United States Patent Application Publication US 2009/0172834 A1 - sequence listing, part 2

SEQ ID NO: 3088 - DNA, 789 bp, Sulfolobus tokodaii
  CDS (1)..(789): transl_table=11
atgtttaaagaaaaagtagggaagattatactatatccagtctataagttctatgaaaaaattttatggaatgagataaaaaatggtccatttcctcaacatgttggaattattccagatgggaataggagatgggcaagagccaacaacttaagtataaatgatgcatattatagtggttacagaaagttaaaacaagtgttattatggttactagagatgggtataaaaaatataacggtatttgcactttcaacagaaaattgtgataagagatcaaatcttgagcttaatacaatatttaactacattaaggcaggattagaagagttactctatggcgaaataatttataaatatgaagttaaagtaagagcaataggtctaatatataaacttcccctagacctattagaagtactaaatcaattaagtaaaaaaactgagaattttaacaagaggaagcttactcttgcaatctgttatggaggaagacaagaaataattgatgctaccaaaaaaattattgcagattacgagaaaggaaaaataaaactagatgatattaatgaaaatatatttaggcaatacctttatgataaagagctagaagacatagatctagtaattagatcttctggtgaaatacgaataagtaatttccttttatggcatatagcgtattcagaactcttttttgtagacacatattggccagactttagaaagatagacttatggagagcaataagatcttatcaaaagaggaaaagaaatttcggtgcttaa

SEQ ID NO: 3089 - protein, 262 aa, Sulfolobus tokodaii
MFKEKVGKIILYPVYKFYEKILWNEIKNGPFPQHVGIIPDGNRRWARANNLSINDAYYSGYRKLKQVLLWLLEMGIKNITVFALSTENCDKRSNLELNTIFNYIKAGLEELLYGEIIYKYEVKVRAIGLIYKLPLDLLEVLNQLSKKTENFNKRKLTLAICYGGRQEIIDATKKIIADYEKGKIKLDDINENIFRQYLYDKELEDIDLVIRSSGEIRISNFLLWHIAYSELFFVDTYWPDFRKIDLWRAIRSYQKRKRNFGA

SEQ ID NO: 3090 - DNA, 756 bp, Synechococcus elongatus
  CDS (1)..(756): transl_table=11
gtgtccatgacgctacagccccattcactgattgagttacccgccgatttagatcgcgatcgcctaccacggcatgtggcggtgattatggatggcaatggccgctgggcaaagcaacgcaatttaccgcgcattatgggacatcaacggggggtggacactctcaaggatttgctgcgctgctgcaaagactggggcattgaagcgctgaccgcctatgccttctccacagaaaattggggacgacccctgccagaggtagagtttctcatgaccctctttgagcaggtattgcggcgagagctcggggaaatggtggccgagggtgtgcaaattcactttgtgggtgacttgacgtgtttgccaaaatccctgcaagcagaaattgagcgagccgtggcagctacggccaataaccaaaaaattaaatttgtggtggcaacgaattatggtgggcgacgggaaatcatccacgcttgccgttcgattgccgcccaagtaaaagctggactcctggatcctgcggatattgatgaggtgctctttgaacgccacttatacacaggtggcctgccggatcccgatttactcattcgcaccagtggcgagctgcgcatcagtaactttttcctgtggcaggtggcctatgcggaaatttatgtcaccaagaccctgtggccagattttgaccggtctgctttccatgaggccctgcgggattaccaacaacgacagcggcgctttggccgtgtctaa

SEQ ID NO: 3091 - protein, 251 aa, Synechococcus elongatus
MSMTLQPHSLIELPADLDRDRLPRHVAVIMDGNGRWAKQRNLPRIMGHQRGVDTLKDLLRCCKDWGIEALTAYAFSTENWGRPLPEVEFLMTLFEQVLRRELGEMVAEGVQIHFVGDLTCLPKSLQAEIERAVAATANNQKIKFVVATNYGGRREIIHACRSIAAQVKAGLLDPADIDEVLFERHLYTGGLPDPDLLIRTSGELRISNFFLWQVAYAEIYVTKTLWPDFDRSAFHEALRDYQQRQRRFGRV

SEQ ID NO: 3092 - DNA, 783 bp, Synechococcus sp
  CDS (1)..(783): transl_table=11
ttgagccgaccactggccaccagccacgacaccactccatcccagctctgccctcccgagctggatggggatcggttgccggtccatgtggctgtgatcatggatggcaacggacgctgggctgaagccaggggcctgcctcggatgatggggcaccgcgccggggtggaagcgctcaagtcaacccttcggctttgcagcgactggggcatcgctgccctcaccgcttacgccttctcaacagaaaactggtcacggccaggtgacgaggtgaatttcctgatgaccctgttcgaacgggtgctgcagaaggagctgcgcaccctcgaggaagaacaggtccgcattcgttttctgggtgacctggacgccctgccgctgaaactgcaggagctgatcggcgatgccacggagcggacggctgccaacgacggcattcatttcaacgtttgcaccaattacggcggtcggcgggagctagtgcgtgcggcgcagcgtctggcacgtcaggccgccaatggtgatctgatgcccgaagacatcgatgagaacagcctggctgcggaactgttcaccgccggcgagcaggatcctgatctgctgattcgcaccagcggcgaacaccgcatcagcaacttcctgctctggcagctggcctatgccgagatccacgtcaccgatgtgttctggcccgacttcaatgccgaggccctgaagcgggcgttgctggatttccagagccgctcccgccgcttcggaggccttgatccactcacgccatga

SEQ ID NO: 3093 - protein, 260 aa, Synechococcus sp
MSRPLATSHDTTPSQLCPPELDGDRLPVHVAVIMDGNGRWAEARGLPRMMGHRAGVEALKSTLRLCSDWGIAALTAYAFSTENWSRPGDEVNFLMTLFERVLQKELRTLEEEQVRIRFLGDLDALPLKLQELIGDATERTAANDGIHFNVCTNYGGRRELVRAAQRLARQAANGDLMPEDIDENSLAAELFTAGEQDPDLLIRTSGEHRISNFLLWQLAYAEIHVTDVFWPDFNAEALKRALLDFQSRSRRFGGLDPLTP

SEQ ID NO: 3094 - DNA, 750 bp, Synechocystis sp
  CDS (1)..(750): transl_table=11
atgactattaaacctgtcatcttagaaacattaccgccggatttggaccagcaacggttaccccaacatgtggcggtcatcatggatgggaatggccgctgggcaaaacaaaggggtatgccaaggattatgggccatcaacggggggtggactccctaaaaaatttgttgcgttgttgcgatgattggggcattgcggccctgacggcctatgctttttctaccgaaaattggggccgtcccctggaagaagtggaatttttgatgaccctgtttgagcgggtgctacggcgggaattaaaggaaatgatggcggaaaacgtccgcattcgttttgtcggtaatctgacttccctgccccgttccctccaggatgaaattgcccgctccatggaagataccaaaaacaatacggggatccgcttcactgtggccaccaactacggcggccgccaagaaattgtccatgtctgccaggcgatcgccagggaagtacaatcggggaaattagacccagaaaccattgatgaaggggtggtggaaaaatatctctataccgaaggtttatcccatcccgacctgcttatccgcaccagtggagaattgagaatcagcaactttttgctctggcaaatggcctacgccgaaatttacgtcacctccaccctctggcccgacttcgatcgccaagcattccatttagccctacgagactatcaacaaagacaccgtcgctttggtaaggtttag

SEQ ID NO: 3095 - protein, 249 aa, Synechocystis sp
MTIKPVILETLPPDLDQQRLPQHVAVIMDGNGRWAKQRGMPRIMGHQRGVDSLKNLLRCCDDWGIAALTAYAFSTENWGRPLEEVEFLMTLFERVLRRELKEMMAENVRIRFVGNLTSLPRSLQDEIARSMEDTKNNTGIRFTVATNYGGRQEIVHVCQAIAREVQSGKLDPETIDEGVVEKYLYTEGLSHPDLLIRTSGELRISNFLLWQMAYAEIYVTSTLWPDFDRQAFHLALRDYQQRHRRFGKV

SEQ ID NO: 3096 - DNA, 777 bp, Thermoplasma acidophilum
  CDS (1)..(777): transl_table=11
atgagcgtatccaataaacttggggatctggcctcgaaggtttacgaaaatgttcttcttgaggaggttaagaagtatccgaggccacgccatatcgggataatcacagatggaaacagaaggtatgccaggaacgtgggcatatctgaaaatgaggggcatgtaaagggaaaggaaaaggttgaagaggttgttgactggtgcatggaactagacataagaatcgtaacgttttatgcattctcgacagagaactttcgtaggagtcccgaagaggtcgatttcctctttcatctcatagataacgccttcaagtctctcctgaaggacgagcgtgtgtacaaaaacagaataaatgttaaggtcataggaaacctatcaatactccctgcttatctgaggcaaacaatacatattgttgaggagacgaccaaaaattttaacaactatcagctcaatctggccataggatacggtggccgggaggagatattggatgcgataaagaggataacaagagacgccatggacgggaaattgaacatagatgaactggacgaggaaaagttcaggatgtacttgtatgacggaaggataccagatcctgatctcatactcagaacaagcggagaggagaggatatccaatttcctgctctggcagagtgcgtattctgagctttatttttcagatgtgtattggccagaattttctaaacttgatttccttagggcaatatattcctatcagaggaggcagcggaggtttgggaggtaa

SEQ ID NO: 3097 - protein, 258 aa, Thermoplasma acidophilum
MSVSNKLGDLASKVYENVLLEEVKKYPRPRHIGIITDGNRRYARNVGISENEGHVKGKEKVEEVVDWCMELDIRIVTFYAFSTENFRRSPEEVDFLFHLIDNAFKSLLKDERVYKNRINVKVIGNLSILPAYLRQTIHIVEETTKNFNNYQLNLAIGYGGREEILDAIKRITRDAMDGKLNIDELDEEKFRMYLYDGRIPDPDLILRTSGEERISNFLLWQSAYSELYFSDVYWPEFSKLDFLRAIYSYQRRQRRFGR

SEQ ID NO: 3098 - DNA, 702 bp, Thermotoga maritima
  CDS (1)..(702): transl_table=11
ttgaggataccacagcacgttgcgatcataatggatggaaacggcagatgggcgaaaaagcgaggtcttcccagaataaaagggcaccagcgaggtgcagaggtgctccacaacaccgtgaaatggtctttggaactggggataaagtatctcacagctttttccttctccacagagaactggaaaagaccgaaggaagaagtggagtttctcatggatcttttcgttcagatgatagatcgtgagatggagctcctcagaagagaaagagtcagagtgagaattcttggaagaaaagaaggtcttccagagaaggtgcttaagaagtggcaggaagtggaggaaaaaacgaaagagttcgaccgaatgacactcattatcgcgttcaactacggaggtagaagggagatcctcgacgcggtagaatttatcttaaaggatgtatctcatgggaagaaaatagaactcactgaggagacctttcgtcaatatctgtatctaccagatgttccggatccagatctgataataagaacctcaggtgagatgagactcagtaatttccttctctggcagtccgcgtattccgagctttatttcttcaaaaaactgtggccagatttcacgaagagggattttctgagggctattgagagttattcaaaaagggaaagacgattcgggggtctgatcaatggatga

SEQ ID NO: 3099 - protein, 233 aa, Thermotoga maritima
MRIPQHVAIIMDGNGRWAKKRGLPRIKGHQRGAEVLHNTVKWSLELGIKYLTAFSFSTENWKRPKEEVEFLMDLFVQMIDREMELLRRERVRVRILGRKEGLPEKVLKKWQEVEEKTKEFDRMTLIIAFNYGGRREILDAVEFILKDVSHGKKIELTEETFRQYLYLPDVPDPDLIIRTSGEMRLSNFLLWQSAYSELYFFKKLWPDFTKRDFLRAIESYSKRERRFGGLING

SEQ ID NO: 3100 - DNA, 792 bp, Thermus thermophilus
  CDS (1)..(792): transl_table=11
atggtccgccgcctcctcgccctttcccgccccctctactggctttacgagcaacgcctcctgagggaggtcaagcggggccccatgccccggcacctgggcctcatcctggacgggaaccgccgctacgcccgcgccttgggcctttcccccaccaaggggcacgagttcggggtgcagaaggcctacgaggtcctggagtggtgcctggagatgggcatcaagaccgtgaccgtctgggtcttctccacggacaacttcaagcgccccccggaggaggtggagaccctcatgaacctcttcctgcgggaggccgagcggatggcggaggaccaccggatcctggaacaccaggtgcgggtgcgcttcatcggcaggcgggaggggttttccccggaggtggtccgggccatagagcgcctggagcggaggacggaggggcaccggggcatgttcctcaacatcgccttaggctacggggggcgggaggagatcgtggacgccgtgaagcggctccttttggaggcggaggcccggggcctttcccccaaggaggtggccgagggcctcaccccggaggacatcgcccgccacctctacaccgccgggcttcccgaccccgacttcatcatccgcacctcgggagagatccggctttccggcttcctcctctggcagtccgcctactccgagttctacttcgccgacgtcctctggcccgagttccgcaagattgacttcctgcgcgccctgaggagctaccaggcccgggagaggcggtttgggcgttga

SEQ ID NO: 3101 - protein, 263 aa, Thermus thermophilus
MVRRLLALSRPLYWLYEQRLLREVKRGPMPRHLGLILDGNRRYARALGLSPTKGHEFGVQKAYEVLEWCLEMGIKTVTVWVFSTDNFKRPPEEVETLMNLFLREAERMAEDHRILEHQVRVRFIGRREGFSPEVVRAIERLERRTEGHRGMFLNIALGYGGREEIVDAVKRLLLEAEARGLSPKEVAEGLTPEDIARHLYTAGLPDPDFIIRTSGEIRLSGFLLWQSAYSEFYFADVLWPEFRKIDFLRALRSYQARERRFGR

SEQ ID NO: 3102 - DNA, 792 bp, Thermus thermophilus
  CDS (1)..(792): transl_table=11
atggtccgccgcctcctcgccctttcccgccccctctactggctttacgagaaacgcctcctgagggaggtcaagcggggccccatgccccggcacctgggcctcatcctggacggaaaccgccgctacgcccgcgctttgggcctttcccccaccaaggggcacgagttcggggtgcagaaggcctacgaggtcctggagtggtgcctggagatgggcatcaagaccgtgaccgtctgggtcttctccacggacaacttcaagcgccccccggaggaggtggagaccctcatgaacctcttcctgcgggaggccgagcggatggcggaggaccaccggatcctggaacaccaggtgcgggtgcgcttcatcggtaggcgggaggggttttccccggaggtggtccgggccatagagcgcctggagcggaggacggaggggcaccggggcatgttcctcaacatcgccatgggctacggggggcgggaggagatcgtggacgccgtgaagcggctccttttggaggcggaggcccggggcctctcccccaaggaggtggccgagggcctcaccccggaggacatcgcccgccacctctacaccgccgggcttcccgaccccgacttcatcatccgcacctcgggggagatccggctttccggcttcctcctctggcagtccgcctactccgagttctacttcgccgacgtcctctggcccgagttccgcaagattgacttcctgcgcgccctgaggagctaccaggcccgcgagaggcggtttgggcgttga

SEQ ID NO: 3103 - protein, 263 aa, Thermus thermophilus
MVRRLLALSRPLYWLYEKRLLREVKRGPMPRHLGLILDGNRRYARALGLSPTKGHEFGVQKAYEVLEWCLEMGIKTVTVWVFSTDNFKRPPEEVETLMNLFLREAERMAEDHRILEHQVRVRFIGRREGFSPEVVRAIERLERRTEGHRGMFLNIAMGYGGREEIVDAVKRLLLEAEARGLSPKEVAEGLTPEDIARHLYTAGLPDPDFIIRTSGEIRLSGFLLWQSAYSEFYFADVLWPEFRKIDFLRALRSYQARERRFGR

SEQ ID NO: 3104 - DNA, 777 bp, Thermoplasma volcanium
  CDS (1)..(777): transl_table=11
atgggaatatcaggaaaattaggggacatagcctctaaggtatatgaagacgtacttatggaagaggttaagaagtacccgcgacctaggcatgtcggcataataactgatggaaacagaagatatgcaagaatagttggtattcccgagaacgagggccacgtaaagggcaaaaacaaagtcgaggaagtcctcgactggtgtatggagcttgatattaaaatcgtaactttttatgcattttcaacggaaaatttcaaaagaagccctgaggaagttgattttctatttcacctaataaatgatgctttcatttccttgttaaaggacgagcgcgtttataaaaataaaataaacgtcaaggtcataggtaatgtatcaatgctcccagagtatctaagagagaccattaagataacagaggaaacgactaaaaacttctctaattaccatatgaacctcgccatagggtacggaggtagggaggaaatcttagacgcaattaaaagaatagctagagatgctatcgcaggaaaaataaacgtagatgagatcgacgagagcaagtttaggaactatctatacgatggaaatttaccggatccagatcttattctaaggactagcggcgaagagagaatttcaaatttcctcctctggcaaagcgcttattctgagctttacttctctgatgtctactggccagaattttctaaattagattttcttagagcaatatattcgtaccaaaggaggcagaggaggtttggaaggtaa

SEQ ID NO: 3105 - protein, 258 aa, Thermoplasma volcanium
MGISGKLGDIASKVYEDVLMEEVKKYPRPRHVGIITDGNRRYARIVGIPENEGHVKGKNKVEEVLDWCMELDIKIVTFYAFSTENFKRSPEEVDFLFHLINDAFISLLKDERVYKNKINVKVIGNVSMLPEYLRETIKITEETTKNFSNYHMNLAIGYGGREEILDAIKRIARDAIAGKINVDEIDESKFRNYLYDGNLPDPDLILRTSGEERISNFLLWQSAYSELYFSDVYWPEFSKLDFLRAIYSYQRRQRRFGR

SEQ ID NO: 3106 - DNA, 684 bp, Treponema denticola
  CDS (1)..(684): transl_table=11
atgtccgatgagctaaaacatatcgccattgtcatggacggcaatggcagatgggcaaaaaagagaggccttccccgttctatgggacataaggaagggcttaatacggtcaaaaggataacaaaggccgtatccgatttaggaattccttatataacgctttatatattttctaccgaaaactggaaaaggaccgaagcggaggtgggctttttaatggggcttatcaaacagcatttaaaagccgagcttaaattttatgccgataataatatacgcatcgagcacataggcaatttaagcggattacctcaagacattcaagatgaaattaattcggtaagggataaaacttccgcttatacgggaactgcaattgtgctcggtataaattacggagcacatgatgaaatcttacgagctataaagaaactgaattccgatgagctcgcttcaataaatgaagaatcgttttctttaaaattggacacggggaaaattcctcccgttgatttgcttatcaggacaggtggagaaaaacgtttaagtaattttttgctttggcaaagtgcttatgcggaactatattttacggataccttgtggcccgattggactgtagaaaatttatatgaagcaatagaagattataaaaaaagaaacaggcgttacggaaatgcctaa

SEQ ID NO: 3107 - protein, 227 aa, Treponema denticola
MSDELKHIAIVMDGNGRWAKKRGLPRSMGHKEGLNTVKRITKAVSDLGIPYITLYIFSTENWKRTEAEVGFLMGLIKQHLKAELKFYADNNIRIEHIGNLSGLPQDIQDEINSVRDKTSAYTGTAIVLGINYGAHDEILRAIKKLNSDELASINEESFSLKLDTGKIPPVDLLIRTGGEKRLSNFLLWQSAYAELYFTDTLWPDWTVENLYEAIEDYKKRNRRYGNA

SEQ ID NO: 3108 - DNA, 687 bp, Treponema pallidum
  CDS (1)..(687): transl_table=11
gtgcagcacgtggccatcatcatggatggaaacgggagatgggcggaaaggagagggttgcggcgcagtgcagggcaccggcgggggctgcagacagcgcgagagattgtcgcggcgctgtgcgcgattcgggtgccttttgttactctgtatgtgttttctactgaaaactggaagcgctctgcgcatgaagtgcatttcttgatgaatttaatcaggtggtatttgaaaaaggagatgtcattctatgtggagcatgccattcgcgtagtgcacctgggttgtgcgcagacacttccgcctgatgtgcgcagccagatagagtatgttgtggaacgcactcggtctcatcggggaactactgttgcgcttgctataaattatgggggaaaagatgaaattttacgtgcggtaaaaaaggttttgtgcagcacttcgtgcccggatggtgagcttctcaccgaagaagctttcggcgcgtgccttgatgcgccgcagttgccgagtgtcgactttctcatcagaacagggggtcagcaacgcatgagtaattttttgctttggcaaagcgcgtacgcggagttctattttaccgatatcctgtggcctgactttcgggtagaagacatgctgcgcgccctggatgagtatcgcctgcgcacgcgtacctttgggggtttggaatga

SEQ ID NO: 3109 - protein, 228 aa, Treponema pallidum
MQHVAIIMDGNGRWAERRGLRRSAGHRRGLQTAREIVAALCAIRVPFVTLYVFSTENWKRSAHEVHFLMNLIRWYLKKEMSFYVEHAIRVVHLGCAQTLPPDVRSQIEYVVERTRSHRGTTVALAINYGGKDEILRAVKKVLCSTSCPDGELLTEEAFGACLDAPQLPSVDFLIRTGGQQRMSNFLLWQSAYAEFYFTDILWPDFRVEDMLRALDEYRLRTRTFGGLE

SEQ ID NO: 3110 - DNA, 774 bp, Vibrio fischeri
  CDS (1)..(774): transl_table=11
atgaccagtcaaattaataacgagtttttatcattagatgtattaccaaaacatattgcggtaattatggatggtaatggacgctgggctaaggctcagggaaaacctcgtgtatttggtcataaagcgggtgttgatgcggtaagaaaaaccatttcagcagccagtaagcttgggatcaatgccataacactttttgcttttagtagtgagaattggcgtcgacctgaagaagaagtaagtgttctaatggagttgtttatcacggtactttctcgtgaagtaaaacgtcttcataaaaataatattcaattgcgtataattggtgaaacctctcagtttagttctcgccttcagaagaaaattgttgaagcggaaacattaacttctgaaaatacagggttagtactaaacgttgctgcaaactatggtggcaaatgggatattacacaagcagtacgtcgcctcgcatatcaagtggaacgaggcaatttacaggcagatgatattgatgaggatcttatcgcatctaaactgactatgtcagatttgcctgaagtggatttgatgattagaacgagcggtgaatgtcgtattagcaactttatgttgtggcaaatggcttatgctgaattctatttcactgaccaatattggcctgattttaatgaacaaagcttagctgacgctgttgcttggtttgttagtcgagaaagacgatttggttgtactggtgaacaaatccaagctctaatgaacgaaaaggatcaataa

SEQ ID NO: 3111 - protein, 257 aa, Vibrio fischeri
MTSQINNEFLSLDVLPKHIAVIMDGNGRWAKAQGKPRVFGHKAGVDAVRKTISAASKLGINAITLFAFSSENWRRPEEEVSVLMELFITVLSREVKRLHKNNIQLRIIGETSQFSSRLQKKIVEAETLTSENTGLVLNVAANYGGKWDITQAVRRLAYQVERGNLQADDIDEDLIASKLTMSDLPEVDLMIRTSGECRISNFMLWQMAYAEFYFTDQYWPDFNEQSLADAVAWFVSRERRFGCTGEQIQALMNEKDQ

SEQ ID NO: 3112 - DNA, 756 bp, Vibrio parahaemolyticus
  CDS (1)..(756): transl_table=11
atgcaaaattctcaagccttctctgactccctccctaagcatattgccatcatcatggacggtaatggtcgctgggctaagtccaaaggaaaacctcgcgtatttggccataaaaaaggcgttaatgccgttcgtaagaccgttgctgcggcttccaaacttggcattaaagcgatgacattatttgcttttagtagcgaaaactggcgtcgtccggaggaagaagttggtcttttgatggaactgttcatcacagtcctgtctagtgaagtaaaaaagctacataaaaacaacttacagttacgtgttattggtgacacaagccgctttagtgagcgcctacaaaagaaaattgtagaagcggaaaatctaacggcaagcaacaccggtatggtgattaacattgcggccaattatggtggtaaatgggacatcacagaagcggctaaagcactagcgcttaaagctcgtaacggtgaaattcgtgtagaggatattaatgagcagttaatcactgagcatttgactatggcagacctaccagaggtggatcttttgatccgtactagtggcgaatgccgcatcagcaacttcatgctgtggcaaatggcttatgctgaaatgtactttacgccagagttttggccagagtttgacgaagacagcttagttgaagctgtgacgtggtttattaaccgtgagcgtcgttttggctgtactggtgaacaagtaaaggcattgatgacggctcaataa

SEQ ID NO: 3113 - protein, 251 aa, Vibrio parahaemolyticus
MQNSQAFSDSLPKHIAIIMDGNGRWAKSKGKPRVFGHKKGVNAVRKTVAAASKLGIKAMTLFAFSSENWRRPEEEVGLLMELFITVLSSEVKKLHKNNLQLRVIGDTSRFSERLQKKIVEAENLTASNTGMVINIAANYGGKWDITEAAKALALKARNGEIRVEDINEQLITEHLTMADLPEVDLLIRTSGECRISNFMLWQMAYAEMYFTPEFWPEFDEDSLVEAVTWFINRERRFGCTGEQVKALMTAQ

SEQ ID NO: 3114 - DNA, 756 bp, Vibrio vulnificus
  CDS (1)..(756): transl_table=11
atgcaaaattctcaactcttcaccgaatctcttcctaagcatattgccattattatggacggcaatggtcgctgggctaaatctaagggtcaacctcgcgtcttcggacataaaaaaggggttagcgccgttcgtaaaaccatcgcagctgcatcgaaactgaatatccaagccattacgttgtttgcttttagtagtgaaaactggcgtcgtcctgaagaggaagtcggattgttgatggaacttttcatcaccgtactgtctagcgaagtgaagaagttacataagaataacctgcgtttacgcatcatcggtgatacctcacgttttagcgaacgtttgcaaaaaaagattgtagaagcacaagagctaacagcaagtaacacgggtatggtgattaatgttgctgctaactacggtggcaaatgggatatcactcaggccgtacaaaaagtggcgcagcaagtggcacttggtgatctgtcggctgaggacattacggaagacgacattgctaagcatctgaccatgtcagatctgccagaagtggacctgctcattcgcacgagtggagaatgccgcattagtaattttatgttgtggcaaatggcctatgctgaaatgtactttactcctgtattctggcccgattttggtgaagaaagcctgattgaggcgatcacatggtttgtaaatcgcgagcgccgttttggttgtactggcgagcaaatcaaggccctgatgagtgctcaataa

SEQ ID NO: 3115 - protein, 251 aa, Vibrio vulnificus
MQNSQLFTESLPKHIAIIMDGNGRWAKSKGQPRVFGHKKGVSAVRKTIAAASKLNIQAITLFAFSSENWRRPEEEVGLLMELFITVLSSEVKKLHKNNLRLRIIGDTSRFSERLQKKIVEAQELTASNTGMVINVAANYGGKWDITQAVQKVAQQVALGDLSAEDITEDDIAKHLTMSDLPEVDLLIRTSGECRISNFMLWQMAYAEMYFTPVFWPDFGEESLIEAITWFVNRERRFGCTGEQIKALMSAQ

SEQ ID NO: 3116 - DNA, 783 bp, Wigglesworthia glossinidia brevipalpis
  CDS (1)..(783): transl_table=11
atgtcattaacaaaaatcaaacacataaacaaaccacgtcatattgctattattatggatggaaatggtcgttgggcaaaaaacagaggcaagttaaggatatttggtcataaagctggtgttgaatctgcaaaaaaagcaataaaatttgcaataaataatcatttaaacgctcttacattatatgcttttagcagcgaaaattggaaaagaccaatacaagaagtttcagatttaatggaattgttttcaagtgttttaaacaatgctatagatagctttaaaaaaaataatatcagattaaaaatcataggagatatatctaaatttaatttgaagttacaaaaatatataaaaaaatctgaaaaaatcacttacaaaaataatggtttgaatttaaatatagctgcaaattatggaggaagatgggatattatacaaggtgtaaaaaaaattgccaaacaagtcaaaaaaggaattatatatccagatcaaataaatgaatctaatttctgcagatttatttgtatgaatgaattagttccagtagacttggttattagaacaggaggagaacatagaattagtaattttttgctttggcaaattgcatattctgagcttttttttacagatgtattatggccagactttgatcatgtgattttttcaaatgcaataaattcttttgccaaaagagaacgtagattcggtaaaataaattctaaatgtagcaaaatttatttaaaaacaggagatgcttctgaaaattcgattaattag

SEQ ID NO: 3117 - protein, 260 aa, Wigglesworthia glossinidia brevipalpis
MSLTKIKHINKPRHIAIIMDGNGRWAKNRGKLRIFGHKAGVESAKKAIKFAINNHLNALTLYAFSSENWKRPIQEVSDLMELFSSVLNNAIDSFKKNNIRLKIIGDISKFNLKLQKYIKKSEKITYKNNGLNLNIAANYGGRWDIIQGVKKIAKQVKKGIIYPDQINESNFCRFICMNELVPVDLVIRTGGEHRISNFLLWQIAYSELFFTDVLWPDFDHVIFSNAINSFAKRERRFGKINSKCSKIYLKTGDASENSIN

SEQ ID NO: 3118 - DNA, 687 bp, Wolinella succinogenes
  CDS (1)..(687): transl_table=11
ttgagagagttgaacgagttgaagcatctagccatcatcatggatgggaatggaaggtgggcgcaagagcgcgggaagcagcgcgtgcgagggcacgaaaaaggggcagagacgattcgagagatcaccatgttttgttcaaaaagtgacatttcattcctcacgctctacgccttttcgaccgaaaactggaagcgacccaagacggaggtcgatttccttatgcgccttttgagtgactatttgaaaaaagaggcggaggtctatctcaagaataacattcgtttcaaagcgattggagatttgagtcgattctcttctcggctacttgatgagatagagacgctcacccaaaagagcgcttcatgttctgggctaacgcaggtgctagcactcaattatggaagcaaagacgagatcatccgcgcgactcagaagatgattgaggcaggggtggaggtgagcgaagagaatctatcgcgctttttggacacagcttttgcacctgatgtggatatgctggtgaggacgggcggggattatcgcctctccaactatctcttgtggcagagcagctacgctgagctctttttcactcccacgctttggcctgatttcactgcaggggagctggcgattcaaatcgaggagtttaagcggagaaaacggcgatttggtggaatctga

SEQ ID NO: 3119 - protein, 228 aa, Wolinella succinogenes
MRELNELKHLAIIMDGNGRWAQERGKQRVRGHEKGAETIREITMFCSKSDISFLTLYAFSTENWKRPKTEVDFLMRLLSDYLKKEAEVYLKNNIRFKAIGDLSRFSSRLLDEIETLTQKSASCSGLTQVLALNYGSKDEIIRATQKMIEAGVEVSEENLSRFLDTAFAPDVDMLVRTGGDYRLSNYLLWQSSYAELFFTPTLWPDFTAGELAIQIEEFKRRKRRFGGI

SEQ ID NO: 3120 - DNA, 774 bp, Xanthomonas axonopodis pv
  CDS (1)..(774): transl_table=11
gtggcgtcgcctgccatgcatccagtcctctctgctgctgtgccgcgccacatcgccatcatcatggatggcaatgggcgttgggcgcagcgtcggcgtcgtccacgcgtcatcggtcaccgtgccggcgcgcgcgcggtcaatcgcacgatcgatttctgcctggaaaaaggcgtctcggcgctgaccctgttcgcgttctccagtgaaaactggggccgtccgcaggatgaggtcgacgcgctgatgaagctgttcctgcatgcgctcgaccgcgaggtcgaagaactgcagcgacgtggcgtgcaggtgcgcttcatcggcgaccgcagccgctttgccgcacccttgcgcgaccgcatggccggcgccgagcgcagcaccgcagcgaactcgcggctggtgctgagcatcgcagccagttacggcggccgccaggatatcgcctcggctgcccgcgcattggccgaagacgtcgccgccggccgcctgcagccagagcagatcgacgaagcgctgctgtccagccgggtcgccctggccgacctgcccgcgccggacctgttcatccgcaccggtggcgacacccgcatcagcaacttcctgttgtggcagctggcttacaccgagctgtggttcaccgaaaccctgtggccggagttcgatgccggcgtgctgcagcaagcgctggacgactatgccgggcgtgaacgtcgcttcggcctgaccagcgcacagatcgccgacaaggcgacggagagctcctccgcatga

SEQ ID NO: 3121 - protein, 257 aa, Xanthomonas axonopodis pv
MASPAMHPVLSAAVPRHIAIIMDGNGRWAQRRRRPRVIGHRAGARAVNRTIDFCLEKGVSALTLFAFSSENWGRPQDEVDALMKLFLHALDREVEELQRRGVQVRFIGDRSRFAAPLRDRMAGAERSTAANSRLVLSIAASYGGRQDIASAARALAEDVAAGRLQPEQIDEALLSSRVALADLPAPDLFIRTGGDTRISNFLLWQLAYTELWFTETLWPEFDAGVLQQALDDYAGRERRFGLTSAQIADKATESSSA

SEQ ID NO: 3122 - DNA, 777 bp, Xanthomonas campestris pv
  CDS (1)..(777): transl_table=11
gtggcgtccactgccatgcattcggagccctccgctgccgcggtgccgcgccaccttgccatcatcatggatggcaacgggcgctgggcgcagcgtcggcggcgtccgcgcgtgatcggccaccgtgccggcgcgcgggcggtcaaccgcaccatcgatttctgtctcgacaagggcgtgtcggcactgaccttgttcgcgttttccagcgagaactggggccgcccgcaggacgaagtcgacgcactgatgaagctgttcctgcatgcactcgatcgtggggtcgaagagttgcagcggcgtggcgtgcaggtgcgtttcatcggcgaccgcagccgctttaccgcgccactgcgcgaccgcatggccggtgccgagcgcatcaccgcggctaacacgcggctggtgctgagcatcgccgccagttatggcggccgccaggacatcgccatggccgcgcgtgcgctggccgtcgaggtcgcggcaggccggttgcagccggagcagatcgacgaagccttgctagccagccgggtcgccctggccgacctgcctgcgccggacctgttcatccgcaccggcggcgacacccggatcagcaatttcctgttgtggcagctcgcctacaccgagctgtggttcaccgaaaccctgtggccggagttcgacgccggcgtgctgcaacaggctctggacgactatgccgggcgcgaacgccgcttcggcctgaccagcgcccagatcgccgagaaggcgacggaggcgtcttccgcatga

SEQ ID NO: 3123 - protein, 258 aa, Xanthomonas campestris pv
MASTAMHSEPSAAAVPRHLAIIMDGNGRWAQRRRRPRVIGHRAGARAVNRTIDFCLDKGVSALTLFAFSSENWGRPQDEVDALMKLFLHALDRGVEELQRRGVQVRFIGDRSRFTAPLRDRMAGAERITAANTRLVLSIAASYGGRQDIAMAARALAVEVAAGRLQPEQIDEALLASRVALADLPAPDLFIRTGGDTRISNFLLWQLAYTELWFTETLWPEFDAGVLQQALDDYAGRERRFGLTSAQIAEKATEASSA

SEQ ID NO: 3124 - DNA, 777 bp, Xanthomonas oryzae pv
  CDS (1)..(777): transl_table=11
gtggcatcgcctgccatgcatccagtccctcctgtcgcagacgtgccgcgccacattgccatcatcatggatggcaacggacgttgggcgcagcgtcggcggcgtccgcgcgtgatcggccaccgcgccggtgcgcgcgcggtcaatcgcacgatcgatttctgcctggaaaaaggcgtgtcggcgctcaccctgttcgcgttctccagcgaaaactggggccgtccgcaggatgaggtcgatgcgctgatgaagctcttcctgcatgcgctcgaccgcgaggttggagaactgcagcggcgtggcgtgcaggtgcgcttcatcggcgaccgcagccgcttcgccgcaccgttgcgcgatcgcatggccggcgccgagcgtagcaccgccgccaatgcgcggctggtgctgagcatcgcagccagttacggcggccgccaggacatcgccacggctgcccgcgcattggccgaagacgtcgctgccggccgtttgcagccggagcagatcgacgaagcgctgctgtccagccgtgtggccctggccgacctgcccgcgccggatctgttcatccgcaccggtggcgacacccgcatcagcaatttcctgctgtggcagctggcctacaccgaactgtggttcaccgaaaccctgtggccggagttcgatgccggcgtaatgcagcaagcgctggacgactatgccgggcgcgaacgccgcttcggcctgaccagtgcacagatcgccgacaaggcgacggagacgtcctccgcatga

SEQ ID NO: 3125 - protein, 258 aa, Xanthomonas oryzae pv
MASPAMHPVPPVADVPRHIAIIMDGNGRWAQRRRRPRVIGHRAGARAVNRTIDFCLEKGVSALTLFAFSSENWGRPQDEVDALMKLFLHALDREVGELQRRGVQVRFIGDRSRFAAPLRDRMAGAERSTAANARLVLSIAASYGGRQDIATAARALAEDVAAGRLQPEQIDEALLSSRVALADLPAPDLFIRTGGDTRISNFLLWQLAYTELWFTETLWPEFDAGVMQQALDDYAGRERRFGLTSAQIADKATETSSA

SEQ ID NO: 3126 - DNA, 768 bp, Xylella fastidiosa
  CDS (1)..(768): transl_table=11
atgcagatcaacaccataccagtcaatcccacacttccccgccacatagccatcatcatggatggtaacgggcgctgggcagaacgccgatcacggccgcgcaccacgggtcatcgtgccggggtaaaagcagccatgcgcaccgtggatttctgtctggagaagggaatcaagatgctgacattgttcgcattctccagcgaaaattggaaccggccagccgatgaagtcaactttttgatggaaatgtccatcaagttatttggccgcggcatcgaagaactgcaccgacgcggtgtacaagtacgctttataggggaacgtaaacgctttgacatcgctctcgtcgaacatatgaccaaggcggaacacctgacagccaacaaccaacgcttaatactgtcactcgccgtcagctacggtggacgccaggacattacgatggctgcacgcgctctggcccaggatgtggctgccggacgattgaaaccagagcagattgatgaagatttgcttggacaacacatggcgctcgctgatctgccgccgcccgacatgttcatccgcaccagcggtgttattcgaattagcaacttcttgctgtggcagatcgcctataccgagctgtggttcaccgacgtgatgtggccagaattcaactcgaccgtattgcagcaagcgttggacgactacgccagccgggagcgtcgcttcggtctaacaaatgcacaaatcgccagccgggggaaaggaagcatacccgcatga

SEQ ID NO: 3127 - protein, 255 aa, Xylella fastidiosa
MQINTIPVNPTLPRHIAIIMDGNGRWAERRSRPRTTGHRAGVKAAMRTVDFCLEKGIKMLTLFAFSSENWNRPADEVNFLMEMSIKLFGRGIEELHRRGVQVRFIGERKRFDIALVEHMTKAEHLTANNQRLILSLAVSYGGRQDITMAARALAQDVAAGRLKPEQIDEDLLGQHMALADLPPPDMFIRTSGVIRISNFLLWQIAYTELWFTDVMWPEFNSTVLQQALDDYASRERRFGLTNAQIASRGKGSIPA

SEQ ID NO: 3128 - DNA, 768 bp, Xylella fastidiosa
  CDS (1)..(768): transl_table=11
atgcagatcaacaccataccagtcaatcccacacttccccgccacatagccatcatcatggatggtaacgggcgctgggcagaacgccgatcacggccgcgcaccacaggccatcgcgccggcgtaaaagcagccatgcgcaccgtggatttctgtctggagaagggaatcaagatgctgacattgttcgcattctccagcgaaaattggaaccggccagccgatgaagtcaactttttgatggaaatgtcaatcaagttatttggccgcggcatcgaagaactgcaccgacgcggtgtacaagtacgctttataggggaacgtaaacgctttgatatcgcgctcgtcgaacatatgaccaaggcggaacacctgacagccagcaaccaacgcttaatactgtcactcgccgtcagctacggtggacgccaggacattacgatggctgcacgcgctctggcccaggatgtggctgccggacgattgaaaccagagcagattgatgaagatttgcttggacaacacatggcgctcgctgatctgccgccgcccgacatgttcatccgcaccagcggtgttattcgaattagtaacttcttgctgtggcagatcgcctataccgagctgtggttcaccgacgtgatgtggccagaattcaactcgaccgtattgcagcaagcgttggacgactacgccagccgggagcgtcgcttcggtctaacaaatgcacaaatcgccagccgggggaaaggaagcatacccgcatga

SEQ ID NO: 3129 - protein, 255 aa, Xylella fastidiosa
MQINTIPVNPTLPRHIAIIMDGNGRWAERRSRPRTTGHRAGVKAAMRTVDFCLEKGIKMLTLFAFSSENWNRPADEVNFLMEMSIKLFGRGIEELHRRGVQVRFIGERKRFDIALVEHMTKAEHLTASNQRLILSLAVSYGGRQDITMAARALAQDVAAGRLKPEQIDEDLLGQHMALADLPPPDMFIRTSGVIRISNFLLWQIAYTELWFTDVMWPEFNSTVLQQALDDYASRERRFGLTNAQIASRGKGSIPA

SEQ ID NO: 3130 - DNA, 759 bp, Yersinia pestis
  CDS (1)..(759): transl_table=11
atgtcgcctgtaaaagaagatagggctaacttgtccccccggagtccacgtcatgttgctatcattatggatggtaatggacgttgggctaaaaataagggtaaattaagagttttcggccataaagccggggtgaagtccgttcgacgcgcagtgagttttgctgcgaagcataatttagatgcgctcactctttatgcttttagcagtgaaaactggaatcgccctgaccaagaagtgaccgctctgatggagctttttgttcgagcactagacagtgaagtaaaaagcttgcataaacataatgttcgtttatctattattggtgatatcagccgttttagtgggcgtttacaagagcgaattcgtcgttcagaaaaattaacggcaaataatgacggattgaaactcaacattgctgccaattatggtggccgttgggatatcatccagggggtgcgccatttagctgaacaagttcagaaaggggaattgcaacctacagatatcagtgaagagtcgctcaactcgtatatctgcctgcatgagcaatctcaggtggacttagtgatcagaaccggtggtgaacatcgcatcagtaatttcttgttgtggcaaatagcctatgctgaactttactttacagatgtcctctggcctgattttgatgaaaatgtctttgaaggtgcgctgaatgcatttgcacaacgcgagcgtcgcttcgggggaactacacctatcgatgccactgcatcctag

SEQ ID NO: 3131 - protein, 252 aa, Yersinia pestis
MSPVKEDRANLSPRSPRHVAIIMDGNGRWAKNKGKLRVFGHKAGVKSVRRAVSFAAKHNLDALTLYAFSSENWNRPDQEVTALMELFVRALDSEVKSLHKHNVRLSIIGDISRFSGRLQERIRRSEKLTANNDGLKLNIAANYGGRWDIIQGVRHLAEQVQKGELQPTDISEESLNSYICLHEQSQVDLVIRTGGEHRISNFLLWQIAYAELYFTDVLWPDFDENVFEGALNAFAQRERRFGGTTPIDATAS

SEQ ID NO: 3132 - DNA, 669 bp, Zymomonas mobilis
  CDS (1)..(669): transl_table=11
atggatggcaatggacgatgggcttctgcgcgccatttacctagaattgctgggcacaaaaagggtgccgatgcggtcaaaacaacggtgcgggctgccgcagagatgggtattgaggttctaaccttatatgctttttcttctgaaaattggcgccgtcctgctagcgaagtcgctgatcttatgggattattgcgactttgccttcggcaggaaatgcacaatattaaagagcgtggcatctgccttaaggtgattggcgattatacacgcctcgatcaggatctggtcgctttactcaatcaagcgattgaaattacagctaataacacaaggctgactttagtttttgccttgaattatggcgcacaagacgaattggtgcatgtcactaaacgcattgcagagaaggctaaagaagggcagcttgatcccgaaaatattgatgtcgggacaattgaatctctgttatatacccatgatttaccaccccttgatctagttatcagaacttctggtgaaaagcgcttgtccaatttcttattatggcaagccgcttatgcggagttactgtttatagataccttatggcctgatttcggcagcgaaactctgaaagctgcggtagaagaatatgcacgccgggaaaggcgctatggtggcttgtga

SEQ ID NO: 3133 - protein, 222 aa, Zymomonas mobilis
MDGNGRWASARHLPRIAGHKKGADAVKTTVRAAAEMGIEVLTLYAFSSENWRRPASEVADLMGLLRLCLRQEMHNIKERGICLKVIGDYTRLDQDLVALLNQAIEITANNTRLTLVFALNYGAQDELVHVTKRIAEKAKEGQLDPENIDVGTIESLLYTHDLPPLDLVIRTSGEKRLSNFLLWQAAYAELLFIDTLWPDFGSETLKAAVEEYARRERRYGGL

SEQ ID NO: 3134 - DNA, 789 bp, Mycobacterium bovis
  CDS (1)..(789): transl_table=11
gtggagatcatcccgccgcggctcaaagagccgttgtaccggctctacgagctgcgcctgcggcagggcttggccgcctcgaaatccgacctgccccggcacatagccgtgctgtgcgacggcaaccggcgatgggcgcgcagcgcgggctacgacgacgtcagctacggctaccggatgggtgcggccaagatcgccgaaatgctgcggtggtgccacgaagccggcatcgaactggccaccgtctatctgctgtccaccgaaaacctgcagcgcgatcccgacgagcttgcagcactcatcgagatcatcaccgatgtcgtggaagagatctgcgcaccggccaaccactggagtgtgcggacggtcggggatctggggttgatcggcgaggaaccggcccggcggctgcgcggtgcggtggaatccaccccggaggtggcctcgtttcatgtcaacgttgctgttggctacggcgggcgccgcgagatcgtcgacgctgtgcgcgcgttgttgagcaaggaactcgccaacggggccaccgcggaggaactcgtcgacgcggtgaccgtcgagggtatctcggaaaacctgtacacctcaggccaacccgaccccgatttggtgatacgcacctccggcgagcaacgcttgtccgggttcttgctgtggcaaagcgcctactcggagatgtggttcaccgaggcgcactggccggcgtttcgccacgtcgattttctacgcgcgctgcgtgactacagtgcgaggcatcgccgctacggcaggtga

SEQ ID NO: 3135 - protein, 262 aa, Mycobacterium bovis
MEIIPPRLKEPLYRLYELRLRQGLAASKSDLPRHIAVLCDGNRRWARSAGYDDVSYGYRMGAAKIAEMLRWCHEAGIELATVYLLSTENLQRDPDELAALIEIITDVVEEICAPANHWSVRTVGDLGLIGEEPARRLRGAVESTPEVASFHVNVAVGYGGRREIVDAVRALLSKELANGATAEELVDAVTVEGISENLYTSGQPDPDLVIRTSGEQRLSGFLLWQSAYSEMWFTEAHWPAFRHVDFLRALRDYSARHRRYGR

SEQ ID NO: 3136 - DNA, 789 bp, Mycobacterium leprae
  CDS (1)..(789): transl_table=11
gtggagatcattccgccacggctcaaagagccattgtatgcgctctatgagttgcggctgcgacagggtctgacagcctcggaatcccgacttcctcgccacatcgcggtcctgtgtgacggaaaccggcggtgggcccgcgacgctggatacgacgatgtcagctacggctaccggatgggcgcggccaagatcgctgaaatgctgcggtggtgccaagaagccggcatcgaaatgaccacggtctatctgctatccacggaaaacttgcaacgcgatcccgatgagctggccgcactaatcgagatcatcactgatgtggttgaggaaatctgcgcacctgccaatcgctggagtgtgcgtaccgtcggtgatttggaactacttggcgaggaaccagcctgtcgactgcgcggcgcggtggaatccacaccaggtgtagcgccgttccatgtcaatgtcgcggtgggttacggaggtcgccgcgagatagtcggcgcggtacgtgcgttgttgggcaaggaactcgccaacggggccactgccgaggagcttgtcgaggcggtgaccgttgaaggcattgccaggaacctgtatacctctggccaacctgaccccgatctggtgatccgcacctcaggggagcaacgcctgtccgggtttttgctgtggcagagtgcgtattcagagatgtggttcaccgaaacgcactggcccgcattccggcgggtcgatttcctgcgcgcgctgcgcgattacagcatgaggcaccgtcggtacggcaagtag

SEQ ID NO: 3137 - protein, 262 aa, Mycobacterium leprae
MEIIPPRLKEPLYALYELRLRQGLTASESRLPRHIAVLCDGNRRWARDAGYDDVSYGYRMGAAKIAEMLRWCQEAGIEMTTVYLLSTENLQRDPDELAALIEIITDVVEEICAPANRWSVRTVGDLELLGEEPACRLRGAVESTPGVAPFHVNVAVGYGGRREIVGAVRALLGKELANGATAEELVEAVTVEGIARNLYTSGQPDPDLVIRTSGEQRLSGFLLWQSAYSEMWFTETHWPAFRRVDFLRALRDYSMRHRRYGK

SEQ ID NO: 3138 - DNA, 1004 bp, Brassica napus; identical to SEQ ID NO: 2348
  CDS (123)..(914)

SEQ ID NO: 3139 - protein, 263 aa, Brassica napus; identical to SEQ ID NO: 2349

SEQ ID NO: 3140 - DNA, 948 bp, Brassica napus; identical to SEQ ID NO: 2350
  CDS (30)..(845)

SEQ ID NO: 3141 - protein, 271 aa, Brassica napus; identical to SEQ ID NO: 2351

SEQ ID NO: 3142 - DNA, 991 bp, Brassica napus; identical to SEQ ID NO: 2352
  CDS (27)..(839)

SEQ ID NO: 3143 - protein, 270 aa, Brassica napus; identical to SEQ ID NO: 2353

SEQ ID NO: 3144 - DNA, 1045 bp, Brassica napus; identical to SEQ ID NO: 2370
  CDS (3)..(872)

SEQ ID NO: 3145 - protein, 289 aa, Brassica napus; identical to SEQ ID NO: 2371

SEQ ID NO: 3146 - DNA, 969 bp, Glycine max; identical to SEQ ID NO: 2430
  CDS (1)..(969)

SEQ ID NO: 3147 - protein, 322 aa, Glycine max; identical to SEQ ID NO: 2431

SEQ ID NO: 3148 - DNA, 1385 bp, Linum usitatissimum; identical to SEQ ID NO: 2501
  CDS (355)..(1119)

SEQ ID NO: 3149 - protein, 254 aa, Linum usitatissimum; identical to SEQ ID NO: 2502

SEQ ID NO: 3150 - DNA, 912 bp, Zea mays; identical to SEQ ID NO: 2557
  CDS (1)..(912)

SEQ ID NO: 3151 - protein, 303 aa, Zea mays; identical to SEQ ID NO: 2558

SEQ ID NO: 3152 - DNA, 24 bp, Artificial sequence
  primer
atggaaacggatagtggtatacct

SEQ ID NO: 3153 - DNA, 28 bp, Artificial sequence
  primer
ttaattcaactttttttctttcaaatcg

SEQ ID NO: 3154 - protein, 271 aa, Artificial sequence
  consensus sequence
  Variant (2)..(2): Xaa in position 2 is any amino acid
  Variant (12)..(12): Xaa in position 12 is any amino acid
  Variant (16)..(24): Xaa in position 16 to 24 is any amino acid
  Variant (25)..(28): Xaa in position 25 to 28 is any or no amino acid
  Variant (31)..(32): Xaa in position 31 to 32 is any amino acid
  Variant (34)..(36): Xaa in position 34 to 36 is any amino acid
  Variant (38)..(40): Xaa in position 38 to 40 is any amino acid
  Variant (42)..(48): Xaa in position 42 to 48 is any amino acid
  Variant (49)..(49): Xaa in position 49 is any or no amino acid
  Variant (51)..(52): Xaa in position 51 to 52 is any amino acid
  Variant (60)..(60): Xaa in position 60 is any amino acid
  Variant (64)..(64): Xaa in position 64 is any amino acid
  Variant (65)..(65): Xaa in position 65 is any or no amino acid
  Variant (67)..(69): Xaa in position 67 to 69 is any amino acid
  Variant (72)..(73): Xaa in position 72 to 73 is any amino acid
  Variant (76)..(76): Xaa in position 76 is any amino acid
  Variant (78)..(85): Xaa in position 78 to 85 is any amino acid
  Variant (86)..(91): Xaa in position 86 to 91 is any or no amino acid
  Variant (93)..(98): Xaa in position 93 to 98 is any or no amino acid
  Variant (100)..(100): Xaa in position 100 is any amino acid
  Variant (102)..(103): Xaa in position 102 to 103 is any amino acid
  Variant (106)..(113): Xaa in position 106 to 113 is any amino acid
  Variant (115)..(117): Xaa in position 115 to 117 is any amino acid
  Variant (119)..(124): Xaa in position 119 to 124 is any amino acid
  Variant (126)..(129): Xaa in position 126 to 129 is any amino acid
  Variant (130)..(136): Xaa in position 130 to 136 is any or no amino acid
  Variant (138)..(138): Xaa in position 138 is any or no amino acid
  Variant (140)..(142): Xaa in position 140 to 142 is any or no amino acid
  Variant (144)..(145): Xaa in position 144 to 145 is any or no amino acid
  Variant (147)..(147): Xaa in position 147 is any or no amino acid
  Variant (150)..(151): Xaa in position 150 to 151 is any or no amino acid
  Variant (153)..(155): Xaa in position 153 to 155 is any amino acid
  Variant (157)..(162): Xaa in position 157 to 162 is any amino acid
  Variant (163)..(186): Xaa in position 163 to 186 is any or no amino acid
  Variant (188)..(201): Xaa in position 188 to 201 is any or no amino acid
  Variant (203)..(204): Xaa in position 203 to 204 is any amino acid
  Variant (205)..(214): Xaa in position 205 to 214 is any or no amino acid
  Variant (221)..(221): Xaa in position 221 is any or no amino acid
  Variant (224)..(224): Xaa in position 224 is any amino acid
  Variant (234)..(234): Xaa in position 234 is any amino acid
  Variant (235)..(236): Xaa in position 235 to 236 is any or no amino acid
  Variant (239)..(239): Xaa in position 239 is any amino acid
  Variant (241)..(242): Xaa in position 241 to 242 is any amino acid
  Variant (244)..(247): Xaa in position 244 to 247 is any amino acid
  Variant (252)..(258): Xaa in position 252 to 258 is any amino acid
  Variant (261)..(262): Xaa in position 261 to 262 is any amino acid
  Variant (264)..(265): Xaa in position 264 to 265 is any amino acid
  Variant (267)..(267): Xaa in position 267 is any amino acid
  Variant (269)..(269): Xaa in position 269 is any amino acid
PXHVAIIMDGNXRWAXXXXXXXXXXXXXGHXXGXXXLXXXVXXXXXXXXIXXLTLYAFSXENWXXRXXXEVXXLMXLXXXXXXXXXXXXXXLXXXXXXVXVXXIGXXXXXXXXLXXXIXXXXXXTXXXXXXXXXXXLXIXXXYXXRXEIXXAXXXLXXXXXXXXXXXXXXXXXXXXXXXXXXXXXXIXXXXXXXXXXXXXXLXXXXXXXXXXXXDLLIRTXGEXRLSNFLLWQXXXAYXEXXFXXXXWPDFXXXXXXXAIXXYXXRXRXFG

SEQ ID NO: 3155 - protein, 15 aa, Artificial sequence
  Consensus sequence
  Variant (2)..(2): Xaa in position 2 is any amino acid
  Variant (4)..(4): Xaa in position 4 is Ile or Val
  Variant (5)..(5): Xaa in position 5 is Ala, Gly or Ser
  Variant (6)..(6): Xaa in position 6 is Phe, Ile, Leu, Met or Val
  Variant (7)..(7): Xaa in position 7 is Ile, Leu, Met or Val
  Variant (8)..(8): Xaa in position 8 is any amino acid
  Variant (12)..(12): Xaa in position 12 is any amino acid
  Variant (14)..(14): Xaa in position 14 is any amino acid
PXHXXXXXDGNXRXA

SEQ ID NO: 3156 - protein, 19 aa, Artificial sequence
  Consensus sequence
  Variant (3)..(3): Xaa in position 3 is any amino acid
  Variant (6)..(6): Xaa in position 6 is Phe or Trp
  Variant (7)..(7): Xaa in position 7 is any amino acid
  Variant (9)..(9): Xaa in position 9 is any amino acid
  Variant (10)..(11): Xaa in position 10 to 11 is any or no amino acid
  Variant (13)..(15): Xaa in position 13 to 15 is any amino acid
  Variant (16)..(16): Xaa in position 16 is Ile or Leu
  Variant (17)..(17): Xaa in position 17 is Phe, Ile, Leu or Met
  Variant (18)..(18): Xaa in position 18 is any amino acid
  Variant (19)..(19): Xaa in position 19 is Phe, Ile, Leu or Met
FSXENXXRXXXEXXXXXXX

SEQ ID NO: 3157 - protein, 19 aa, Artificial sequence
  Consensus sequence
  Variant (2)..(2): Xaa in position 2 is any or no amino acid
  Variant (4)..(4): Xaa in position 4 is any amino acid
  Variant (5)..(5): Xaa in position 5 is any or no amino acid
  Variant (7)..(7): Xaa in position 7 is Pro, Ser or Thr
  Variant (8)..(8): Xaa in position 8 is Gly or Ser
  Variant (10)..(11): Xaa in position 10 to 11 is any amino acid
  Variant (13)..(13): Xaa in position 13 is any amino acid
  Variant (15)..(15): Xaa in position 15 is Asp, Gly or Asn
  Variant (16)..(16): Xaa in position 16 is Phe or Tyr
  Variant (17)..(17): Xaa in position 17 is Phe, Leu or Met
  Variant (18)..(18): Xaa in position 18 is any amino acid
DXLXXRXXGXXRXSXXXXW

SEQ ID NO: 3158 - DNA, 411 bp, Saccharomyces cerevisiae
  CDS (1)..(411)
atggccagaacaaagcaaacagcaagaaagtccactggtggtaaggccccaagaaagcaattagcttctaaggctgccagaaaatccgccccatctaccggtggtgttaagaagcctcacagatataagccaggtactgttgctttgagagaaatcagaagattccaaaaatctactgaactgttgatcagaaagttgcctttccaaagattggtcagagaaatcgctcaagatttcaagaccgacttgagatttcaatcttctgccatcggtgccttgcaagaatctgtcgaagcctacttagtctctttatttgaagataccaacttggctgccattcacgccaagcgtgtcactatccaaaagaaggatatcaagttggctagaagattaagaggtgaaagatcatag

SEQ ID NO: 3159 - protein, 136 aa, Saccharomyces cerevisiae
MARTKQTARKSTGGKAPRKQLASKAARKSAPSTGGVKKPHRYKPGTVALREIRRFQKSTELLIRKLPFQRLVREIAQDFKTDLRFQSSAIGALQESVEAYLVSLFEDTNLAAIHAKRVTIQKKDIKLARRLRGERS

SEQ ID NO: 3160 - DNA, 411 bp, Danio rerio
  CDS (1)..(411)
atggcaagaaccaagcaaaccgcccgtaaatccaccggaggcaaagctccaaggaagcagctcgccactaaagctgcccgtaagagcgctcctgccaccggcggcgtcaagaaacctcaccgttacaggcccggcaccgtggctctgcgcgagatccgtcgttaccagaagtccactgagctgctgatccgcaaactgcccttccagcgtctggtccgagaaattgctcaggatttcaagacagatctgcgcttccagagctccgctgtcatggccctgcaggaggccagcgaggcttatctcgtcggtctgttcggggacaccaacctgtgcgccatccacgccaagagggtcaccatcatgcccaaagacatccagctggcccgccgcatccgtggagaacgcgcttaa

SEQ ID NO: 3161 - protein, 136 aa, Danio rerio
MARTKQTARKSTGGKAPRKQLATKAARKSAPATGGVKKPHRYRPGTVALREIRRYQKSTELLIRKLPFQRLVREIAQDFKTDLRFQSSAVMALQEASEAYLVGLFGDTNLCAIHAKRVTIMPKDIQLARRIRGERA

SEQ ID NO: 3162 - DNA, 411 bp, Homo sapiens
  CDS (1)..(411)
atggcccgtactaagcagactgcccgcaagtcgaccggcggcaaggccccgaggaagcagctggctaccaaagcggcccgcaagagcgcgccggccacgggcggggtgaagaagccgcaccgctaccggcccggcaccgtggctctgcgggagatccggcgctatcagaagtctacggagctgctgatccgcaagctgcccttccagcggctggtacgcgagatcgcgcaggagtttaagacggacctgcgcttccagagctcggccgtgatggcgctgcaggaggccagagaggcctacctggtggggctgttcgaagacacgaacctgtgcgccatccatgccaagcgcgtgaccatcatgcccaaggacatccagttggtcagccgcatccgcggggagcgggcctaa

SEQ ID NO: 3163 - protein, 136 aa, Homo sapiens
MARTKQTARKSTGGKAPRKQLATKAARKSAPATGGVKKPHRYRPGTVALREIRRYQKSTELLIRKLPFQRLVREIAQEFKTDLRFQSSAVMALQEAREAYLVGLFEDTNLCAIHAKRVTIMPKDIQLVSRIRGERA

SEQ ID NO: 3164 - DNA, 411 bp, Mus musculus
  CDS (1)..(411)
atggcccgtacgaagcagaccgcccgcaagtccaccggcggcaaggccccgcgcaagcagctggccaccaaggccgcccgcaagagcgccccggccaccggcggcgtgaagaagccgcaccgctaccggcccggcaccgtggcgctgcgggagatccggcgctaccagaagtcgaccgagctgctgatccgcaagctgccgttccagcgcttggtgcgcgagatcgcgcaggacttcaagacggacctgcgcttccagagctcggccgtcatggcgctgcaggaggcgagcgaggcctacctggtggggctgttcgaggacaccaacctgtgcgccatgcacgccaaacgcgtcaccatcatgcccaaggacatccagttggcccgccgcatccgtggggagcgcgcttaa

SEQ ID NO: 3165 - protein, 136 aa, Mus musculus
MARTKQTARKSTGGKAPRKQLATKAARKSAPATGGVKKPHRYRPGTVALREIRRYQKSTELLIRKLPFQRLVREIAQDFKTDLRFQSSAVMALQEASEAYLVGLFEDTNLCAMHAKRVTIMPKDIQLARRIRGERA

SEQ ID NO: 3166 - DNA, 411 bp, Arabidopsis thaliana
  CDS (1)..(411)
atggctcgtaccaagcaaaccgctcgtaagtccaccggaggtaaagctccaaggaagcaacttgctactaaggctgctcgtaaatctgcaccaactactggtggagtcaagaaaccacatcgttaccgtcctggaactgttgctctccgtgaaatccgtaagtaccagaagagtactgagttgcttatcaggaaactgccatttcagaggctagtccgtgagattgctcaagatttcaagactgatttgcgtttccagagccatgctgtcttagctctccaggaagctgcagaagcatatcttgttggtctctttgaagacactaacctttgtgccattcatgccaagcgtgtgaccataatgcccaaagacattcagctcgctcgtcgtatcagaggtgaacgcgcttaa

SEQ ID NO: 3167 - protein, 136 aa, Arabidopsis thaliana; identical to SEQ ID NO: 2317

SEQ ID NO: 3168 - DNA, 411 bp, Caenorhabditis elegans
  CDS (1)..(411)
atggctcgtaccaagcaaaccgctcgtaaatccaccggaggaaaggctccaagaaagcagttggccaccaaggccgcccgcaaatcggctccaaccaccggaggagtcaagaagccacatcgttaccgtccaggaactgtcgctctccgtgagattcgtcgttaccagaagtcgactgagcttctcatccgcaagcttcctttccaacgtctcgttcgtgagattgcccaggacttcaagactgatctccgcttccagtcggctgccatcggagctctccaggaggcatctgaagcatacctcgtcggactcttcgaggacaccaacctgtgcgccatccacgccaagcgcgtcaccatcatgccaaaggacatgcaactcgccagacgcatccgcggagaacgtgcttaa

SEQ ID NO: 3169 - protein, 136 aa, Caenorhabditis elegans
MARTKQTARKSTGGKAPRKQLATKAARKSAPTTGGVKKPHRYRPGTVALREIRRYQKSTELLIRKLPFQRLVREIAQDFKTDLRFQSAAIGALQEASEAYLVGLFEDTNLCAIHAKRVTIMPKDMQLARRIRGERA

SEQ ID NO: 3170 - DNA, 411 bp, Caenorhabditis elegans
  CDS (1)..(411)
atggctcgtaccaagcaaaccgcgcgtaaatcaactggaggaaaagctcctcgcaagcagctggccactaaggcggctcgcaagtcagctccaactaccggaggtgtcaagaaaccacatcgttatcgtccaggaaccgtcgctcttcgtgagattcgtcgttaccaaaagtccaccgagcttctcatccgcaagcttccattccaacgtcttgttcgtgaaatcgctcaagatttcaagaccgatctccgtttccaatccgccgccatcggagctctgcaagaggcttctgaggcctacctcgttgggctcttcgaagacaccaacttgtgcgcaatccacgccaaacgtgtcaccatcatgccaaaggacatccagcttgctcgacgcatccgtggagaacgtgcataa

SEQ ID NO: 3171 - protein, 136 aa, Caenorhabditis elegans
MARTKQTARKSTGGKAPRKQLATKAARKSAPTTGGVKKPHRYRPGTVALREIRRYQKSTELLIRKLPFQRLVREIAQDFKTDLRFQSAAIGALQEASEAYLVGLFEDTNLCAIHAKRVTIMPKDIQLARRIRGERA

SEQ ID NO: 3172 - DNA, 411 bp, Schizosaccharomyces pombe 972h-
  CDS (1)..(411)
atggctcgtactaaacaaacagctcgtaagtctaccggtggtaaggcaccccgtaagcaattggcctctaaggccgctcgtaaggccgctcccgctaccggaggtgttaagaagcctcatcgttatcgtcctggtactgtcgctcttcgtgagattcgtcgttatcaaaagtctactgaacttttaattcgtaagctacctttccaacgtttggtccgtgaaatcgcccaagatttcaagactgacttgcgtttccaatcttctgccattggtgctctccaagaagctgttgaggcctaccttgtctctctatttgaggacactaacttgtgtgctattcacggaaaacgtgttacgattcaacccaaggatatgcagttggctcgtcgtctccgtggcgaacgctcataa

SEQ ID NO: 3173 - protein, 136 aa, Schizosaccharomyces pombe 972h-
MARTKQTARKSTGGKAPRKQLASKAARKAAPATGGVKKPHRYRPGTVALREIRRYQKSTELLIRKLPFQRLVREIAQDFKTDLRFQSSAIGALQEAVEAYLVSLFEDTNLCAIHGKRVTIQPKDMQLARRLRGERS

SEQ ID NO: 3174 - DNA, 411 bp, Drosophila melanogaster
  CDS (1)..(411)
atggctcgtactaagcagactgcccgtaagtcgaccggaggaaaggctcctcgtaagcagctagccaccaaggctgcccgtaaatcggcgccatccaccggcggagtgaagaagccccatcgttatcgtcccggaactgtggctcttcgtgagatccgtcgttaccagaagtcgaccgagttgctcatccgcaagctgcccttccagcgtctggttcgtgaaatcgctcaggatttcaagaccgatctgcgtttccagtcggctgccatcggtgccttgcaggaagcatctgaggcgtacctggtgggtctcttcgaggacaccaacttgtgcgctatccacgccaagcgcgtgacaatcatgcctaaggacatccagttggcgcgccgcatccgtggcgagcgtgcttaa

SEQ ID NO: 3175 - protein, 136 aa, Drosophila melanogaster
MARTKQTARKSTGGKAPRKQLATKAARKSAPSTGGVKKPHRYRPGTVALREIRRYQKSTELLIRKLPFQRLVREIAQDFKTDLRFQSAAIGALQEASEAYLVGLFEDTNLCAIHAKRVTIMPKDIQLARRIRGERA

SEQ ID NO: 3176 - DNA, 411 bp, Danio rerio
  CDS (1)..(411)
atggcccgtactaagcagaccgcgcgtaaatccactggaggaaaggcgccaagaaaacagctggcaactaaagccgccaggaaaagcgcgccctctactggaggagtgaagaagcctcacagatacaggcccggaactgttgctctgggagaaattcgtcgttatcagaagtcaacagagttgctcatccgcaagttgccgtttcagcgtctggtcagagaaatcgcacaggatttcaaaactgacctgaggttccagagtgctgctattggcgctcttcaggaagcaagtgaggcctaccttgtcggtctgtttgaggacaccaacttgtgcgccattcatgccaagagagtaacaatcatgcccaaggatatccagcttgcaaggcgaatcagaggagagagggcttaa

SEQ ID NO: 3177 - protein, 136 aa, Danio rerio
MARTKQTARKSTGGKAPRKQLATKAARKSAPSTGGVKKPHRYRPGTVALGEIRRYQKSTELLIRKLPFQRLVREIAQDFKTDLRFQSAAIGALQEASEAYLVGLFEDTNLCAIHAKRVTIMPKDIQLARRIRGERA

SEQ ID NO: 3178 - DNA, 573 bp, Rattus norvegicus
  CDS (1)..(573)
  misc_feature (18)..(18): n is a, g, c or t
atgggtgacgccccgggnccaagaccggacagcgcgggagtttcaagtcgctgtctccgccccgccgtggtggggggggaagactggtcctataaagacggtcggctgcgacctgggtctagtccccgtgtgctcctcgtcttggtgacttccgtctccgccatggcccgtacgaagcagaccgcccgcaagtccaccggcggcaaggccccgcgcaagcagctggccaccaaggccgcccgcaagagcgccccggccacgggcggcgtgaagaagccgcaccgctaccggcccggcaccgtggcgctgcgggagatccggcgctaccagaagtcgaccgagctgctgatccgcaagctgccgttccagcgcctggtgcgcgagatcgcgcaggacttcaagacggacctgcgcttccagagctcggccgtcatggcgctgcaggaggcgagcgaggcctacctggtgggtctgttcgaggacaccaacctgtgcgccatccacgccaagcgcgtcaccatcatgcccaaggacatccagttggcccgtcgcatccgcggggagcgcgcttga

SEQ ID NO: 3179 - protein, 190 aa, Rattus norvegicus
MGDAPGPRPDSAGVSSRCLRPAVVGGEDWSYKDGRLRPGSSPRVLLVLVTSVSAMARTKQTARKSTGGKAPRKQLATKAARKSAPATGGVKKPHRYRPGTVALREIRRYQKSTELLIRKLPFQRLVREIAQDFKTDLRFQSSAVMALQEASEAYLVGLFEDTNLCAIHAKRVTIMPKDIQLARRIRGERA

SEQ ID NO: 3180 - DNA, 600 bp, Gallus gallus
  CDS (1)..(600)
atgaagtttcaagaagtccttgtgaatttcagcctccacacggcttttaaactgccaggaattcgggtagaggggaaaccggagaagaagacgggatgtgaccgcagcgtcacaaacgggccccatgcacaaacgggtcgtgcactcagaactaagatttggtggggagcaggaaggagcttctcggccatggcgcgtacgaagcagacggcgcgtaagtcgacgggcgggaaggcgccccgcaagcagctggccaccaaggcggcccgcaagagcgcgccggccacgggcggcgtgaagaagccgcaccgctaccggcccggcacggtggcgctgcgcgagatccggcgctaccagaagtccacggagctgctgatccgcaagctgcccttccagcgcctggtgcgcgagatcgcgcaggacttcaagaccgacctgcgcttccagagctcggccgtcatggcgctgcaggaggcgagcgaggcctacctggtggggctcttcgaggacaccaacctgtgcgccatccacgccaagcgcgtcaccatcatgcccaaggacatccagctcgcccgccgcatccgcggggagcgcgcctga

SEQ ID NO: 3181 - protein, 199 aa, Gallus gallus
MKFQEVLVNFSLHTAFKLPGIRVEGKPEKKTGCDRSVTNGPHAQTGRALRTKIWWGAGRSFSAMARTKQTARKSTGGKAPRKQLATKAARKSAPATGGVKKPHRYRPGTVALREIRRYQKSTELLIRKLPFQRLVREIAQDFKTDLRFQSSAVMALQEASEAYLVGLFEDTNLCAIHAKRVTIMPKDIQLARRIRGERA

SEQ ID NO: 3182 - DNA, 411 bp, Pan troglodytes
  CDS (1)..(411)
atggctcgtacaaagcagactgcccgcaaatcgaccggtggtaaagcacccaggaagcaactggctacaaaagccgctcgcaagagtgcgccctctactggaggggtgaagaaacctcatcgttacaggcctggtactgtggcgctccgtgaaattagacgttatcagaagtccactgaacttctggttcgcaaacttcccttccagcgtctggtgcgagaaattgctcaggactttaaaacagatctgcgcttccagagcgcagctatcggtgctttgcaggaggcaagtgaggcctatctggttggcctttttgaagacaccaacctgagtgctatccatgccaaacgtgtaacaattatgccaaaagacatccagctagcacgcagcatacgtggagaacatgcttaa

SEQ ID NO: 3183 - protein, 136 aa, Pan troglodytes
MARTKQTARKSTGGKAPRKQLATKAARKSAPSTGGVKKPHRYRPGTVALREIRRYQKSTELLVRKLPFQRLVREIAQDFKTDLRFQSAAIGALQEASEAYLVGLFEDTNLSAIHAKRVTIMPKDIQLARSIRGEHA

SEQ ID NO: 3184 - DNA, 525 bp, Canis familiaris
  CDS (1)..(525)
atggacagccagcgcgggactttcaattattgccccgcccaatcggagagagacggtgcctataaagaccgctgcggcgggccggggcgccgttactctcccagccgcttcgccatggctcgtacgaaacagaccgcccgcaagtcgaccggcggcaaggccccgcgcaaacagctggccaccaaggcggcccgcaagagcgcgccggccacgggcggcgtcaagaagccgcaccgctaccggccgggcacggtggccctgcgcgagatccggcgctaccagaagtccacggagctgctgatccgcaagctgccgttccagcggctggtgcgcgagatcgcgcaggacttcaagacggacctgcgcttccagagctcggccgtcatggcgctgcaggaggcgagcgaggcctacctggtggggctcttcgaggacaccaacctgtgcgccatccacgccaagcgcgtcaccatcatgcccaaggacatccagctggcgcgccgcatccgcggggagcgggcttga

SEQ ID NO: 3185 - protein, 174 aa, Canis familiaris
MDSQRGTFNYCPAQSERDGAYKDRCGGPGRRYSPSRFAMARTKQTARKSTGGKAPRKQLATKAARKSAPATGGVKKPHRYRPGTVALREIRRYQKSTELLIRKLPFQRLVREIAQDFKTDLRFQSSAVMALQEASEAYLVGLFEDTNLCAIHAKRVTIMPKDIQLARRIRGERA

SEQ ID NO: 3186 - DNA, 798 bp, Bos taurus
  CDS (1)..(798)
atgcccatagaggaggaagagaatgctgaggaaaaacaagaaagctgtacagggaaatataacacatacaatgacgtccacctgaacccagacatgatgcccacccccatccaacccagacccacttggttttcgagcaaccctgcgagctccaaaacgccagcctgtgaggccaagtcctcacatcgcgaaaataaggggcaggcgcccatgcagtatgcctccatggaccaatcagagcttagcctgtccttacgccacccagcaattggccaatgggaaggctacaccctctataaaagagggcagacttcgcacttacgcacgttggcgagggacggagattataatagcaactgtcatctaggcgacagacgcagcagcggcatggcccgaacgaagcagactgcccgcaagtccaccggcggcaaagcgcctcgtaagcagctagctaccaaagttgctcgaaagagcgctccagccaccggtggcatgaagaagccacatcgctatcggcctggaactgtagcactgcgcgagatccgccgcttccagaagtctactgaacttctgattcggaagctgccgtttcagcgcctggtgcgggaaattgcgcaggatttcaaatccgatctgcgctttcagagttccgccgtgatggcactccaggaggcatgtgaggcgtatctagtcggcctttttgaagacaccaatctgtgtgccatccatgctaagcgtgtcaccatcatgcctaaggatattcagctggcacggcgaattcgtggagaacgtgcctag

SEQ ID NO: 3187 - protein, 265 aa, Bos taurus
MPIEEEENAEEKQESCTGKYNTYNDVHLNPDMMPTPIQPRPTWFSSNPASSKTPACEAKSSHRENKGQAPMQYASMDQSELSLSLRHPAIGQWEGYTLYKRGQTSHLRTLARDGDYNSNCHLGDRRSSGMARTKQTARKSTGGKAPRKQLATKVARKSAPATGGMKKPHRYRPGTVALREIRRFQKSTELLIRKLPFQRLVREIAQDFKSDLRFQSSAVMALQEACEAYLVGLFEDTNLCAIHAKRVTIMPKDIQLARRIRGERA

SEQ ID NO: 3188 - DNA, 441 bp, Danio rerio
  CDS (1)..(441)
atgttcacgtcacactacaagttagtcacaatggcaagaaccaagcagaccgcccgtaaatccaccggaggaaaggctccgaggaagcagctcgccactaaagctgcccgtaaaagcgcaccagcaaccggcggcgtcaagaagcctcatcgttacaggcctggtaccgtggctctgagagagatccgccgttatcagaagtctactgagctgctgatccgtaaactgccctttcaacgtctggtgagagaaatcgctcaagatttcaagactgatctgcgtttccagagctccgccgtcatggctctgcaggaggccagcgaggcttacctggtgggtctgtttgaggacacaaacctgtgcgccatccacgctaagagggtcaccatcatgcccaaagacatccagctggcccgccgcatccgcggagagcgcgcttaa

SEQ ID NO: 3189 - protein, 146 aa, Danio rerio
MFTSHYKLVTMARTKQTARKSTGGKAPRKQLATKAARKSAPATGGVKKPHRYRPGTVALREIRRYQKSTELLIRKLPFQRLVREIAQDFKTDLRFQSSAVMALQEASEAYLVGLFEDTNLCAIHAKRVTIMPKDIQLARRIRGERA

SEQ ID NO: 3190 - DNA, 411 bp, Drosophila simulans
  CDS (1)..(411)
atggctcgaaccaagcaaactgcacgcaaatcgactggtggaaaagcaccacgcaaacaactggctacaaaggccgctcgcaagagtgtcccagccactggaggtgtgaagaagccccatcgctatcgccctggaacagtggccttgcgtgaaatccgtcgctaccaaaagagcaccgagcttctaatccgcaagctgcctttccagcgtctggtgcgtgaaatcgctcaggactttaagacggacttgcgattccagagctcggcggttatggctctgcaggaagctagcgaaacctacctagttggtctcttcgaagataccaacttgtgtgccattcatgccaagcgtgtcaccattatgcccaaagacatccagttagcgcgacgcattcgcggcgagcgtgcttaa

SEQ ID NO: 3191 - protein, 136 aa, Drosophila simulans
MARTKQTARKSTGGKAPRKQLATKAARKSVPATGGVKKPHRYRPGTVALREIRRYQKSTELLIRKLPFQRLVREIAQDFKTDLRFQSSAVMALQEASETYLVGLFEDTNLCAIHAKRVTIMPKDIQLARRIRGERA

SEQ ID NO: 3192 - DNA, 423 bp, Emericella nidulans
  CDS (1)..(423)
atggctcgcactaagcagactgcccgtaagtcctcaaagtctactggtggcaaggctccccgtaagcagctcgcgtccaaggctgcccgtaaggccgctccctccactggaggtgtcaagaagcctcaccgctacaagcctggtggtaccgtcgctctccgtgagatccgtcgctaccagaagtccactgagcttctgatccgaaagctccccttccagcgtctggtccgtgaaatcgcccaggacttcaagtccgacctccgcttccagtcctccgccatcggtgctctccaggagtccgttgaggcctacctcgtctccctcttcgaagacaccaacctgtgcgctatccacgccaagcgtgtcaccatccagtccaaggacatccagcttgctcgtcgcctccgtggtgagcgatcttaa

SEQ ID NO: 3193 - protein, 140 aa, Emericella nidulans
MARTKQTARKSSKSTGGKAPRKQLASKAARKAAPSTGGVKKPHRYKPGGTVALREIRRYQKSTELLIRKLPFQRLVREIAQDFKSDLRFQSSAIGALQESVEAYLVSLFEDTNLCAIHAKRVTIQSKDIQLARRLRGERS

SEQ ID NO: 3194 - DNA, 411 bp, Lytechinus pictus
  CDS (1)..(411)
atggcccgtaccaagcagaccgctcgcaaatctaccggaggaaaggctccacgcaagcagctcgccaccaaggcagctcgcaagtccgccccagccactggcggagtcaagaagcctcatcgttacaggcctggaaccgtcgctctccgtgagatccgtcgctaccagaagagcaccgagcttttcatccgcaagctccccttccagcgtctggtccgtgagatcgctcaggacttcaaaaccgagctccgcttccagagctccgccgtcatggccctccaagaggccagggaagcttacttggtcggtctcttcgaggacaccaacctttgcgccatccacgccaagcgtgtcaccatcatgcccaaggacatccagcttgcccgccgtatccgtggcgagcgtgcttaa

SEQ ID NO: 3195 - protein, 136 aa, Lytechinus pictus
MARTKQTARKSTGGKAPRKQLATKAARKSAPATGGVKKPHRYRPGTVALREIRRYQKSTELFIRKLPFQRLVREIAQDFKTELRFQSSAVMALQEAREAYLVGLFEDTNLCAIHAKRVTIMPKDIQLARRIRGERA

SEQ ID NO: 3196 - DNA, 411 bp, Mus musculus
  CDS (1)..(411)
atggcccgaaccaagcagaccgctaggaagtccaccggtgggaaagccccccgcaaacagctggccaccaaggcggctcggaaaagcgcgccctctaccggcggggtgaagaagcctcaccgctacaggccagggaccgtggctctgagagagatccgtcgttaccagaaatcgactgagctgctcatccggaagctgccattccagagattggtgagggagatcgcccaggatttcaaaaccgacttgaggtttcaaagtgcagccatcggtgcccttcaggaggctagcgaagaatacctggtggggttgtttgaagataccaatctgtgtgccatccacgccaagagagtcaccatcatgcccaaagacatccagttggctcgccggatacggggggagagagcttaa

SEQ ID NO: 3197 - protein, 136 aa, Mus musculus
MARTKQTARKSTGGKAPRKQLATKAARKSAPSTGGVKKPHRYRPGTVALREIRRYQKSTELLIRKLPFQRLVREIAQDFKTDLRFQSAAIGALQEASEEYLVGLFEDTNLCAIHAKRVTIMPKDIQLARRIRGERA

SEQ ID NO: 3198 - DNA, 550 bp, Craterostigma plantagineum
  CDS (12)..(422)
ctcgtttcaatatggctcgtaccaagcaaaccgcccgcaagtcgaccggaggaaaggcgccgcgcaagcagctcgccaccaaagccgctcgcaagtccgctccctcgtccggaggagtcaagaagccccatcgctatcgtcccggaaccgtcgcgcttcgtgagatccgtcgctatcagaagtcgaccgaacttctgatccgcaaactcccgttccagcgtctcgtccgtgaaatcgcgcaggacttcaagaccgatctgcgcttccagtcggccgccgtcggtgctcttcaagaagccgccgaagcctatctcgtcggtctgttcgaagacaccaacttgtgcgcgatccacgccaagcgagtgaccatcatgcccaaggacattcagctcgctcgtcgcattcgtggcgaacgcgcttaagcggccagtcacctgcctctctaacccaacggccctctttagggccacaaactgtacgtagaactgataacccttcactgctatgcaacctgttgctcgttcatcgatcaataaatctgttttcccgc

SEQ ID NO: 3199 - protein, 136 aa, Craterostigma plantagineum
MARTKQTARKSTGGKAPRKQLATKAARKSAPSSGGVKKPHRYRPGTVALREIRRYQKSTELLIRKLPFQRLVREIAQDFKTDLRFQSAAVGALQEAAEAYLVGLFEDTNLCAIHAKRVTIMPKDIQLARRIRGERA

SEQ ID NO: 3200 - DNA, 463 bp, Lilium longiflorum
  CDS (8)..(418)
cccactaatggcccgcaccaagcagactgcgcgcaagtccaccggcggcaaggcccctaggaagcagcttgcaaccaaggcagcccgcaagtccgctccggccaccggcggagtgaagaagccccaccgcttccgtcccggtacggtggcgctccgtgagatccggaagtaccagaagagtacagagcttcttatccgcaagcttccgttccagcgccttgtccgcgagatcgctcaggacttcaaggccgacctccgcttccagagctcggccgtagcggcgctgcaggaggcgtcggagtcttacctggtggggctgttcgaggacaccaacctgtgcgccattcacgctaagagggtgactatcatgccgaaggacatccagctcgccaggaggatccgcggcgagagggcttgagcatgttcagagtttctgtttcgcttcttgcgaatatgtagggtt

SEQ ID NO: 3201 - protein, 136 aa, Lilium longiflorum
MARTKQTARKSTGGKAPRKQLATKAARKSAPATGGVKKPHRFRPGTVALREIRKYQKSTELLIRKLPFQRLVREIAQDFKADLRFQSSAVAALQEASESYLVGLFEDTNLCAIHAKRVTIMPKDIQLARRIRGERA

SEQ ID NO: 3202 - DNA, 631 bp, Lilium longiflorum
  CDS (86)..(496)
tggattggaatgaagaaatcatttcattacaaacaacaatttatcaatccccaaatttacgaaaccctaaccctaaccttctccgatggcccgtacgaagcagactgcccgcaagtccaccggcggtaaggcccctcgtaagcagctcgccaccaaggctgctcgtaagtcggcaccgacgaccggcggagtgaaaaagccccatcgctacaggcccggtacggtggcgttgcgtgagatccgcaagtaccagaagagcactgatcttcttatcaggaagctgcccttccagaggcttgtgagggagatcgctcaggattacaaggccgatctccgtttccagagccatgctgtgctagctctccaggaggcggcggaggcttacctggtgggactgtttgaggatacaaatctgtgcgccattcatgccaagcgcgtgacgatcatgccgaaggacatccagcttgcacgtcgcatccgtggcgagcgtgcctaattcgtctgttattgtgttaaagtttcagggatttgaagttagacttcttaattgggtattatatataaatactttgctggaaactaatattattccatgaataatgaatttctgattctcgcgaaacaaaagctt

SEQ ID NO: 3203 - protein, 136 aa, Lilium longiflorum
MARTKQTARKSTGGKAPRKQLATKAARKSAPTTGGVKKPHRYRPGTVALREIRKYQKSTDLLIRKLPFQRLVREIAQDYKADLRFQSHAVLALQEAAEAYLVGLFEDTNLCAIHAKRVTIMPKDIQLARRIRGERA

SEQ ID NO: 3204 - DNA, 507 bp, Oryza sativa
  CDS (1)..(507)
atggcccgcacgaagcagacggctcggaagtcgaccggcgggaaggcgccgaggaagcagctggcgacgaaggcggcgcggaagtcggcgccggccaccggcggcgtgaagaagccgcaccggttccggccgggcaccgtcgcgctccgggagatccgcaagtaccagaagagcacggagctgctgatccgcaagctccccttccagcggctcgtccgggagatcgcgcaggacttcaagacggacctccggttccagagctccgccgtcgccgcgctccaggaggccgccgaggcctacctcgtcgggctcttcgaggacaccaacctctgcgccatccacgccaagcgcgtcaccatcatgcccaaggacatccagctcgcccgccgcatccgcggtctccatccatgtcttgagcagaagatgtcacttgccacctgtcttataagtctggctcccaactgcagtcttcttcgatttacttccaacttctgcaaagatgcctag

SEQ ID NO: 3205 - protein, 168 aa, Oryza sativa
MARTKQTARKSTGGKAPRKQLATKAARKSAPATGGVKKPHRFRPGTVALREIRKYQKSTELLIRKLPFQRLVREIAQDFKTDLRFQSSAVAALQEAAEAYLVGLFEDTNLCAIHAKRVTIMPKDIQLARRIRGLHPCLEQKMSLATCLISLAPNCSLLRFTSNFCKDA

SEQ ID NO: 3206 - DNA, 411 bp, Oryza sativa
  CDS (1)..(411)
atggcccgcacgaagcagacggcgcgcaagtccaccggcgggaaggcgccgaggaagcagctggcgaccaaggcggcgcgcaagtcggcgccggccaccggcggcgtgaagaagccgcaccgcttcaggccgggcaccgtcgcgctccgtgagatccgcaagtaccagaagagcacggagctgctcatccgcaagctccccttccagcgcctcgtccgcgagatcgcccaggacttcaagaccgacctccgcttccagacgtccgccgtccgcgcgctgcaggaggccgcggagcggtacctcgtcgggctcttcgaggacactaacctgtgcgccatccacgccaagcgcgtcaccatcatgcccaaggacatccagctcgcccgccgcatccgcggtgagcgcgcctga

SEQ ID NO: 3207 - protein, 136 aa, Oryza sativa
MARTKQTARKSTGGKAPRKQLATKAARKSAPATGGVKKPHRFRPGTVALREIRKYQKSTELLIRKLPFQRLVREIAQDFKTDLRFQTSAVRALQEAAERYLVGLFEDTNLCAIHAKRVTIMPKDIQLARRIRGERA

SEQ ID NO: 3208 - DNA, 459 bp, Schistosoma japonicum
  CDS (15)..(425)
ccaaatttcgtgacatggctaggacaaagcagacggcgaggaaatcgacgggtggtaaggcaccaaggaaacagttagcaacaaaagctgcccggaaatcagctccatcaacgggtggtgtgaagaagcctcatcgctaccgcccagggactgttgctctgcgtgagattcgtcgttatcagaagtccaccgagctgttgatccgaaagttgccgtttcaaagattagtccgagagatagcacaagatttcaagactgacttacgttttcaaagcgctgcggttggtgctcttcaggaggcaagcgaagcttatctagttggtttgttcgaagatacaaatctttgtgcgattcatgccaagcgagttactattatgccaaaggatatccagttggctcgtcgtattcgaggagaaagggcttaacatttaattctaataaatatcaatttacattctt

SEQ ID NO: 3209 - protein, 136 aa, Schistosoma japonicum
MARTKQTARKSTGGKAPRKQLATKAARKSAPSTGGVKKPHRYRPGTVALREIRRYQKSTELLIRKLPFQRLVREIAQDFKTDLRFQSAAVGALQEASEAYLVGLFEDTNLCAIHAKRVTIMPKDIQLARRIRGERA

SEQ ID NO: 3210 - DNA, 414 bp, Conocephalum conicum
  CDS (1)..(414)
atggctcgcactaagcaaactgcccgcaagtcgactggaggcaaagctcctcgcaagcaactcgcttccaaggctgctcgcaagactgccccaactaccaccggaggtgtcaagaagccccatcgcttcagccccggtaccgtcgctttgcgtgaaattcgtcgctaccaaaagtccaccgaacttttgattcgcaagctccctttccagcgtctcgttcgtgagattgctcaggacttcaagacggatcttcgcttccagtcctctgctgtcatggctcttcaggaagctgctgaggcttaccttgtctcacttttcgaggacactaacttggctgctatccatgctaagcgcgttactattcaacccaaggatttggctcttgctaggcgtctccgaggcgagcgcaactaa

SEQ ID NO: 3211 - protein, 137 aa, Conocephalum conicum
MARTKQTARKSTGGKAPRKQLASKAARKTAPTTTGGVKKPHRFSPGTVALREIRRYQKSTELLIRKLPFQRLVREIAQDFKTDLRFQSSAVMALQEAAEAYLVSLFEDTNLAAIHAKRVTIQPKDLALARRLRGERN

SEQ ID NO: 3212 - DNA, 411 bp, Conocephalum conicum
  CDS (1)..(411)
atggctcgcactaagcagacctcccgtaagtccactggtggcaaggctccccgtaagcagcttgcctccaaggctgcccgcaagtctgccccgtctaccggtggcgtcaagaagccccatcgctacaagcctggtaccgtcgctcttcgtgagatccgtcgctaccagaagtcgactgagctcctgatccgcaagctccccttccagcgtctggttcgtgagattgcccaggacttcaagtccgatctccgcttccagtcctcggccatcggtgctctccaggagtccgttgagtcttacctcgtctccctctttgaggacaccaacctgtgcgccatccacgccaagcgtgtcaccatccagtcgaaggacatccagctcgcccgccgcctccgaggcgagcgcaactaa

SEQ ID NO: 3213 - protein, 136 aa, Conocephalum conicum
MARTKQTSRKSTGGKAPRKQLASKAARKSAPSTGGVKKPHRYKPGTVALREIRRYQKSTELLIRKLPFQRLVREIAQDFKSDLRFQSSAIGALQESVESYLVSLFEDTNLCAIHAKRVTIQSKDIQLARRLRGERN

SEQ ID NO: 3214 - DNA, 411 bp, Marchantia polymorpha
  CDS (1)..(411)
atggctcgcactaagcagaccgcccgcaagtccactggtgggcaaggccctcgcaagcagctcgcttccaaggctgcccgcaagtccgccccgtctaccggtggtgtcaagaagcctcaccgctacaagcccggtaccgtcgctctccgtgagatccgacgataccagaagtccaccgagcttctcatccgaaagctccccttccagcgtctcgtccgtgagattgcccaggacttcaagtctgatctccgattccagtcttccgctatcggtgctctccaggagtccgtcgagtcctacctcgtctccctcttcgaggataccaacctctgcgccatccacgccaagcgtgtcaccatccagtccaaggacatccagctggcccgccgtctccgaggcgagcgcaactaa

SEQ ID NO: 3215 - protein, 136 aa, Marchantia polymorpha
MARTKQTARKSTGGQGPRKQLASKAARKSAPSTGGVKKPHRYKPGTVALREIRRYQKSTELLIRKLPFQRLVREIAQDFKSDLRFQSSAIGALQESVESYLVSLFEDTNLCAIHAKRVTIQSKDIQLARRLRGERN

SEQ ID NO: 3216 - DNA, 411 bp, Marchantia polymorpha
  CDS (1)..(411)
atggctcgcactaagcagaccgcccgcaagtccactggtggcaaggcccctcgcaagcagctcgcttccaaggctgcccgcaagtccgccccgtctaccggtggtgtcaagaagcctcaccgctacaagcccggtaccgtcgctctccgtgagatccgacgataccagaagtccaccgggcttctcatccgaaagctccccttccagcgtctcgtccgtgagattgcccaggacttcaagtctgatctccgattccagtcttccgctatcggtgctctccaggagtccgtcgagtcctacctcgtctccctcttcgaggataccaacctctgcgccatccacgccaagcgtgtcaccatccagtccaaggacattcagctggcccgccgtctccgaggtgagcgcaactaa

SEQ ID NO: 3217 - protein, 136 aa, Marchantia polymorpha
MARTKQTARKSTGGKAPRKQLASKAARKSAPSTGGVKKPHRYKPGTVALREIRRYQKSTGLLIRKLPFQRLVREIAQDFKSDLRFQSSAIGALQESVESYLVSLFEDTNLCAIHAKRVTIQSKDIQLARRLRGERN

SEQ ID NO: 3218 - DNA, 402 bp, Marchantia polymorpha
  CDS (1)..(402)
atggctcgcactaagcagaccgcccgcaagtccactggtggcaaggcccctcgcaagcagctcgcttccaaggctgcccgcaagtccgccccgtctaccggtggtgtcaagaagcctcaccgctacaagcccggtaccgtcgctctccgtgagatcggacgataccagaagtccaccgagcttctcatccgaaagctcccctttcagcgtctcattgcccaggacttcaagtctgatctccgattccagtcttccgctatcggtgctctccaggagtccgtcgagtcctacctcgtctccttcttggaggataccaacttgtgcgccatccacgccaagcgtgtcaccatccagtccaaggacatccagctggcccgccgtctccgaggcgagcgcaactaa

SEQ ID NO: 3219 - protein, 133 aa, Marchantia polymorpha
MARTKQTARKSTGGKAPRKQLASKAARKSAPSTGGVKKPHRYKPGTVALREIGRYQKSTELLIRKLPFQRLIAQDFKSDLRFQSSAIGALQESVESYLVSFLEDTNLCAIHAKRVTIQSKDIQLARRLRGERN

SEQ ID NO: 3220 - DNA, 411 bp, Conocephalum supradecompositum
  CDS (1)..(411)
atggctcgcactaagcagaccgcccgtaagtccactggtggcaaggctccccgcaagcagctcgcctccaaggctgcccgcaagtccgcgccatctaccggtggtgtcaagaagcctcaccgctacaagcctggtaccgtcgctctccgtgagattcgtcgctaccagaagtcgactgagctcctcatccgcaagctccccttccagcgtctcgtccgtgagattgcccaggacttcaagagcgatctccgcttccagtcttctgccatcggcgccctccaggagtccgtcgagtcttacctcgtctctctcttcgaagaaaccaacttgtgcgccatccacgccaagcgtgtcaccattcagtccaaggaaattcagcttgcccgccgtctccgaagggagcgcaactaa

SEQ ID NO: 3221 - protein, 136 aa, Conocephalum supradecompositum
MARTKQTARKSTGGKAPRKQLASKAARKSAPSTGGVKKPHRYKPGTVALREIRRYQKSTELLIRKLPFQRLVREIAQDFKSDLRFQSSAIGALQESVESYLVSLFEETNLCAIHAKRVTIQSKEIQLARRLRRERN

SEQ ID NO: 3222 - DNA, 411 bp, Conocephalum conicum
  CDS (1)..(411)
atggctcgcactaagcagaccgcccgcaagtccactggtgggaaggcccctcgcaagcagctcgcttccaaggctgcccgcaagtccgccccgtctaccggtggtgtcaagaagcctcaccgctacaagaccggtaccgtcgctctccgtgagatccgacgataccagaagtccaccgagcttctcatccgaaagctccccttccagcgtctcgtccgtgagattgcccaggacttcaagtctgatctccgattccagtcttccgctatcgttgctctccaggagtccgtcgagtcctacctcgtctccctcttcgaggataccaacctctgcgccatccacgccaagcgtgtcaccatccagtccaaggacatccagctggcccgccgtctccgaggcgagcgcaactaa

SEQ ID NO: 3223 - protein, 136 aa, Conocephalum conicum
MARTKQTARKSTGGKAPRKQLASKAARKSAPSTGGVKKPHRYKTGTVALREIRRYQKSTELLIRKLPFQRLVREIAQDFKSDLRFQSSAIVALQESVESYLVSLFEDTNLCAIHAKRVTIQSKDIQLARRLRGERN

SEQ ID NO: 3224 - DNA, 411 bp, Conocephalum conicum
  CDS (1)..(411)
atggctcgcactaagcagaccgcccgcaagtcgaccggtggcaaggcgccgcgcaagcagctcgcctccaaggccgcccgcaagagcgccccgtccaccgggggggtcaagaaggcccatcgctacaagcctggtaccgtcgctctgcgtgagattcgtcgctaccagaagtcgaccgagcttctgatccgcaagcttcccttccagcgcctggttcgtgagattgcacaggacttcaagtcggatctccgcttccagtcgtctgctatcggcgccctccaagagtcggttgagtcttacctcgtctcgctcttcgaggacaccaacctgtgcgccatccacgccaagcgcgtcaccatccaatcgaaggacatccagcttgcccgccgtctccgaggcgagcgcaactaa

SEQ ID NO: 3225 - protein, 136 aa, Conocephalum conicum
MARTKQTARKSTGGKAPRKQLASKAARKSAPSTGGVKKAHRYKPGTVALREIRRYQKSTELLIRKLPFQRLVREIAQDFKSDLRFQSSAIGALQESVESYLVSLFEDTNLCAIHAKRVTIQSKDIQLARRLRGERN

SEQ ID NO: 3226 - DNA, 744 bp, Pongo pygmaeus
  CDS (44)..(454)
cgtttgggttacgctcccgggagtgatcgaataacaagaagcaatggctcgtacaaagcaaactgcccgtaaatccactggtggaaaggctccaaggaagcagctggctacaaaggctgccaggaaaagtgctccttccacaggtggtgtgaagaagccacacagatacaggcctggcactgttgccttgagagaaatcagaagatatcagaagtctactgagctgttgatccgaaaactaccattccagcgacttgcaagggagattgcccaagacttcaagactgatttgaggttccagagtgcagctattggtgctcttcaggaagcaagtgaggcttacctggttggcctctttgaagataccaacctgtgtgccattcatgccaagagagtaacaattatgcccaaggacatccagttagcaagaagaatccgtggcgagcgtgcttaaacattttgctaggaacttttttttgaacttagtttttttttttacaattgtacatacaagtgtgatgtcttttattttataaagggtttgttaactgtagagtagttgacagtaagatggtagtaaacattttatatgacattcccttaatcctcaggtttttcagaaatttgtatctgcagctagtcttttgtgaccctctcctttaaaacatagtgcatgcccatacttcattctttacataatttagtatctttctgtgtaactccattgtaaataaactttccact

SEQ ID NO: 3227 - protein, 136 aa, Pongo pygmaeus
MARTKQTARKSTGGKAPRKQLATKAARKSAPSTGGVKKPHRYRPGTVALREIRRYQKSTELLIRKLPFQRLAREIAQDFKTDLRFQSAAIGALQEASEAYLVGLFEDTNLCAIHAKRVTIMPKDIQLARRIRGERA

SEQ ID NO: 3228 - DNA, 411 bp, Camellia sinensis
  CDS (1)..(411)
atggctcgtacaaagcagacagctcggaagtccaccggaggcaaggcaccaaggaagcaactcgccaccaaggccgctcgcaagtccgctccagccaccggtggtgtgaagaagccccaccgcttccgccccggcacggtggcgctccgggagatccgaaagtaccagaaatccacagagcttctgatccgaaagcttccattccagagacttgttcgtgagatcgctcaggacttcaagaccgatctccgattccagagctccgctgttgcggccctccaggaggctgctgagtcttaccttgttggactgtttgaagacaccaatctttgtgctattcacgctaagcgtgtcacgattatgcctaaggatatgcagcttgctcgccgcatcagaggcgaacgtgcttag

SEQ ID NO: 3229 - protein, 136 aa, Camellia sinensis
MARTKQTARKSTGGKAPRKQLATKAARKSAPATGGVKKPHRFRPGTVALREIRKYQKSTELLIRKLPFQRLVREIAQDFKTDLRFQSSAVAALQEAAESYLVGLFEDTNLCAIHAKRVTIMPKDMQLARRIRGERA

SEQ ID NO: 3230 - DNA, 411 bp, Caenorhabditis briggsae
  CDS (1)..(411)
atggctcgtaccaagcaaaccgcccgcaaatctaccggaggaaaggccccaagaaagcaattggccaccaaagctgcccgcaagtcggccccagctgccggaggagtcaagaagccacatcgttaccgtccaggaaccgttgctcttcgtgagatcagacgttaccaaaagtcgactgagctcctcatccgcaagttgccattccagcgacttgtccgtgaaatcgcccaggacttcaagactgacctccgcttccaatcctccgccgtcatggctcttcaagaatctgccgaggcttaccttgtcggactcttcgaggacaccaacttgtgcgccatccacgctaagcgagtcaccatcatgccaaaggatatccagcttgccagacgtatccgaggagagcgcgcttaa

SEQ ID NO: 3231 - protein, 136 aa, Caenorhabditis briggsae
MARTKQTARKSTGGKAPRKQLATKAARKSAPAAGGVKKPHRYRPGTVALREIRRYQKSTELLIRKLPFQRLVREIAQDFKTDLRFQSSAVMALQESAEAYLVGLFEDTNLCAIHAKRVTIMPKDIQLARRIRGERA

SEQ ID NO: 3232 - DNA, 411 bp, Cricetulus longicaudatus
  CDS (1)..(411)
atggcccgtacgaagcagaccgcccgcaagtccaccggcggcaaggccccgcgcaagcagctggccaccaaggccgcccgcaagagcgccccggccacgggcggcgtgaagaaaccgcaccgctaccgacccggcaccgtgacgctgcgggagatccggcgctaccagaagtcgaccgagctgctgatccgcaagctgccgttccagcgcctggtgcgcgagatcgcgcaggacttcaagacggacctgcgcttccagagctcggccgtcatggcgctgcaggaggcgagcgaggcctacctggtgggtctgttcgaggacaccaacctgtgcgccatccacgccaagcgcgtcaccatcatgcccaaggacatccagttggcccgtcgcatccgcggggagcgcgcttga

SEQ ID NO: 3233 - protein, 136 aa, Cricetulus longicaudatus
MARTKQTARKSTGGKAPRKQLATKAARKSAPATGGVKKPHRYRPGTVTLREIRRYQKSTELLIRKLPFQRLVREIAQDFKTDLRFQSSAVMALQEASEAYLVGLFEDTNLCAIHAKRVTIMPKDIQLARRIRGERA

SEQ ID NO: 3234 - DNA, 411 bp, Mus pahari
  CDS (1)..(411)
atggcccgtacgaagcagaccgcccgcaagtccaccggcggcaaggccccgcgcaagcagctggccaccaaggcggcccgcaagagcgccccgaccacgggcggcgtgaagaagccgcaccgctaccggcccggcaccgtggcgctgcgcgagatccggcgctaccagaagtcgaccgagctgctgatccgcaagctgccgttccagcgcctggtgcgcgagatcgcgcaggacttcaagacggacctgcgcttccagagctcggccgtcatggcgctgcaggaggcgagcgaggcctacctggtggggctgttcgaggacaccaacctgtgcgccatccacgccaagcgcgtcaccatcatgcccaaggacatccagttggtccgccgcatccgtggtgagcgcgcttga

SEQ ID NO: 3235 - protein, 136 aa, Mus pahari
MARTKQTARKSTGGKAPRKQLATKAARKSAPTTGGVKKPHRYRPGTVALREIRRYQKSTELLIRKLPFQRLVREIAQDFKTDLRFQSSAVMALQEASEAYLVGLFEDTNLCAIHAKRVTIMPKDIQLVRRIRGERA

SEQ ID NO: 3236 - DNA, 411 bp, Homo sapiens
  CDS (1)..(411)
atggctcgtacaaagcagactgccctcaaatcgaccggtggtaaagcacccaggaagcaactggctacaaaagccgctcgcaagagtgcgccctctactggaggggtgaagaaacctcatcgttacaggcctggtactgtggcgctccgtgaaattagacgttatcagaagtccactgaacttctgattcgcaaacttcccttccagcgtctggtgcgagaaattgctcaggactttaaaacagatctgcgcttccagagcgcagctatcggtgctttgcaggaggcaagtgaggcctatctggttggcctttttgaagacaccaacctgtgtgctatccatgccaaacgtgtaacaattatgccaaaagacatccagctagcacgccgcatacgtggagaacgtgcttaa

SEQ ID NO: 3237 - protein, 136 aa, Homo sapiens [sequence omitted]

SEQ ID NO: 3238 - DNA, 420 bp, Homo sapiens
  CDS (1)..(420)
atgttagccatggcacgaacaaagcaaacagctcgcaagtccaccggcggcaaagcgccgcgcaagcagctggccaccaaggcggctcgcaagagcgctccggccaccggtggcgtcaagaagccccaccgctaccgccccggcaccgtggccctgcgcgagatccgccgctaccagaagtcgaccgagctgctaatccggaagctaccttttcagcgcttggtacgggagatcgcacaggactttaagaccgatctgcgcttccagagctcggcggtgatggcgctgcaggaggcttgcgaggcctacctggtggggctatttgaggataccaacctgtgcgccattcacgccaaacgcgtcactattatgcctaaagacatccagcttgcgcgccgcatccgaggggagagggcataa

SEQ ID NO: 3239 - protein, 139 aa, Homo sapiens
MLAMARTKQTARKSTGGKAPRKQLATKAARKSAPATGGVKKPHRYRPGTVALREIRRYQKSTELLIRKLPFQRLVREIAQDFKTDLRFQSSAVMALQEACEAYLVGLFEDTNLCAIHAKRVTIMPKDIQLARRIRGERA

SEQ ID NO: 3240 - DNA, 411 bp, Plasmodium falciparum
  CDS (1)..(411)
atggcacgaactaaacaaacagctagaaaatcaactgctggtaaagccccaaggaagcaattagcttcaaaagcagcaaggaaatcagctccaatctctgctggtattaaaaagccacacagatatagaccaggaactgtagctttaagagaaattagaagatatcaaaaatctactgatcttttaataagaaaattaccattccaaagattagtaagagaaattgctcaagattataaaactgacttaagattccaatcttcagcagtaatggcccttcaagaagctgcagaagcttacttagttggtctttttgaagataccaacttatgtgccattcacgcaaaaagagttaccattatgccaaaagatatccaattagccagacgtattcgtggagaaagatcttaa

SEQ ID NO: 3241 - protein, 136 aa, Plasmodium falciparum
MARTKQTARKSTAGKAPRKQLASKAARKSAPISAGIKKPHRYRPGTVALREIRRYQKSTDLLIRKLPFQRLVREIAQDYKTDLRFQSSAVMALQEAAEAYLVGLFEDTNLCAIHAKRVTIMPKDIQLARRIRGERS

SEQ ID NO: 3242 - DNA, 411 bp, Homo sapiens
  CDS (1)..(411)
atggcacgaacaaagcaaacagctcgcaagtccaccggcggcaaagcgccgcgcaagcagctggccaccaaggcggctcgcaagagcgctccggccaccggtggcgtcaagaagccccaccgctaccgccccggcaccgtggccctgcgcgagatccgccgctaccagaagtcgaccgagctgctaatccggaagctaccttttcagtgcttggtacgggagatcgcacaggactttaagaccgatctgcgcttccagagctcggcggtgatggcgctgcaggaggcttgcgaggcctacctggtggggctatttgaggataccaacctgtgcgccattcacgccaaacgcgtcactattatgcctaaagacatccagcttgcgcgccgcatccgaggggagagggcataa

SEQ ID NO: 3243 - protein, 136 aa, Homo sapiens [sequence omitted]

SEQ ID NO: 3244 - DNA, 411 bp, Chinchilla lanigera
  CDS (1)..(411)
atggcccgaaccaagcagactgctcgtaagtccactggtgggaaagccccccgaaaacagctggccactaaagctgccaggaaaagcgctccctctaccggcggggtgaagaaacctcatcgctacaggcctggtaccgtggcgcttcgagagattcgtcgttaccagaagtcgaccgagcttctcattcggaagctgcctttccagaggttggtgagagagattgcccaggatttcaagaccgacttgaggtttcagagtgcagccattggtgctcttcaggaggcgagtgaagcatacctggtgggcttatttgaagatactaatctgtgtgccatccacgctaagagagtcaccatcatgcccaaagacatccagttggcccgccggatgcggggagagagagcttaa

SEQ ID NO: 3245 - protein, 136 aa, Chinchilla lanigera
MARTKQTARKSTGGKAPRKQLATKAARKSAPSTGGVKKPHRYRPGTVALREIRRYQKSTELLIRKLPFQRLVREIAQDFKTDLRFQSAAIGALQEASEAYLVGLFEDTNLCAIHAKRVTIMPKDIQLARRMRGERA

SEQ ID NO: 3246 - DNA, 411 bp, Mytilus chilensis
  CDS (1)..(411)
atggctcgtacaaagcagaccgcccgtaaatccactggaggaaaagctccaagaaaacaacttgccaccaaggccgcccgtaagagcgcacctgccactggtggagttaagaagccacatagatacaggccaggaacagtcgctcttcgtgagatcagaagataccagaaaagtactgaactcctcatcaggaaactccccttccagagattagttcgtgaaattgctcaagacttcaagactgatcttcgtttccagagctctgccgttatggccctccaggaagccagtgaagcttacctcgttggtcttttcgaggacaccaacttgtgtgcaatccacgccaagagagtcaccataatgcccaaagacatccagttggttcgcagaatccgtggagaacgggcttaa

SEQ ID NO: 3247 - protein, 136 aa, Mytilus chilensis
MARTKQTARKSTGGKAPRKQLATKAARKSAPATGGVKKPHRYRPGTVALREIRRYQKSTELLIRKLPFQRLVREIAQDFKTDLRFQSSAVMALQEASEAYLVGLFEDTNLCAIHAKRVTIMPKDIQLVRRIRGERA

SEQ ID NO: 3248 - DNA, 411 bp, Mytilus californianus
  CDS (1)..(411)
atggctcgtacaaagcagaccgcccgtaaatccactggaggaaaagctccaagaaaacaacttgccaccaaggccgcccgtaagagcgcacctgccactggtggagttaagaagccacatagatacaggccaggaacagtcgctcttcgtgagatcagaagataccagaaaagtactgaactcctcatcaggaaactccccttccagagattagttcgtgaaattgctcaagacttcaagactgatcttcgtttccagagctctgccgttatggccctccaggaagccagtgaagcttacctcgttggtcttttcgaggacaccaacttgcgtgcaatccacgccaagagagtcaccatcatgcccaaagacatccagttggctcgcagaatccgtggagaacgtgcttaa

SEQ ID NO: 3249 - protein, 136 aa, Mytilus californianus
MARTKQTARKSTGGKAPRKQLATKAARKSAPATGGVKKPHRYRPGTVALREIRRYQKSTELLIRKLPFQRLVREIAQDFKTDLRFQSSAVMALQEASEAYLVGLFEDTNLRAIHAKRVTIMPKDIQLARRIRGERA

SEQ ID NO: 3250 - DNA, 411 bp, Drosophila persimilis
  CDS (1)..(411)
atggctcgtaccaagcagactgctcgtaaatcgactggtggcaaggcgccgcgcaaacaactggctaccaaggccgcacgtaaaagtgctccagcaaccggaggcgtgaagaaacctcatcgctatcgccccggcactgttgccctccgtgaaatccgtcgctaccagaagagtaccgagctgctgatccgcaaactgcctttccagcgtttggttcgtgaaatcgctcaggatttcaaaactgacttgcgtttccagagctcggcagtaatggcactccaggaagctagcgaagcctatctggtcggtctcttcgaagataccaacttgtgcgccatccatgccaagcgtgtcacaatcatgcccaagggcatccaactggccagacgtatccgtggcgagcgtgcttaa

SEQ ID NO: 3251 - protein, 136 aa, Drosophila persimilis
MARTKQTARKSTGGKAPRKQLATKAARKSAPATGGVKKPHRYRPGTVALREIRRYQKSTELLIRKLPFQRLVREIAQDFKTDLRFQSSAVMALQEASEAYLVGLFEDTNLCAIHAKRVTIMPKGIQLARRIRGERA

SEQ ID NO: 3252 - DNA, 411 bp, Drosophila pseudoobscura
  CDS (1)..(411)
atggcccgtaccaagcagactgctcgtaaatcgactggtggcaaggcgccgcgcaaacaactggctaccaaggccgcacgtaaaggtgctccagcaaccggaggcgtgaagaaacctcatcgctatcgccccggcactgttgccctccgtgaaatccgtcgctaccagaagagtaccgagctgctgatccgcaaactgcctttccagcgtttggttcgtgaaatcgctcaggatttcaaaactgacttgcgtttccagagctcagcagtaatggcactccaggaagctagcgaagcctatctggtcggtctcttcgaagataccaacttgtgcgccatccatgccaagcgtgtcacaatcatgcccaaggacatccaactggccagacgtatccgtggcgagcgtgcttaa

SEQ ID NO: 3253 - protein, 136 aa, Drosophila pseudoobscura
MARTKQTARKSTGGKAPRKQLATKAARKGAPATGGVKKPHRYRPGTVALREIRRYQKSTELLIRKLPFQRLVREIAQDFKTDLRFQSSAVMALQEASEAYLVGLFEDTNLCAIHAKRVTIMPKDIQLARRIRGERA

SEQ ID NO: 3254 - DNA, 411 bp, Griffithsia japonica
  CDS (1)..(411)
atggctcgtaccaagcaaaccgcccgtaagtccacagggggcaaggccccccgcaagcagctggccaccaaggctgcccgcaagtctgcccccgcctccggcggtgtcaagaagccgcatcgcttcaggcccggtaccgtcgccctccgtgaaatccgcaagttccaaaagtccacggagctgctcgtccgcaagctgcccttccaacgcctcgtccgtgagattgcacaggacttcaagtccgaccttcgctttcagagctcggccgtcctcgctctccaagaagccgctgaggcctacatggtcggtctgttcgaggacaccaacttgtgcgccattcacgcaaagcgggtcaccatcatgcccaaggacatccagcttgcaaggaggattcgtggtgagcgtacctag

SEQ ID NO: 3255 - protein, 136 aa, Griffithsia japonica
MARTKQTARKSTGGKAPRKQLATKAARKSAPASGGVKKPHRFRPGTVALREIRKFQKSTELLVRKLPFQRLVREIAQDFKSDLRFQSSAVLALQEAAEAYMVGLFEDTNLCAIHAKRVTIMPKDIQLARRIRGERT

SEQ ID NO: 3256 - DNA, 411 bp, Toxoplasma gondii
  CDS (1)..(411)
atggcgcgcaccaagcagaccgcgagaaaatccaccggtgggaaagccccccgcaagcagctggcttccaaggcagcgcgcaagtctgcccccatgagcggaggcatcaagaagccgcacagataccgcccgggaaccgtcgccctccgtgaaattcgcagataccagaagtccactgaccttctcatccgcaagctccctttccagagacttgtgcgtgagatcgcccaggacttcaagaccgatctgcgtttccagtcgtccgctgtccttgctctccaggaagccgctgaggcttacctcgtcgggctcttcgaggacaccaacttgtgcgccatccacgccaagcgtgtcaccatcatgcccaaggacattcagctcgctcgccgcatccgtggtgaacggtcttaa

SEQ ID NO: 3257 - protein, 136 aa, Toxoplasma gondii
MARTKQTARKSTGGKAPRKQLASKAARKSAPMSGGIKKPHRYRPGTVALREIRRYQKSTDLLIRKLPFQRLVREIAQDFKTDLRFQSSAVLALQEAAEAYLVGLFEDTNLCAIHAKRVTIMPKDIQLARRIRGERS

SEQ ID NO: 3258 - DNA, 411 bp, Oikopleura dioica
  CDS (1)..(411)
atggcccgaaccaagcaaaccgctcgcaagtcaacaggaggtaaagctccacgaaagcagctggccaccaaagctgctcgaaaatctgccccagcaactggaggagtcaagaagccccaccgataccgacctggtaccgtcgctctccgagagatccgacgataccaaaaatccaccgagcttctcatccgaaagttgcccttccagcgactcgtccgagaaatcgcacaggacttcaaaaccgacctccgcttccagtcttccgccgtcatggctcttcaggaagcatccgaggcttaccttgtcgggctttttgaggatacccacttgtgcgcaattcacgctaagcgagttacgatcatgccaaaggacatccagctcgccagacgaatccgaggagaacgtgcttaa

SEQ ID NO: 3259 - protein, 136 aa, Oikopleura dioica
MARTKQTARKSTGGKAPRKQLATKAARKSAPATGGVKKPHRYRPGTVALREIRRYQKSTELLIRKLPFQRLVREIAQDFKTDLRFQSSAVMALQEASEAYLVGLFEDTHLCAIHAKRVTIMPKDIQLARRIRGERA

SEQ ID NO: 3260 - DNA, 411 bp, Toxoplasma gondii
  CDS (1)..(411)
atggcgcgaactaagcagactgcacgtaaatcgacaggcgggaaggctcctaggaagcagctggcatcgaaggcagcgcggaagagcgctccgatgtcaggcggtatcaagaagccgcacagatacagacccggtaccgtggccctgcgtgaaatcaggaaatttcagaagagcacggatctcctcatccgcaagttgcccttccagcgcttggtccgagagattgcccaggatttcaagacggatcttcgatttcagtcccaagcaatccttgctctgcaggaagcggcggaagcgtacttggttggattattcgaagacaccaatctgtgcgcgattcacgcgaagcgcgttactatcatgcccaaggacattcagctggcgaggcgaatccgaggcgagaggtcttaa

SEQ ID NO: 3261 - protein, 136 aa, Toxoplasma gondii
MARTKQTARKSTGGKAPRKQLASKAARKSAPMSGGIKKPHRYRPGTVALREIRKFQKSTDLLIRKLPFQRLVREIAQDFKTDLRFQSQAILALQEAAEAYLVGLFEDTNLCAIHAKRVTIMPKDIQLARRIRGERS

SEQ ID NO: 3262 - DNA, 411 bp, Eimeria tenella
  CDS (1)..(411)
atggcgcgaaccaaacagacggcgcgcaagtccaccggcggcaaggccccccgcaaacaactcgcctccaaggccgcccgcaagtccgcccccgtcgccggaggcatcaaaaagccccacaggtaccgccccggcaccgtcgccctccgcgaaatccgcaggtaccaaaaaagcacggacctgctgattcgcaagctgcctttccagcggctggtccgcgagatcgcgcaggacttcaagacggacttgcgtttccagtcctccgcggtgctcgcgctgcaggaggctgcggaggcgtacctcgtgggtcttttcgaagacacaaacttgtgcgccatccacgcaaagcgcgtcacaatcatgccaaaggacatccaactggcccgcagaatccggggcgaacgctcgtaa

SEQ ID NO: 3263 - protein, 136 aa, Eimeria tenella
MARTKQTARKSTGGKAPRKQLASKAARKSAPVAGGIKKPHRYRPGTVALREIRRYQKSTDLLIRKLPFQRLVREIAQDFKTDLRFQSSAVLALQEAAEAYLVGLFEDTNLCAIHAKRVTIMPKDIQLARRIRGERS

SEQ ID NO: 3264 - DNA, 411 bp, Xenopus laevis
  CDS (1)..(411)
atggctcgtactaagcagaccgcccgcaagtccaccggagggaaagctccccgcaagcagttggccactaaagcagccaggaagagcgctccggccactggtggagtcaagaagccgcatcgttatcgaccagggacagtcgctctccgagaaatccgccgttaccagaaatccaccgaactgctgattcgcaagttgcctttccagcgcctggtccgtgagatcgctcaggatttcaagaccgacctgcggttccagagctcggccgtcatggctctgcaggaggccagcgaggcttatctggtcggtttgtttgaggacaccaatctgtgcggcatccacgccaagagggtcaccatcatgcccaaggacatccagctggcccgcaggatccgaggcgagagggcttag

SEQ ID NO: 3265 - protein, 136 aa, Xenopus laevis
MARTKQTARKSTGGKAPRKQLATKAARKSAPATGGVKKPHRYRPGTVALREIRRYQKSTELLIRKLPFQRLVREIAQDFKTDLRFQSSAVMALQEASEAYLVGLFEDTNLCGIHAKRVTIMPKDIQLARRIRGERA

SEQ ID NO: 3266 - DNA, 411 bp, Trichinella spiralis
  CDS (1)..(411)
atggcgcgtacgaaacaaaccgcacgaaaaagtactggtggtaaggcccctcgcaaacagttggctactaaggcagctcgaaagtccgcacccagtgctggtggagtgaagaagccgcatcgctatcgtccaggtactgtggctcttcgggaaattcgacgctaccaaaaaagcactgaattgttgatccgaaagctgcccttccaacgtttggttcgtgaagttgctcaagattacaagactgacttgcgattccaatcgtcggcagttttggctttacaagaagcagctgaagcttatcttgtgggtctgttcgaagacacaaacttgtgcgctattcacgccaagcgtgtcaccatcatgcccaaagatattcagttggctcgtcgtatacgcggcgaacgcgcctaa

SEQ ID NO: 3267 - protein, 136 aa, Trichinella spiralis
MARTKQTARKSTGGKAPRKQLATKAARKSAPSAGGVKKPHRYRPGTVALREIRRYQKSTELLIRKLPFQRLVREVAQDYKTDLRFQSSAVLALQEAAEAYLVGLFEDTNLCAIHAKRVTIMPKDIQLARRIRGERA

SEQ ID NO: 3268 - DNA, 411 bp, Drosophila erecta
  CDS (1)..(411)
atggcccgtacgaagcaaactacacgcaaatcgactggtggaaaagcgccacgcaaacaactggctactaaggccgctcgcaagagtgcccctgcgaccggaggtgtgaagaagccccatcgctatcgccctggaacagtggccttgcgtgagatccgtcggtaccaaaagagcactgagcttttgatccgcaaactgccttttcagcgtctggtgcgtgaaatcgctcaggattttaagactgatttgcgattccagagctcggcggttatggccctgcaagaagctagcgaagcctatctggttggtctctttgaagataccaacttgtgtgccattcatgccaagcgtgtcaccattatgcccaaggacatccaattagcgcgacgcatccgcggcgagcgtgcttaa

SEQ ID NO: 3269 - protein, 136 aa, Drosophila erecta
MARTKQTTRKSTGGKAPRKQLATKAARKSAPATGGVKKPHRYRPGTVALREIRRYQKSTELLIRKLPFQRLVREIAQDFKTDLRFQSSAVMALQEASEAYLVGLFEDTNLCAIHAKRVTIMPKDIQLARRIRGERA

SEQ ID NO: 3270 - DNA, 411 bp, Bos taurus
  CDS (1)..(411)
atggctcgtacgaagcaaacagctcgcaagtctaccggcggcaaagctccgcgcaagcagcttgctactaaagcagcccgtaagagcgctccggccaccggtggcgtgaagaaacctcatcgctaccgcccgggcaccgtggccttgcgcgaaatccgtcgctaccagaagtccaccgagctgctgatccggaagctgccgttccagcgcctggtgcgagaaatcgcccaggacttcaaaaccgacctgcgtttccagagctctgcggtgatggcgctgcaggaggcttgtgaggcctacctggtgggactcttcgaagacaccaatctgtgcgctattcacgctaaacgcgtcaccatcatgcccaaagatatccagctggcacgtcgcatccgtggggaaagggcataa

SEQ ID NO: 3271 - protein, 136 aa, Bos taurus
MARTKQTARKSTGGKAPRKQLATKAARKSAPATGGVKKPHRYRPGTVALREIRRYQKSTELLIRKLPFQRLVREIAQDFKTDLRFQSSAVMALQEACEAYLVGLFEDTNLCAIHAKRVTIMPKDIQLARRIRGERA

SEQ ID NO: 3272 - DNA, 411 bp, Gallus gallus
  CDS (1)..(411)
atggcaagaaccaagcagaccgcccgtaaatccactggaggcaaagccccaaggaagcagctcgccaccaaagcagctcgcaagagtgctcctgccaccggtggagtcaagaagcctcaccgttacaggcccggtaccgtggcactgcgagaaatccgtcgttaccagaagtccactgagctgctgatccgcaaactgcccttccagcgtctggtccgtgaaatcgctcaggacttcaagacggatctgcgcttccagagctccgccgtcatggctcttcaggaggcaagcgaggcttatctggtcggtctgttcgaggacaccaacctgtgcgccatccacgccaagagggtcaccatcatgcccaaagacatccagctggcccgccgcatccgcggagagcgcgcttaa

SEQ ID NO: 3273 - protein, 136 aa, Gallus gallus [sequence omitted]

SEQ ID NO: 3274 - DNA, 741 bp, Zea mays
  CDS (59)..(469)
ttcgaaacaccctcgcacccacactctcccttcgtccccagcctaaatccccgcaaagatggctcgcacgaagcagacggcgcgcaagtccacgggcggcaaggccccgaggaagcagctggcgaccaaggcggcgcgcaagtcggcccctgcgaccggcggcgtgaagaagccgcaccgcttccgcccgggcaccgtggcgctgcgcgagatccgcaagtaccagaagagcacggagctgctcatccgcaagctgcccttccagcgcctggtccgcgagatcgcgcaggacttcaagaccgacctccgcttccagtcctccgccgtcgccgcgctgcaggaggctgccgaggcctacctcgtcggcctgtttgaggacaccaacctctgcgccatccacgccaagcgcgtcaccatcatgcccaaggacatccagctcgcccgccgcatccgcggggagcgcgcataggcggcccgccggataggccggtggcccgttgcgcagtctcttctcggaagtttgtactagtggtcgggtcgtgtggaaggagtggtgtactgatctgcaatgtctcaaaccatgtcaacctctttgttgtcatcaatggaaatcgctacttatgtgtgctaatcttcgtgctgcgtttgtttcgtagtaacacaattcgatggattcgtacctgtgaacaatcgattcatatcgtcaccagatgcgaaattggcagtttgtgttcaaatttc

SEQ ID NO: 3275 - protein, 136 aa, Zea mays; identical to SEQ ID NO: 2331

SEQ ID NO: 3276 - DNA, 411 bp, Medicago sativa
  CDS (1)..(411)
atggcccgcaccaagcagacggcgaggaagtccaccggcggcaaggcgccgaggaagcagctggcgaccaaggccgcccgcaagtccgccccggccaccggcggcgtcaagaagccccaccgcttccgccccggcaccgtcgcgctccgcgagatccgcaagtaccagaagagcaccgagctgctcatccgcaagctccccttccagcgcctcgtccgcgagatcgcccaggacttcaagaccgacctccgcttccagtcctccgccgtctccgccctgcaggaggccgccgaggcgtacctggtggggctcttcgaggacaccaacctctgcgccatccacgccaagcgcgtcaccatcatgcccaaggacatccagctcgcacgccgcatccgtggcgagagggcctaa

SEQ ID NO: 3277 - protein, 136 aa, Medicago sativa; identical to SEQ ID NO: 2309

SEQ ID NO: 3278 - DNA, 411 bp, Schizosaccharomyces pombe
  CDS (1)..(411)
atggctcgtaccaagcaaactgctcgtaaatctaccggtggtaaggcaccccgtaagcaattggcctctaaggctgcccgtaaggccgctcccgctactggcggtgtcaagaagcctcatcgttatcgtcctggtactgtcgctcttcgtgaaatccgtcgttaccaaaagtctactgaattgttgattcgcaaacttcccttccaacgtttggtccgtgaaattgcccaagattttaagactgacttgcgtttccaatcctccgcaattggtgctcttcaagaagctgtcgaggcttatcttgtctctctcttcgaagataccaatctttgcgctatccatggcaagcgtgttaccattcaacccaaggatatgcaattggcccgtcgtcttcgtggcgaacgctcttaa

SEQ ID NO: 3279 - protein, 136 aa, Schizosaccharomyces pombe; identical to SEQ ID NO: 3173

SEQ ID NO: 3280 - DNA, 711 bp, Oryza sativa
  CDS (231)..(641)
ggatccaatctgcaccgtccattcgcacgcaatccaacgccgctgattccccgcggccaaaatccaaaccaaaaaattttcgcgctctcaaattccaaaccccagcctccccctatataaacgccgctcgcctccctcgctgtctcaacccactccgccgccgccgacttcgccgcgaaatttctcaaactcccaaagctcctccgcgtcaagctctcctctcctcctcgatggcccgcacgaagcagacggcgcgcaagtccaccggcgggaaggcgccgaggaagcagctggcgaccaaggcggcgcgcaagtcggcgccggccaccggcggcgtgaagaagccgcaccgcttcaggccgggcaccgtcgcgctccgtgagatccgcaagtaccagaagagcacggagctgctcatccgcaagctccccttccagcgcctcgtccgcgagatcgcccaggacttcaagaccgacctccgcttccagacgtccgccgtccgcgcgctgcaggaggccgcggagcggtacctcgtcgggctcttcgaggacactaacctgtgcgccatccacgccaagcgcgtcaccatcatgcccaaggacatccagctcgcccgccgcatccgcggtgagcgcgcctgattaatttattagtcgcttcatctgtgatagctctagtaccagaattgcttagtagtagtgatgtaatggc

SEQ ID NO: 3281 - protein, 136 aa, Oryza sativa; identical to SEQ ID NO: 3207

SEQ ID NO: 3282 - DNA, 592 bp, Caenorhabditis elegans
  CDS (22)..(432)
ttcaggtgaaccagaattgaaatggctcgtaccaagcaaaccgcgcgtaaatcaactggaggaaaagctcctcgcaagcagctggccactaaggcggctcgcaagtcagctccaactaccggaggtgtcaagaaaccacatcgttatcgtccaggaaccgtcgctcttcgtgagattcgtcgttaccaaaagtccaccgagcttctcatccgcaagcttccattccaacgtcttgttcgtgaaatcgctcaagatttcaagaccgatctccgtttccaatccgccgccatcggagctctgcaagaggcttctgaggcctacctcgttgggctcttcgaagacaccaacttgtgcgcaatccacgccaaacgtgtcaccatcatgccaaaggacatccagcttgctcgacgcatccgtggagaacgtgcataaacgttgagctgtttcgccaatctctctgaataatctattatgtatctctcaatgtactaaaatcttccatctcttaacttaatctctcttttattctagccgagagtgcatgttattctatgttattttttttacaaaaaagtaataaacgtaaatattt

SEQ ID NO: 3283 - protein, 136 aa, Caenorhabditis elegans; identical to SEQ ID NO: 3171

SEQ ID NO: 3284 - DNA, 411 bp, Gallus gallus
  CDS (1)..(411)
atggcccgaaccaagcagactgctcgtaagtccaccggtgggaaagccccccgcaaacagctggccacgaaagccgccaggaaaagcgctccctctaccggcggggtgaagaagcctcatcgctacaggcccgggaccgtggcgcttcgagagattcgtcgttatcagaagtcgaccgagctgctcatccggaagctgcccttccagaggttggtgagggagatcgcgcaggatttcaaaaccgacctgaggtttcagagcgcagccatcggtgcgctgcaggaggctagcgaagcgtacctggtgggtctgttcgaagataccaacctgtgtgccatccacgctaagagagtcaccatcatgcccaaagacatccagttggctcgccggatacggggagagagagcttaa

SEQ ID NO: 3285 - protein, 136 aa, Gallus gallus; identical to SEQ ID NO: 3175

SEQ ID NO: 3286 - DNA, 411 bp, Schizosaccharomyces pombe
  CDS (1)..(411)
atggctcgtactaagcaaactgcacgtaaatcaactggtggtaaggctcctcgtaagcaacttgcctctaaggctgcccgtaaggctgctcccgctactggtggtgttaagaagcctcatcgttatcgtccccctacagtcgctcttcgtgaaattcgtcgttatcaaaagtctactgaacttttgattcgtaagctacctttccaacgcttggtccgtgaaatcgcccaagatttcaagactgacttgcgtttccagtcttctgccattggtgctctccaagaagctgttgaggcctatcttgtctctctatttgaagacactaacttgtgtgctattcacggaaagcgtgtaactattcaacccaaggatatgcaattggctcgtcgtcttcgcggtgaacgctcataa

SEQ ID NO: 3287 - protein, 136 aa, Schizosaccharomyces pombe
MARTKQTARKSTGGKAPRKQLASKAARKAAPATGGVKKPHRYRPPTVALREIRRYQKSTELLIRKLPFQRLVREIAQDFKTDLRFQSSAIGALQEAVEAYLVSLFEDTNLCAIHGKRVTIQPKDMQLARRLRGERS

SEQ ID NO: 3288 - DNA, 733 bp, Trichinella pseudospiralis
  CDS (145)..(555)
gattgccaaagtgtttggagctggtgagcgtcggttttggttatggctctggtgatatttgtgctttttttcattttgatgtcgtggttgttgtcatcatcgtcgtttggcattggtttcggtgcctggttcaaatgaagcgaaatggctcgtacgaagcaaactgcacgcaaatcgaccggaggaaaagctcctcgtaaacagttggcgacgaaagcggcgcgtaaatctgcgccctctaccggaggcgtgaagaaaccgcatcgctatcgtccgggaactgttgcattgcgtgaaattcgtcgttatcagaaatccactgagcttctgattcgtaaacttccgttccaacgtttggtccgtgaaattgcgcaagatttcaaaaccgacttgcgttttcaatcggcggcaattggcgcattgcaggaggcagctgaagcttacttggttggcttgtttgaagataccaacttgtgcgctattcacgctaagcgcgtcaccatcatgccgaaggacatccagttggcacgacgtattcgtggcgaacgtgcttgaagatactattatttatcataattatatttattaataatcatgtgtgtttatccccataatctataatagtgttagttataaataattgtacgcatttattatacgtacagttatttagatgttaatgtttaagcaaaattatttaactttgtggtgcggtttaaaaaaaaaaaaaaaa

SEQ ID NO: 3289 - protein, 136 aa, Trichinella pseudospiralis
MARTKQTARKSTGGKAPRKQLATKAARKSAPSTGGVKKPHRYRPGTVALREIRRYQKSTELLIRKLPFQRLVREIAQDFKTDLRFQSAAIGALQEAAEAYLVGLFEDTNLCAIHAKRVTIMPKDIQLARRIRGERA

SEQ ID NO: 3290 - DNA, 411 bp, Homo sapiens
  CDS (1)..(411)
atggctcgtaccaagcagactgctcgcaagtccacgggtgggaaagcgccacgcaagcagctggccaccaaggctgctcgaaagagcgctccagccaccggcggcgtgaagaagccccaccgttaccggcccggcacggtggctctgcgcgagatccgccgctaccagaagtcgaccgagctgctgattcgcaaactgccattccagcgtctagtccgtgagatcgcgcaggacttcaagactgatctgcgttttcagagctcggcggtgatggcgctgcaggaggcctgcgaggctaccctggtggggctgtttgaggacaccaacctatgcgccattcacgccaagcgagtgactatcatgccgaaggacatccagcttgctcgccgcattcgtggggagagggcgtaa

SEQ ID NO: 3291 - protein, 136 aa, Homo sapiens [sequence omitted]

SEQ ID NO: 3292 - DNA, 411 bp, Acropora formosa
  CDS (1)..(411)
atggcacgaacaaagcaaacagcacgaaagtcaacgggcggtaaagcaccgcgaaaacaactcgctacgaaggcggctgccaagagcgctcctgctacgggtggagtgaaaaagcctcatcgttatagacccggtacagtggctctacgggaaattcgtcgttaccagaaatctacagagttgctgattcgaaagttgccgttccagcgcctcgtgcgagaaattgcccaggacttcaagactgacttgcggttccaaagttcggctgtgttggctctccaggaggccagtgaagcttacttggtcggtcttttcgaggacactaacctgtgtgcaattcacgccaagcgtgttaccatcatgccgaaggatatacagcttgctcgccgaattcggggagagcgtgcctaa

SEQ ID NO: 3293 - protein, 136 aa, Acropora formosa
MARTKQTARKSTGGKAPRKQLATKAAAKSAPATGGVKKPHRYRPGTVALREIRRYQKSTELLIRKLPFQRLVREIAQDFKTDLRFQSSAVLALQEASEAYLVGLFEDTNLCAIHAKRVTIMPKDIQLARRIRGERA

SEQ ID NO: 3294 - DNA, 411 bp, Aspergillus fumigatus
  CDS (1)..(411)
atggccagaactaagcagactgcccgtaagtccactggtggcaaggcccctcgtaagcagctcgcctccaaggccgcccgtaaggctgctccctctaccggaggtgtcaagaagcctcaccgttacaagcctggtaccgtcgctctccgtgagatccgtcgctaccagaagtccaccgagcttctgatccgcaagctccccttccagcgtctggtccgtgaaatcgcccaggatttcaagtccgacctccgtttccagtcctccgccatcggtgctctccaggagtccgttgaggcctacctcgtctctcttttcgaggacaccaacctctgcgccatccacgccaagcgtgttaccatccagtccaaggacatccagctcgcccgccgtctccgtggtgagcgctcttag

SEQ ID NO: 3295 - protein, 136 aa, Aspergillus fumigatus
MARTKQTARKSTGGKAPRKQLASKAARKAAPSTGGVKKPHRYKPGTVALREIRRYQKSTELLIRKLPFQRLVREIAQDFKSDLRFQSSAIGALQESVEAYLVSLFEDTNLCAIHAKRVTIQSKDIQLARRLRGERS

SEQ ID NO: 3296 - DNA, 435 bp, Griffithsia japonica
  CDS (25)..(435)
ccttcaagtctctcccaatcacccatggctcgtaccaagcaaaccgcccgcaagtctacgggaggcaaggcgcctcgcaaacaactcgctaccaaggccgctcgcaagtcagcacctgcctccggcggtgtcaagaagccgcatcgcttcaggcccggtaccgttgctctccgtgaaatccgtcgcttccaaaagtcgaccgagctcctcgtccgcaagcttcctttccaacgtctggtccgtgagatcgcccaggacttcaagtcggaccttcgcttccaaagctcagccgtgctcgcccttcaggaggctgcagaagcgtacatggtcggtctgtttgaggataccaacttatgtgccatccatgccaagagggtgactatcatgcccaaggatattcagctggctcgcaggattcgtggtgagaggacataa

SEQ ID NO: 3297 - protein, 136 aa, Griffithsia japonica
MARTKQTARKSTGGKAPRKQLATKAARKSAPASGGVKKPHRFRPGTVALREIRRFQKSTELLVRKLPFQRLVREIAQDFKSDLRFQSSAVLALQEAAEAYMVGLFEDTNLCAIHAKRVTIMPKDIQLARRIRGERT

SEQ ID NO: 3298 - DNA, 739 bp, Marchantia polymorpha
  CDS (97)..(507)
ttcccacatccatccatcaaccacatcgcggtcattccatttccaatacaacaacaatttcatcaacccactccgataactttatcatcaatcacaatggcccgcactaagcagaccgcccgcaagtccactggtggcaaggcccctcgcaagcagcttgcctccaaggctgcccgcaagtcggccccgtcgaccggcggtgtcaagaagcctcaccgttacaagcccggtaccgtcgctcttcgtgagattcgtcgctaccagaagtcgactgagctgctcatccgcaagctccccttccagcgtctggttcgcgaaatcgctcaggacttcaagtccgacctccgcttccagagctccgccattggtgccctccaggagtccgtcgagtcttacctcgtctctctcttcgaggacaccaacctgtgcgccatccacgccaagcgtgtcaccatccagtcgaaggacatccagctcgctcgtcgcctccgcggtgagcgcaactaagcatagttgcttgactctttgctagttttgggggttcgcaggttatgactttctcattgggacgcgctctggatgaaggggctcattcacgggacaagggacggcgtttaattgcgatgggtttttgctctatggggttgtacattacatggtggcaaacggactgctgcgaatatccacgttgacttcatgatcaaaaaaaaaaaaaaaaaaaaaaaaaaaaaaaaaaaaa

SEQ ID NO: 3299 - protein, 136 aa, Marchantia polymorpha; identical to SEQ ID NO: 2311

SEQ ID NO: 3300 - DNA, 411 bp, Mortierella alpina
  CDS (1)..(411)
atggctcgtaccaagcagaccgcccgcaagtccaccggaggaaaggctcctcgcaagcagctcgccaccaaggccgctcgcaagtctgcccccgctaccggaggtgtcaagaagccccatcgttaccgccccggtaccgtcgctcttcgtgagatccgtcgctaccaaaagtcgaccgagctcttgatccgcaagcttcccttccagcgtctcgtccgcgagattgcccaggacttcaagaccgaccttcgtttccagtcctcggccatcggtgccctccaggaggcctccgaggcctacctcgtctcgctctttgaagataccaacttggctgccatccacgccaagcgtgtcaccatccagcccaaggacatccacttggcccgtcgcctccgtggtgagcgcacctaa

SEQ ID NO: 3301 - protein, 136 aa, Mortierella alpina
MARTKQTARKSTGGKAPRKQLATKAARKSAPATGGVKKPHRYRPGTVALREIRRYQKSTELLIRKLPFQRLVREIAQDFKTDLRFQSSAIGALQEASEAYLVSLFEDTNLAAIHAKRVTIQPKDIHLARRLRGERT

SEQ ID NO: 3302 - DNA, 411 bp, Strongylocentrotus purpuratus
  CDS (1)..(411)
atggcccgtaccaagcagaccgctcgcaagtccaccggaggaaaggctcctcgcaagcagctggccaccaaggcagctcgcaagtccgccccagccactggcggagtcaagaagccccatcgttacaggcccggtaccgtcgctctccgtgagatccgtcgctaccagaagagtaccgagctgctcatccgcaagctccccttccagcgtctggtccgtgagatcgctcaggacttcaagaccgagctccgtttccagagctctgccgtcatggctcttcaggaggccagcgaagcctacttggtccgtcttttcgaggacaccaacctttgcgccatccacgccaagcgtgttaccatcatgccaaaggacatccagctggcccgccgcatccgtggcgagcgagcttag

SEQ ID NO: 3303 - protein, 136 aa, Strongylocentrotus purpuratus
MARTKQTARKSTGGKAPRKQLATKAARKSAPATGGVKKPHRYRPGTVALREIRRYQKSTELLIRKLPFQRLVREIAQDFKTELRFQSSAVMALQEASEAYLVRLFEDTNLCAIHAKRVTIMPKDIQLARRIRGERA

SEQ ID NO: 3304 - DNA, 707 bp, Brassica napus; identical to SEQ ID NO: 2290
  CDS (12)..(422)

SEQ ID NO: 3305 - protein, 136 aa, Brassica napus; identical to SEQ ID NO: 2291

SEQ ID NO: 3306 - DNA, 414 bp, Unknown; identical to SEQ ID NO: 2302
  Unidentified
  CDS (1)..(411)

SEQ ID NO: 3307 - protein, 136 aa, Unknown; identical to SEQ ID NO: 2303
  Unidentified

SEQ ID NO: 3308 - DNA, 615 bp, Triticum aestivum; identical to SEQ ID NO: 2306
  CDS (20)..(451)

SEQ ID NO: 3309 - protein, 142 aa, Triticum aestivum; identical to SEQ ID NO: 2307

SEQ ID NO: 3310 - DNA, 770 bp, Hordeum vulgare; identical to SEQ ID NO: 2314
  CDS (197)..(607)

SEQ ID NO: 3311 - protein, 136 aa, Hordeum vulgare; identical to SEQ ID NO: 2315

SEQ ID NO: 3312 - DNA, 772 bp, Hordeum vulgare; identical to SEQ ID NO: 2318
  CDS (40)..(459)

SEQ ID NO: 3313 - protein, 139 aa, Hordeum vulgare; identical to SEQ ID NO: 2319

SEQ ID NO: 3314 - DNA, 477 bp, Unknown; identical to SEQ ID NO: 2324
  Unidentified
  CDS (1)..(474)

SEQ ID NO: 3315 - protein, 157 aa, Unknown; identical to SEQ ID NO: 2325
  Unidentified

SEQ ID NO: 3316 - DNA, 414 bp, Unknown; identical to SEQ ID NO: 2326
  Unidentified
  CDS (1)..(411)

SEQ ID NO: 3317 - protein, 136 aa, Unknown; identical to SEQ ID NO: 2327
  Unidentified

SEQ ID NO: 3318 - DNA, 411 bp, Zea mays; identical to SEQ ID NO: 2394
  CDS (1)..(411)

SEQ ID NO: 3319 - protein, 136 aa, Zea mays; identical to SEQ ID NO: 2395

SEQ ID NO: 3320 - DNA, 411 bp, Zea mays; identical to SEQ ID NO: 2406
  CDS (1)..(411)

SEQ ID NO: 3321 - protein, 136 aa, Zea mays; identical to SEQ ID NO: 2407

SEQ ID NO: 3322 - DNA, 781 bp, Glycine max; identical to SEQ ID NO: 2458
  CDS (8)..(484)

SEQ ID NO: 3323 - protein, 158 aa, Glycine max; identical to SEQ ID NO: 2459

SEQ ID NO: 3324 - DNA, 727 bp, Glycine max; identical to SEQ ID NO: 2468
  CDS (80)..(490)

SEQ ID NO: 3325 - protein, 136 aa, Glycine max; identical to SEQ ID NO: 2469

SEQ ID NO: 3326 - DNA, 698 bp, Triticum aestivum; identical to SEQ ID NO: 2533
  CDS (46)..(456)

SEQ ID NO: 3327 - protein, 136 aa, Triticum aestivum; identical to SEQ ID NO: 2534

SEQ ID NO: 3328 - DNA, 411 bp, Zea mays; identical to SEQ ID NO: 2581
  CDS (1)..(411)

SEQ ID NO: 3329 - protein, 136 aa, Zea mays; identical to SEQ ID NO: 2582

SEQ ID NO: 3330 - DNA, 411 bp, Zea mays; identical to SEQ ID NO: 2593
  CDS (1)..(411)

SEQ ID NO: 3331 - protein, 136 aa, Zea mays; identical to SEQ ID NO: 2594

SEQ ID NO: 3332 - DNA, 24 bp, Artificial sequence
  primer
atggccagaacaaagcaaacagca

SEQ ID NO: 3333 - DNA, 26 bp, Artificial sequence
  primer
ctatgatctttcacctcttaatcttc

SEQ ID NO: 3334 - protein, 214 aa, Artificial sequence
  consensus sequence
  Variant (10)..(11): Xaa in position 10 to 11 is any amino acid
  Variant (12)..(12): Xaa in position 12 is any or no amino acid
  Variant (24)..(30): Xaa in position 24 to 30 is any amino acid
  Variant (33)..(33): Xaa in position 33 is any amino acid
  Variant (42)..(42): Xaa in position 42 is any amino acid
  Variant (43)..(54): Xaa in position 43 to 54 is any or no amino acid
  Variant (60)..(75): Xaa in position 60 to 75 is any amino acid
  Variant (80)..(80): Xaa in position 80 is any amino acid
  Variant (84)..(84): Xaa in position 84 is any amino acid
  Variant (93)..(93): Xaa in position 93 is any amino acid
  Variant (120)..(120): Xaa in position 120 is any amino acid
  Variant (121)..(127): Xaa in position 121 to 127 is any or no amino acid
  Variant (130)..(130): Xaa in position 130 is any amino acid
  Variant (135)..(135): Xaa in position 135 is any amino acid
  Variant (137)..(138): Xaa in position 137 to 138 is any amino acid
  Variant (144)..(144): Xaa in position 144 is any amino acid
  Variant (146)..(146): Xaa in position 146 is any amino acid
  Variant (150)..(150): Xaa in position 150 is any amino acid
  Variant (168)..(168): Xaa in position 168 is any amino acid
  Variant (178)..(178): Xaa in position 178 is any amino acid
  Variant (181)..(181): Xaa in position 181 is any amino acid
  Variant (182)..(212): Xaa in position 182 to 212 is any or no amino acid
MARTKQTARXXXKSTGGKAPRKQXXXXXXXLAXKAARKSAPXXXXXXXXXXXXXTGGVKXXXXXXXXXXXXXXXXKPHRXRPGXTVALREIRXYQKSTELLIRKLPFQRLVREIAQDFKXXXXXXXXDLXRFQSXAXXALQEAXEXYLVXLFEDTNLCAIHAKRVTIXPKDIQLARRXRGXXXXXXXXXXXXXXXXXXXXXXXXXXXXXXXXER

SEQ ID NO: 3335 - DNA, 369 bp, Saccharomyces cerevisiae
  CDS (1)..(369)
atggtacccgcacctgggtcacgtgcattcccctcacccgtttttttaggtggtgtcttttttgtttttttttttaggtggcgcggcaactataaagtacagcaagtgaggttgaggcaatactgggagtttacactatgggagacagctcctaacaccaagcagaaaaacgactttttcgcaaaaacattaacatatataaaactagcgctatggccgcaactaaagaagcaaagcaaccaaaggaaccaaagaagaggaccaccaggagaaagaaggatcctaacgcccctaagaggcggttgtcagcttatatgttctttgctaatgaaaacagagacattgtccgttccgagaatcctgacgtaa

SEQ ID NO: 3336 - protein, 122 aa, Saccharomyces cerevisiae
MVPAPGSRAFPSPVFLGGVFFVFFFRWRGNYKVQQVRLRQYWEFTLWETAPNTKQKNDFFAKTLTYIKLALWPQLKKQSNQRNQRRGPPGERRILTPLRGGCQLICSLLMKTETLSVPRILT

SEQ ID NO: 3337 - DNA, 369 bp, Saccharomyces cerevisiae; identical to SEQ ID NO: 3335
  CDS (1)..(369)

SEQ ID NO: 3338 - protein, 122 aa, Saccharomyces cerevisiae; identical to SEQ ID NO: 3336

SEQ ID NO: 3339 - DNA, 21 bp, Artificial sequence
  primer
atggtacccgcacctgggtca

SEQ ID NO: 3340 - DNA, 23 bp, Artificial sequence
  primer
ttacgtcaggattctcggaacgg

SEQ ID NO: 3341 - protein, 122 aa, Artificial sequence; identical to SEQ ID NO: 3336
  consensus sequence

SEQ ID NO: 3342 - DNA, 444 bp, Saccharomyces cerevisiae
  CDS (1)..(444)
atgtcctccaatcttaccgaagaacaaattgctgaattcaaagaagcctttgccctctttgataaagataacaatggctctatctcatcaagtgaattggccactgtgatgaggtcattgggtctttcgcccagtgaagcagaagtaaatgatttgatgaacgaaatagatgttgatggtaaccatcaaatcgaatttagtgaatttttggctctgatgtctcgtcaactcaaatcaaatgactctgaacaagaactactagaagcttttaaagtattcgataagaacggtgatggtttaatctccgccgctgagttgaaacacgtgctaacatccattggtgaaaaattgactgatgccgaagtagatgatatgctaagagaggttagtgatggatcaggcgagatcaacattcaacaattcgctgctttgttatctaaatag

SEQ ID NO: 3343 - protein, 147 aa, Saccharomyces cerevisiae
MSSNLTEEQIAEFKEAFALFDKDNNGSISSSELATVMRSLGLSPSEAEVNDLMNEIDVDGNHQIEFSEFLALMSRQLKSNDSEQELLEAFKVFDKNGDGLISAAELKHVLTSIGEKLTDAEVDDMLREVSDGSGEINIQQFAALLSK

SEQ ID NO: 3344 - DNA, 450 bp, Homo sapiens
  CDS (1)..(450)
atggccgaccagctgactgaggagcaggtcacagaattcaaggaggccttctccctgtttgacaaggatggggacggctgcatcaccacccgcgagctgggcacggtcatgcggtccctgggccagaaccccacggaggccgagctgcgggacatgatgagtgagatcgaccgggacggcaacggcaccgtggacttccccgagttcctgggcatgatggccaggaagatgaaggacacggacaacgaggaggagatccgcgaggccttccgcgtgttcgacaaggacggcaacggcttcgtcagcgccgccgagctgcgacacgtcatgacccggctgggggagaagctgagtgacgaggaggtggacgagatgatccgggccgcggacacggacggagacggacaggtgaactacgaggagtttgtccgtgtgctggtgtccaagtga

SEQ ID NO: 3345 - protein, 149 aa, Homo sapiens
MADQLTEEQVTEFKEAFSLFDKDGDGCITTRELGTVMRSLGQNPTEAELRDMMSEIDRDGNGTVDFPEFLGMMARKMKDTDNEEEIREAFRVFDKDGNGFVSAAELRHVMTRLGEKLSDEEVDEMIRAADTDGDGQVNYEEFVRVLVSK

SEQ ID NO: 3346 - DNA, 450 bp, Mus musculus
  CDS (1)..(450)
atggccgaccagctgactgaggagcaaatcgccgagttcaaagaggctttctctctgtttgacaaggatggggatggcagtatcaccacccaagaattgggcactgtcatgcggtccctgggtcagaaccccacagaggctgagcttcaaggcatggtgaatgaaattgacaaagatggaaacggcaccgtggacttccccgagttcctgacaatgatgtccaggaagatgaaagacactgacagcgaggaggagatccgagaggccttccgagtgttcgacaaggatggcaatggcttcgtcagtgcagccgagctgaggcacgtgatgaccaagctgggggagaagctgagcgatgaggaagtggacgaaatgatacaggcggcagatacagatggtgatgggcaagtgaactatgaggagtttgtccacatgctggtgtccaaatga

SEQ ID NO: 3347 - protein, 149 aa, Mus musculus
MADQLTEEQIAEFKEAFSLFDKDGDGSITTQELGTVMRSLGQNPTEAELQGMVNEIDKDGNGTVDFPEFLTMMSRKMKDTDSEEEIREAFRVFDKDGNGFVSAAELRHVMTKLGEKLSDEEVDEMIQAADTDGDGQVNYEEFVHMLVSK

SEQ ID NO: 3348 - DNA, 522 bp, Arabidopsis thaliana
  CDS (1)..(522)
atggaagaaattcaacaacaacaacaacaacaacaacaacaacaacaacaacaacaacaacaacaacaacaacaacaagaactgacgcaagaacagataatggagttcaaagaggctttttgtctattcgacaaagatggtgatggatgcatcactgctgatgaacttgccactgtgatccgctcattggatcagaaccctaccgagcaagaacttcaagatatgatcactgagatcgactccgatggcaacggcaccatcgaattttcggagtttctcaacctcatggctaaccaactccaggaaactgatgcagatgaagagctgaaagaagcattcaaagtgtttgacaaagaccaaaatggttacatctctgccagtgagttgaggcatgtgatgattaatcttggggagaagctaacagatgaagaggttgatcaaatgataaaagaggcagatttggatggtgatggccaagtcaattatgatgaatttgtcaggatgatgatgatcaatggttaa

SEQ ID NO: 3349 - protein, 173 aa, Arabidopsis thaliana
MEEIQQQQQQQQQQQQQQQQQQQQQQELTQEQIMEFKEAFCLFDKDGDGCITADELATVIRSLDQNPTEQELQDMITEIDSDGNGTIEFSEFLNLMANQLQETDADEELKEAFKVFDKDQNGYISASELRHVMINLGEKLTDEEVDQMIKEADLDGDGQVNYDEFVRMMMING

SEQ ID NO: 3350 - DNA, 456 bp, Arabidopsis thaliana
  CDS (1)..(456)
atggaagaaacagcactgacaaaagatcagatcactgagttcaaagaagccttttgtctcttcgacaaagacggcgacggttgtataacggtggaagaacttgcaacagtgatccgttcgttggatcagaatccgacagaacaagaacttcatgatatcatcactgagattgattctgatagcaacggcaccattgaatttgctgagtttctcaacctcatggccaaaaaacttcaggaaagtgatgcggaggaagagctgaaagaagcattcaaagtctttgacaaagaccaaaatggatacatctctgccagtgagttgagtcatgtaatgataaatctaggagaaaagctaacagatgaagaagttgaacaaatgataaaggaggcagatttggatggtgatggccaagtcaattatgatgaatttgtcaagatgatgatcaacattgactga

SEQ ID NO: 3351 - protein, 151 aa, Arabidopsis thaliana
MEETALTKDQITEFKEAFCLFDKDGDGCITVEELATVIRSLDQNPTEQELHDIITEIDSDSNGTIEFAEFLNLMAKKLQESDAEEELKEAFKVFDKDQNGYISASELSHVMINLGEKLTDEEVEQMIKEADLDGDGQVNYDEFVKMMINID

SEQ ID NO: 3352 - DNA, 450 bp, Plasmodium falciparum 3D7
  CDS (1)..(450)
atggcagacaagttaacagaagaacaaatttcggaattcaaagaagcctttagtttgtttgataaagatggagatggaactataacaactaaggagttaggaacggtcatgagatctttaggacaaaatccaactgaagcagaattgcaagatatgattaatgaaattgatacagatgggaacggaacgatcgattttcccgaatttctaaccttaatggcaagaaaattaaaagatacggacactgaagaagaattaattgaagccttccgagtttttgatagagatggtgatggatatataagtgcagatgaactaaggcatgtcatgacaaatttgggagaaaaattaacaaatgaagaagttgatgaaatgataagagaagctgatattgatggtgatggacaaattaattatgaagagtttgttaaaatgatgatagccaaatga

SEQ ID NO: 3353 - protein, 149 aa, Plasmodium falciparum 3D7
MADKLTEEQISEFKEAFSLFDKDGDGTITTKELGTVMRSLGQNPTEAELQDMINEIDTDGNGTIDFPEFLTLMARKLKDTDTEEELIEAFRVFDRDGDGYISADELRHVMTNLGEKLTNEEVDEMIREADIDGDGQINYEEFVKMMIAK

SEQ ID NO: 3354 - DNA, 546 bp, Arabidopsis thaliana
  CDS (1)..(546)
atggcagatcagctcaccgatgatcagatctctgagttcaaggaagcttttagccttttcgacaaagacggagatggttgcatcacaacgaaagagctaggaacagtgatgagatcattaggtcaaaatccaacagaagcagagttacaagatatgataaacgaagtagatgctgatggtaacggaaccatagacttccctgagtttctgaacctaatggctaggaagatgaaggacactgactctgaagaagagctcaaagaagctttcagggttttcgataaggaccagaacggtttcatctcggcagctgagttaagacatgtaatgacaaatcttggtgagaagttaactgatgaagaagttgatgagatgatcaaagaagctgatgttgatggagatggtcagatcaattatgaagagtttgtcaaagttatgatggcaaagagaagagggaagagagttatggcagcaaagcgtagtagcaattctgctgaatacaaagaaaagaatggtcgccggaaaagtcactgccgtattctctga

SEQ ID NO: 3355 - protein, 181 aa, Arabidopsis thaliana
MADQLTDDQISEFKEAFSLFDKDGDGCITTKELGTVMRSLGQNPTEAELQDMINEVDADGNGTIDFPEFLNLMARKMKDTDSEEELKEAFRVFDKDQNGFISAAELRHVMTNLGEKLTDEEVDEMIKEADVDGDGQINYEEFVKVMMAKRRGKRVMAAKRSSNSAEYKEKNGRRKSHCRIL

SEQ ID NO: 3356 - DNA, 564 bp, Oryza sativa (japonica cultivar-group)
  CDS (1)..(564)
atggcggaccagctctccgaagagcagattggagagttcagggaggccttcagcctcttcgacaaggacggcgacggttctatcaccaccaaggagctaggaaccgtgatgcgaagtctagggcagaacccaacggaggcggagctgcaggacatgatcagcgaggtggacacggacagcaacggcaacatcgaattcaaggagttcctgggcctgatggcgcgcaagctgagggacaaggactccgaggaggagctgaaggaggcattccgcgtcttcgacaaggaccagaacggtttcatctctgccaccgagctccgccacgtgatggccaacatcggggagcggctcaccgacgaggaggtcggcgagatgatcagcgaggccgacgtcgacggcgacgggcagatcaactacgaggagttcgtcaagtgcatgatggccaagaagaggaggaagaggatagaggagaagagggaccacgacggcggcagcaggacgaagagtgcagggccctccgccgcgccggcgagcaagcgtggccagaagtgcgtgatcctgtaa

SEQ ID NO: 3357 - protein, 187 aa, Oryza sativa (japonica cultivar-group)
MADQLSEEQIGEFREAFSLFDKDGDGSITTKELGTVMRSLGQNPTEAELQDMISEVDTDSNGNIEFKEFLGLMARKLRDKDSEEELKEAFRVFDKDQNGFISATELRHVMANIGERLTDEEVGEMISEADVDGDGQINYEEFVKCMMAKKRRKRIEEKRDHDGGSRTKSAGPSAAPASKRGQKCVIL

SEQ ID NO: 3358 - DNA, 408 bp, Branchiostoma lanceolatum
  CDS (1)..(408)
atggagcagatcgctgagttcaaggaagccttctccttgttcgacaaagatggggacggtaccatcaccacaagggagctgggaactgtcatgaggtcgctgggtcagaacccaaccgaagctgaacttcaggatatgatcaacgaggtagacgcggacggaaacggaaccatagacttcccagagttcctcaccatgatggcccggaagatgaaagacaccgactcggaagaagagattcgtgaagcatttcgggtgttcgataaggatggcaacggcttcatcagcgctgcggagctgcgtcacgtgatgaccaacctgggagagaagctgacagatgaagaggtggatgagatggtccgagaggctgacatcgacggagatggccaggtcaactacgaagagtag

SEQ ID NO: 3359 - protein, 135 aa, Branchiostoma lanceolatum
MEQIAEFKEAFSLFDKDGDGTITTRELGTVMRSLGQNPTEAELQDMINEVDADGNGTIDFPEFLTMMARKMKDTDSEEEIREAFRVFDKDGNGFISAAELRHVMTNLGEKLTDEEVDEMVREADIDGDGQVNYEE

SEQ ID NO: 3360 - DNA, 360 bp, Lycopersicon esculentum
  CDS (1)..(360)
atgcagatcgctgagttcaaggaggctttcagtttgttcgacaaggacggagatggttgcatcacgactaaggagcttgggactgtgatgaggtcgttgggacagaaccctactgaagctgagctccaggacatgataaacgaggtggatgcagatggtaatggaaccatcgacttcccagagtttctaaaccttatggccaggaagatgaaggatactgactctgaggaggagttgaaagaggcattcagagttttcgacgaggatcaaaatggcttcatctccgctgctgagcttcgtcatgtgatgactaaccttggagagaagcttactgatgaggaagtggatgagatgatctag

SEQ ID NO: 3361 - protein, 119 aa, Lycopersicon esculentum
MQIAEFKEAFSLFDKDGDGCITTKELGTVMRSLGQNPTEAELQDMINEVDADGNGTIDFPEFLNLMARKMKDTDSEEELKEAFRVFDEDQNGFISAAELRHVMTNLGEKLTDEEVDEMI

SEQ ID NO: 3362 - DNA, 456 bp, Branchiostoma lanceolatum
  CDS (1)..(456)
atgggcggcgctgagagaatgacagaagaacagatcgccgagttcaaggaagccttctccttgttcgacaaaaatggggatgggaacatcacaactggtgagctgggaactgtcatgaggtcgctgggtcagaatccaactgaagctgagcttctggatatggcaaacgaggttgacgcggacggaaatggcaccatagatttcccagaatccctcaccatgatggctcgaaataagaaggataacaatcaggaagaggaactgcgggaggcgtttaaagtgtttgacaaggatgggaacggctacattagcgccgcggagctgcgtcacgtgatgaccaacctgggagagaagctgacagatgaagaggtggatgagatgatccgagaggctgatgtggatggagacggccaggtaaactaccaagagttcgtttcgatgatgacggagaaataa

SEQ ID NO: 3363 - protein, 151 aa, Branchiostoma lanceolatum
MGGAERMTEEQIAEFKEAFSLFDKNGDGNITTGELGTVMRSLGQNPTEAELLDMANEVDADGNGTIDFPESLTMMARNKKDNNQEEELREAFKVFDKDGNGYISAAELRHVMTNLGEKLTDEEVDEMIREADVDGDGQVNYQEFVSMMTEK

SEQ ID NO: 3364 - DNA, 495 bp, Dunaliella salina
  CDS (1)..(495)
atgcctcccaagggtgccgaggggagtgctgtcgcccctgcggaccagctgacagaggaccagatagcggaattcaaggaggcatttgcgctatttgacaaggatggagatggcaccatcacaacgaaagagctgggcactgtcatgcgttctttggaccaaaaccctacggaggcggagctgcaagacacgattaacgaggtggacgcagacgggaacggcaccatcgacttccctgagtttctcatgctcatggcgcgaaagatgaaggagactgaccaagaggaggagttgagagaagcattcaaggtctttgatcgtgatggcaatgggtttatctcagcagcagagttgcggcatgtaatgacaaacttgggcgagaagttgtcagaacaagaggtggaggagatgattagagaggcagatgttgacaacgacggacaagtcaactatgacgagtttgtgaacatgatgcttgccaagcccttggtgtag

SEQ ID NO: 3365 - protein, 164 aa, Dunaliella salina
MPPKGAEGSAVAPADQLTEDQIAEFKEAFALFDKDGDGTITTKELGTVMRSLDQNPTEAELQDTINEVDADGNGTIDFPEFLMLMARKMKETDQEEELREAFKVFDRDGNGFISAAELRHVMTNLGEKLSEQEVEEMIREADVDNDGQVNYDEFVNMMLAKPLV

SEQ ID NO: 3366 - DNA, 453 bp, Glycine max
  CDS (1)..(453)
atggcagatatcctgagtgaagaacagattgttgattttaaagaggcctttggcttgtttgacaaagatggagatggttgcattactgtggaagaacttgccactgtcattcggtcattggatcagaaccccactgaagaagagctccaagatatgataagcgaagtcgatgcagatggcaatggaaccattgaatttgacgagttcttgagcttgatggccaagaaagttaaagacactgatgcagaggaggagctcaaagaagctttcaaggtttttgacaaagatcaaaatggctacatatcagctagtgagttgagacacgtaatgatcaatctaggggaaaaactaaccgatgaagaggtggagcagatgattaaagaagcagatttggacggtgatggccaagttaactatgaggaattcgtcaagatgatgatgaccgttcgatga

SEQ ID NO: 3367 - protein, 150 aa, Glycine max
MADILSEEQIVDFKEAFGLFDKDGDGCITVEELATVIRSLDQNPTEEELQDMISEVDADGNGTIEFDEFLSLMAKKVKDTDAEEELKEAFKVFDKDQNGYISASELRHVMINLGEKLTDEEVEQMIKEADLDGDGQVNYEEFVKMMMTVR

SEQ ID NO: 3368 - DNA, 594 bp, Mus musculus
  CDS (1)..(594)
atgggtcgcggcgagccgggagacgtacagggcttggaccgcggcctcggggtgtcctcagccaccttcagaccccctgaccagcccagtcgggagtcccccctcgcttgcggtcccctccttcctcccggggggcgcggcgcgggcgctgatcagctgactgaagagcagattgctgaattcaaggaagctttctccctattcgataaagatggtgacggcaccatcacaaccaaggaactggggaccgtcatgcggtcactgggtcagaacccaacagaagccgagctgcaggatatgatcaacgaagtggatgctgatggcaatggcaccattgacttcccagagttcttgactatgatggctagaaaaatgaaagacacagatagcgaagaagagatccgcgaggccttccgagtgtttgacaaggatgggaatggttacatcagtgcggcagaactgcgccacgtcatgacaaacttaggagaaaagctaacagatgaagaagtagatgaaatgatcagagaagcagatattgatggcgacggacaagtcaactatgaagaattcgtacagatgatgactgcaaaatga

SEQ ID NO: 3369 - protein, 197 aa, Mus musculus
MGRGEPGDVQGLDRGLGVSSATFRPPDQPSRESPLACGPLLPPGGRGAGADQLTEEQIAEFKEAFSLFDKDGDGTITTKELGTVMRSLGQNPTEAELQDMINEVDADGNGTIDFPEFLTMMARKMKDTDSEEEIREAFRVFDKDGNGYISAAELRHVMTNLGEKLTDEEVDEMIREADIDGDGQVNYEEFVQMMTAK

SEQ ID NO: 3370 - DNA, 564 bp, Oryza sativa
  CDS (1)..(564)
atggcggaccagctctccgaagagcagattgtagagttcagggaggccttcagcctcttcgacaaggacggcgacggttctatcaccaccaaggagctaggaaccgtgatgcgaagtctggggcagaacccaacagaggcggagctgcaggacatgatcagcgaggtggacgcggacagcaacggcaacatcgaattcaaggagttcctgggcctgatggcgcgcaagctgagggacaaggactccgaggaggagctgaaggaggcgttccgcgtcttcgacaaggaccagaacggcttcatctccgccgccgagctccgccacgtgatggccaacatcggggagcggctcaccgacgaggaggtcggcgagatgatcagcgaggccgacgtcgacggcgacgggcagatcaactacgaggagttcgtcaagtgcatgatggccaagaagaggaggaagaggatagaggagaagagggagcacgacggcggcagcaggacgaagagtgcagggccctccgccgcgccggcgagcaagcgtggccagaagtgcgtgatcctgtaa

SEQ ID NO: 3371 - protein, 187 aa, Oryza sativa
MADQLSEEQIVEFREAFSLFDKDGDGSITTKELGTVMRSLGQNPTEAELQDMISEVDADSNGNIEFKEFLGLMARKLRDKDSEEELKEAFRVFDKDQNGFISAAELRHVMANIGERLTDEEVGEMISEADVDGDGQINYEEFVKCMMAKKRRKRIEEKREHDGGSRTKSAGPSAAPASKRGQKCVIL

SEQ ID NO: 3372 - DNA, 453 bp, Pisum sativum
  CDS (1)..(453)
atggcacatatcctaagtgaagaacaaattgttgatttcaaagaagcctttggtttgtttgacaaagatggagatggttgcgttactgtggaagaattggccactgttattaggtcactggatcagaatcccactgaggaagagctacaagatatgataagtgaagttgatgcagatggcaatggaaccattgaatttgatgagttcttgaacttgatggcaaggaaaatgaaagacactgatgcagaagaggagctaagagaggctttcaaggtttttgataaagatcaaaatggctatatatctcccagtgagttgagacatgtaatgatgaatctaggtgaaaaattaagtgatgaggaggtgaagcagatgattaaagaagcagatatggatggtgatggtcaagttgattatgatgattttgtgaagatgatgatggccattagatga

SEQ ID NO: 3373 - protein, 150 aa, Pisum sativum
MAHILSEEQIVDFKEAFGLFDKDGDGCVTVEELATVIRSLDQNPTEEELQDMISEVDADGNGTIEFDEFLNLMARKMKDTDAEEELREAFKVFDKDQNGYISPSELRHVMMNLGEKLSDEEVKQMIKEADMDGDGQVDYDDFVKMMMAIR

SEQ ID NO: 3374 - DNA, 453 bp, Glycine max
  CDS (1)..(453)
atggcagatgttctgagtgaagaacagattagtgagatcaaagaagcctttggcttgtttgacaaagatggtgatgggtgcattactgtggacgaatttgtcacggttatccggtcattggttcagaaccccacagaagaagagctccaagacatgataaacgaggtagatgcagatggtaatggaaccattgaatttgttgagtttttgaacttaatggccaagaaaatgaaggaaactgatgaagaggaagatctcaaagaggctttcaaggtgtttgacaaggatcaaaatggctacatttcagcaagtgagttgagacacgttatgatcaatctgggtgaaaaactaactgatgaggaggtggagcagatgattgaagaagcagatttggatggtgatggtcaagttaattatgatgaatttgtcaagatgatgatgactattggatga

SEQ ID NO: 3375 - protein, 150 aa, Glycine max
MADVLSEEQISEIKEAFGLFDKDGDGCITVDEFVTVIRSLVQNPTEEELQDMINEVDADGNGTIEFVEFLNLMAKKMKETDEEEDLKEAFKVFDKDQNGYISASELRHVMINLGEKLTDEEVEQMIEEADLDGDGQVNYDEFVKMMMTIG

SEQ ID NO: 3376 - DNA, 390 bp, Penicillium coffeae
  CDS (1)..(390)
atggaggcgttctccctctttgacaaggatggcgatggccagatcaccaccaaggagcttggtaccgtcatgcgctccctcggccagaacccctccgagtctgagctgcaggacatgatcaacgaggttgacgccgacaacaacggcaccattgatttccctgagttccttaccatgatggcccgcaagatgaaggataccgactcagaggaggagattcgtgaggcattcaaggtgttcgaccgtgacaacaacggcttcatctccgccgccgagctgcgccacgtcatgacttccattggtgagaagctgaccgacgacgaagtggacgagatgatccgcgaggcggaccaggatggcgacggccgtattgactacaacgagttctag

SEQ ID NO: 3377 - protein, 129 aa, Penicillium coffeae
MEAFSLFDKDGDGQITTKELGTVMRSLGQNPSESELQDMINEVDADNNGTIDFPEFLTMMARKMKDTDSEEEIREAFKVFDRDNNGFISAAELRHVMTSIGEKLTDDEVDEMIREADQDGDGRIDYNEF

SEQ ID NO: 3378 - DNA, 450 bp, Aspergillus flavus
  CDS (1)..(450)
atggccgactctttgactgaagaacaggtctccgagtacaaggaggccttctccctattcgacaaggacggtgatggccagatcaccaccaaggagttgggcactgtcatgcgctctctgggccaaaacccctctgagtcggaactccaggacatgattaacgaggttgacgccgacaacaatggcaccattgacttccctgagttcctgacgatgatggcgagaaagatgaaggataccgactctgaggaggagatccgggaggctttcaaggttttcgaccgcgataacaacggcttcatctccgctgccgaattgcgtcacgtcatgacctccatcggcgagaagcttaccgatgacgaagttgatgagatgatccgcgaggcggatcaggatggtgacggccggattgactacaacgagtttgtccagctcatgatgcaaaaataa

SEQ ID NO: 3379 - protein, 149 aa, Aspergillus flavus
MADSLTEEQVSEYKEAFSLFDKDGDGQITTKELGTVMRSLGQNPSESELQDMINEVDADNNGTIDFPEFLTMMARKMKDTDSEEEIREAFKVFDRDNNGFISAAELRHVMTSIGEKLTDDEVDEMIREADQDGDGRIDYNEFVQLMMQK

SEQ ID NO: 3380 - DNA, 450 bp, Quercus petraea
  CDS (1)..(450)
atggcggagcagcttatggaggagcagatcgctgagttcaaggaagccttcagcctctttgacaaggacggcgatggctgcatcactaccaaagagttgggaacagtcatgagatctttggggcaaaatcccactgaagctgaactacaggacatgatcaatgaagttgatgctgatcaaaatggcactattgatttttctgagtttttgaatttgatggcacgaaaaatgaaggatactgattctgaggaggaactcagagaagctttcaaggtgtttgataaggaccagaatggctttatttctgctgcagagcttcgacatgtaatgacaaatcttggggaaaagctgacagatgaagaagtggatgagatgatacgtgaagcagatttggatggtgatggtcaggtgaattatgaggagtttgtgaggatgatgcttgccaagtga

SEQ ID NO: 3381 - protein, 149 aa, Quercus petraea
MAEQLMEEQIAEFKEAFSLFDKDGDGCITTKELGTVMRSLGQNPTEAELQDMINEVDADQNGTIDFSEFLNLMARKMKDTDSEEELREAFKVFDKDQNGFISAAELRHVMTNLGEKLTDEEVDEMIREADLDGDGQVNYEEFVRMMLAK

SEQ ID NO: 3382 - DNA, 450 bp, Codonopsis lanceolata
  CDS (1)..(450)
atggcagaacagttaaccgaggaacagattgctgagttcaaggaagctttcagccttttcgacaaggatggcgatggctgcatcactactaaagagttgggaactgttatgagatcgttggggcagaatcccaccgaggctgaattgcaagatatgatcaatgaagttgatgctgatcagaatggaaccattgattttcctgagttcttgaacttgatggctcgaaaaatgaaggatactgactcagaggaggaactcaaagaagctttcaaggtctttggcaaggatcagaatggatatatttctgctgcggagctgcgccatgtaatgacaaacctaggggagaagctgactgatgaagaagtggatgagatgataagagaagctgacatggatggtgatggtcaagtgaactacgaggagtttgtgaggatgatgcttgctaagtga

SEQ ID NO: 3383 - protein, 149 aa, Codonopsis lanceolata
MAEQLTEEQIAEFKEAFSLFDKDGDGCITTKELGTVMRSLGQNPTEAELQDMINEVDADQNGTIDFPEFLNLMARKMKDTDSEEELKEAFKVFGKDQNGYISAAELRHVMTNLGEKLTDEEVDEMIREADMDGDGQVNYEEFVRMMLAK

SEQ ID NO: 3384 - DNA, 435 bp, Paxillus involutus
  CDS (1)..(435)
atggcggatcaactgtctgaagagcaaatatctgaattcaaggaagccttctctctctttgacaaagatggcgatggcacaatcaccaccaaggagcttggcactgtgatgcgctcgctagggcagaaccccactgaagcagagctacaagacatgatcaacgaagtcgatgcagacgggaacggcacgattgatttcccggagttcttgaccatgatggcgcgcaagatgcgcgacacggacagtgaagaagaaatcaaggaggcatttaaagtgttcgacaaggacggaaatggctacattagcgccgcagagttgcgacatgtcatgacgaaccttggagagaaattgactgatacagaggttgacgagatgatccgcgaggcggatgttgatggcgacggccaaatcaactacgacgagttcgtcaagtag

SEQ ID NO: 3385 - protein, 144 aa, Paxillus involutus
MADQLSEEQISEFKEAFSLFDKDGDGTITTKELGTVMRSLGQNPTEAELQDMINEVDADGNGTIDFPEFLTMMARKMRDTDSEEEIKEAFKVFDKDGNGYISAAELRHVMTNLGEKLTDTEVDEMIREADVDGDGQINYDEFVK

SEQ ID NO: 3386 - DNA, 435 bp, Paxillus involutus
  CDS (1)..(435)
atggcggatcaactgtctgaagagcaaatatctgaattcaaggaagccttctctctctttgacaaagatggcgatggcacgatcaccaccaaggagcttggcactgtgatgcgctcgctagggcagaaccccaccgaaggagagctacaagacatgatcaacgaagtcgatgcagacggaaacggcacgattgatttccctgagttcttgaccatgatggcgcgcaagatgcgcgacacggacagtgaagaagaaatcaaggaggcatttaaagtgttcgacaaggacggaaatggctacattagcgccgcagagttgcgacatgtcatgacgaaccttggagagaaattgaccgatacagaggttgacgagatgatccgcgaggcggatgttgatggtgatggccaaatcaactacgacgagttcgtcaagtag

SEQ ID NO: 3387 - protein, 144 aa, Paxillus involutus
MADQLSEEQISEFKEAFSLFDKDGDGTITTKELGTVMRSLGQNPTEGELQDMINEVDADGNGTIDFPEFLTMMARKMRDTDSEEEIKEAFKVFDKDGNGYISAAELRHVMTNLGEKLTDTEVDEMIREADVDGDGQINYDEFVK

SEQ ID NO: 3388 - DNA, 465 bp, Chlorarachnion sp
  CDS (1)..(465)
atgtcagaccaggatgcaaccaagcagctctctgaggagcaaattgctgaattcaaagaggccttctcccttttcgataaagatggcgatggatctatcactaccaaagagctgggaaccgtcatgcgctccctaggacaaaaccctaccgaggctgagctgcaggacatgatcaacgaagtagatgctgacggaaacggggatatcgatttctctgagtttcttaccatgatggcaagaaagatgaaggatacggatagcgaagacgaaatcaaggaagcattcaaggttttcgataaggacgggaacggatacatttctgctgctgagcttcgccacgtcatgacaaatctaggcgagaagttgaccgatgaggaggtggacgaaatgatccgtgaagctgatattgatggtgatggacaaatcaactacgaggaattcgtgaaaatgatgatgtcccaataa

SEQ ID NO: 3389 - protein, 154 aa, Chlorarachnion sp
MSDQDATKQLSEEQIAEFKEAFSLFDKDGDGSITTKELGTVMRSLGQNPTEAELQDMINEVDADGNGDIDFSEFLTMMARKMKDTDSEDEIKEAFKVFDKDGNGYISAAELRHVMTNLGEKLTDEEVDEMIREADIDGDGQINYEEFVKMMMSQ

SEQ ID NO: 3390 - DNA, 447 bp, Salvia miltiorrhiza
  CDS (1)..(447)
atggcggatccgctcaccgacgagcagatctccgaattcaaggaagccttctcgctattcgacaaggatggcgatggctgcatcactaccaaggagcttggtaccgtgatgcgttctttggggcagaaccccacagaggccgaacttcaggatatgatcaatgaagttgatgctgatggcaatgggacaatcgatttcccagagttcctcaacttgatggccagaaagatgaaggatactgattcagaggaagaactcaaggaagctttccgtgttttcgacagggaccaaaatggattcatttctgcagctgagcttcgacatgtcatgacaaaccttggggagaagcttactgatgaggaggttgatgagatgatccgtgaggctgatgtggatggtgatgggcagatcaactacgaggagttcgtcaaggtcatgatggcctaa

SEQ ID NO: 3391 - protein, 148 aa, Salvia miltiorrhiza
MADPLTDEQISEFKEAFSLFDKDGDGCITTKELGTVMRSLGQNPTEAELQDMINEVDADGNGTIDFPEFLNLMARKMKDTDSEEELKEAFRVFDRDQNGFISAAELRHVMTNLGEKLTDEEVDEMIREADVDGDGQINYEEFVKVMMA

SEQ ID NO: 3392 - DNA, 375 bp, Prorocentrum minimum
  CDS (1)..(375)
atgaccatcaccaccaaggagttgggcaccgtgatgcgttcgctggggcagaaccccaccgaggccgagctgcaggacatgatcaacgaggtggacgcggacgggaacggtacgatcgactttcctgagttcttgtccctgatggcgcgcaagatgaaggacacagacaccgaggaggagctgatcgaggcattcaaggtgttcgatcgcgacggcaatggtttcatcagtgccgcggagctgcgccacgtgatgaccaacctcggggagaagctcaccgacgaggaggtcgatgagatgatccgcgaggcggacgtcgatggtgacggccagatcaattacgaggagttcgtgaagatgatgatggcaaagtga

SEQ ID NO: 3393 - protein, 124 aa, Prorocentrum minimum
MTITTKELGTVMRSLGQNPTEAELQDMINEVDADGNGTIDFPEFLSLMARKMKDTDTEEELIEAFKVFDRDGNGFISAAELRHVMTNLGEKLTDEEVDEMIREADVDGDGQINYEEFVKMMMAK

SEQ ID NO: 3394 - DNA, 450 bp, Pythium splendens
  CDS (1)..(450)
atggctgaccaattgactgaagaacaaatcgccgagttcaaggaagcgttctcgctctttgacaaggacggtgatggaaccatcacgacgaaggaactcggcacggtcatgcgctcgcttggtcagaacccaacggaggccgaactccaggacatgatcaacgaagtcgacgcggacggcaacggcacgatcgactttcctgaattcttgaccatgatggcccgcaagatgaaggacacggactcggaggaggaaatcttggaagcgttcaaggtcttcgacaaggacggcaacggattcatctcggctgccgaattgcgtcacatcatgaccaacttgggcgagaagttgacggacgaggaagtcgatgagatgatccgtgaagccgatatcgatggcgatggacagatcaactacgaagagttcgtcaagatgatgatgtccaagtaa

SEQ ID NO: 3395 - protein, 149 aa, Pythium splendens
MADQLTEEQIAEFKEAFSLFDKDGDGTITTKELGTVMRSLGQNPTEAELQDMINEVDADGNGTIDFPEFLTMMARKMKDTDSEEEILEAFKVFDKDGNGFISAAELRHIMTNLGEKLTDEEVDEMIREADIDGDGQINYEEFVKMMMSK

SEQ ID NO: 3396 - DNA, 450 bp, Solanum commersonii
  CDS (1)..(450)
atggcggatcagcttactgatgaccagatctctgagttcaaagaggctttcagcttgttcgacaaggacggagatggttgcatcacgaccaaggagcttgggactgtgatgaggtccttgggacagaaccctactgaatctgagctccaggacatgataaacgaggtggatgcagatggtaatggaaccatcgacttcccagagtttctaaacctcgtggccaggaagatgaaggatactgactctgaggaggagttgaaagaggcattcagagttttcgacaaggatcaaaatggcttcatctcagctgctgagcttcgtcatgtgatgactaaccttggagagaagctcactgatgaagaagtcgatgagatgattagggaagcagatgttgatggtgatggacaaatcaactatgaggagtttgttaaggtcatgatggccaagtaa

SEQ ID NO: 3397 - protein, 149 aa, Solanum commersonii
MADQLTDDQISEFKEAFSLFDKDGDGCITTKELGTVMRSLGQNPTESELQDMINEVDADGNGTIDFPEFLNLVARKMKDTDSEEELKEAFRVFDKDQNGFISAAELRHVMTNLGEKLTDEEVDEMIREADVDGDGQINYEEFVKVMMAK

SEQ ID NO: 3398 - DNA, 450 bp, Ceratopteris richardii
  CDS (1)..(450)
atggctgagcaactcaccactgatcagattgcggagttcaaggaggctttcggcttgtttgacaaagacggcgatggttgtattactacaaaggaactggggactgtgatgcggtctcttggccagaatccaaccgaggctgagttgcaggaaatgatcaatgaagttgatgcagatgggaacgggacaattgattttccggagtttcttaacctaatggccaggaaaatgaaggatacagattctgaagaggagctcaaagaggctttcaaagtctttgataaagaccagaatggatttatctctgcagcagagctgcgtcatgtgatgacaaatcttggtgagaagcttactgatgaggaggtggatgagatgatccgggaggcagatgttgatggtgatgggcaagtcaattacgaggagtttgtgaggatgatgctttcaaagtga

SEQ ID NO: 3399 - protein, 149 aa, Ceratopteris richardii
MAEQLTTDQIAEFKEAFGLFDKDGDGCITTKELGTVMRSLGQNPTEAELQEMINEVDADGNGTIDFPEFLNLMARKMKDTDSEEELKEAFKVFDKDQNGFISAAELRHVMTNLGEKLTDEEVDEMIREADVDGDGQVNYEEFVRMMLSK

SEQ ID NO: 3400 - DNA, 450 bp, Sonneratia paracaseolaris
  CDS (1)..(450)
atggcggatccgctcaccgacgaccagatctccgagttcaaggaggccttcagcctcttcgacaaggacggagacggttccatcacaaccaaggagcttggaactgttatgcggtcactggggcagaacccaacggaggcagagcttcaggacatgatcaatgaggttgatgctgacggtaacggtaccatcgatttcccagagtttcttaacctgatggctaggaagatgaaggacactgactcggaggaagagctcaaggaagctttccgagctttcgacaaggaccaaaatggcttgatttctgctgctgctgagcttcgccatctcatgacaaacctcggtgagaagttgaccgatgaggaagttgatgagatgatccgagaagctgatgtggatggtgatggccagatcaactatgatgagttcgtcaaggtcatgatggcctag

SEQ ID NO: 3401 - protein, 149 aa, Sonneratia paracaseolaris
MADPLTDDQISEFKEAFSLFDKDGDGSITTKELGTVMRSLGQNPTEAELQDMINEVDADGNGTIDFPEFLNLMARKMKDTDSEEELKEAFRAFDKDQNGLISAAAELRHLMTNLGEKLTDEEVDEMIREADVDGDGQINYDEFVKVMMA

SEQ ID NO: 3402 - DNA, 501 bp, Oryza sativa
  CDS (1)..(501)
atggcggaggtggaggtgagggtgaggcaggagcaggtggcggagttcagggagacgttcgcgttcttcgacaaggacggggacgggtgcatcacgctggaggagctggacacggtggtgcggtcgctggggcagacgccgacgagggaggagctcgccgagatgatccgcgacgtcgacgtcgacggcaacggcaccatcgagttcgccgagttcctcgccctcatggcccgcaaggcctcgcgcggcggcgagaacggcggaggaggagacgactccggcgacgccgccgacgaggagctccgggaggcgttcaaggtgttcgacaaggaccaggacgggctcatctccgccgccgagctccgccacgtgatgatcagcctcggcgagaagctcaccgacgaggaggtggagcagatgatccgggaggccgacctcgacggcgacggccaggtcaacttcgacgagttcgtcaggatgatgatgctctccgaccaataa

SEQ ID NO: 3403 - protein, 166 aa, Oryza sativa
MAEVEVRVRQEQVAEFRETFAFFDKDGDGCITLEELDTVVRSLGQTPTREELAEMIRDVDVDGNGTIEFAEFLALMARKASRGGENGGGGDDSGDAADEELREAFKVFDKDQDGLISAAELRHVMISLGEKLTDEEVEQMIREADLDGDGQVNFDEFVRMMMLSDQ

SEQ ID NO: 3404 - DNA, 453 bp, Nicotiana tabacum
  CDS (1)..(453)
atgggagatatactgaaccaagatcaaattgttgaattgcaagaagctttcagtctatttgacagagatggagatggttgtattacagttgaagaattagcgacagttataaggtcattggatcaaaatccaacagaggaagagctgcaggatatgatcactgaagttgattcagatgggaatggaaccattgaattcactgaattcttgaaccttatggccaagaaaatgaaggacactgatgctgaggaagaacttaaagaggctttcaaggtgttcgacaaagatcaaaatggttatatatctgctaacgagctgaggcatgtaatgatcaatttaggggagaaactaacagatgaagaggttgagcagatgattaaagaagcagacttggatggtgatggtcaagtcaactttgatgaatttgtgaaaatgatgatgaacgtcggatag

SEQ ID NO: 3405 - protein, 150 aa, Nicotiana tabacum
MGDILNQDQIVELQEAFSLFDRDGDGCITVEELATVIRSLDQNPTEEELQDMITEVDSDGNGTIEFTEFLNLMAKKMKDTDAEEELKEAFKVFDKDQNGYISANELRHVMINLGEKLTDEEVEQMIKEADLDGDGQVNFDEFVKMMMNVG

SEQ ID NO: 3406 - DNA, 447 bp, Castanea sativa
  CDS (1)..(447)
atggcaggacaacttacaggacaaatcgcagagtttaaggggatcttttctttgtttgacaaggacggggatggctgcatcactaccaaagagttgggaacagtcatgagatctttgggacagaatcccactgaagctgaactacaggacatgatcaatgaagttgatgctgatcaaaatggcactattgatttttctgagtttctgaatttgatggcacgaaaaatgaaggatactgattctgaggaggaactcaaagaagctttcaaggtgtttgataaggaccagaatggctttatttctgctgcagagcttcgacatgtaatgacaaatcttggggaaaagctgacagatgaagaagtcgatgagatgatacagaaagcagatttggatggtgatggtcaggtgaattatcaggagtttgtaagaatgatgcttgccaagtaa

SEQ ID NO: 3407 - protein, 148 aa, Castanea sativa
MAGQLTGQIAEFKGIFSLFDKDGDGCITTKELGTVMRSLGQNPTEAELQDMINEVDADQNGTIDFSEFLNLMARKMKDTDSEEELKEAFKVFDKDQNGFISAAELRHVMTNLGEKLTDEEVDEMIQKADLDGDGQVNYQEFVRMMLAK

SEQ ID NO: 3408 - DNA, 444 bp, Homo sapiens
  CDS (1)..(444)
atggctgaccagctgactgaggagcagattgcagagttcaaggaggccttctccctctttgacaaggatggagatggcactatcaccaccaaggagttggggacagtgatgagatccctgggacagaaccccactgaagcagagctgcaggatatgatcaatgaggtggatgcagatgggaacgggaccattgacttcccggagttcctgaccatgatggccagaaagatgaaggacacagacagtgaggaggagatccgagaggcgttccgtgtctttgacaaggatgggaatggctacatcagcgccgcagagctgcgtcacgtaatgacgaacctgggggagaagctgaccgatgagtctctctccatgcccctcatctcttccttttgccctcgcctcttccatccatgtcttccaaggcctgatgcattcataagttga

SEQ ID NO: 3409 - protein, 147 aa, Homo sapiens
MADQLTEEQIAEFKEAFSLFDKDGDGTITTKELGTVMRSLGQNPTEAELQDMINEVDADGNGTIDFPEFLTMMARKMKDTDSEEEIREAFRVFDKDGNGYISAAELRHVMTNLGEKLTDESLSMPLISSFCPRLFHPCLPRPDAFIS

SEQ ID NO: 3410 - DNA, 447 bp, Chara corallina
  CDS (1)..(447)
atgtctgatttgaccgacgagcagatctccgagttcaaggaggctttcagtctttttgacaaggatggcgatgggagcatcaccacgaaggagctcgggactgtgatgaggtctctcggtcagaatcctacggaggctgagctgcaggatatgatcaatgaggttgacgttgatgggaacggaaccatcgatttccacgagttcttgaacctgatggcgagaaagatgaaggacacagactccgaggaggaacttaaagaagccttcaaggtttttgacaaagaccagaacggatacatttccgctgcggagcttcgtcatgtgatgacgaacctcggcgagaagctgacagacgaggaggtggatgaaatgatccgggaggccgatgtcgatggcgatgggcaagtcaattacgaggagttcgtgaagatgatgatggcgaagtga

SEQ ID NO: 3411 - protein, 148 aa, Chara corallina
MSDLTDEQISEFKEAFSLFDKDGDGSITTKELGTVMRSLGQNPTEAELQDMINEVDVDGNGTIDFHEFLNLMARKMKDTDSEEELKEAFKVFDKDQNGYISAAELRHVMTNLGEKLTDEEVDEMIREADVDGDGQVNYEEFVKMMMAK

SEQ ID NO: 3412 - DNA, 522 bp, Branchiostoma floridae
  CDS (1)..(522)
atggtcgggaaaggggccttccttgtagggattctcctgctcctgacacaaacgacaacagtcgcagaactagccatgacagatcagctgacggaggtacaggttgcggagataagggaagccttctccttgttcgacacagacgggaagggttgtatcaccaccgcggatctgggaactgtcatggcgtcgctgggccagaaccctacggcagccgagattcgagatatggtgaaagaggctgacgcggacggaaatggaaccatagatttcccacaattcctcagtatgatggcgcgaactctggagactgacgcccacgaggagctgaaggaagcgttcgcggttttcgacaagaatggtgacggtttcatcagtatggtggagctgcggcacatcctgatgaacacgggagagaagctgacagatgaggagatggaggagatgatgcgggaggctgaccttggtggagatgggaagctcaactacgaggagttcgtgaaagtgatgaatgcccaatag

SEQ ID NO: 3413 - protein, 173 aa, Branchiostoma floridae
MVGKGAFLVGILLLLTQTTTVAELAMTDQLTEVQVAEIREAFSLFDTDGKGCITTADLGTVMASLGQNPTAAEIRDMVKEADADGNGTIDFPQFLSMMARTLETDAHEELKEAFAVFDKNGDGFISMVELRHILMNTGEKLTDEEMEEMMREADLGGDGKLNYEEFVKVMNAQ

SEQ ID NO: 3414 - DNA, 444 bp, Branchiostoma floridae
  CDS (1)..(444)
atggcagctcaactgacacgggagcagatcgctgagtttaaagaggccttctctatgttcgacaaggatggtgttatcactataaaggagctggggactgtcatgagatcgctgggtcagaatccaaatcaagctgaacttcaggacatgataaacgaggtagacacggacggaaacggaaccatagacttctcagaattcctcaccatgatggcgcggaagatgggggaaaccgactcagaagaggagattagggaagcattccggcatttcgataaggattgcaacggctacatcaaccgttcggagcttaagcaagtgatgtccaagctgggagagaagctgacagatgaagagctggatgagatgatccaagaggccgacattgatggagatgggcagatcaactacgaagagttcgtgaagatgatgatgtcaaaatga

SEQ ID NO: 3415 - protein, 147 aa, Branchiostoma floridae
MAAQLTREQIAEFKEAFSMFDKDGVITIKELGTVMRSLGQNPNQAELQDMINEVDTDGNGTIDFSEFLTMMARKMGETDSEEEIREAFRHFDKDCNGYINRSELKQVMSKLGEKLTDEELDEMIQEADIDGDGQINYEEFVKMMMSK

SEQ ID NO: 3416 - DNA, 447 bp, Drosophila melanogaster
  CDS (1)..(447)
atgtccgaactaacggaggagcagattgccgagttcaaggatgcctttgtccagttcgacaaggagggaaccggcaagatcgccacccgtgagctgggcacattgatgcgcaccttgggccagaatccaacggaggccgagttgcaagatttgatagctgaggccgagaacaacaacaatggccaactgaacttcactgagttctgcggtataatggccaagcaaatgcgggaaactgacactgaggaggaaatgcgtgaggcattcaagatttttgatcgtgatggcgatggctttatatcaccagctgagcttcgctttgtgatgatcaatctgggcgaaaaggtcaccgacgaggagatcgatgagatgattcgcgaggctgattttgatggggatggcatgatcaactacgaggaattcgtatggatgataagccagaagtag

SEQ ID NO: 3417 - protein, 148 aa, Drosophila melanogaster
MSELTEEQIAEFKDAFVQFDKEGTGKIATRELGTLMRTLGQNPTEAELQDLIAEAENNNNGQLNFTEFCGIMAKQMRETDTEEEMREAFKIFDRDGDGFISPAELRFVMINLGEKVTDEEIDEMIREADFDGDGMINYEEFVWMISQK

SEQ ID NO: 3418 - DNA, 450 bp, Branchiostoma floridae
  CDS (1)..(450)
atggcagaccaactgacagaggagcagatcgctgagttcaaagaggccttctctttgttcgacaaggatggaaatggcaacatcactacaaaggagctgggaactgtcatgagatcgctgggtcagaatccgacggaaggtgaacttcaggatatgataaacgaggttgatgcagacggaaacggaaccatagacttcccagaattcctcaccatgatggccaggaagatgaaggacaccgactcagaagaggagattagggaagcatttaaggttttcgataaggatggtaacgggttcatcagcgctgcggagctgcgtcacgtgatgaccaacccgggagagaagctgacagatgaagaggtggatgagatgatccgagaggctgacatagacggagatgggcaggtcaactacgaagagttcgtgaagatgatgacttcaaaatga

SEQ ID NO: 3419 - protein, 149 aa, Branchiostoma floridae
MADQLTEEQIAEFKEAFSLFDKDGNGNITTKELGTVMRSLGQNPTEGELQDMINEVDADGNGTIDFPEFLTMMARKMKDTDSEEEIREAFKVFDKDGNGFISAAELRHVMTNPGEKLTDEEVDEMIREADIDGDGQVNYEEFVKMMTSK

SEQ ID NO: 3420 - DNA, 767 bp, Petunia hybrida
  CDS (101)..(655)
ttggaccattataataacacctctttggcttccccatttgtgtacattcaacacaaaaaacacacagttgcacatttctttcttcccttgttaatacataatggcagatcaactcactgatgatcagatctctgagttcaaagaagcctttagcctattcgacaaagatggagatggttgtatcactactaaggagcttggaaccgtgatgcggtcattgggacagaacccaactgaggctgagcttcaagacatgattaatgaagttgatgctgatgggaatgggaccattgacttccctgagttcctaaacctgatggctcgcaagatgaaggacactgattctgaggaggagctcaaggaagcttttagagtgtttgacaaggatcagaatggatttatctctgcagctgagcttcgccatgtcatgacaaacctaggtgagaagcttacagacgaagaggttgatgagatgatccgtgaagctgacgtggatggtgacggccagatcaactatgaggagttcgtcaaggtcatgatggccaataggaggagaaggaggattgaagaaagtaagagatcagtcaactcaaatatctcacggagcaacaatggaaggaaggtccgcaagagagatcgatgcacaatactgtgatccatctttgtgtgttgttgattgcaaacttgttatctacttagcttgttatattctatagtctacgaataaatgtcgccctttataagatttgtgtgatcaaaaaaaaaaa

SEQ ID NO: 3421 - protein, 184 aa, Petunia hybrida
MADQLTDDQISEFKEAFSLFDKDGDGCITTKELGTVMRSLGQNPTEAELQDMINEVDADGNGTIDFPEFLNLMARKMKDTDSEEELKEAFRVFDKDQNGFISAAELRHVMTNLGEKLTDEEVDEMIREADVDGDGQINYEEFVKVMMANRRRRRIEESKRSVNSNISRSNNGRKVRKRDRCTIL

SEQ ID NO: 3422 - DNA, 468 bp, Naegleria gruberi
  CDS (1)..(468)
atgagtagagaagctattagcaataacgaattaactgaagaacaaatcgctgaatttaaggaagccttctctctgttcgataaggacggtgatggtactattactacaagcgaattgggaactgttatgagatcattgggacaaaacccaactgaagcagaactccacgacatgattaacgaagttgatgctgatggtaatggaacaatagatttcactgaatttttgacaatgatggccaagaagatgaaggatactgataacgaagaagaaatcaaggaagctttcaaagttttcgataaggacggaaacggtttcatttctgctcaagaactcagacacgttatgtgcaacctaggtgaaaaactcacagacgaagaagttgatgaaatgattcgtgaagccgatattgacggtgataaccaaatcaactatactgaattcgtcaagatgatgatgcaaaagtaa

SEQ ID NO: 3423 - protein, 155 aa, Naegleria gruberi
MSREAISNNELTEEQIAEFKEAFSLFDKDGDGTITTSELGTVMRSLGQNPTEAELHDMINEVDADGNGTIDFTEFLTMMAKKMKDTDNEEEIKEAFKVFDKDGNGFISAQELRHVMCNLGEKLTDEEVDEMIREADIDGDNQINYTEFVKMMMQK

SEQ ID NO: 3424 - DNA, 450 bp, Candida albicans
  CDS (1)..(450): transl_table=12
atggctgaaaaattatcagaacaacaaattgctgaattcaaagaagcattttctttattcgataaagatagcgatggtaaaataactaccaaagaattaggtacagttatgagatctttaggtcaaaacccatctgaaagtgagttgactgacatgataaatgaagttgatgtcaactctgatggttcaattgatttcccggaatttttgactatgatggcaagaaagatgaaggatacagactcagaggcagaaattgcagaagcattcaaagtatttgacagaaacggtgatgggaaaatcagtgctgccgagttaagacaccttttgacttcaattggtgagaaattgtctgatgctgatgtggatcaaatgattaaagaagctgataccaacaatgatggtgagattgatatccaagaatttactctgttattagcagctaaataa

SEQ ID NO: 3425 - protein, 149 aa, Candida albicans
MAEKLSEQQIAEFKEAFSLFDKDSDGKITTKELGTVMRSLGQNPSESELTDMINEVDVNSDGSIDFPEFLTMMARKMKDTDSEAEIAEAFKVFDRNGDGKISAAELRHLLTSIGEKLSDADVDQMIKEADTNNDGEIDIQEFTSLLAAK

SEQ ID NO: 3426 - DNA, 444 bp, Kluyveromyces lactis
  CDS (1)..(444)
atgtcgcagaatttaacagaggaacaaattgcagaattcaaagaggcatttgccttgttcgataaggataatagcggctccatttctgctagtgagttggctaccgtgatgagatctttgggtctttcgcccagtgaagccgaagttgctgacttgatgaacgaaattgatgttgatggtaaccatgccattgaattcagtgagtttttagcgttaatgtccagacaattgaagtgtaacgattcggaacaagagttgttggaagctttcaaggtgtttgataagaacggggatggtttgatctctgctgcagagttgaaacatgttttgacgtcgattggtgaaaaattgaccgatgcggaagtcgatgaaatgttgagagaagttagcgatggctcgggtgaaattaacatcaaacaatttgctgcccttctatccaaatag

SEQ ID NO: 3427 - protein, 147 aa, Kluyveromyces lactis
MSQNLTEEQIAEFKEAFALFDKDNSGSISASELATVMRSLGLSPSEAEVADLMNEIDVDGNHAIEFSEFLALMSRQLKCNDSEQELLEAFKVFDKNGDGLISAAELKHVLTSIGEKLTDAEVDEMLREVSDGSGEINIKQFAALLSK

SEQ ID NO: 3428 - DNA, 456 bp, Pneumocystis carinii
  CDS (1)..(456)
atgagtaatgaacagaatttaacagaagaacagatttcagagtttaaggaagctttttcattatttgataaggatggggatggctctattacaacgaaagagcttggaattgttatgcggtcattaggtcagaatccaacagaagcagaattacaagatatggtgaacgaagttgatgcagatgggaatggaacaattgattttcctgaatttctggcaatgatggcacgaaaaatgaaagatgtcgattctgaagaagaaattcgggaagcatttaaagtatttgataaagatggtaacggaattatttctgcagcagagttgagacatgttatgacaaatttgggggagaagttgacagatgaggaagttgatgaaatgattcgagaagctgatgtagatggtgatggagttattgattatagtgaatttgttaagatgatgttaagtaaataa

SEQ ID NO: 3429 - protein, 151 aa, Pneumocystis carinii
MSNEQNLTEEQISEFKEAFSLFDKDGDGSITTKELGIVMRSLGQNPTEAELQDMVNEVDADGNGTIDFPEFLAMMARKMKDVDSEEEIREAFKVFDKDGNGIISAAELRHVMTNLGEKLTDEEVDEMIREADVDGDGVIDYSEFVKMMLSK

SEQ ID NO: 3430 - DNA, 453 bp, Schizosaccharomyces pombe
  CDS (1)..(453)
atgactacccgtaaccttacagatgagcagattgcagaattccgtgaagccttttcactgtttgatcgtgatcaggatggaaatatcacgtccaatgaattgggtgtagttatgagatcgttaggtcaatcgcctactgccgccgaattacaagatatgattaatgaggtcgatgccgatggtaatggcacaattgattttaccgaatttttgactatgatggcccgaaaaatgaaggataccgacaacgaagaggaagttcgcgaagcctttaaagtcttcgataaagatggaaatggatacattacagtcgaggagttgactcatgtgcttacaagtcttggtgaacgtttgtctcaagaagaagtagccgatatgatacgtgaagccgacaccgatggcgatggtgtaatcaactacgaagaattctctcgtgtcatttcttccaagtag

SEQ ID NO: 3431 - protein, 150 aa, Schizosaccharomyces pombe
MTTRNLTDEQIAEFREAFSLFDRDQDGNITSNELGVVMRSLGQSPTAAELQDMINEVDADGNGTIDFTEFLTMMARKMKDTDNEEEVREAFKVFDKDGNGYITVEELTHVLTSLGERLSQEEVADMIREADTDGDGVINYEEFSRVISSK

SEQ ID NO: 3432 - DNA, 821 bp, Stylonychia lemnae
  CDS (159)..(608)
ccccaaaaccccaaaaccccaaaaccccgtgataaaagaattattcaaagaaaaaaagattaattctgattgttttgtgacaaaacaagaaatcattatttaagagcgcttagttaaatcaatataattgttaaataaagataccctaacaaacacaaatggctgataatctaactgaagaacaaattgctgagttcaaggaagccttctccctcttcgataaggacggtgatggaaccattaccaccaaagagcttggtactgtcatgagatcactcggacaaaacccaactgaagctgagctccaagatatgatcaacgaagttgatgctgacggtaacggcaccattgattttccagagttcctttccctcatggcaagaaagatgaaggacactgataccgaggaggaactggtagaagccttcaaggtcttcgatagagatggaaacggtctcatctcagctgctgagcttagacacgtcatgacaaatctcggagaaaagttgaccgacgaggaggtcgatgagatgattagagaggctgatgttgacggtgatggtcacattaactacgaggaattcgtcagaatgatgatggctaagtgatctcccaaatgttaaatatacatattcactattttgtaacctaagagccattcaatcttgactttttttctttcaaatttgtctcatagtcttcaaatctttattagttcttcatattatttaccacccataattcaaattttatattctccgtactagacaacactctagatcattctattgttacaccaacggggttttggggttttgggg

SEQ ID NO: 3433 - protein, 149 aa, Stylonychia lemnae
MADNLTEEQIAEFKEAFSLFDKDGDGTITTKELGTVMRSLGQNPTEAELQDMINEVDADGNGTIDFPEFLSLMARKMKDTDTEEELVEAFKVFDRDGNGLISAAELRHVMTNLGEKLTDEEVDEMIREADVDGDGHINYEEFVRMMMAK

SEQ ID NO: 3434 - DNA, 618 bp, Tetrahymena pyriformis
  CDS (26)..(475)
aaaacttcaaataaaaaattaagaaatggctgatcaattaaccgaagaacaaattgccgaattcaaggaagccttctccttgttcgataaggatggtgatggtaccattactaccaaagaattgggtactgtcatgagatctttaggtcaaaaccccactgaagctgaactccaagatatgatcaacgaagtcgatgctgatggtaacggtactatcgatttccccgaattcttaagtttgatggccagaaagatgaaagataccgatactgaagaagaactcattgaagccttcaaggtcttcgatagagatggtaacggtctcatttctgctgccgaattaagacacgtcatgaccaacctcggtgaaaagctcactgacgaagaagtcgatgaaatgattagagaagctgatattgatggtgatggtcacattaactacgaagaattcgttagaatgatgatggctaagtgaacaaattaactaaaaattaaaaatactcttaaaaattgaaaaataaactttttttcatacaaacatctatatacaattcaacattagttgttttattcatatatatatcaatatgcactctatcacttattgatatctcattc

SEQ ID NO: 3435 - protein, 149 aa, Tetrahymena pyriformis
MADQLTEEQIAEFKEAFSLFDKDGDGTITTKELGTVMRSLGQNPTEAELQDMINEVDADGNGTIDFPEFLSLMARKMKDTDTEEELIEAFKVFDRDGNGLISAAELRHVMTNLGEKLTDEEVDEMIREADIDGDGHINYEEFVRMMMAK

SEQ ID NO: 3436 - DNA, 450 bp, Trypanosoma brucei brucei
  CDS (1)..(450)
atggccgatcaactctccaacgagcagatctccgaattcaaggaggcgttctcgctatttgacaaggatggtgatggtaccattacgacgaaagaactcggcactgtgatgcggtcactgggccagaaccccaccgaggcggaactccaggacatgatcaacgaagttgatcaggatggaagcggaactattgactttccagagttcttgacgcttatggcgcgcaagatgcaggattctgattccgaggaagaaatcaaggaagcgtttcgtgtctttgataaggatggcaatggtttcatttccgctgctgaactccgtcacatcatgacgaacctcggtgaaaaactaacagatgaggaggtggacgagatgatccgcgaggctgacgttgatggcgacggtcaaatcaactacgaggagttcgtgaaaatgatgatgagcaaatag

SEQ ID NO: 3437 - protein, 149 aa, Trypanosoma brucei brucei
MADQLSNEQISEFKEAFSLFDKDGDGTITTKELGTVMRSLGQNPTEAELQDMINEVDQDGSGTIDFPEFLTLMARKMQDSDSEEEIKEAFRVFDKDGNGFISAAELRHIMTNLGEKLTDEEVDEMIREADVDGDGQINYEEFVKMMMSK

SEQ ID NO: 3438 - DNA, 453 bp, Unknown; identical to SEQ ID NO: 2288
  Unidentified
  CDS (1)..(450)

SEQ ID NO: 3439 - protein, 149 aa, Unknown; identical to SEQ ID NO: 2289
  Unidentified

SEQ ID NO: 3440 - DNA, 790 bp, Brassica napus; identical to SEQ ID NO: 2292
  CDS (31)..(501)

SEQ ID NO: 3441 - protein, 156 aa, Brassica napus; identical to SEQ ID NO: 2293

SEQ ID NO: 3442 - DNA, 695 bp, Brassica napus; identical to SEQ ID NO: 2294
  CDS (44)..(493)

SEQ ID NO: 3443 - protein, 149 aa, Brassica napus; identical to SEQ ID NO: 2295

SEQ ID NO: 3444 - DNA, 702 bp, Brassica napus; identical to SEQ ID NO: 2296
  CDS (74)..(520)

SEQ ID NO: 3445 - protein, 148 aa, Brassica napus; identical to SEQ ID NO: 2297

SEQ ID NO: 3446 - DNA, 811 bp, Glycine max; identical to SEQ ID NO: 2300
  CDS (79)..(534)

SEQ ID NO: 3447 - protein, 150 aa, Glycine max; identical to SEQ ID NO: 2301

SEQ ID NO: 3448 - DNA, 740 bp, Hordeum vulgare; identical to SEQ ID NO: 2320
  CDS (52)..(549)

SEQ ID NO: 3449 - protein, 165 aa, Hordeum vulgare; identical to SEQ ID NO: 2321

SEQ ID NO: 3450 - DNA, 423 bp, Unknown; identical to SEQ ID NO: 2322
  Unidentified
  CDS (1)..(420)

SEQ ID NO: 3451 - protein, 139 aa, Unknown; identical to SEQ ID NO: 2323
  Unidentified

SEQ ID NO: 3452 - DNA, 753 bp, Brassica napus; identical to SEQ ID NO: 2332
  CDS (57)..(566)

SEQ ID NO: 3453 - protein, 169 aa, Brassica napus; identical to SEQ ID NO: 2333

SEQ ID NO: 3454 - DNA, 805 bp, Brassica napus; identical to SEQ ID NO: 2336
  CDS (69)..(623)

SEQ ID NO: 3455 - protein, 184 aa, Brassica napus; identical to SEQ ID NO: 2337

SEQ ID NO: 3456 - DNA, 706 bp, Brassica napus; identical to SEQ ID NO: 2354
  CDS (47)..(478)

SEQ ID NO: 3457 - protein, 143 aa, Brassica napus; identical to SEQ ID NO: 2355

SEQ ID NO: 3458 - DNA, 903 bp, Brassica napus; identical to SEQ ID NO: 2358
  CDS (38)..(682)

SEQ ID NO: 3459 - protein, 214 aa, Brassica napus; identical to SEQ ID NO: 2359

SEQ ID NO: 3460 - DNA, 756 bp, Brassica napus; identical to SEQ ID NO: 2360
  CDS (37)..(486)

SEQ ID NO: 3461 - protein, 149 aa, Brassica napus; identical to SEQ ID NO: 2361

SEQ ID NO: 3462 - DNA, 753 bp, Brassica napus; identical to SEQ ID NO: 2364
  CDS (48)..(494)

SEQ ID NO: 3463 - protein, 148 aa, Brassica napus; identical to SEQ ID NO: 2365

SEQ ID NO: 3464 - DNA, 913 bp, Brassica napus; identical to SEQ ID NO: 2366
  CDS (155)..(796)

SEQ ID NO: 3465 - protein, 213 aa, Brassica napus; identical to SEQ ID NO: 2367

SEQ ID NO: 3466 - DNA, 570 bp, Glycine max; identical to SEQ ID NO: 2382
  CDS (1)..(570)

SEQ ID NO: 3467 - protein, 189 aa, Glycine max; identical to SEQ ID NO: 2383

SEQ ID NO: 3468 - DNA, 543 bp, Glycine max; identical to SEQ ID NO: 2384
  CDS (1)..(543)

SEQ ID NO: 3469 - protein, 180 aa, Glycine max; identical to SEQ ID NO: 2385

SEQ ID NO: 3470 - DNA, 507 bp, Glycine max; identical to SEQ ID NO: 2386
  CDS (1)..(507)

SEQ ID NO: 3471 - protein, 168 aa, Glycine max; identical to SEQ ID NO: 2387

SEQ ID NO: 3472 - DNA, 513 bp, Glycine max; identical to SEQ ID NO: 2388
  CDS (1)..(513)

SEQ ID NO: 3473 - protein, 170 aa, Glycine max; identical to SEQ ID NO: 2389

SEQ ID NO: 3474 - DNA, 1518 bp, Glycine max; identical to SEQ ID NO: 2398
  CDS (1)..(1518)

SEQ ID NO: 3475 - protein, 505 aa, Glycine max; identical to SEQ ID NO: 2399

SEQ ID NO: 3476 - DNA, 453 bp, Glycine max; identical to SEQ ID NO: 2400
  CDS (1)..(453)

SEQ ID NO: 3477 - protein, 150 aa, Glycine max; identical to SEQ ID NO: 2401

SEQ ID NO: 3478 - DNA, 1650 bp, Glycine max; identical to SEQ ID NO: 2404
  CDS (1)..(1650)

SEQ ID NO: 3479 - protein, 549 aa, Glycine max; identical to SEQ ID NO: 2405

SEQ ID NO: 3480 - DNA, 543 bp, Glycine max; identical to SEQ ID NO: 2414
  CDS (1)..(543)

SEQ ID NO: 3481 - protein, 180 aa, Glycine max; identical to SEQ ID NO: 2415

SEQ ID NO: 3482 - DNA, 447 bp, Glycine max; identical to SEQ ID NO: 2416
  CDS (1)..(447)

SEQ ID NO: 3483 - protein, 148 aa, Glycine max; identical to SEQ ID NO: 2417

SEQ ID NO: 3484 - DNA, 483 bp, Glycine max; identical to SEQ ID NO: 2424
  CDS (1)..(483)

SEQ ID NO: 3485 - protein, 160 aa, Glycine max; identical to SEQ ID NO: 2425

SEQ ID NO: 3486 - DNA, 1602 bp, Glycine max; identical to SEQ ID NO: 2428
  CDS (1)..(1602)

SEQ ID NO: 3487 - protein, 533 aa, Glycine max; identical to SEQ ID NO: 2429

SEQ ID NO: 3488 - DNA, 513 bp, Glycine max; identical to SEQ ID NO: 2432
  CDS (1)..(513)

SEQ ID NO: 3489 - protein, 170 aa, Glycine max; identical to SEQ ID NO: 2433

SEQ ID NO: 3490 - DNA, 636 bp, Glycine max; identical to SEQ ID NO: 2440
  CDS (1)..(636)

SEQ ID NO: 3491 - protein, 211 aa, Glycine max; identical to SEQ ID NO: 2441

SEQ ID NO: 3492 - DNA, 492 bp, Glycine max; identical to SEQ ID NO: 2442
  CDS (1)..(492)

SEQ ID NO: 3493 - protein, 163 aa, Glycine max; identical to SEQ ID NO: 2443

SEQ ID NO: 3494 - DNA, 450 bp, Glycine max; identical to SEQ ID NO: 2444
  CDS (1)..(450)

SEQ ID NO: 3495 - protein, 149 aa, Glycine max; identical to SEQ ID NO: 2445

SEQ ID NO: 3496 - DNA, 646 bp, Glycine max; identical to SEQ ID NO: 2454
  CDS (81)..(527)

SEQ ID NO: 3497 - protein, 148 aa, Glycine max; identical to SEQ ID NO: 2455

SEQ ID NO: 3498 - DNA, 729 bp, Glycine max; identical to SEQ ID NO: 2460
  CDS (44)..(430)

SEQ ID NO: 3499 - protein, 128 aa, Glycine max; identical to SEQ ID NO: 2461

SEQ ID NO: 3500 - DNA, 895 bp, Glycine max; identical to SEQ ID NO: 2466
  CDS (183)..(695)

SEQ ID NO: 3501 - protein, 170 aa, Glycine max; identical to SEQ ID NO: 2467

SEQ ID NO: 3502 - DNA, 1901 bp, Glycine max; identical to SEQ ID NO: 2472
  CDS (476)..(1510)

SEQ ID NO: 3503 - protein, 344 aa, Glycine max; identical to SEQ ID NO: 2473

SEQ ID NO: 3504 - DNA, 369 bp, Unknown; identical to SEQ ID NO: 2474
  Unidentified
  CDS (1)..(366)

SEQ ID NO: 3505 - protein, 121 aa, Unknown; identical to SEQ ID NO: 2475
  Unidentified

SEQ ID NO: 3506 - DNA, 2059 bp, Glycine max; identical to SEQ ID NO: 2476
  CDS (199)..(1785)

SEQ ID NO: 3507 - protein, 528 aa, Glycine max; identical to SEQ ID NO: 2477

SEQ ID NO: 3508 - DNA, 844 bp, Helianthus annuus; identical to SEQ ID NO: 2485
  CDS (56)..(562)

SEQ ID NO: 3509 - protein, 168 aa, Helianthus annuus; identical to SEQ ID NO: 2486

SEQ ID NO: 3510 - DNA, 799 bp, Helianthus annuus; identical to SEQ ID NO: 2487
  CDS (51)..(494)

SEQ ID NO: 3511 - protein, 147 aa, Helianthus annuus; identical to SEQ ID NO: 2488

SEQ ID NO: 3512 - DNA, 846 bp, Hordeum vulgare; identical to SEQ ID NO: 2491
  CDS (72)..(521)

SEQ ID NO: 3513 - protein, 149 aa, Hordeum vulgare; identical to SEQ ID NO: 2492

SEQ ID NO: 3514 - DNA, 915 bp, Hordeum vulgare; identical to SEQ ID NO: 2493
  CDS (271)..(777)

SEQ ID NO: 3515 - protein, 168 aa, Hordeum vulgare; identical to SEQ ID NO: 2494

SEQ ID NO: 3516 - DNA, 880 bp, Hordeum vulgare; identical to SEQ ID NO: 2499
  CDS (82)..(651)

SEQ ID NO: 3517 - protein, 189 aa, Hordeum vulgare; identical to SEQ ID NO: 2500

SEQ ID NO: 3518 - DNA, 444 bp, Unknown; identical to SEQ ID NO: 2505
  Unidentified
  CDS (1)..(441)

SEQ ID NO: 3519 - protein, 146 aa, Unknown; identical to SEQ ID NO: 2506
  Unidentified

SEQ ID NO: 3520 - DNA, 724 bp, Linum usitatissimum; identical to SEQ ID NO: 2511
  CDS (73)..(516)

SEQ ID NO: 3521 - protein, 147 aa, Linum usitatissimum; identical to SEQ ID NO: 2512

SEQ ID NO: 3522 - DNA, 908 bp, Triticum aestivum; identical to SEQ ID NO: 2519
  CDS (8)..(697)

SEQ ID NO: 3523 - protein, 229 aa, Triticum aestivum; identical to SEQ ID NO: 2520

SEQ ID NO: 3524 - DNA, 483 bp, Triticum aestivum; identical to SEQ ID NO: 2521
  CDS (34)..(435)

SEQ ID NO: 3525 - protein, 133 aa, Triticum aestivum; identical to SEQ ID NO: 2522

SEQ ID NO: 3526 - DNA, 720 bp, Triticum aestivum; identical to SEQ ID NO: 2525
  CDS (58)..(564)

SEQ ID NO: 3527 - protein, 168 aa, Triticum aestivum; identical to SEQ ID NO: 2526

SEQ ID NO: 3528 - DNA, 1343 bp, Triticum aestivum; identical to SEQ ID NO: 2527
  CDS (26)..(1216)

SEQ ID NO: 3529 - protein, 396 aa, Triticum aestivum; identical to SEQ ID NO: 2528

SEQ ID NO: 3530 - DNA, 710 bp, Triticum aestivum; identical to SEQ ID NO: 2529
  CDS (50)..(547)

SEQ ID NO: 3531 - protein, 165 aa, Triticum aestivum; identical to SEQ ID NO: 2530

SEQ ID NO: 3532 - DNA, 784 bp, Triticum aestivum; identical to SEQ ID NO: 2531
  CDS (58)..(564)

SEQ ID NO: 3533 - protein, 168 aa, Triticum aestivum; identical to SEQ ID NO: 2532

SEQ ID NO: 3534 - DNA, 576 bp, Unknown; identical to SEQ ID NO: 2537
  Unidentified
  CDS (1)..(573)

SEQ ID NO: 3535 - protein, 190 aa, Unknown; identical to SEQ ID NO: 2538
  Unidentified

SEQ ID NO: 3536 - DNA, 516 bp, Triticum aestivum; identical to SEQ ID NO: 2541
  CDS (19)..(495)

SEQ ID NO: 3537 - protein, 158 aa, Triticum aestivum; identical to SEQ ID NO: 2542

SEQ ID NO: 3538 - DNA, 1726 bp, Triticum aestivum; identical to SEQ ID NO: 2545
  CDS (97)..(1368)

SEQ ID NO: 3539 - protein, 423 aa, Triticum aestivum; identical to SEQ ID NO: 2546

SEQ ID NO: 3540 - DNA, 1671 bp, Zea mays; identical to SEQ ID NO: 2547
  CDS (1)..(1671)

SEQ ID NO: 3541 - protein, 556 aa, Zea mays; identical to SEQ ID NO: 2548

SEQ ID NO: 3542 - DNA, 519 bp, Zea mays; identical to SEQ ID NO: 2551
  CDS (1)..(519)

SEQ ID NO: 3543 - protein, 172 aa, Zea mays; identical to SEQ ID NO: 2552

SEQ ID NO: 3544 - DNA, 1608 bp, Zea mays; identical to SEQ ID NO: 2553
  CDS (1)..(1608)

SEQ ID NO: 3545 - protein, 535 aa, Zea mays; identical to SEQ ID NO: 2554

SEQ ID NO: 3546 - DNA, 1575 bp, Zea mays; identical to SEQ ID NO: 2559
  CDS (1)..(1575)

SEQ ID NO: 3547 - protein, 524 aa, Zea mays; identical to SEQ ID NO: 2560

SEQ ID NO: 3548 - DNA, 1653 bp, Zea mays; identical to SEQ ID NO: 2561
  CDS (1)..(1653)

SEQ ID NO: 3549 - protein, 550 aa, Zea mays; identical to SEQ ID NO: 2562

SEQ ID NO: 3550 - DNA, 459 bp, Zea mays; identical to SEQ ID NO: 2567
  CDS (1)..(459)

SEQ ID NO: 3551 - protein, 152 aa, Zea mays; identical to SEQ ID NO: 2568

SEQ ID NO: 3552 - DNA, 1602 bp, Zea mays; identical to SEQ ID NO: 2569
  CDS (1)..(1602)

SEQ ID NO: 3553 - protein, 533 aa, Zea mays; identical to SEQ ID NO: 2570

SEQ ID NO: 3554 - DNA, 1596 bp, Zea mays; identical to SEQ ID NO: 2571
  CDS (1)..(1596)

SEQ ID NO: 3555 - protein, 531 aa, Zea mays; identical to SEQ ID NO: 2572

SEQ ID NO: 3556 - DNA, 1614 bp, Zea mays; identical to SEQ ID NO: 2573
  CDS (1)..(1614)

SEQ ID NO: 3557 - protein, 537 aa, Zea mays; identical to SEQ ID NO: 2574

SEQ ID NO: 3558 - DNA, 1620 bp, Zea mays; identical to SEQ ID NO: 2579
  CDS (1)..(1620)

SEQ ID NO: 3559 - protein, 539 aa, Zea mays; identical to SEQ ID NO: 2580

SEQ ID NO: 3560 - DNA, 1593 bp, Zea mays; identical to SEQ ID NO: 2585
  CDS (1)..(1593)

SEQ ID NO: 3561 - protein, 530 aa, Zea mays; identical to SEQ ID NO: 2586

SEQ ID NO: 3562 - DNA, 447 bp, Zea mays; identical to SEQ ID NO: 2587
  CDS (1)..(447)

SEQ ID NO: 3563 - protein, 148 aa, Zea mays; identical to SEQ ID NO: 2588

SEQ ID NO: 3564 - DNA, 903 bp, Zea mays; identical to SEQ ID NO: 2599
  CDS (66)..(617)

SEQ ID NO: 3565 - protein, 183 aa, Zea mays; identical to SEQ ID NO: 2600

SEQ ID NO: 3566 - DNA, 1324 bp, Zea mays; identical to SEQ ID NO: 2601
  CDS (108)..(866)

SEQ ID NO: 3567 - protein, 252 aa, Zea mays; identical to SEQ ID NO: 2602

SEQ ID NO: 3568 - DNA, 24 bp, Artificial sequence
  primer
atgtcctccaatcttaccgaagaa

SEQ ID NO: 3569 - DNA, 26 bp, Artificial sequence
  primer
ctatttagataacaaagcagcgaatt

SEQ ID NO: 3570 - protein, 146 aa, Artificial sequence
  consensus sequence
  Variant (2)..(4): Xaa in position 2 to 4 is any amino acid
  Variant (6)..(7): Xaa in position 6 to 7 is any amino acid
  Variant (8)..(9): Xaa in position 8 to 9 is any or no amino acid
  Variant (11)..(11): Xaa in position 11 is any amino acid
  Variant (13)..(13): Xaa in position 13 is any amino acid
  Variant (14)..(15): Xaa in position 14 to 15 is any or no amino acid
  Variant (18)..(23): Xaa in position 18 to 23 is any amino acid
  Variant (26)..(39): Xaa in position 26 to 39 is any amino acid
  Variant (40)..(41): Xaa in position 40 to 41 is any or no amino acid
  Variant (43)..(44): Xaa in position 43 to 44 is any amino acid
  Variant (45)..(47): Xaa in position 45 to 47 is any or no amino acid
  Variant (49)..(53): Xaa in position 49 to 53 is any amino acid
  Variant (56)..(65): Xaa in position 56 to 65 is any amino acid
  Variant (66)..(86): Xaa in position 66 to 86 is any or no amino acid
  Variant (89)..(91): Xaa in position 89 to 91 is any amino acid
  Variant (93)..(96): Xaa in position 93 to 96 is any amino acid
  Variant (98)..(98): Xaa in position 98 is any amino acid
  Variant (100)..(102): Xaa in position 100 to 102 is any amino acid
  Variant (103)..(106): Xaa in position 103 to 106 is any or no amino acid
  Variant (109)..(115): Xaa in position 109 to 115 is any amino acid
  Variant (117)..(124): Xaa in position 117 to 124 is any amino acid
  Variant (125)..(133): Xaa in position 125 to 133 is any or no amino acid
  Variant (135)..(136): Xaa in position 135 to 136 is any amino acid
  Variant (137)..(137): Xaa in position 137 is any or no amino acid
  Variant (140)..(144): Xaa in position 140 to 144 is any amino acid
FXXXDXXXXGXIXXXELXXXXXXLGXXXXXXXXXXXXXXXXDXXXXXGXXXXXEFXXXXXXXXXXXXXXXXXXXXXXXXXXXXXXXAFXXXDXXXXGXIXXXXXXXELXXXXXXXGXXXXXXXXXXXXXXXXXDXXXDGXXXXXEF

SEQ ID NO: 3571 - DNA, 1452 bp, Saccharomyces cerevisiae
  CDS (1)..(1452)
atgtatttgtcattctatatcactgatacaaagaacaaacttattttccagtatcttttaggtgcaacagctccctccttcaagcacctgtggacccgcgttcgtaccacatgtcctcaattgctcgaagatagcagtagtgatgattatttagaccattcaatggttggaagagatttagaggtctataagtatttctcagttataaataagctcaattattggtgcttagcctccacttcgaagtcaaaaggcccgcttgattgttttacctttttagagactatagatcgtatcctgttagaatattttgacaaggataaattaagtatcaagaaaattgttaataattatgatagaatcagtttgatttttaactgttgcgtcgaagcgggtgaaccaaatgtgagtgatatgctctatgttaataaaattaaagaagctgttcctgaaagatcggatttatcgaagttcataagttctacagcccataatttacagcaggctgtgcaactcccacaacaaaggcaacagcagctacaacaaaatcagatttctcgtggtagtaattcactaatcgaaaatgaagagattgttccctggagaacttcaagggctagcaaacatgagaataatgagctttatgtggatttgttagaaacattccatgttgtatttgaaaagaaaaaatcacatctaaggttgctcactggaagtatccatggaatagtggacgtgagatcttatttgaatgataatcctctagttgcagtaaaattaaacactatgggaaatgatataggtatacccagtttgcatgactgtgttgaaatcaatgatggtgtgttttctccctctaatataacgtttataccaccagatgggaagttcagattgctggagtattccgtcgatttaagttctcaagtaaagcaatccggagtaaggatgaattctattggcttgatgtctttacacttccaaaatggattgggtaaagattctgatgaatttgagttatccttaaatattgaaaatttcaaaaaagtttcacaagttgatgacctaaaaatagatttacagttcaatgttgagaatgctgatccaaatgaaatagcatataagataaaaatattgcgcaatactcatggccgttttgaaaatagcattatcatgggtcaaggacaatggatttttgataaatcaactgccactggaacggtacctgtactacgtggctgtattgagtatgaaaatactgggccaaattttacaaaaaaagttgatttacaaacagtctccttagaatattcttacataggacaatcggccagtggaatctatgtagaagccatcgatattgtatctggattaacaattggcaaaaatacaaagctgtacaagggtgcaaagtataagacccagacaggcaattttcaagtaaggctgtag

SEQ ID NO: 3572 - protein, 483 aa, Saccharomyces cerevisiae
MYLSFYITDTKNKLIFQYLLGATAPSFKHLWTRVRTTCPQLLEDSSSDDYLDHSMVGRDLEVYKYFSVINKLNYWCLASTSKSKGPLDCFTFLETIDRILLEYFDKDKLSIKKIVNNYDRISLIFNCCVEAGEPNVSDMLYVNKIKEAVPERSDLSKFISSTAHNLQQAVQLPQQRQQQLQQNQISRGSNSLIENEEIVPWRTSRASKHENNELYVDLLETFHVVFEKKKSHLRLLTGSIHGIVDVRSYLNDNPLVAVKLNTMGNDIGIPSLHDCVEINDGVFSPSNITFIPPDGKFRLLEYSVDLSSQVKQSGVRMNSIGLMSLHFQNGLGKDSDEFELSLNIENFKKVSQVDDLKIDLQFNVENADPNEIAYKIKILRNTHGRFENSIIMGQGQWIFDKSTATGTVPVLRGCIEYENTGPNFTKKVDLQTVSLEYSYIGQSASGIYVEAIDIVSGLTIGKNTKLYKGAKYKTQTGNFQVRL

SEQ ID NO: 3573 - DNA, 1257 bp, Danio rerio
  CDS (1)..(1257)
atgatccacagtctattcctcgttaacgcatcgggggacatctttctggagaagcactggaagagtgttgtcagccgatctgtatgtgactacttcttcgaggccctggagcgcgccacggaaccggagaacgtacctccggtgatcccgacgccgcatcactacctcatcaacgtgctccgccatcgcatctacttcgtggccgtgatacagagcgaggtgccgccgctgtttgtcatcgagttcctccatcgtgtggtcgacacctttcaggactattttggggtgtgcacagaggctgctattaaagacaatgtagttgtagtctatgagctgctggaggagatgctggataatggcttccccctggccaccgaatcaaacatcttaaaagagctcattaaacctcctaccatcctgcgcacagtggtcaacaccatcacaggaagtactaatgttggtgggcagcttcctacaggtcagctatcagtggtaccgtggcggagaacaggcgttaaatataccaacaacgaagcttatttcgatgtggtggaagaaatcgatgctatcattgacaaatcaggttcaaccatcacagctgagatacagggagtgatagacgcatgtgtgaaactcacagggatgccagatctcaccctgtcgtttatgaatcctcgactcttggatgatgtcagcttccatccctgtgtgcggttcaagcgttgggaggctgagcgaattttgtctttcatcccaccagacggcaacttccgcctcctgtcctaccacgtcagctcacagaacctggtggcgatcccagtgtacgtcaagcacaacatcagctttagagaaggcagttctcagggccgtttcgagctcaccctcggcccaaagcagaccatgggtaaggtggtggaagcagttctggtgagcagtcagctgccgcggggcgtcctcaatgccaacctcaacccttcacagggcacttacacttttgaccctgtcacaaagcttttgtcatgggatgtggggaagataaaccctcagaaactgccgagtttaaaagggtccatgagtcttcaggctggagcctccaaacctgatgagaaccccacaatcaacatccagttcaagattcaacagctggccatttcaggtctgaaagtaaataggttggacatgtatggcgagaagtacaaacctttcaaaggcatcaaatacatgaccaaggcgggcaaatttcaagtgcgaacctag

SEQ ID NO: 3574 - protein, 418 aa, Danio rerio
MIHSLFLVNASGDIFLEKHWKSVVSRSVCDYFFEALERATEPENVPPVIPTPHHYLINVLRHRIYFVAVIQSEVPPLFVIEFLHRVVDTFQDYFGVCTEAAIKDNVVVVYELLEEMLDNGFPLATESNILKELIKPPTILRTVVNTITGSTNVGGQLPTGQLSVVPWRRTGVKYTNNEAYFDVVEEIDAIIDKSGSTITAEIQGVIDACVKLTGMPDLTLSFMNPRLLDDVSFHPCVRFKRWEAERILSFIPPDGNFRLLSYHVSSQNLVAIPVYVKHNISFREGSSQGRFELTLGPKQTMGKVVEAVLVSSQLPRGVLNANLNPSQGTYTFDPVTKLLSWDVGKINPQKLPSLKGSMSLQAGASKPDENPTINIQFKIQQLAISGLKVNRLDMYGEKYKPFKGIKYMTKAGKFQVRT

SEQ ID NO: 3575 - DNA, 1272 bp, Xenopus tropicalis
  CDS (1)..(1272)
atgtcagcctccgccgtgtatatcctggatctgaagggaaagccccttatctgcaggaactacaagggtgatatcgacatgctggagattgaccatttcatgcccttgctggtgcagaaggaagaggagagcaacctgactccattgctgacccacggaaaagtgcacttcatgtggatcaagcacagcaatctctatttggttgcactaaccaataagaatgccaatgcctcccttgtttattccttcctgtataagttgatagaggtcttcacagaatactttaaagagctggaggaagagagtattcgggataactttgtcattgtgtatgagctgctggatgaaatcatggactttgggtttccacagacgacagagagcaaaattcttcaggagtatatcactcagcaaggaaacaaattggatacaggcaaatctcgtgtccccaccacggtgaccaacgccgtgtcctggaggtccgaagggatcaagtataagaagaatgaagtcttcatagatgtgattgagtccgtcaatattctagtgaatagcaacggcagcgttctacgcagtgagattgtgggcagtgtgaagctaaaggtctttctctcggggatgccggagttacggctggggcttaacgacagagtcctctttgaactaactggccgcaacaaaaataaaacagtggagcttgaagacgtgaagtttcaccagtgcgtccgcctgtcccgctttgagaatgaccgcaccatttcctttatccctccggatggcgactttgagctcatgtcttacaggctgaacacacaggttaaaccattaatctggatagagtcagtaattgagaaattcagtcatagccggctggagattatggtgaaggctaaggggcaatttaagaaacaatcggtggcaaataatgtggagatttctgtgccggtgccgagtgatgctgattctcccaagtttaaaaccagcgtggggagcgcgaaatatgtccctgaaaaaaatgtggtgatttggacaatcaaatcatttccggggggcaaggagtatctgatgcgtgcccactttggcctgcccagcgtggagacagaagagttagaagggaaacccccaataagcgtcaagtttgaaataccctacttcactgtttcagggattcaggttcgatacatgaagatcattgagaaaagtggataccaagccctcccgtgggtccgatatatcactcagagcggagattatcagctacgaaccaactga

SEQ ID NO: 3576 - protein, 423 aa, Xenopus tropicalis
MSASAVYILDLKGKPLICRNYKGDIDMLEIDHFMPLLVQKEEESNLTPLLTHGKVHFMWIKHSNLYLVALTNKNANASLVYSFLYKLIEVFTEYFKELEEESIRDNFVIVYELLDEIMDFGFPQTTESKILQEYITQQGNKLDTGKSRVPTTVTNAVSWRSEGIKYKKNEVFIDVIESVNILVNSNGSVLRSEIVGSVKLKVFLSGMPELRLGLNDRVLFELTGRNKNKTVELEDVKFHQCVRLSRFENDRTISFIPPDGDFELMSYRLNTQVKPLIWIESVIEKFSHSRLEIMVKAKGQFKKQSVANNVEISVPVPSDADSPKFKTSVGSAKYVPEKNVVIWTIKSFPGGKEYLMRAHFGLPSVETEELEGKPPISVKFEIPYFTVSGIQVRYMKIIEKSGYQALPWVRYITQSGDYQLRTN

SEQ ID NO: 3577 - DNA, 1257 bp, Xenopus tropicalis
  CDS (1)..(1257)
atgatccacagcctgtttttgattaacccttcgggggacatcttcctagagaagcactggaaaagtgtggtatcccgctctgtttgtgactacttctttgaagcccaggaaagggcatcagaggcagagaatgtgcccccaatcattcagacccctcaccactaccttctcagcgtctacaggcacggcatcttttttgtggctgtcattcagacagaagtgcccccgcttttcgctattgagttccttcaccgcgtggtggacacattccaggattactttggctcctgctctgaggctgtgattaaggaaaacgtggtagttgtatatgaggttcttgaggaaatgctggataatgggttccctcttgctactgagtccaacatcctgaaggagctcatcaagcctccaaccattcttcgcagtgtggtcaacaccatcacaggcagttctaatgttggggaccaacttcccactggacagctctccgtggttccttggagacggacaggagtaaaatacaccaataatgaggcttattttgatgttatcgaggaaattgatgccatcattgataaatcaggatgcactgtgacagcagagattcagggggtgattgacgcctgtgtaaaactaagcgggatgccagatctgactctgtctttcatgaatccccgtctcctggatgatgtgagttttcacccatgcgtacgtttcaagcggtgggagtcagagaggatcctttccttcatcccgcctgatgggaacttccggctgctgtcctaccatgtcagcgctcaaaacttggtggccattcctgtgtatgtgaaacatgcaattagtttccgggaaggaagcagcggcgggagatttgaagtcacgctaggaccaaagcagagcatggggaaaacagtggaaggggtcaccctcaccgggcagatgcccaagggagtgctgaacatgacgctaaccccttcccaaggaactcatgtctttgatccagtgaccaagctcttgtcctgggatgtaggaaaaattaatcctcagaagttaccaaatctcaaggggaccatgatccttcaggctggatgctcaaagccagatgaaaaccccaccttgaacctgcatttcaagatccaacagttggccatatcaggtctgaaggtaaacaggctggacatgtatggagagaaatacaaaccattcaaaggcatcaagtacatgaccaaagctggcaagttccaagtcagaacatga

SEQ ID NO: 3578 - protein, 418 aa, Xenopus tropicalis
MIHSLFLINPSGDIFLEKHWKSVVSRSVCDYFFEAQERASEAENVPPIIQTPHHYLLSVYRHGIFFVAVIQTEVPPLFAIEFLHRVVDTFQDYFGSCSEAVIKENVVVVYEVLEEMLDNGFPLATESNILKELIKPPTILRSVVNTITGSSNVGDQLPTGQLSVVPWRRTGVKYTNNEAYFDVIEEIDAIIDKSGCTVTAEIQGVIDACVKLSGMPDLTLSFMNPRLLDDVSFHPCVRFKRWESERILSFIPPDGNFRLLSYHVSAQNLVAIPVYVKHAISFREGSSGGRFEVTLGPKQSMGKTVEGVTLTGQMPKGVLNMTLTPSQGTHVFDPVTKLLSWDVGKINPQKLPNLKGTMILQAGCSKPDENPTLNLHFKIQQLAISGLKVNRLDMYGEKYKPFKGIKYMTKAGKFQVRT

SEQ ID NO: 3579 - DNA, 1257 bp, Gallus gallus
  CDS (1)..(1257)
atgatccacagcctgtttcttataaactgttctggtgatatattcttggagaagcactggaagagcgttgtgagccagtctgtgtgtgattatttctttgaagctcaggagaaagcaatcgatgtcgagaatgtgcctcctgtcatctccacgccacttcactacctcatcagcatctatcgggataaaatcttctttgtgtctgtcatacagacagaagtgccaccgctctttgtaattgaatttctgcaccgcgtagcagatacttttcaggattactttggtgaatgttctgagactgcaattaaggacaatgtggttattgtgtacgaactgctggaagaaatgttagacaacggcttcccactggcaacagaatccaacatactgaaggagctgattaagcctcccacaattctgcgttccgttgtcaactccatcacaggcagcagtaatgtgggtgacacccttcccaccggacagctgtccaacattccttggcgcagagcaggggtaaaatacacaaacaatgaagcctactttgatgtcattgaagaaattgatgctattatagacaaatcaggttccacagtctttgcagaaatccaaggtgttattgattcgtgtattaagctctcaggaatgccagatctttctctttctttcatgaacccaaggctgctggatgatgtcagcttccatccatgtattcgattcaaacgctgggagtctgaaagagtcctttcgtttattcctccggatgggaatttcagactgatctcctaccgtgtcagttcacagaacttggtggcaattcctgtatacgtgaagcatttgatcagttttaaggagaacagttcttcgggaagatttgatgttaccattggaccaaaacagaatatggggaaaacagtagaaggagttgtcatgacagttcatatgccaaaagcagtacttaatatgaacctcaccgctacccaaggcagctatacattcgatccagttactaaggtgttagcatgggatgttggcaaaattacccctcaaaagctgccaaatctgaagggtatagtgaacttgcagtctggagcccctaagcctgaagagaatccaagtttaaatatccaatttaagatacaacagcttgcaatttcaggactgaaagtaaatcgcctggacatgtatggagaaaaatacaagccttttaaaggtgtcaaatacattacaaaagcaggaaaatttcaagtcaggacatga

SEQ ID NO: 3580 - protein, 418 aa, Gallus gallus
MIHSLFLINCSGDIFLEKHWKSVVSQSVCDYFFEAQEKAIDVENVPPVISTPLHYLISIYRDKIFFVSVIQTEVPPLFVIEFLHRVADTFQDYFGECSETAIKDNVVIVYELLEEMLDNGFPLATESNILKELIKPPTILRSVVNSITGSSNVGDTLPTGQLSNIPWRRAGVKYTNNEAYFDVIEEIDAIIDKSGSTVFAEIQGVIDSCIKLSGMPDLSLSFMNPRLLDDVSFHPCIRFKRWESERVLSFIPPDGNFRLISYRVSSQNLVAIPVYVKHLISFKENSSSGRFDVTIGPKQNMGKTVEGVVMTVHMPKAVLNMNLTATQGSYTFDPVTKVLAWDVGKITPQKLPNLKGIVNLQSGAPKPEENPSLNIQFKIQQLAISGLKVNRLDMYGEKYKPFKGVKYITKAGKFQVRT

SEQ ID NO: 3581 - DNA, 1248 bp, Arabidopsis thaliana
  CDS (1)..(1248)
atgcttcaatgtatctttctcatctccgattctggagaggtaatgctagagaagcagcttactggtcatcgcgttgatagatccatatgtgcttggttctgggatcaatatatttctcaaggcgattcctttaaggcacttccagtgattgcttcaccaacacattatctatttcaaattgttcgtgacggaattacgttcttagcttgtagtcaagttgaaatgccaccgttgatggcaatcgagttcctttgcagagttgctgatgttttgtctgagtaccttggtgggctaaatgaagatctcattaaggataatttcatcattgtctatgagcttttggatgagatgatcgataatggtttccctctcacaacagaacctagtatcctgaaggaaatgatagctccaccgaatctagtcagcaaaatgttgagtgttgtaacgggaaatgcttcgaatgttagtgacacgcttccgagtggggcgggctcttgtgttccttggcgaccgacagatccaaagtactctagcaacgaagtttatgtcgaccttgttgaagagatggatgcaattgtaaacagggatggagaattggtaaaatgcgagatttatggcgaagtccaaatgaattctcagctcactggttttccagatttgacattgtcgtttgcgaatccatcaatcctagaagacatgaggtttcacccgtgtgtccgctacagaccatgggaatctcatcaagttctctcctttgtccctccagatggagagttcaagcttatgagttacagggtgaagaagctaaagaacacacctgtatatgtaaaacctcaaataacatcagattcgggtacatgtcgaattagcgtgctagtgggaatccgaagcgatccagggaaaacaattgagtcgataaccttgagtttccagcttcctcactgtgtatcatctgcagatctctcatcaaatcatggaactgtaacaatcctctctaacaagacatgtacatggacaatcgggcgaatcccaaaggacaaaactccgtgtttgtcgggaacactagcgctggaaccagggttagaacggcttcacgtgtttccgacattcaaactcgggtttaagataatgggcattgctctttctggcctaagaatcgagaaacttgatcttcaaactatccctcctcgtttgtacaaagggtttcgtgctcagacacgcgctggtgagttcgatgtcaggttgtag

SEQ ID NO: 3582 - protein, 415 aa, Arabidopsis thaliana
MLQCIFLISDSGEVMLEKQLTGHRVDRSICAWFWDQYISQGDSFKALPVIASPTHYLFQIVRDGITFLACSQVEMPPLMAIEFLCRVADVLSEYLGGLNEDLIKDNFIIVYELLDEMIDNGFPLTTEPSILKEMIAPPNLVSKMLSVVTGNASNVSDTLPSGAGSCVPWRPTDPKYSSNEVYVDLVEEMDAIVNRDGELVKCEIYGEVQMNSQLTGFPDLTLSFANPSILEDMRFHPCVRYRPWESHQVLSFVPPDGEFKLMSYRVKKLKNTPVYVKPQITSDSGTCRISVLVGIRSDPGKTIESITLSFQLPHCVSSADLSSNHGTVTILSNKTCTWTIGRIPKDKTPCLSGTLALEPGLERLHVFPTFKLGFKIMGIALSGLRIEKLDLQTIPPRLYKGFRAQTRAGEFDVRL

SEQ ID NO: 3583 - DNA, 1245 bp, Caenorhabditis elegans
  CDS (1)..(1245)
atgctgaacagtctattttttgtaaatagtagtggtgatgtattacttgaaaagcattggaaatctgttattcatcgatcaatttgcgattatttctttgatattcagaaaaagagcattcaccccgaagatgtgcctccaataatttcaactccacatcattatttgataaacgtatatcagaacaacttatttctagtcgcagttatcacagttgaaacacctcccctcatggtcatcgaatttttacacagagtaattcaaaccttcacacaatactttgatgaattttcggattcttctatgaaagaaaattgcgtgatggtttttgagttgctcgatgaaatgctggacaacggctttccactggtgacggaaatgaacatccttcaagatttgatcaagccgcccaactttctgcgcaatattgctaatcaggtcaccggccgtacaaacctttctgaaaccctgccaacggggcagctatcaaatattccatggaggcgacaaggagtgaagtacacaaataatgaagcgtattttgatgtgattgaggaaattgacgtgattgttgataagcaaggatccactgtttttgccgagattcagggatatgttgacgtttgctgtaaactgtccggaatgcctgatctcacaatgacccttatcaacccaagacttctagatgatgtatccttccatccatgtgtcagatacaagcgctgggagaacgagaaggttctttcatttgttcctccagatggcaactttcgtctgttgtcctatcatattgctgcacaaaatatggttgccattccaatctacgttagacaagtgatctccttgaaaccaaatgctggaaaacttgacctcacagttggaccaaagctaagcatgggtaaagtgctggaagacgttgttcttgaaatcacaatgccaaaatgtgtacaaaactgcaatttggtggcgagtcacggaagaatcgcgttcgacccgacgactaaactattgcaatggaccattggaaaaattgaagtcggaaaaccatcaacactcaaaggatcagttgctgtgagcggaactactgttgcagagaatccaccaatttcactgaaattcaaaattaaccagttggttctgtccggattaaaggtcaatcgtttggatatgtacggcgaaaagtacaagccgttcaagggtgtgaaatatataacgaaagccggtaaattcacaattcgcacttag

SEQ ID NO: 3584 - protein, 414 aa, Caenorhabditis elegans
MLNSLFFVNSSGDVLLEKHWKSVIHRSICDYFFDIQKKSIHPEDVPPIISTPHHYLINVYQNNLFLVAVITVETPPLMVIEFLHRVIQTFTQYFDEFSDSSMKENCVMVFELLDEMLDNGFPLVTEMNILQDLIKPPNFLRNIANQVTGRTNLSETLPTGQLSNIPWRRQGVKYTNNEAYFDVIEEIDVIVDKQGSTVFAEIQGYVDVCCKLSGMPDLTMTLINPRLLDDVSFHPCVRYKRWENEKVLSFVPPDGNFRLLSYHIAAQNMVAIPIYVRQVISLKPNAGKLDLTVGPKLSMGKVLEDVVLEITMPKCVQNCNLVASHGRIAFDPTTKLLQWTIGKIEVGKPSTLKGSVAVSGTTVAENPPISLKFKINQLVLSGLKVNRLDMYGEKYKPFKGVKYITKAGKFTIRT

SEQ ID NO: 3585 - DNA, 1278 bp, Schizosaccharomyces pombe 972h-
  CDS (1)..(1278)
atgagcacaatagaagcaatatatcttgtagacactaatggggcgttactactccagttggagtctcgaggaaggacatctcccataacgttagaacatataaaaaacgaactttttcgctacaaacttcgaaatgaggagcctccatttatattacataacaaaaattttttgatatttcaagagttagaggaagatgtgcgtttgtgtattcctacaacttgcgacactgagcctctctacattcatgatattatgagacgcattgtggatgtagttaaaacattttttggtgggtttaatgcttcaaaggtcgagaaaaatgtttgcgttattgtccagctattagctgaaatgattgattatggatatgcaacttgtatggaaccaaatgcattgcaggacattgtaccactccctagctttatgaataagtttatggcagttactggtctacaaacaaatacaccgactcttgcaagagataccgttccttggagaacagctaaagcaaaatatgcaaccaatgaattttttattcatgtacttgaacgcgtatcagccgtttaccagcctaacggaaaacttgcttttggcacagttaaaagtgatatggaatgcaaatgtcaaatatctggtatgcctttacttttgctgagtttgagacccggcacaaaactagggaatgttcggttccaccagtcagtcaatttaaaaagatggaaacaacatccggatcagattgaattcattccaccggacggaaaatttacattagcttcttttcaaacagactttgctacccagaaatctttgcctgttgttgttgaagcaaaaaataagttggatggaaggttcgaagtacgtattcgaaacaccgggaaaaaatccgttgaaaatttaaaaatcctaataactattcctcaagctctaaagagcgttacggttaccgagggaaattatatttttcgtgcttccaagtatactcatatggaagaaggtattctggagtggtcggtaaaaaaattagcttggacatccccggccttagtgttgacaggattcctggcccccttaaagaaagatgccaattcaaccgaagagtcaagtagctactctaagcttgagcaccttgatttacaatataaacttcaaggatcaacccttcataattttaaagtagagtcattgaagatgcttaatcatccagataaaaaatcttataaaggggtcaagcatacaattattgcacaaaatgtttcatttcgttttcggtaa

SEQ ID NO: 3586 - protein, 425 aa, Schizosaccharomyces pombe 972h-
MSTIEAIYLVDTNGALLLQLESRGRTSPITLEHIKNELFRYKLRNEEPPFILHNKNFLIFQELEEDVRLCIPTTCDTEPLYIHDIMRRIVDVVKTFFGGFNASKVEKNVCVIVQLLAEMIDYGYATCMEPNALQDIVPLPSFMNKFMAVTGLQTNTPTLARDTVPWRTAKAKYATNEFFIHVLERVSAVYQPNGKLAFGTVKSDMECKCQISGMPLLLLSLRPGTKLGNVRFHQSVNLKRWKQHPDQIEFIPPDGKFTLASFQTDFATQKSLPVVVEAKNKLDGRFEVRIRNTGKKSVENLKILITIPQALKSVTVTEGNYIFRASKYTHMEEGILEWSVKKLAWTSPALVLTGFLAPLKKDANSTEESSSYSKLEHLDLQYKLQGSTLHNFKVESLKMLNHPDKKSYKGVKHTIIAQNVSFRFR

SEQ ID NO: 3587 - DNA, 1257 bp, Rattus norvegicus
  CDS (1)..(1257)
atgatccacagtctatttctcatcaactgttctggcgacatatttctagaaaaacactggaagagcgttgtaagccaatctgtgtgtgactatttctttgaagctcaggagaaagctgctgatgttgaaaatgtaccacctgtcatttcaacacctcaccactacctcattagtatctaccgggataagctcttctttgtgtctgtgatacagactgaagtgccacctctctttgtaattgagtttctgcatcgagttgctgacacttttcaggactactttggtgagtgttcagaggctgcaattaaggataatgtggtcatagtgtatgagctcttggaagaaatgttagacaatggattcccactggctaccgaatctaacattctgaaagaactgattaaaccaccaacaattctacgttctgtcgtcaattctattacaggcagtagtaatgttggggacacgctccccactgggcagctgtccaacatcccgtggcgtcgagcaggtgtaaagtacaccaacaatgaagcctactttgatgtagtcgaagagatagatgcgattatagataaatcaggatctacagtctttgcagaaattcaaggtgtcattgatgcttgcattaagctgtctggaatgcctgatctctctctctctttcatgaacccaaggcttctagatgatgtcagcttccacccatgcatccggttcaaacgctgggaatctgagagagttttgtcattcattcctcccgatggaaatttccgactcatatcataccgcgtcagctcacaaaatctagtggcaatcccagtgtatgtgaaacataatatcagctttaaggaaaacagctcttgtggtagatttgatataacaattggaccaaaacagaatatgggaaaaacgattgaaggaatcacagtgactgttcacatgccaaaagttgtgctgaatatgaacctgacaccaacacaaggcagctatacattcgatccagtcaccaaggtactagcatgggatgtggggaaaattactccacaaaagctcccaagtcttaaaggactggtaaatttacagtcaggagcacccaagccagaagagaacccaaacctcaacatacagttcaagatccagcagcttgctatttcaggcttaaaagtgaaccgcttggacatgtatggtgagaagtataagccatttaaaggagtcaagtatatcacaaaggccggaaagttccaagtgaggacatga

SEQ ID NO: 3588 - protein, 418 aa, Rattus norvegicus
MIHSLFLINCSGDIFLEKHWKSVVSQSVCDYFFEAQEKAADVENVPPVISTPHHYLISIYRDKLFFVSVIQTEVPPLFVIEFLHRVADTFQDYFGECSEAAIKDNVVIVYELLEEMLDNGFPLATESNILKELIKPPTILRSVVNSITGSSNVGDTLPTGQLSNIPWRRAGVKYTNNEAYFDVVEEIDAIIDKSGSTVFAEIQGVIDACIKLSGMPDLSLSFMNPRLLDDVSFHPCIRFKRWESERVLSFIPPDGNFRLISYRVSSQNLVAIPVYVKHNISFKENSSCGRFDITIGPKQNMGKTIEGITVTVHMPKVVLNMNLTPTQGSYTFDPVTKVLAWDVGKITPQKLPSLKGLVNLQSGAPKPEENPNLNIQFKIQQLAISGLKVNRLDMYGEKYKPFKGVKYITKAGKFQVRT

SEQ ID NO: 3589 - DNA, 1281 bp, Drosophila melanogaster
  CDS (1)..(1281)
atgtcttcgtcggccattttcgttctggacgtgaagggcaaggtgctgatatcgcggaactaccgcggtgacaacatcgacatggccgtgatcgacaaattcatgccattgctgatggagcgcgaggaggagggcctaatcactccgatccttcagacggcggagactacatttgcctacatcaaaacgaacaatctttatatcgtatccacgacgccgcgcaataagaacgttaatatcgctctggtcttcgtctttctgcacaagatcgcgcaggtctttgtggaatacttcaaggagctggaggaggagtccattcgggacaatttcgtgatcatctacgagctgctggatgaattgctcgactttggctacccgcagaccaccgactcgaaaattctacaggaatacattacgcaggagggtcataagctggagctacagccccgcatcccggtggccgtgaccaatgcagtatcctggcggtccgagggcattaagtatcgcaagaacgaggtgttcctggacgttatcgagtcggtgaatcttctcgcaaacgccaatggcaatgtgctgcgcagcgagatcgtgggcgccattaagatgcgcgtctacttgtcgggaatgccagagctgcgactgggtctcaacgacaaggttctgttcgagagcacgggccgcggcaagtcaaagtccgtagagctggaggacgtcaagttccaccagtgcgtgcggttgtcacgcttcgagaatgaccggacaatctcgttcattcctccggacggcgagttcgaactgatgtcctatcgtctgaacacgcatgtcaaacccctgatttggatcgaatcagtgatcgagcggcatgcccactcccgtgtggagtacatgattaaggcgaagtctcagttcaagcgaagatcgacggccaacaacgtggaaatcgtcataccagtgcccgccgacgcggactcacccaagttcaagaccaccattggaagctgcaagtacgcaccggagcagaacgcaatcatctggacgatcaaatcgttcccgggtggcaaggagtatctaatgcgggcacatttcggtctgccgagcgtggaaagcgaggacaatacggagggcaagccgccaattcaggtgcgcttcgagattccctactttaccacgtcgggcatccaggtgcgctatctgaagatcatcgagaagagcggctatcaggcgctgccatgggtgcggtacatcacgcagaacggcgactatcagctacgcaccaattga

SEQ ID NO: 3590 - protein, 426 aa, Drosophila melanogaster
MSSSAIFVLDVKGKVLISRNYRGDNIDMAVIDKFMPLLMEREEEGLITPILQTAETTFAYIKTNNLYIVSTTPRNKNVNIALVFVFLHKIAQVFVEYFKELEEESIRDNFVIIYELLDELLDFGYPQTTDSKILQEYITQEGHKLELQPRIPVAVTNAVSWRSEGIKYRKNEVFLDVIESVNLLANANGNVLRSEIVGAIKMRVYLSGMPELRLGLNDKVLFESTGRGKSKSVELEDVKFHQCVRLSRFENDRTISFIPPDGEFELMSYRLNTHVKPLIWIESVIERHAHSRVEYMIKAKSQFKRRSTANNVEIVIPVPADADSPKFKTTIGSCKYAPEQNAIIWTIKSFPGGKEYLMRAHFGLPSVESEDNTEGKPPIQVRFEIPYFTTSGIQVRYLKIIEKSGYQALPWVRYITQNGDYQLRTN

SEQ ID NO: 3591 - DNA, 1248 bp, Drosophila melanogaster
  CDS (1)..(1248)
atgatacacagtctgtttattgtaaacagcggcggcgaggtcttcctggaaaagcattggcgctcggttgtctcgagatctgtgtgcgaatacttccttgacgcccagcgcgctgctccatatgatgtgccgccggtgatagccacgccccactactacctgattacagtgcaaagggacacggtgtctttggtcgccgcctgcaagcaggaggtgccgccgctctttgtcatcgagttcctgcatcgcgtggtggacaccttccaggactatttcggcgactgctccgagtccgtgatcaaggacaactatgtggtcgtttacgagctgctggacgagatgctcgataatggcttcccactggccaccgagagcaacatcctcaaggagctgatcaagccgcccaatatcctgcgcaccattgccaacacggtgacgggcaagagcaatgtaagcactactttgccctcgggtcagctgtcggcggttcgctggcgcagaagcggcgtgaggtacaccaacaacgaggcgtacttcgatgtcatcgaggaggtggacgctatcattgataaatccggatccacggtctttgccgagatccagggacacatcgactgctgcattaagttatccggcatgccagatctgacgttatctttcatgaatcctcgcctcttcgacgacgtttccttccatccttgcgtgcgctacaagcgctgggaggcggagcgcctgctctcctttatcccgcccgacggaaacttccgcctgatgtcatatcacattagctctcagtccgtggtggccatacccatctacatcaggcacaacttttcgatcaaaacgggtgagcaggggcgtctggacctcacgattggcccgaggaacacccttggtcgcaccgttgacaaggtgaagctggagctgaccatgccgcggtgtgtgcttaattgcctattgacgccgaatcagggaaagtataccttcgattcggtgaccaagacgctgtcctgggatgtgggacggatcgatgtttccaagttgccaaatattaggggatcggtttccattacgcccggtacgaccaacatcgatgccaatccatccgtgaatgtccagttccaaatctcgcagctggccgtctctgggctaaaggtaaatcgcctggacatgtacggcgagaagtacaagcctttcaagggcgtcaaatacctgaccaaggcgggcaagttccaggtgcggatgtag

SEQ ID NO: 3592 - protein, 415 aa, Drosophila melanogaster
MIHSLFIVNSGGEVFLEKHWRSVVSRSVCEYFLDAQRAAPYDVPPVIATPHYYLITVQRDTVSLVAACKQEVPPLFVIEFLHRVVDTFQDYFGDCSESVIKDNYVVVYELLDEMLDNGFPLATESNILKELIKPPNILRTIANTVTGKSNVSTTLPSGQLSAVRWRRSGVRYTNNEAYFDVIEEVDAIIDKSGSTVFAEIQGHIDCCIKLSGMPDLTLSFMNPRLFDDVSFHPCVRYKRWEAERLLSFIPPDGNFRLMSYHISSQSVVAIPIYIRHNFSIKTGEQGRLDLTIGPRNTLGRTVDKVKLELTMPRCVLNCLLTPNQGKYTFDSVTKTLSWDVGRIDVSKLPNIRGSVSITPGTTNIDANPSVNVQFQISQLAVSGLKVNRLDMYGEKYKPFKGVKYLTKAGKFQVRM

SEQ ID NO: 3593 - DNA, 1266 bp, Danio rerio
  CDS (1)..(1266)
atgattcacagcctgttcttgataaacaatgttggtgatttattcctggagaaacactggaagagtgtcataagccgctccgtctgcgattatttcttcgaagcacgagagaaggcaggggaaccggacaatgtgcctcctgtcatccgcacccctcatcactatctcataaatatctaccgtgacaagatcttcttcgtctctgtcatccaaacggaagtgcctccgctgtttgtaatagaatttctccatcgggttgcagagacttttcaggattattttggagaatgttctgagatgactataaaggaaaatatggtaatagtctatgagctcctagaggaaatgctggataacggcttcccccttgccacagaatctaacatcttaaaagagctcatcagacctcctaatatcctgcgcacaatggtcaacactatcacgggtagcagtaatgttggcgaaacccttcctactggccagctttccacaatcccgtggagaagagccggagtgaaatataccaataacgaagcttactttgatgtggtggaggaaatcgatgccatcctggataagtctggaactacggttttcgcagaaatccagggagttattgatgcttgtgtgaagctctctggaatgccagaccttacgctttcatttatgaacccaagactcctggacgatgtgagcttccatccgtgtgttcgttataagagatgggaaagtgagagagtcatttccttcattccgcctgatggaaacttccagctcatgtcgtatcacatcagtgcacaaaatcttgtagcaatcccagtttatgtgaagcaaaacatcagtttctttgagagcgggtcttcaggaagactggacatcactgtgagccccaagcagaccatggggaaagttgtggagtgtgtggtggtgactatacacatgcctaaagtggttctcagtgccacccttaatgccactcagggaacctacaaatacgacccgcttacaaagattttggtgtgggatataggtaagcttaatcctcagaatacccaaaagcaacccaatctgaaaggaagtctaagtctgcagtctggagctcctaaaccggaagagaacccaagtctgaacattgacctgaaaatccagcagttagccatctcaggactgaaggtgaatcgtctagacatgtacggagagaagtataaaccattcaaaggtgtgaaatatgtcaccaaagctgggaagtttcaggtcaggacatga

SEQ ID NO: 3594 - protein, 421 aa, Danio rerio
MIHSLFLINNVGDLFLEKHWKSVISRSVCDYFFEAREKAGEPDNVPPVIRTPHHYLINIYRDKIFFVSVIQTEVPPLFVIEFLHRVAETFQDYFGECSEMTIKENMVIVYELLEEMLDNGFPLATESNILKELIRPPNILRTMVNTITGSSNVGETLPTGQLSTIPWRRAGVKYTNNEAYFDVVEEIDAILDKSGTTVFAEIQGVIDACVKLSGMPDLTLSFMNPRLLDDVSFHPCVRYKRWESERVISFIPPDGNFQLMSYHISAQNLVAIPVYVKQNISFFESGSSGRLDITVSPKQTMGKVVECVVVTIHMPKVVLSATLNATQGTYKYDPLTKILVWDIGKLNPQNTQKQPNLKGSLSLQSGAPKPEENPSLNIDLKIQQLAISGLKVNRLDMYGEKYKPFKGVKYVTKAGKFQVRT

SEQ ID NO: 3595 - DNA, 1236 bp, Eremothecium gossypii
  CDS (1)..(1236)
atggacgccatggtagcgataagcaaggacatgtcgctgtatcggcaggcggtggggcctgagaagctgtggtactgggcgctgtgccaagcgtgtggggaccccctagagccacaaatgttcctggcacaataccaccaggtgctgattgagtactttgacaaggaggcactgacggtcaagaaactggtcaacaacgcagaccggctggcactactgctacacgccatgctagatgcgggggaggtggcggtgacggattcgaaccgcctgcggcagctggttccgctccgcaacgacctctctaccatcttgaacagcgcgaccaagacgctggcaaataccgtcaagtacgcggactcgaaacagctgttcggggcgccggtcgccacaggcaaggtcgaggcaggccaaactgttccctggcgcaccgccgactgccgctacgtcaataacgaaatctacgtggacctggtggagactgtcaatgccacgctgcgccagaagggttcgtcgctcacgctgatcaacggatcccttagtggcaaaatcgatgtcaaatgctatctttccggcaacccgacagtacagctcaagctgcggaccagcggccatcccctagataactccgcgctccaccgctgtgttgagctgggcgaggctggcgtggccaccatgaactttgtgccacccgacggccggttcacgcttgccgagtatgccatcgacctcagcgccataagccaggccgcccgccgcctcaccaacctcggtctggtgacagtctcgctggcgtccggcctcgggcagcacagggacgagtttgagatcaaggtcatcatcggcaattccacgcaagtcgccgccatcgaggacttgcgcatcaccgtctacttccccgacatatcagacgctgcaaagatcaagatcctacgcaccacccacggcggctgggagtccgacctctcccgtgtccgcggcgtctgggcgtttgacaagcagacggctgtcggatcggtgcccgtcctcagaggctgtgtcgagaacccggaatccactccccatgccccgcccgtcttcccgtcccatctcgcggtaagctacagccatgtcggccaattgcccagcggcattcgcgtcgacaccattgctctctccgatctgcccccggggtcgaaaccgttcaagggtgtaaaatacacctcccgcgccggtgactacatcgttagagcatag

SEQ ID NO: 3596 - protein, 411 aa, Eremothecium gossypii
MDAMVAISKDMSLYRQAVGPEKLWYWALCQACGDPLEPQMFLAQYHQVLIEYFDKEALTVKKLVNNADRLALLLHAMLDAGEVAVTDSNRLRQLVPLRNDLSTILNSATKTLANTVKYADSKQLFGAPVATGKVEAGQTVPWRTADCRYVNNEIYVDLVETVNATLRQKGSSLTLINGSLSGKIDVKCYLSGNPTVQLKLRTSGHPLDNSALHRCVELGEAGVATMNFVPPDGRFTLAEYAIDLSAISQAARRLTNLGLVTVSLASGLGQHRDEFEIKVIIGNSTQVAAIEDLRITVYFPDISDAAKIKILRTTHGGWESDLSRVRGVWAFDKQTAVGSVPVLRGCVENPESTPHAPPVFPSHLAVSYSHVGQLPSGIRVDTIALSDLPPGSKPFKGVKYTSRAGDYIVRA

SEQ ID NO: 3597 - DNA, 1308 bp, Xenopus tropicalis
  CDS (1)..(1308)
atgattgggggactgttcatatataatcataagggcgaggtccttatctcccgggtgtacagagatgacattgggcggaatgctgtggatgctttccgtgttaatgtcatccatgcccggcagcaggtgcgctcgccagtcactaacattgcccgcacaagcttctttcacgtaaaacggtcaaacatctggctagctgcagtcaccaaacaaaatgttaatgctgccatggtgtttgagtttctctacaaaatgtgtgacgtgatgactgcatactttggaaagatcagcgaggagaacataaagaacaactttgtgctgatctacgagctgctagatgaaatcctggattttggttaccctcagaattctgaaacaggagcactgaagactttcatcacccaacaagggattaaaagtcagcatcagaccaaggaggagcagtctcagattactagccaggttactggccaaattgggtggagacgtgaaggcattaagtatcgtcgaaatgagctgttcttagatgtgttagagagtgtcaacctgctaatgtcacctcaagggcaggtacttagcgctcatgtgtctgggcgtgtggtgatgaagagctacctgagtggaatgccagagtgcaagtttggaatgaatgacaaaatagtgattgagaaacaaggcaaaggaaccgctgatgagactggcaaaacgggaaagcaatcaattgccattgatgactgtacattccaccagtgtgtccggcttagcaaatttgactctgagcgcagcatcagctttatacctccagatggagaatttgagcttatgagatatcgaaccacaaaagacatcatcctaccattccgtgtcattcctcttgttcgtgaagtggggcgcacaaagcttgaggtcaaggtggtcatcaaatctaattttaaaccttcacttttggctcagaagattgaggtgaggattccaaccccactcaacaccagtggagtacaggtcatctgtatgaaaggaaaagcaaagtataaggccagtgagaatgccattgtgtggaaaataaagcgcatggctggtatgaaggaatctcagataagtgcagagattgagctgcttcctactaatgataagaagaaatgggctcggcctccaatatccatgaactttgaggtcccgtttgccccatctgggctcaaagtgcgttacctgaaggtgtttgaaccaaaactaaactacagcgaccatgatgtgatcaaatgggtgcgatacattggccgcagtgggatctatgagacacggtgttaa

SEQ ID NO: 3598 - protein, 435 aa, Xenopus tropicalis
MIGGLFIYNHKGEVLISRVYRDDIGRNAVDAFRVNVIHARQQVRSPVTNIARTSFFHVKRSNIWLAAVTKQNVNAAMVFEFLYKMCDVMTAYFGKISEENIKNNFVLIYELLDEILDFGYPQNSETGALKTFITQQGIKSQHQTKEEQSQITSQVTGQIGWRREGIKYRRNELFLDVLESVNLLMSPQGQVLSAHVSGRVVMKSYLSGMPECKFGMNDKIVIEKQGKGTADETGKTGKQSIAIDDCTFHQCVRLSKFDSERSISFIPPDGEFELMRYRTTKDIILPFRVIPLVREVGRTKLEVKVVIKSNFKPSLLAQKIEVRIPTPLNTSGVQVICMKGKAKYKASENAIVWKIKRMAGMKESQISAEIELLPTNDKKKWARPPISMNFEVPFAPSGLKVRYLKVFEPKLNYSDHDVIKWVRYIGRSGIYETRC

SEQ ID NO: 3599 - DNA, 3102 bp, Gibberella zeae PH-1
  CDS (1)..(3102)
atgaacggtgttattgaggcgcttcacatttacgatgataaccggaatcctattctctcgcatacctatgcagggcggcccatgtcggcaacccatcttctacccctctacctagaacatcccgcaccgcaaccgaacctcatctacctacccaacacaagtcctccaacgctcgtctttaacttaacgcatgcgaacctcttattcattgcgacatcgtcgaccgagatcgaaccgctgctagtctttgagttcctacaccgcataatagatgcctttgaggacttccttggcgcgccgctgctggccgtcaagattgagaacaattatgacattgtcgcacagctgttaacggagatgtgcgatgccggtataataagcacgacagaacccaatgctctgcgcgaagtggttgagcaggaaggttgggtcgggaaattgttgggaagcatcaatttgcctggaaaagcacctttgagcgccaacttttcaaattcgagcacgtcctccattttgccatcaaactcgaccgctttaccgtggaggagagcgaatgtacgacacacgtcaaatgagatgtacgcagatatcgtggagaccttgtctgttacgctcgctccatcaggaaggccgctggcagctttcgccaatggaaccatcgcattcacttccaaggtatcaggtgttccagatattaccttgaacattacaagcccgtccggaaaacataacctgggcagtattatggaactaccagtatttcacccgtgtgtacgacttaaccgatggaaggagagaccaggcgaattaagcttcgttccgcctgatggaaggtttattctggctgggtacgaagtggacctgctgccctttacgagtgggaagagcggaagtctcagttccaacaatctcaagttgcctattaacatggaggtcaagacgggattgggtgcgacaggatcagactttgaggttcgtcttcaagtcaacaagattctcggagcaccttcgccagcatcatcgggtctaggaagaggcggcagtggaggccgacttggaggacctcatccggggtcaccaggagctcctttgatggatgacttgaccgtgacgattccactgccagctgatgtcagaaacctatctgagattcggccaagcaagggcgacgcaagcttcaacccaggcgaaaagtttttagaatggtatattcccgcaaaggaattgtcaggtggtacaagctactttggtctcaggtgtactgttgtgggaccgctggcaggcgaagatgatgagggattcgatcccaatgggtttggatttaacaccgattacacattcgatgggccctatcagagcgcacccgtggccaaggccgcaaataatcaagacagcaaggacgatgacaaggacaccaagaagatcgcacagaacaagatattgatgccaacttcagcatcattgatgcagaatgattccctagacatgtcatgtgctcacaaacgtaatgttgaagagcctcggaggatgtgccgaaaaagcaacggagctccgaagctgctacaggtcggggcatcggttctaagtgtgggggtagacccggagccccaagttcgaggtgcaaaggcccctgtagcaacgacgcttcggcatgcgatcgtcgggaacctgtatccgacaattctcatgagcattgaaagaaaactccccccaaatccgaggaattcgaatgaaacgctcactccgtccatcttgacctctatcctctgccccgccgctcagacggcaatggcaacaatcacgatgcggtgccgccacacttatactctagctactcacattcgctcctcggcttctgcttctccaacaacgacgacgacgacgacaacaacaacaacaacaacaacccgcagtcgaccgtcattacagactttaccacaaagacagcatctattacagcagcaaagatggcgatctacacatcgaggcggcacaagaacggcactcttcttcccaggtcaaggtgttcagcgtgttggcatgttgaccccatggctcgaggccttcccttcgacagcatcgcaactacgagacgaaattgacgaatacatgggctataagctctccgacgttattcagaatgggccttcgaggctgctcactgaaacccccaatgcgcaacccgccatcatggctacctcaatattcatattgcgcattcttgagcgtgaattcggtttcaaagtcaccgaccacttcgacgtcacactaggccactcacttggtgagttcgccgcggtcgtagctggcggttacatctccttccaggacagtctaaacctggtgcgcaaacgagcagaggccatgacggaagctacgaaacatgcgatcgaaaagtacggcggggaatatggcatggtcgccgtcatatctcatccggaacacatggacaaacttgttgaagccatccgggagtttgttgggatttcggctgaggacctggcagatctgccgcctattgagcaggtgttaatagccaacataaacagcaagaatcagatcgtattgagtggcaacatcgaacggataaagacactcattgcccacgtccgccaattcctcggctacgacccgcgtgcagtccgtctcaaggccgatagtccttttcacagccccattatgaagcccgccgttgcggtgatgcgccagctactcgaagaacccagccaagtgaagggtcgtgaaaatgaggacattgttacattccctgggctcttgccaattgtcagcaacgtgtctgcgcggccagtttgctgcaagaatgagctcaaggatttattagcccgtggctgtctcgatacagttcgctggtgggacagtatcaagtacttggaccaagaggcccgtatacgacgatgggtgggcgtcggaccgggcaaggtcggtcgcaacctcgtaggaaaagaggtcggtatgcgcggtaaagatctagtaaagggtggaggcgtgtgggccatcacagatccatcagaggttgaagaggttctaagaggacttgaagataccgccggtctaatggaagatgacgaatattcagagtga

SEQ ID NO: 3600 - protein, 1033 aa, Gibberella zeae PH-1
MNGVIEALHIYDDNRNPILSHTYAGRPMSATHLLPLYLEHPAPQPNLIYLPNTSPPTLVFNLTHANLLFIATSSTEIEPLLVFEFLHRIIDAFEDFLGAPLLAVKIENNYDIVAQLLTEMCDAGIISTTEPNALREVVEQEGWVGKLLGSINLPGKAPLSANFSNSSTSSILPSNSTALPWRRANVRHTSNEMYADIVETLSVTLAPSGRPLAAFANGTIAFTSKVSGVPDITLNITSPSGKHNLGSIMELPVFHPCVRLNRWKERPGELSFVPPDGRFILAGYEVDLLPFTSGKSGSLSSNNLKLPINMEVKTGLGATGSDFEVRLQVNKILGAPSPASSGLGRGGSGGRLGGPHPGSPGAPLMDDLTVTIPLPADVRNLSEIRPSKGDASFNPGEKFLEWYIPAKELSGGTSYFGLRCTVVGPLAGEDDEGFDPNGFGFNTDYTFDGPYQSAPVAKAANNQDSKDDDKDTKKIAQNKILMPTSASLMQNDSLDMSCAHKRNVEEPRRMCRKSNGAPKLLQVGASVLSVGVDPEPQVRGAKAPVATTLRHAIVGNLYPTILMSIERKLPPNPRNSNETLTPSILTSILCPAAQTAMATITMRCRHTYTLATHIRSSASASPTTTTTTTTTTTTTTRSRPSLQTLPQRQHLLQQQRWRSTHRGGTRTALFFPGQGVQRVGMLTPWLEAFPSTASQLRDEIDEYMGYKLSDVIQNGPSRLLTETPNAQPAIMATSIFILRILEREFGFKVTDHFDVTLGHSLGEFAAVVAGGYISFQDSLNLVRKRAEAMTEATKHAIEKYGGEYGMVAVISHPEHMDKLVEAIREFVGISAEDLADLPPIEQVLIANINSKNQIVLSGNIERIKTLIAHVRQFLGYDPRAVRLKADSPFHSPIMKPAVAVMRQLLEEPSQVKGRENEDIVTFPGLLPIVSNVSARPVCCKNELKDLLARGCLDTVRWWDSIKYLDQEARIRRWVGVGPGKVGRNLVGKEVGMRGKDLVKGGGVWAITDPSEVEEVLRGLEDTAGLMEDDEYSE

SEQ ID NO: 3601 - DNA, 1632 bp, Candida glabrata CBS138
  CDS (1)..(1632)
atggtttaccaggcagtgtatattactgatgcggagaataagctggtgtttcagcatttgctgaatgccaaggctcctgagttcagcaagatgtgggtgaagttgtcagctatgcatcctcaattggtggcaccacgtaattaccaggacaacatatatacaattgagagggattctggtggaggaagtgtttcaagcacttcagaggaggtaattgggtcgtatggtacagataatactatttacaagtacaagtcacagctggcggggtccgcgctgacctattggtgcttgcattctaatgacagcaatgtgtattacatggagccactatttgccatgcaagtatttgagacgagactgcatgagtattttgacaaagaggaactaactatcactaagatcaccaacaatgctgaccgagtgtcgattatctgcaattatattctgaatggtggatattataatgtagctggcatgtatgatagtaggattaaagagattgtaccggagaggtctgatctatccaaactcataagtagtactgcacacacgatacaaagtgctgttaacaagcaacgaaatactcccggatttggtaatggtatgggtcaatctatgggtagcaaggtttcacacatcggaagtactttgaagggagatgactctgttgctccatggaggaatggcaagaacattcacaatgatcggaatgagctctatgctgatgtgcgagaagttatacaagtggtgtatcaaaagaaatattccagtaagaagaatgacagtaggcgcaaaatatttggaaggcgaagtggtcacttagaatatgtacgtggtaatattagtggtagtgttgatatgaggtgttttttaactgggaacccattggtagagatagcgttaaagcaaggtggcctagacattggtatacctggttttcacgattgtgttgacaagacaagtttgttgaagcaagaaaagatatcaaagttgtcatttattccgccagatggtaggtttacgctaatgcagtataacatcaatctcgatcaggggaagagacactcggtaggcttagtccatgcggatatagaggaccatctaggtactttgggagacgaatttgaggtcacactaaatatctctagttctacaagtgtgaaacatatagaagacatggaagtgatgttatactttgggctatctcacggcaaccggaagaaagacacgcatctatcatcggatgaggaagagttttctgtcgagcaattcagaattaaaccattgcaaatcacgcatggtcgattagagaacatgtcttcaggagtacataaaagaagtaagtgggtgtttgacaaggaagtgtctacaggtaccatgcccgtacttcgaggttgtgttgagagacagcgcagcgatgaagatgtcaaggacagcaagggaagcgacagcaccgctcagagaatgttggtgttgcaaagtattaacatcagttacaagcatacaggctcgagcaatggcttgcaaatcgaatctatcaacgtcgacacctctgctgatctgcaacgaaacttattcaaaggtgtcaaataccacacaatcgccaaagactaccaagtaagagtataa

SEQ ID NO: 3602 - protein, 543 aa, Candida glabrata CBS138
MVYQAVYITDAENKLVFQHLLNAKAPEFSKMWVKLSAMHPQLVAPRNYQDNIYTIERDSGGGSVSSTSEEVIGSYGTDNTIYKYKSQLAGSALTYWCLHSNDSNVYYMEPLFAMQVFETRLHEYFDKEELTITKITNNADRVSIICNYILNGGYYNVAGMYDSRIKEIVPERSDLSKLISSTAHTIQSAVNKQRNTPGFGNGMGQSMGSKVSHIGSTLKGDDSVAPWRNGKNIHNDRNELYADVREVIQVVYQKKYSSKKNDSRRKIFGRRSGHLEYVRGNISGSVDMRCFLTGNPLVEIALKQGGLDIGIPGFHDCVDKTSLLKQEKISKLSFIPPDGRFTLMQYNINLDQGKRHSVGLVHADIEDHLGTLGDEFEVTLNISSSTSVKHIEDMEVMLYFGLSHGNRKKDTHLSSDEEEFSVEQFRIKPLQITHGRLENMSSGVHKRSKWVFDKEVSTGTMPVLRGCVERQRSDEDVKDSKGSDSTAQRMLVLQSINISYKHTGSSNGLQIESINVDTSADLQRNLFKGVKYHTIAKDYQVRV

SEQ ID NO: 3603 - DNA, 1494 bp, Kluyveromyces lactis NRRL Y-1140
  CDS (1)..(1494)
atgattgttagcatatatgtcaatgataggtgccaggaaacgctattccagtactcaacagtagcagagtgccctacttttcggcaactagttgttaaactacaaggtaaagacgaatcatgggagtctaaatactgcaatgagataaattctgagttgaagctttgcagacacgtttctttgctgaatccagttgtttattggtgtttaatttcgtgttcagagtccacagtttccgtggtatctttgttagaagagatagatttactgttgttacaatatttcgataaggaccaattaacgaagcagaagataaataataacctcgatcgattatcgatgcttttccattgtatccttgatgctgggcaaccggtgataacagactcgaaccgtttaaaggcaatggtcccaagtagaaacgatttatcgaaattgttgaagacgacaaccaatacaattaccaagaccttacaacaaccggacgggtcaatgtttaagaatggtccggaaaaatcaaggtttagtggcagtagatatccatcttcatccgcttcatccgtttcctcgttccacgttgggtctcctggctcctcgttagttgatcattccgttgatgaatctggtgtcccatggagaatgagcggcatcaactatgctaataacgaaatattcatcgatatgagtgaggaaattaacgctattgtggaaaaggggaaactgttaaccggacatatcaagggttgtatcgacttaaacaaccatctcagcggacagccattggttgagatgaaacttgggctcttagaccacaagcttagccacttaaacacgactttccatagatgcatcttagaggataaggcgaacagcataaatgatttaatcgctgggaaattcactaagctaacgtttgtacctcctgatggacgtactaggctctgtcaatataccctaccgttggtgaaaagagactcaaacctcggcattatagacgtaaatttacaaagcagtttaggtaaaagacttgacgaatttgaggtccgcgtcaccgttggaatgagcacgacggtgaaagaaatagaaaacatgagcatgactatcaggatgaatagaaattttaagggaatagtacgtgtcatgagaaacactcacggcggtgtcgaaacaaatatgactcgtggcgaagttaattggcatttggacaaaaacatggtatgcggttcaatggctgtactacgttgtatagcggaactggaacccgaactcgcctccaatgaccaaacatctagtagatcttcggttgttcaaccacctagttcacacttaacatccttactacaacctagtttcatcaaatgttactacgaacacaaatcccagcttccctccggaatcaaacttcaatcaatcgacgtagttaatggaggtccaaaaaaaccgttcaaaggtgttaagtacctcacaaagactggttcgctagagtataggtga

SEQ ID NO: 3604 - protein, 497 aa, Kluyveromyces lactis NRRL Y-1140
MIVSIYVNDRCQETLFQYSTVAECPTFRQLVVKLQGKDESWESKYCNEINSELKLCRHVSLLNPVVYWCLISCSESTVSVVSLLEEIDLLLLQYFDKDQLTKQKINNNLDRLSMLFHCILDAGQPVITDSNRLKAMVPSRNDLSKLLKTTTNTITKTLQQPDGSMFKNGPEKSRFSGSRYPSSSASSVSSFHVGSPGSSLVDHSVDESGVPWRMSGINYANNEIFIDMSEEINAIVEKGKLLTGHIKGCIDLNNHLSGQPLVEMKLGLLDHKLSHLNTTFHRCILEDKANSINDLIAGKFTKLTFVPPDGRTRLCQYTLPLVKRDSNLGIIDVNLQSSLGKRLDEFEVRVTVGMSTTVKEIENMSMTIRMNRNFKGIVRVMRNTHGGVETNMTRGEVNWHLDKNMVCGSMAVLRCIAELEPELASNDQTSSRSSVVQPPSSHLTSLLQPSFIKCYYEHKSQLPSGIKLQSIDVVNGGPKKPFKGVKYLTKTGSLEYR

SEQ ID NO: 3605 - DNA, 1524 bp, Kluyveromyces lactis NRRL Y-1140
  CDS (1)..(1524)
atgtcatcatgtttccttttgctcgatgagacgtatgaaccgctaataagaagagcactacgaccgatccatttccttgatgatgctatacttcaattacagaataaccttaaacatcataagggatgcacaaaacctatattcgaaggcaatgggtggcattacgctgtgataactcgtgataacctatatttcgctatgataatgcaagtgaataatagtgtttctcccataagtgtgttacattacttagatgaaatctaccagttatgcaggaaatttatgggcatgaagcttaacaagctcaatgtacgagataacttccatttaattttcgaagttattgaggaatcatccgattatggtatcatacaggttacaaactataatattatacatgatttcataaaggtagaagttatcaaacccgacgatgattccgagaatacagcctctgaaaaacatgagctgccaccaggtgaccaggatgaaacattcataaacagttatattcttcgaacgatgacatctgctgtctcatggcgtcctaagggtatccattacggtaagaacgaattctttcttgatgtaattgagaaattagaattcattatggatttcgaggaaggtgtggtcagaaataatgtaatcaacggaacaataatatgccggagttatttgtctggtatgcctcaattgagtataggattgaataagttgatgcagaagaatgtacacttcatgaaacgtttaaaattccatgaatgcgtagacctgcataccttaatcaaggaagaatctccagttattaagtttattccaccggatggagaatttgagctttgtaattataaattgaatagaccgctacttgatgaaccagttataaaactacagtcattcgggctatcccaaaaacctagaaagaaccaagaaacccaggataagctattgttgaaagctgccataactacgcatttcaaagctcaggatagtgcaaaggagcttttaattaaaattccgataaagtcagttattcgaaagtggaatattgacctcgaaaagccgcccctgtttaaaagcgatataggagatgttgtgttcgacataacagcgggttcgataatttggaaaattaacaatttgaagggtggtcatggaaacaagaattatgggcttaaatgcatgtttgaaatatgggaccgccagattcatgaagctttagaggtgcagctacgaaattccatggacccaccacctttaaggactggccccaaactagagagaatttgggatcagtaccatggaaaaactacggaatatgatggcaatgagaaccaaaaagaagatgtagacaagttcgcgttaattgctatgtcgtttgaaatcccttattatgcagtgagcggtttaaaagttgagtatttcaagatcgaagaacctcaattaaactaccaatctttcccatgggttagatacaagacagtcaatgataacgaatatatataccaggtttccatttag

SEQ ID NO: 3606 - protein, 507 aa, Kluyveromyces lactis NRRL Y-1140
MSSCFLLLDETYEPLIRRALRPIHFLDDAILQLQNNLKHHKGCTKPIFEGNGWHYAVITRDNLYFAMIMQVNNSVSPISVLHYLDEIYQLCRKFMGMKLNKLNVRDNFHLIFEVIEESSDYGIIQVTNYNIIHDFIKVEVIKPDDDSENTASEKHELPPGDQDETFINSYILRTMTSAVSWRPKGIHYGKNEFFLDVIEKLEFIMDFEEGVVRNNVINGTIICRSYLSGMPQLSIGLNKLMQKNVHFMKRLKFHECVDLHTLIKEESPVIKFIPPDGEFELCNYKLNRPLLDEPVIKLQSFGLSQKPRKNQETQDKLLLKAAITTHFKAQDSAKELLIKIPIKSVIRKWNIDLEKPPLFKSDIGDVVFDITAGSIIWKINNLKGGHGNKNYGLKCMFEIWDRQIHEALEVQLRNSMDPPPLRTGPKLERIWDQYHGKTTEYDGNENQKEDVDKFALIAMSFEIPYYAVSGLKVEYFKIEEPQLNYQSFPWVRYKTVNDNEYIYQVSI

SEQ ID NO: 3607 - DNA, 1578 bp, Debaryomyces hansenii CBS767
  CDS (1)..(1578)
atgtttgaggcagtatacatagcagattcaacgaattcgttggtgtttgagtacttgattaatttatcttgtccaaaatttaattccttgaagaacttaatcaaattggacgaatatgatcaatcaaagctgaggttagttgaaatcaattcggagtattttgttgcatttgagaagatgtccaatcttgtaatatatttgttgtgctcttccaagaatgatccaaaccctgtaatgccgtttgtgtttataaatcgtttggttgaagtgatggaagattattttggaagcccgttagcggttacgaagatagatgcaaatattgatacgttgacattactcgtaaatgagatgattgacgatggaattcctaatgttacagacttcaatcggttaagggatttgattccgctcagtaatttgtttaccaagttgttgagtactagtaatgacttggctagtgcggtgtcaaacaagtccttatcatccataacccataatactcgaaaggctgaatcactctcttcaaacatgcagcagacgtcggtgccttggagaagggataatgttaagtatactaacaacgagatgtacgttgatgttgtggagactataaacgtgatcttgaaacccttgcctaaacatatcggcaaggaatcaaacatgttaggctcatcaaagggttttgattctgcattttattcgacctctttaaaggcatcgtccaaattggtcccgatagtcggaacaatcgatggtcaaataaattttatttcccatttgacgggggttccctacttgcaaatgatattaaataaaggagggttaaaaatggatttaccttctttccacgaatgtatagaattggataaatggaccaacgatccagggaatttatcgtttattccacctgatgggaattctacattaatgaactatcaaattgatttggacacaataaacaaaagagaccaaaagggcatgctcggtattgtcgacatagactaccagcatggtttgggtactaaccagaatgagtttgaaatccgattattcattaacagcaataaatcagtacctaaaattgaaaatttatgcatagaaatacattgcgataatgtaaacgaaggtgaaacttcatctgctgatgattctagtggtaatagtagcataaacgtaagcaacattagagctagcagaataacacatggtgatttttcctttaaaggaagcggtaaaggtgaatggaacatacgcaatatatctacaggcacgcagccgatgctccatgggtctatagtttcagatggatcttatgactccctggagttagctagtgctctaaaagaacacgataagtctcatttgggtagtgacaaagaatctaccccgcttgcaatggaagctatcaaacccattcacttgaaattatcgtatagtcacaagggatgtgttcccagcggaatgaaggttgattccttaaagatcgtcagtgctaagggtttgggagatacagtcaaaccttataagggggttaagtatatggctaagaccggcaattttataatacgctcatag

SEQ ID NO: 3608 - protein, 525 aa, Debaryomyces hansenii CBS767
MFEAVYIADSTNSLVFEYLINLSCPKFNSLKNLIKLDEYDQSKLRLVEINSEYFVAFEKMSNLVIYLLCSSKNDPNPVMPFVFINRLVEVMEDYFGSPLAVTKIDANIDTLTLLVNEMIDDGIPNVTDFNRLRDLIPLSNLFTKLLSTSNDLASAVSNKSLSSITHNTRKAESLSSNMQQTSVPWRRDNVKYTNNEMYVDVVETINVILKPLPKHIGKESNMLGSSKGFDSAFYSTSLKASSKLVPIVGTIDGQINFISHLTGVPYLQMILNKGGLKMDLPSFHECIELDKWTNDPGNLSFIPPDGNSTLMNYQIDLDTINKRDQKGMLGIVDIDYQHGLGTNQNEFEIRLFINSNKSVPKIENLCIEIHCDNVNEGETSSADDSSGNSSINVSNIRASRITHGDFSFKGSGKGEWNIRNISTGTQPMLHGSIVSDGSYDSLELASALKEHDKSHLGSDKESTPLAMEAIKPIHLKLSYSHKGCVPSGMKVDSLKIVSAKGLGDTVKPYKGVKYMAKTGNFIIRS

SEQ ID NO: 3609 - DNA, 1191 bp, Yarrowia lipolytica CLIB99
  CDS (1)..(1191)
atggaagcgatatttatcacggatgccacgtctctcattttcgagtaccccgtgtcgggctcaccacccgcgtggaagacgatcagtgaggaaatcgacctgcatccgggctcggacatcatccaaagcacgtcgtcgtcaaactacgtcatctaccggttcaagcgggccagcgggctcacgttcgtgattgtggctgatccaacggtttcgccgtcagtaccagcgcagtttgtgcaactgctcaccgactccatggcccagtactttgtgctcggcaagctggactccaactatgacacagtgactctgatcctgagtgagacgctggacaacggagtgccttatctcagcgaaccggaccaagtgcgcgaattcgtgagcaagggaggcgtgctcagtaaactgctgagccagagtgcaaccccccacaaggtgagccgctcggcggccgatggaccctactggagaagacagaacgtgcgacacacgcagaacgagctgtttgtggacgtcgaggagtcaatcacgtgtgttgtccgacgtcagggggcttctaagactacacccgtcgtttcatatgtcgacggctctgtgtacctcacatcgcatctctcaggtgtccccgaaatcgaactttctctcagtcgtcctattgctggaggcaaacatgtgtgcattacaaaatcgggacccgccagccgctttcgtttcacccctcctgacggaagaacaaaactgctgacgtacacacaggatgtgaacgtgtcctcatatctggtcaattgcacgttccacacgggtctggggctgcagaaggacgaatttgaggtccgagtgggcgtgctcatgaacagaggagtcaaggctgtcgacaatctcgcggtggaggtgtttggaggaaaaatcaagacattgcgaaacacgaccggagactttattactaatcaaaagggcggggtgtggaatctgggcaccacgacccccatggggttcaacgcaacgtttagaggcatctgtgacggtaatgtgagtcatgtaaccctgaagtactcgctgcagggtgctgttccctcgggtctcaaggtggacagtgtgaacattgtggccgcccggggtctgggcgagggagtcaagccatacaagggagtcaagtatgccaccgatgtggctgagtatgtggtgagatag

SEQ ID NO: 3610 - protein, 396 aa, Yarrowia lipolytica CLIB99
MEAIFITDATSLIFEYPVSGSPPAWKTISEEIDLHPGSDIIQSTSSSNYVIYRFKRASGLTFVIVADPTVSPSVPAQFVQLLTDSMAQYFVLGKLDSNYDTVTLILSETLDNGVPYLSEPDQVREFVSKGGVLSKLLSQSATPHKVSRSAADGPYWRRQNVRHTQNELFVDVEESITCVVRRQGASKTTPVVSYVDGSVYLTSHLSGVPEIELSLSRPIAGGKHVCITKSGPASRFRFTPPDGRTKLLTYTQDVNVSSYLVNCTFHTGLGLQKDEFEVRVGVLMNRGVKAVDNLAVEVFGGKIKTLRNTTGDFITNQKGGVWNLGTTTPMGFNATFRGICDGNVSHVTLKYSLQGAVPSGLKVDSVNIVAARGLGEGVKPYKGVKYATDVAEYVVR

SEQ ID NO: 3611 - DNA, 1257 bp, Canis familiaris
  CDS (1)..(1257)
atgattcatagccttttcttgatcaactcctctggagatatattcctggaaaaacattggaaaagtgtggtcagccgatctgtttgtgactacttttttgaggcgcaagagagagctactgaggcagaaaacgtacctccagttatccctacccctcaccactatctcctaagtgtttaccgtcacaagatcttttttgtggctgtgatccagacagaggtccctcctctttttgtcattgagttccttcaccgagtagtggacacatttcaggattattttggagtctgttcagagccagtgatcaaagataatgtggttgtggtttatgaggtactggaagagatgcttgacaatgggtttccattagctaccgaatcaaacatcctcaaagaactgatcaagcctcccactatccttcgaacagtggtcaacacaataacaggaagcaccaatgtgggtgaccagcttcctactggacagctctcagtggtgccctggcgacggactggggtaaagtacaccaacaatgaggcctattttgatgtgatcgaagagattgatgccatcattgataaatcaggttccacaattactgccgagatccagggggtcattgatgcctgtgtcaagctgactggaatgccagaccttacactttccttcatgaatcctcggctgttggatgatgtcagcttccatccttgtgttcgtttcaagcgctgggaatctgagcgtatcctctccttcatccctcctgatggaaacttccgcctgctctcttaccatgtcagtgcacagaacctggtggcaattccagtgtacgttaaacataacatcagtttccgggacagtagctcacttggacgctttgaaataacagtaggaccgaagcagactatgggaaagaccatagagggagtgatcgtcaccagccagatgcccaaaggagtcctaaatatgagcctcacaccatctcaggggacacacacatttgacccagttaccaagatgctgtcatgggatgtaggaaaaataaatccccaaaagctgccaagtttgaaggggaccatgagtcttcaggctggagcttccaaacctgatgagaaccccacaattaacctgcactttaagatacagcagctggccatttccggactcaaggtgaatcgtctggatatgtatggagaaaagtacaaaccctttaagggcataaaatacatgacaaaagctggaaagttccaagttcgaacctga

SEQ ID NO: 3612 - protein, 418 aa, Canis familiaris
MIHSLFLINSSGDIFLEKHWKSVVSRSVCDYFFEAQERATEAENVPPVIPTPHHYLLSVYRHKIFFVAVIQTEVPPLFVIEFLHRVVDTFQDYFGVCSEPVIKDNVVVVYEVLEEMLDNGFPLATESNILKELIKPPTILRTVVNTITGSTNVGDQLPTGQLSVVPWRRTGVKYTNNEAYFDVIEEIDAIIDKSGSTITAEIQGVIDACVKLTGMPDLTLSFMNPRLLDDVSFHPCVRFKRWESERILSFIPPDGNFRLLSYHVSAQNLVAIPVYVKHNISFRDSSSLGRFEITVGPKQTMGKTIEGVIVTSQMPKGVLNMSLTPSQGTHTFDPVTKMLSWDVGKINPQKLPSLKGTMSLQAGASKPDENPTINLHFKIQQLAISGLKVNRLDMYGEKYKPFKGIKYMTKAGKFQVRT

SEQ ID NO: 3613 - DNA, 1434 bp, Canis familiaris
  CDS (1)..(1434)
atggtgcgaaaccctcctttcttccgggttctgaccccagttggttactttgaagctgtcagtcaggcaatctactgggcagcccagctcggggtcctcgcggcctcttcagctgcctcagccttggtccggagtggacctggcgccgaatcactggctggcccaggtgtcgggaaaatgatccacagtctatttctcataaactgttccggtgacatatttctagagaagcactggaagagcgttgtgagccagtctgtctgtgattatttctttgaagctcaagagaaagctgctgatgttgaaaatgtaccacctgtcatttcaacacctcatcactacctcatcagtatctacagggataagctcttctttgtgtctgtcatacagactgaagtgccacctctctttgtaattgagttcctacatcgagttgctgacacttttcaggactactttggtgaatgttcggaagctgcaattaaggataatgtggtcattgtatatgagctcttggaagaaatgttagacaatggatttccactggctactgaatctaatattttgaaagaactgattaaaccaccaacaattctacgttctgtcgtcaactctattacaggcagtagtaatgttggggacacactccccactgggcagctgtccaacatcccatggcggcgggcaggggtaaagtacacaaataatgaagcctattttgatgtcgttgaagaaatagatgcaattatagataaatcaggatctacagtgtttgcagaaattcagggggtcattgatgcttgcattaagctatctggaatgcctgacctttctctttctttcatgaacccacggcttctcgacgatgtcagcttccacccctgcatccggttcaagcgctgggaatctgaaagagttttgtcatttattcctccagatggaaatttccgactcatatcgtatcgtgtcagctcacaaaatctagtggcaataccggtgtatgtgaaacatagcatcagctttaaggagaacagttcttgcggtagatttgatattacaattggaccaaagcagaatatggggaaaactattgaaggaatcacagtaacagttcatatgcccaaagttgtgctgaatatgaacctgacaccaacacaaggcagctatacatttgatccagttaccaaggtactaacatgggatgtgggaaaaattactccacaaaagctcccgagtcttaaaggactggtaaatttacagtctggagcacccaagccagaagagaatccaagtctcaacatacagttcaagatccagcagcttgctatttctggcttaaaagtaaaccgcttggacatgtatggggagaaatataagccatttaaaggagtcaaatatgtcacgaaagctggaaagttccaagtgagaacatga

SEQ ID NO: 3614 - protein, 477 aa, Canis familiaris
MVRNPPFFRVLTPVGYFEAVSQAIYWAAQLGVLAASSAASALVRSGPGAESLAGPGVGKMIHSLFLINCSGDIFLEKHWKSVVSQSVCDYFFEAQEKAADVENVPPVISTPHHYLISIYRDKLFFVSVIQTEVPPLFVIEFLHRVADTFQDYFGECSEAAIKDNVVIVYELLEEMLDNGFPLATESNILKELIKPPTILRSVVNSITGSSNVGDTLPTGQLSNIPWRRAGVKYTNNEAYFDVVEEIDAIIDKSGSTVFAEIQGVIDACIKLSGMPDLSLSFMNPRLLDDVSFHPCIRFKRWESERVLSFIPPDGNFRLISYRVSSQNLVAIPVYVKHSISFKENSSCGRFDITIGPKQNMGKTIEGITVTVHMPKVVLNMNLTPTQGSYTFDPVTKVLTWDVGKITPQKLPSLKGLVNLQSGAPKPEENPSLNIQFKIQQLAISGLKVNRLDMYGEKYKPFKGVKYVTKAGKFQVRT

SEQ ID NO: 3615 - DNA, 1365 bp, Cryptococcus neoformans var. neoformans JEC21
  CDS (1)..(1365)
atgtcaaagatagatggaatcatcatcctagacacaaacggcaagcccatcatctgttcaaacttcgcctcatatctcccatcgtatgccacagcacatatagatacgttcaatgcagctcggaagagggcattggttaatggccctggtagagggatggatcccgttttatgggtgaacacacttgacaatggaaggacaggcatgttgggaggaggactgtgccattcagaacgaaatgggctgtactttttggtgccaataggacaagaagtgaatccgctcttcgcattctcattcttagagtctcttttagacattcttcgaaattacttgggtgatgtgacggaaacgacaatcaaagataactttgacattgtttatatgctaattgaagagactcttgatgagggacatcccatgacgacagagacggagatgttgaaggaaatcgttcttcctccaagcttggtccggaagatattcggtgcagccggtgtttctggtcttcagtctactacaacggcgccgtttacagcaccgataccttggcgacgcccgggagtgcgacataataataacgaaatttactttgatattgaggaatgtctggatgcaattgtggataggagagggaatactttgacggcctctgtctggggtcgtatcaactgtaactctcgcttatccggtaatccggatctccttcttaacttctccgatccaaaacgcatgcatcagtgctcattccacccttgtgttaggtattctcgatggatgaaggatggtgttctctccttcatccctccagatggcaagttcagactgctagagtatgaatctgtcatcaacaacgcgagaacttctgttcctatacagttgaaagctggattgacgattggggattacggcggacgcttcacacttactctatcatctcgccttaacactcgacctctggaggatataaatgtgtctatcttccttggcaaaggcgcaacatcggttagtgccaatgcctctggtgaaaggcgacctttacatacccagattgggaaggaggaagctgctgaaggttttgtgggagggggaaattgggagtttgatccgcatacgcaaattctcaaatggcaccttgcttctttagtctcgacggagcggtcgccgactttaactggaacctttacctcgagtgaagctcgtcctatcgtatccccatcctttgatgtcggctttaccattcagaattattcgtactcaaacctccgagtgaatcagctcaaggtgcaaggtgatgtaatgtacaagccattcaagggggtaaaaatgattggcagggctggtaaaatagaggtgcgatggtag

SEQ ID NO: 3616 - protein, 454 aa, Cryptococcus neoformans var. neoformans JEC21
MSKIDGIIILDTNGKPIICSNFASYLPSYATAHIDTFNAARKRALVNGPGRGMDPVLWVNTLDNGRTGMLGGGLCHSERNGLYFLVPIGQEVNPLFAFSFLESLLDILRNYLGDVTETTIKDNFDIVYMLIEETLDEGHPMTTETEMLKEIVLPPSLVRKIFGAAGVSGLQSTTTAPFTAPIPWRRPGVRHNNNEIYFDIEECLDAIVDRRGNTLTASVWGRINCNSRLSGNPDLLLNFSDPKRMHQCSFHPCVRYSRWMKDGVLSFIPPDGKFRLLEYESVINNARTSVPIQLKAGLTIGDYGGRFTLTLSSRLNTRPLEDINVSIFLGKGATSVSANASGERRPLHTQIGKEEAAEGFVGGGNWEFDPHTQILKWHLASLVSTERSPTLTGTFTSSEARPIVSPSFDVGFTIQNYSYSNLRVNQLKVQGDVMYKPFKGVKMIGRAGKIEVRW

SEQ ID NO: 3617 - DNA, 1362 bp, Cryptosporidium parvum
  CDS (1)..(1362)
atgtgtggagtttcagcaatttttattttagatataaatgggaagccaataataggaaggaactataaaggcgatatttcagaaagtggagttttagatgcttttcaacaacatgttatagaacaggaagaatcttgcattaaaccaattttctcttcaaaaatgattacatattgttggattaaatacaacaacttgtatttggtattactttcgagaaaaaattcaaatgcaatcatgatgataacgtttctatataagttaattgaaattttaaaagattatttcaaggttttggaggaagaaagtataagagataacttcgtagtaatatatgaattattggatgagataatggacaacggctttcctcagataacagaagtcaaagttttgcgtgaatatataaaaaatgaagcacatgaactttcagcagcatccgtattggtgcaaagtagaaatagctcttcatctataaagccaccttctgcattatcgaatgtaatttcttggagaccagaaggaataaaacataaaaagaatgaaatatttctagatgtaattgagaaagtaaatatgataattggttctagtggggatgtaataaatagtgagattgttggaacattaacaatgaaaagctacctttctggtatgccagaacttaagctcggattaaatgatagactcggcgatgcttccatttctactagcaatgctaatcgtaattcagcctctagttcaaatagaaactccatattgaaaaataaatcagttgagatagaggatatcaagtttcatcaatgcgtaagacttgcgagatttgagagcgataggacgatttcttttatccctcccgatggacaatttgaattaatgagctacagattaactccatcatctaatttaaagccactatttaaggttgatgtaaatattgaaaatatcagtgctactcgtataaagtatgttatcaaagttaaaggccaatataaagcaagaagtgttgcaaagaatacagaaattcaaatcccagttccgagtgatgttataatacctacttttaaaacatcaatgggtacagtcaaatattctcctgagcgtgatttaatagtatggaatattaagacattctctgggcagaaggaatttacaatgaccgcaattttcgatattccatccatcatcaatgagacaaatacaagcaaacgtccagtaacagttggcttcgaaattccgtatttcacaatttcaggtcttactataagatacttgaaaatcacagagaagagcggatatcaagctcttccatgggtgagatacataacgcagaatggaaattacgaaataagaatgccatga

SEQ ID NO: 3618 - protein, 453 aa, Cryptosporidium parvum
MCGVSAIFILDINGKPIIGRNYKGDISESGVLDAFQQHVIEQEESCIKPIFSSKMITYCWIKYNNLYLVLLSRKNSNAIMMITFLYKLIEILKDYFKVLEEESIRDNFVVIYELLDEIMDNGFPQITEVKVLREYIKNEAHELSAASVLVQSRNSSSSIKPPSALSNVISWRPEGIKHKKNEIFLDVIEKVNMIIGSSGDVINSEIVGTLTMKSYLSGMPELKLGLNDRLGDASISTSNANRNSASSSNRNSILKNKSVEIEDIKFHQCVRLARFESDRTISFIPPDGQFELMSYRLTPSSNLKPLFKVDVNIENISATRIKYVIKVKGQYKARSVAKNTEIQIPVPSDVIIPTFKTSMGTVKYSPERDLIVWNIKTFSGQKEFTMTAIFDIPSIINETNTSKRPVTVGFEIPYFTISGLTIRYLKITEKSGYQALPWVRYITQNGNYEIRMP

SEQ ID NO: 3619 - DNA, 1266 bp, Dictyostelium discoideum
  CDS (1)..(1266)
atgttaagcagtttttttattatagctgatcaaggggatattttaattgaaaaacattggagaggattaatgaatagatcaatttgtgaatatttttgggatcaagtattacaaagtaaacaaaatggatcaagtgtaccaccaattatatcaacaccaaaatattatttaatcaatattcaaaagcaaaatgtctatttattaggagtatgtcaatcagaggtatcaccattattggttgtagatttcttacaaagaatatatgatacatttgttgaatattttggttcaaatattacaagtgcaaccatcaaagagaactttgtacacgtttatcaactcttggatgaaatggctgataatggtttcccttttacaacagaattaaactttttaaaagaaatgataaaaccacctggtgtattatcaaatgttatttcaagtgttactggtacttcaaatattactgatatattaccaaatggatctttaggtgccattcaatggcgtaaaacaggtattaaatatacacaaaataaaatattctttgatattattgaagaaattgattgtataattgatagtaatggatatattgtttcaagtgaaattaatggtgaaatattatgtcattgtaatttaagtggtatgccagatttaacaatgacatttaataatccaagaatgttagatgatgttagttttcatccatgtgttagatattcaagatgggagaatgatagagtgttatcgtttattccaccagatggtaattttaaattgttatcgtatcgtgtaaagggtatcaatcaattcccagtttacgttaaacctcaaattagttatagtgaaggttcgagtagtgtaggtagagtcaatgtaaccgttggtgctaaaggttacaatgttcaaaataaattatcaatcgaggatgtagttgcaactatccctttctcaaagactacctcttcaactaatttaaccgctaatatcggttcattcggtatggatgaacaatcgaaaatactaagatggaatataggtaaaataccaaaagagaaaacacctttccttaatggtactgtctctttaatcgctggttcaatgacaccagaatccactccttcaattatgctccaattcaaaataccacaatatgctatctctggtttaacaatcgatagtcttgcttgtagtgaaagatataaaccattcaaaggtgtaaaatgtactactaaagctggtaaattccaagttagatcttaa

SEQ ID NO: 3620 - protein, 421 aa, Dictyostelium discoideum
MLSSFFIIADQGDILIEKHWRGLMNRSICEYFWDQVLQSKQNGSSVPPIISTPKYYLINIQKQNVYLLGVCQSEVSPLLVVDFLQRIYDTFVEYFGSNITSATIKENFVHVYQLLDEMADNGFPFTTELNFLKEMIKPPGVLSNVISSVTGTSNITDILPNGSLGAIQWRKTGIKYTQNKIFFDIIEEIDCIIDSNGYIVSSEINGEILCHCNLSGMPDLTMTFNNPRMLDDVSFHPCVRYSRWENDRVLSFIPPDGNFKLLSYRVKGINQFPVYVKPQISYSEGSSSVGRVNVTVGAKGYNVQNKLSIEDVVATIPFSKTTSSTNLTANIGSFGMDEQSKILRWNIGKIPKEKTPFLNGTVSLIAGSMTPESTPSIMLQFKIPQYAISGLTIDSLACSERYKPFKGVKCTTKAGKFQVRS

SEQ ID NO: 3621 - DNA, 1362 bp, Cryptosporidium hominis
  CDS (1)..(1362)
atgtgtggagtttcagcaatttttattttagatataaatgggaagccaataataggaagaaactataaaggcgatatttcagaaagtggagttttagatgcttttcaacaacatgttatagaacaagaagaatcttgcattaaaccaattttctcttcaaaaatgattacatattgttggattaaatacaacaacttgtatttggtattactttcaagaaaaaattcaaatgcaatcatgatgataacatttctatataagttaattgaaattttaaaagattatttcaaggttttggaggaagaaagtataagagataacttcgtagtaatatatgaattattggatgagataatggataacggctttcctcagataacagaagtcaaagttttgcgtgaatatataaaaaacgaagcacatgaactctccgcagcatccgtattggtgcaaagtagaaatagctcttcatctataaaaccaccttctgcattatcgaatgtaatttcttggagaccagaaggaataaaacataaaaagaatgaaatatttctagatgtaattgagaaagtaaatatgataattggttctagtggggatgtaataaatagtgagattgttggaacattaacaatgaaaagctacctttctggtatgccagaacttaagctcggattaaatgatagactcggcgatgcttccatttctactagcaatgccaatcgtaattcagcctctagttcaaatagaaactccatattgaaaaataaatcagttgagatagaggatatcaagtttcatcaatgcgtaagacttgcaagatttgagagcgataggacgatttcttttatccctcctgatggacaatttgaattaatgagctacagattaactccatcatctaatttaaagccactatttaaggttgatgtaaatattgaaaatatcagtactactcgtatgaagtatgttatcaaagttaaaggccaatataaagcaagaagtgttgcaaagaatacagaaattcaaatcccagttccgagtgatgttataatacctacttttaaaacatcaatgggtacagtcaaatactctcctgagcgtgatttaatagtatggaatattaagacattttctgggcagaaggaatttacaatgaccgcaattttcgatattccatccatcatcaatgagacaaatacaagcaaacgtccagtaacagttggcttcgaaattccgtatttcacaatttcaggtcttactataagatacctgaaaatcacagagaagagcggatatcaggctcttccatgggtgagatacataacgcagaatggaaattacgaaataagaatgccataa

SEQ ID NO: 3622 - protein, 453 aa, Cryptosporidium hominis
MCGVSAIFILDINGKPIIGRNYKGDISESGVLDAFQQHVIEQEESCIKPIFSSKMITYCWIKYNNLYLVLLSRKNSNAIMMITFLYKLIEILKDYFKVLEEESIRDNFVVIYELLDEIMDNGFPQITEVKVLREYIKNEAHELSAASVLVQSRNSSSSIKPPSALSNVISWRPEGIKHKKNEIFLDVIEKVNMIIGSSGDVINSEIVGTLTMKSYLSGMPELKLGLNDRLGDASISTSNANRNSASSSNRNSILKNKSVEIEDIKFHQCVRLARFESDRTISFIPPDGQFELMSYRLTPSSNLKPLFKVDVNIENISTTRMKYVIKVKGQYKARSVAKNTEIQIPVPSDVIIPTFKTSMGTVKYSPERDLIVWNIKTFSGQKEFTMTAIFDIPSIINETNTSKRPVTVGFEIPYFTISGLTIRYLKITEKSGYQALPWVRYITQNGNYEIRMP

SEQ ID NO: 3623 - DNA, 1539 bp, Candida albicans SC5314
  CDS (1)..(1539): transl_table=12
atgattgaagcaatatatatttcagactcaactaactcattggtttatgagtacacaacttcactatgcatcccaaaatttaaatcattagttcccaaagttacttcgtttaacgattcaacaaccaccaataagattccattaaattcaaagttgtacttatttgtgcatcatcatcagcagtcagggttgcagttttacttgttatgcaaagagattgataatgcaaacccattgattccctcaatttttattcaaaggttaatcgaagtgatggaagattactttggggatttgaatagtgtcaagatcgaagcaaataatgaaatcttaacgttattattataccaaatgttggacgatggcaccccttacattacagatttcaataaattgcgagacttggttagttataaatcattactttccaagcttctcagtagtgctaccactgtcgcatccaaagccactggaacggcaatgagcaataaaggtcccttagatttgcataaaacaaataaccatcaaacatccgatattccttggagaagaagcaacgtaaaacatacaaacaatgaaatgtatgttgatgtaattgaaaccgtgaatgtcattataaagcctacaaccaaaaaagcaaaaagacatttacaactggaaaagcaaaaccaaggatttgactctgccttttattcttcagcatctagcaaatcgctaaaccatgatatagagaatcatttaattagtggatacattgacggtgaaatcaactttttgagtcggttgaccggtgtgccatctttgcagttatcgttgaattccataggaacaagcagaatagagttgccaagtttacacaggtgcattgattttgatgtttggaacgaaaaaagagggatattgtcgtttattccacctgatgggaaatctactctaatgaggtatcaaattgatttgaaccaaaccaatcagtacggcacgtctaacaagcaatcaatgttgagcatgataaagtcaacaagtattgaagcagagtttatttgccatgaaaatacttccgattttgaaattagattaaacttatccccatctatatctaaaatagattccctaaatgttgaaattgtgtgtgagcacccagaggatcaaatcaaaatgaaccgtgttactcacggagacttttcatcaaaaggaaatggaaaagcggaatggattttacgacaactaaaaccaaatgtgttttcacctgtgttttatggatcaatcatatctaatacagagaattccagcgatgaagaggaagaagaagagaaagaaggagcaagagacgagaacaaccaagctaaacacgataaaaaagtgagaatttctaaaccaagttatataaaactaagttatagccacaaaggaccagttccaagtggattgaaggtcgatagcttaaagataattagtgcaaaagggttaggcgatacagtcaaaccttacaaaggtgtcaagtatatgaccaagtctggtaattatatagtgagatcataa

SEQ ID NO: 3624 - protein, 512 aa, Candida albicans SC5314
MIEAIYISDSTNSLVYEYTTSLCIPKFKSLVPKVTSFNDSTTTNKIPLNSKLYLFVHHHQQSGLQFYLLCKEIDNANPLIPSIFIQRLIEVMEDYFGDLNSVKIEANNEILTLLLYQMLDDGTPYITDFNKLRDLVSYKSLLSKLLSSATTVASKATGTAMSNKGPLDLHKTNNHQTSDIPWRRSNVKHTNNEMYVDVIETVNVIIKPTTKKAKRHLQSEKQNQGFDSAFYSSASSKSLNHDIENHLISGYIDGEINFLSRLTGVPSLQLSLNSIGTSRIELPSLHRCIDFDVWNEKRGILSFIPPDGKSTLMRYQIDLNQTNQYGTSNKQSMLSMIKSTSIEAEFICHENTSDFEIRLNLSPSISKIDSLNVEIVCEHPEDQIKMNRVTHGDFSSKGNGKAEWILRQLKPNVFSPVFYGSIISNTENSSDEEEEEEKEGARDENNQAKHDKKVRISKPSYIKLSYSHKGPVPSGLKVDSLKIISAKGLGDTVKPYKGVKYMTKSGNYIVRS

SEQ ID NO: 3625 - DNA, 1875 bp, Aspergillus fumigatus Af293
  CDS (1)..(1875)
atgagcgaggtcgatgcgctctacatctatgatgagcataacaacccgctcgtggagcatgtttatcgctcccgtccaccctccgcatcagctatccttcccctctatctcgcccactcaccccctcgtccgtcactcctctacattccaaatatcacgcccccggtgacggtcttttctatcgtacagtcaaacctgctgtttttggccctttccgaagttgataccgagccacttcttgcactggagttcttgcaccgagtagttgatgtgcttgaggactttgttggggctccattactctcttccaagcttcaggcgaactacgatgtggtcgcacaattgctccacgaaatgtgtgacgccggcatcgtatgcaatacggaaccaaatgcgctgcaggaagttgtggagatgccgggatggatggggaagttgttgggaggcgttggactaccggggtcgtctacacctatactagggccttccaaccctctgaaaaccccattatcatcctcaaatatcccacagggccctgcgatcccgtggagaaaggccggtgtgcggcacacgtcgaatgagttatacgtcgacattattgaatcactctcagtcacgattgctccatctggacgactactgtcagcgctggtatcagggaccattgcgttcacagctaaattatcgggggtacccgacttgctcctcacattaaccactcccagcggtccccaggctgtggggaaaaagatagacctgccggtattccatccctgtgttcgactagctcgatggagagagcgacctggcgaactcagctttgtgcctcctgatggccgatttattcttgcaggttatgaggtggatctgcttcctattgatcctaatattgaccaacctcctacgcatatggagaaggtgttcttacctgccgttgtcgaagtacgcaaatcactaggaccgacgggatcggaatttgaggtccgattgatattaaatacaagctttccaggatactcgtctttcaaccgccccggagcagggcggggcggattgggtacttccactccatcgttcctcggaggaggcgggaactcctcagcacctgtccttgaagaggtcgtggtcacagtgccaataccgaagacggttcggaacatcaccgatatgcaggcgagtcgcggagaagcgatattcgcgcccggcaacgacactttggagtggcggatacctaccaaagactccggaactgtttcgggcacagcgactcttcgctgcacggtcgtcggacaccagaatgtagaagatgagattgaagaagacaatgacggggcagacgcagacgcaaattttttgcaaggatactacgacgcctcaacagcagcgtcttaccaggtcgccgaggaagctgcaacaggtaccacgaaacggaaaacaaagaaaaagaagaagacaacaaagacaacaaagacaacaaagaccaagaagtcatccaaatccgccgctgccagcgcgctcgtcgcctccgatcaagacagtgtaccgcaaacctcccccaatccttctaaacctcaaagccctgcacctgaatcgtcgtcatcgccagccgcacccgcccctgcacaatcctcctctcaatcgtcgtccttattctatacaccacctcgtaaaaccaaggcacaaataaacgccagccttatgccgaactccgcctctgtctcattttctgttaaaggttggctaccgtcggggctccgagtcgacagtctgaacatcgacccacggcgcagtcgaggcctcggagaaggcgtgaagccatacaagggggtgaagtatctgtgcgtcagcaggaagggcgtggaagctaggtgctaa

SEQ ID NO: 3626 - protein, 624 aa, Aspergillus fumigatus Af293
MSEVDALYIYDEHNNPLVEHVYRSRPPSASAILPLYLAHSPPRPSLLYIPNITPPVTVFSIVQSNLLFLALSEVDTEPLLALEFLHRVVDVLEDFVGAPLLSSKLQANYDVVAQLLHEMCDAGIVCNTEPNALQEVVEMPGWMGKLLGGVGLPGSSTPILGPSNPLKTPLSSSNIPQGPAIPWRKAGVRHTSNELYVDIIESLSVTIAPSGRLLSALVSGTIAFTAKLSGVPDLLLTLTTPSGPQAVGKKIDLPVFHPCVRLARWRERPGELSFVPPDGRFILAGYEVDLLPIDPNIDQPPTHMEKVFLPAVVEVRKSLGPTGSEFEVRLILNTSFPGYSSFNRPGAGRGGLGTSTPSFLGGGGNSSAPVLEEVVVTVPIPKTVRNITDMQASRGEAIFAPGNDTLEWRIPTKDSGTVSGTATLRCTVVGHQNVEDEIEEDNDGADADANFLQGYYDASTAASYQVAEEAATGTTKRKTKKKKKTTKTTKTTKTKKSSKSAAASALVASDQDSVPQTSPNPSKPQSPAPESSSSPAAPAPAQSSSQSSSLFYTPPRKTKAQINASLMPNSASVSFSVKGWLPSGLRVDSLNIDPRRSRGLGEGVKPYKGVKYLCVSRKGVEARC

SEQ ID NO: 3627 - DNA, 1224 bp, Strongylocentrotus purpuratus
  CDS (1)..(1224)
atgagagatatttttatggaaaaacattggaaaagtgttgtaagcagatcagtatgtgactacttctttgaagcacaagaaaaggcctgcagcaaattggatgttcctcccatcattgctacacctcatcactatctcatcagcatatacaggaatcagatctactttgttgctgtggtacagacagagacaccccctctgtttgtgattgaattcctccatcgagttgttgacacatttgcagattatttctctgaatgtaccgagacatccataaaggagaactatgtggtcgtgtacgagcttctagaggagatgcttgacaatgggttccctctggctacagagtccaatgtacttaaggagctcatcaaaccacccaacattctcaggacggtggtcaatacagtcactggaagcacaaatctgagcgacacccttcctagtggtcagctgtccaatgtcccttggagacgaagcggggtgaagtacaccaacaatgaggcatactttgatgttattgaagaagtagactgcatcattgacaaatcaggttcgactgtaattgctgaaatccagggatacattgattgctctgtgaagctgaccgggatgcctgatcttaccatgtcctttgtgaatcatcgtctcctggatgacgtcagctttcatccttgtgtcagatacaagagatgggagtctgagagagtgctgtcctttgttcctcccgatggtaacttcagactcctctcctatcacataggagcttccaacctcacagccattccagtatatgtgaaacccaacatcatgatgagagagacatcaggcagatttgaagtgatggtgggacctaaacaaactatgggaaaaactgtggagaatgtagttatcacctgcgaccttcccaagcaagtgctgaacatgaccctgaccccaacccagggcagctacagctttgaccctgttagtaagatcatgtcgtgggaggtcggcaagatcaacccacagaagctacccagcataaaaggcagtatgtcactccaatctggtgtccctcctcctgaagctaaccccaccctatccgtaagtgcaattttctatcaaccagctggcaatatcaggcctaaggtcaacagattggacatgtatggagagaaatacaagcccttcaagggagtgaagtatctaacaagagctggaaaattccaagtcaggacatga

SEQ ID NO: 3628 - protein, 407 aa, Strongylocentrotus purpuratus
MRDIFMEKHWKSVVSRSVCDYFFEAQEKACSKLDVPPIIATPHHYLISIYRNQIYFVAVVQTETPPLFVIEFLHRVVDTFADYFSECTETSIKENYVVVYELLEEMLDNGFPLATESNVLKELIKPPNILRTVVNTVTGSTNLSDTLPSGQLSNVPWRRSGVKYTNNEAYFDVIEEVDCIIDKSGSTVIAEIQGYIDCSVKLTGMPDLTMSFVNHRLLDDVSFHPCVRYKRWESERVLSFVPPDGNFRLLSYHIGASNLTAIPVYVKPNIMMRETSGRFEVMVGPKQTMGKTVENVVITCDLPKQVLNMTLTPTQGSYSFDPVSKIMSWEVGKINPQKLPSIKGSMSLQSGVPPPEANPTLSVSAIFYQPAGNIRPKVNRLDMYGEKYKPFKGVKYLTRAGKFQVRT

SEQ ID NO: 3629 - DNA, 1281 bp, Trypanosoma brucei
  CDS (1)..(1281)
atgataaccggccttttcttccttaataagcatggcgaggttattattgagaaggaattccgtgagaaggtaccccgctccagcctggaagacttctggtgcacctatatgactccattgcgttcgattgaagaggcacccgctgttattacgtacagccggtttgcctttattcaaatccatcgtaacgatgtcgtcctcctggcggttgcaacaagtgagtgtttccccctattcgtgatggaagtcctagcgctggccgcaaaagtggtgcaaaagtacctcaaagtcatctctgagagcacgttgcgtgagaatttttctttggtgtatcaattgcttgtggagctcattgacaatggatacccactgacaactgaaatgcacgtgctagaggagttggtgcttccaccgtcgttagaaaatgtgtttcgtagtgctctggaagcaccagtagcgataaagcggcgccatatgggttcccgtgccgtaccgtggcgggaccctgcgacaaagcactcatcaaatgagattttcttcgatatagtggaaaatttggattgcatagtcgattgcgaaggaaatgtggtgcagagcgctgtccgtggtgccgtggaggtgaactgtcgtctgagtgggctgcccgaagtcatcatgcggttaactggcatcgattgcatcgaagacattgccatgcatcggtgtgttcgacgtagccgttacgaggtcgaccgcatgatcagttttatacctgttgatgggaagtttacgctgttgcagtaccgctgtaaaatggccaatagtgtgcaggttcccttctatgttacaccgcaaattacttttaatgccagtgttggtcgatttaactgtatggtgggattccgtggttctggtctcgcagcaaggagcagggaatacgagattcagaaacttatcatccaccttccccttccgccccagacagaggcggtgcaggtgcacagcatctcacacgggaacacgaactttaagaaggcacgtaacatgctggtgtggaatgtagggtcacttcatcgtggcacgtgctcacttagtggcgagtttacgtttggtacggagagggaaaaggagggactagcgccgtgtacaggaggctctgcgttagttgagttcagcatcccaaactatctactgagtagcatccgcgtcgacagtgttcaggtgttgaatgatttgacaaagccctacaaaggtgtcaaatatgttacgacggctgggaggtttgccgtgcggacaatttga

SEQ ID NO: 3630 - protein, 426 aa, Trypanosoma brucei
MITGLFFLNKHGEVIIEKEFREKVPRSSLEDFWCTYMTPLRSIEEAPAVITYSRFAFIQIHRNDVVLLAVATSECFPLFVMEVLALAAKVVQKYLKVISESTLRENFSLVYQLLVELIDNGYPLTTEMHVLEELVLPPSLENVFRSALEAPVAIKRRHMGSRAVPWRDPATKHSSNEIFFDIVENLDCIVDCEGNVVQSAVRGAVEVNCRLSGLPEVIMRLTGIDCIEDIAMHRCVRRSRYEVDRMISFIPVDGKFTLLQYRCKMANSVQVPFYVTPQITFNASVGRFNCMVGFRGSGLAARSREYEIQKLIIHLPLPPQTEAVQVHSISHGNTNFKKARNMLVWNVGSLHRGTCSLSGEFTFGTEREKEGLAPCTGGSALVEFSIPNYLLSSIRVDSVQVLNDLTKPYKGVKYVTTAGRFAVRTI

SEQ ID NO: 3631 - DNA, 1314 bp, Canis familiaris
  CDS (1)..(1314)
atgattggaggcttattcatctataatcacaagggggaggtgctcatctcccgggtctaccgagatgacatcggcaataggaggaatgcagtggatgcctttcgagtcaatgttatccacgcccggcagcaggtgcgcagccccgtcaccaacatcgctcgcaccagtttcttccatgttaagcggtccaacatctggttggcagctgtcaccaagcaaaatgtcaatgctgccatggtcttcgaattcctctataagatgtgtgatgtaatggctgcctactttggcaagatcagcgaggagaacatcaagaacaattttgtgctcatatatgagctactggatgagatcctggactttggctatccacagaattcagagacaggagcactgaaaaccttcatcactcagcagggtatcaagagccagcatcagacaaaagaagagcaatcccagatcaccagccaggtgactgggcagattggctggcggcgggagggcatcaagtatcgccggaatgagctctttttggatgtgctggaaagtgtgaacctcctcatgtccccacaggggcaggtgctgagtgcccatgtgtcaggccgggtggtgatgaagagctacctgagtggcatgcctgaatgcaagtttgggatgaatgacaagattgtcattgagaagcaaggcaaaggcacagctgatgaaacaagcaagagtggaaagcaatcaattgccatcgatgactgcaccttccaccagtgtgtgcgactcagcaagtttgactctgaacgcagcatcagcttcatcccaccagatggagagtttgagctaatgaggtatcgcaccaccaaggacatcatccttcctttccgggtgatcccactagtgcgagaagtgggacgtaccaagctggaggtcaaggtggtcatcaaatccaatttcaaaccctctttactggctcagaagattgaggtgaggatcccaactccactgaatacaagcggagtacaggtgatctgcatgaaggggaaggccaagtacaaggccagcgagaacgccatcgtatggaagatcaagcgcatggcaggcatgaaggaatcgcagatcagcgcagagattgaacttctgcccaccaatgacaagaagaaatgggctcgaccccccatttccatgaactttgaggtgccattcgcaccctctggcctcaaggtgcgctacttgaaggtgtttgaaccgaagctgaactacagcgaccatgatgtcatcaaatgggtgcgctacattggccgcagcggcatttatgagacccgctgctag

SEQ ID NO: 3632 - protein, 437 aa, Canis familiaris
MIGGLFIYNHKGEVLISRVYRDDIGNRRNAVDAFRVNVIHARQQVRSPVTNIARTSFFHVKRSNIWLAAVTKQNVNAAMVFEFLYKMCDVMAAYFGKISEENIKNNFVLIYELLDEILDFGYPQNSETGALKTFITQQGIKSQHQTKEEQSQITSQVTGQIGWRREGIKYRRNELFLDVLESVNLLMSPQGQVLSAHVSGRVVMKSYLSGMPECKFGMNDKIVIEKQGKGTADETSKSGKQSIAIDDCTFHQCVRLSKFDSERSISFIPPDGEFELMRYRTTKDIILPFRVIPLVREVGRTKLEVKVVIKSNFKPSLLAQKIEVRIPTPLNTSGVQVICMKGKAKYKASENAIVWKIKRMAGMKESQISAEIELLPTNDKKKWARPPISMNFEVPFAPSGLKVRYLKVFEPKLNYSDHDVIKWVRYIGRSGIYETRC

SEQ ID NO: 3633 - DNA, 1705 bp, Bos taurus
  CDS (20)..(1291)
aggtccgccggccgccaccatgtccgcctcggctgtcttcatcctcgacgtcaagggcaagcccctgatcagccgcaactacaagggtgatgtggctatgagcgagatcgatcacttcatgcctctgctcatgcagcgggaggaggaaggcgccctgaccccactgctgagtcacggacgggtccacttcctgtggatcaaatacagcaacctctacttggtggccaccacactgaagaatgccaacgcctccctcgtgtattccttcctctacaagatagtggaggtattctccgaatactttaaggagctagaggaggagagtatccgagacaactttgtcatcgtctatgaattgctggatgagctcatggactttggcttcccacagaccacagacagcaaaatcctgcaggagtacatcacgcagcagggcaacaagctggagacgggcaagtcacgagtgccacccactgtcaccaatgctgtgtcctggcgctcggagggcatcaagtacaagaagaatgaggtcttcatcgatgtcatagagtcagttaacctgctggtcaatgccaacggcagtgtcctgctgagcgagatcgtgggcagtatcaagctcaaggtgtttctgtcgggaatgccagagctgcggctgggcctcaacgaccgtgtactcttcgagctcactggccggagcaagaacaagtctgtggaactggaggatgtgaaattccaccagtgcgtgcggctttctcgctttgacaatgaccgcaccatctccttcatcccgcccgacggtgactttgagctcatgtcctaccgccttagcacccaggtcaagccactcatctggattgaatctgtcattgagaaattctcacacagccgcgtggagatcatggtcaaggccaaggggcagtttaaaaagcagtctgtagctaacggcgtagagatatcggtgcccgtacccagcgatgccgactcccctcgcttcaagaccagtgtgggcagcgccaagtatgtgccagagaagaacacggttatttggagcatcaagtctttcccggggggcaaggagtacctgatgcgggcccactttggcctccccagcgtggagaaggaggaagtagagggccggccccctattggggtgaagtttgagatcccctatttcactgtctctgggatccaggtccgatacatgaagatcattgagaagagtggttaccaggccctgccctgggtccgctatatcacccagagtggcgattatcaacttcgtaccagctagaagggagaagtgggagcctgaacctgggctgtcttctccccaggccccagctgcagactccactagagaaggagggaagatggggtgtgtgtgtgtgtgagagggcagcccttgaattattagttcgttactcccagcacccgacttgctcctacccttttcctttaccggtaggctgggagtgatagtccccagctctcagactctcacccctccccctccccctcccccaattttatatgaagaaatagaagaggggcttgaagtccccctcacgagtgccttcttgcagtgacctgccttaggaggtgtggggagtccctcctccacagctgctgaacccagaggccccactggcccatttctgagttttaggatggcattaaaaagatgaatctaaaaaaaaaaaaaaaa

SEQ ID NO: 3634 - protein, 423 aa, Bos taurus
MSASAVFILDVKGKPLISRNYKGDVAMSEIDHFMPLLMQREEEGALTPLLSHGRVHFLWIKYSNLYLVATTLKNANASLVYSFLYKIVEVFSEYFKELEEESIRDNFVIVYELLDELMDFGFPQTTDSKILQEYITQQGNKLETGKSRVPPTVTNAVSWRSEGIKYKKNEVFIDVIESVNLLVNANGSVLLSEIVGSIKLKVFLSGMPELRLGLNDRVLFELTGRSKNKSVELEDVKFHQCVRLSRFDNDRTISFIPPDGDFELMSYRLSTQVKPLIWIESVIEKFSHSRVEIMVKAKGQFKKQSVANGVEISVPVPSDADSPRFKTSVGSAKYVPEKNTVIWSIKSFPGGKEYLMRAHFGLPSVEKEEVEGRPPIGVKFEIPYFTVSGIQVRYMKIIEKSGYQALPWVRYITQSGDYQLRTS

SEQ ID NO: 3635 - DNA, 1257 bp, Xenopus laevis
  CDS (1)..(1257)
atgatccacagcctttttctgataaacccttcgggggacatcttcctggagaagcactggaaaagtgtggtttcccgctctgtttgtgactatttctttgaagcccaggaaagggcgtcggaggcagagaatgtgccgccaatcattcagacccctcaccattaccttctcagcgtctacaggcacgccatcttttttgtggccgtcatccagacagaagtacccccactttttgccattgagttccttcaccgtgtggtggacacattccaggattactttggctcatgctccgaggctgtgattaaggaaaacgtggtagtcgtatatgaggttcttgaggaaatgctggataatgggttccctcttgctactgagtccaacatcctgaaggagctcatcaagcctccaaccattcttcgtagtgtggtcaacaccatcacaggcagttccaatgttggagaccagcttcccactggacaactctctgtggttccttggagacggacgggagtaaaatacaccaataacgaggcttattttgatgttattgaggaaattgacgccatcattgataaatcaggatgcaccgtgacagccgagatccagggggtgattgacgcctgtgtgaaactaagtgggatgccagatctgaccctgtctttcatgaatccccgtctcctggatgatgtgagttttcacccatgtgtacgtttcaagcgatgggagtcagagaggatcctttccttcatcccacctgatgggaacttccgactgctgtcctaccatgtcagcgcgcagaacttggtggccatcccggtgtacgtaaaacacgccattagtttccgggaaggaagcagcgctgggaggtttgaagtcacgctaggaccaaagcagagcatggggaagaccgtggaaggggtcaccctcacagggcagatgcccaaaggagtcctgaacatgacactaaccccttcccaaggaacatatgtctttgatccagtgaccaagctcttgtcctgggacgtaggaaaaattaatccccagaagttaccaaatctcaagggaaccatgagccttcaggctggatgctcaaagccagatgaaaaccccaccttgaacctgcattgcaagatccaacagctggccatatcaggcctaaaggttaacagactggacatgtatggagagaaatacaaaccatttaaaggcatcaagtacatgaccaaagctggcaagttccaagtcagaacatga

SEQ ID NO: 3636 - protein, 418 aa, Xenopus laevis
MIHSLFLINPSGDIFLEKHWKSVVSRSVCDYFFEAQERASEAENVPPIIQTPHHYLLSVYRHAIFFVAVIQTEVPPLFAIEFLHRVVDTFQDYFGSCSEAVIKENVVVVYEVLEEMLDNGFPLATESNILKELIKPPTILRSVVNTITGSSNVGDQLPTGQLSVVPWRRTGVKYTNNEAYFDVIEEIDAIIDKSGCTVTAEIQGVIDACVKLSGMPDLTLSFMNPRLLDDVSFHPCVRFKRWESERILSFIPPDGNFRLLSYHVSAQNLVAIPVYVKHAISFREGSSAGRFEVTLGPKQSMGKTVEGVTLTGQMPKGVLNMTLTPSQGTYVFDPVTKLLSWDVGKINPQKLPNLKGTMSLQAGCSKPDENPTLNLHCKIQQLAISGLKVNRLDMYGEKYKPFKGIKYMTKAGKFQVRT

SEQ ID NO: 3637 - DNA, 1308 bp, Pongo pygmaeus
  CDS (1)..(1308)
atgattggaggcttattcatctataatcacaagggggaggtgctcatctcccgagtctaccgagatgacatcgggaggaacgcagtggatgcctttcgggtcaatgttatccatgcccggcagcaggtgcgcagccccgtcactaacattgctcgcaccagcttcttccacgttaagcggtccaacatttggctggcagcagtcaccaagcagaatgtcaacgctgccatggtcttcgaattcctctataagatgtgtgacgtgatggctgcctactttggcaagatcagcgaggaaaacatcaagaacaattttgtgctcatatatgagctgctggatgagattctagactttggctacccacagaattccgagacaggcgcgctgaaaaccttcatcacgcagcagggcatcaagagtcagcatcagacaaaagaagagcagtcacagatcaccagccaggtgactgggcagattggctggcggcgagagggtatcaagtatcgccggaatgagctcttcctggatgtgctggagagtgtgaacctgctcatgtccccacaagggcaggtgctgagtgcccatgtgtcgggccgggtggtgatgaagagctacctgagtggcatgcctgaatgcaagtttgggatgaatgacaagattgttattgaaaagcagggcaaaggcatagctgatgaaacaagcaagagcgggaagcaatcaattgccattgatgactgcaccttccaccagtgtgtgcgactcagcaagtttgactctgaacgcagcatcagctttatcccgccagatggagagtttgagcttatgaggtatcgcacaaccaaggacatcatccttcccttccgggtgatcccgctagtgcgagaagtgggacgcaccaaactggaggtcaaggtggtcatcaagtccaactttaaaccctcactgctggctcagaagattgaggtgaggatcccaaccccactgaacacaagcggggtgcaggtgatctgcatgaaggggaaggccaagtacaaggccagcgagaatgccatcgtgtggaagatcaagcgcatggcaggcatgaaggaatcgcagatcagcgcagagattgagcttctgcctaccaacgacaagaagaaatgggctcgaccccccatttccatgaactttgaggtgccattcgcgccctctggcctcaaggtgcgctacttgaaggtgtttgaaccgaagctgaactacagcgaccatgatgtcatcaaatgggtgcgctacattggccgcagcggcatttatgaaactcgctgctag

SEQ ID NO: 3638 - protein, 435 aa, Pongo pygmaeus
MIGGLFIYNHKGEVLISRVYRDDIGRNAVDAFRVNVIHARQQVRSPVTNIARTSFFHVKRSNIWLAAVTKQNVNAAMVFEFLYKMCDVMAAYFGKISEENIKNNFVLIYELLDEILDFGYPQNSETGALKTFITQQGIKSQHQTKEEQSQITSQVTGQIGWRREGIKYRRNELFLDVLESVNLLMSPQGQVLSAHVSGRVVMKSYLSGMPECKFGMNDKIVIEKQGKGIADETSKSGKQSIAIDDCTFHQCVRLSKFDSERSISFIPPDGEFELMRYRTTKDIILPFRVIPLVREVGRTKLEVKVVIKSNFKPSLLAQKIEVRIPTPLNTSGVQVICMKGKAKYKASENAIVWKIKRMAGMKESQISAEIELLPTNDKKKWARPPISMNFEVPFAPSGLKVRYLKVFEPKLNYSDHDVIKWVRYIGRSGIYETRC

SEQ ID NO: 3639 - DNA, 999 bp, Caenorhabditis briggsae
  CDS (1)..(999)
atgctgaacagtttgttctttgtgaacactagcggagatgtgttactggaaaaacattggaaatctgttattcaccgctctatttgcgattatttcttcgacattcagaagaagagtaatcactcggaagatgttcctccgatcatttcaaccccacatcattatctgatcaatgtttatcagaataatctgtatctcgtcgcggtaatcacaatagaaactcctccacttatggtcattgagttcttgcaccgcgtgattcagacgttttctcaatattttgacgaattctcggattctactataaaagaaaactgtgtgatggtattcgagcttcttgacgagatgttagacaatgggtttccactggttacggaaatgaacattctccaagatctgatcaagccgcccaattttctcagaaacattgccaatcaggttactggacggacaaacttgtcggaaacgcttccgacaggacagctctcgaatattccatggagacgtcaaggagtcaaatacacaaacaacgaagcttatttcgacgtgatagaggagatcgacgttattgtggataagcaaggatcaacggtgtttgctgagatccaaggatatattgacgtttgctgcaaactatcgggcatgcctgatcttactatgacacttatcaatcctcgtcttctggatgatgtatcgtttcacccatgcgtacgatacaaacgttgggaaaatgagaaagtattatcttttgtcccgccagatggcaacttccgtcttctttcatatcacattgcggcgcaaaacatggttgcaatcccgatttacgttagacacgtaatttcacttaagccaaacgcgggaaagttggatctcactgtgggaccgaagttgagcatgggaaaagttctcaatcgtttggatatgtatggagagaaatataaaccattcaaaggtgttaaatacatcaccaaagcgggtaaatttaccatccgtacttaa

SEQ ID NO: 3640 - protein, 332 aa, Caenorhabditis briggsae
MLNSLFFVNTSGDVLLEKHWKSVIHRSICDYFFDIQKKSNHSEDVPPIISTPHHYLINVYQNNLYLVAVITIETPPLMVIEFLHRVIQTFSQYFDEFSDSTIKENCVMVFELLDEMLDNGFPLVTEMNILQDLIKPPNFLRNIANQVTGRTNLSETLPTGQLSNIPWRRQGVKYTNNEAYFDVIEEIDVIVDKQGSTVFAEIQGYIDVCCKLSGMPDLTMTLINPRLLDDVSFHPCVRYKRWENEKVLSFVPPDGNFRLLSYHIAAQNMVAIPIYVRHVISLKPNAGKLDLTVGPKLSMGKVLNRLDMYGEKYKPFKGVKYITKAGKFTIRT

SEQ ID NO: 3641 - DNA, 1272 bp, Xenopus laevis
  CDS (1)..(1272)
atgtcagcctccgctgtgtttatcttggatctaaagggaaagccccttatctgcaggaattacaagggtgatatcgacacactggagatcgaccattttatgcccttgctggtgcagaaggaagaggagagcaacctgactccattgctgacccatggaaaagtgcatttcatgtggatcaaacacagcaatctctatttggttgcactaaccaataagaatgccaatgcctcccttgtatattccttcctgtataagctggtagaggtgttcacagaataccttaaagaggtggaggaagagagtatccgggataactttgtcattgtgtatgagctgctggatgagatcatggactttgggtttccacagacaacagacagcaagattctacaggagtatatcacacagcaaggaaacaaactggatacgggcaaatctcgtgtccccaccactgtgaccaatgctgtgtcctggaggtcggaagggatcaagtataaaaagaatgaagtcttcatagatgtgattgagtctgtcaatattctagtgaacagcaacggcagtgttctacggagtgagattgtgggcagtgtgaagttgagggtctttctctcagggatgccggagttacggctggggcttaatgacagagtcctctttgaattaactggacgtaacaagaataaaacagtggagcttgaagatgtgaagtttcaccagtgcgtccgcttgtcccggtttgagaacgaccgcaccatttcttttatccctccggatggcgattttgagctcatgtcttacaggctgaacacacaggttaaaccattaatctggatagaatcagtgattgagaaattcagtcatagtcggctggagattatggtgaaggccaagggccaatttaagaaacagtcggtggcaaataatgtggaaatttatgtgccagtcccaagtgacgcggattctccaaagtttaaaaccagcgtggggagtgcaaaatacgtccctgaaaaaaatgtggtggtctggacgatcaaatcatttccggggggtaaggagtatcttatgcgtgcgcacttcggcctgcccagtgtggagagagaagaattagaaggaaaacccccaataaatgtcaagtttgaaatcccctacttcacagtttcaggaatccaggttcgatacatgaagatcatcgagaaaagtggataccaagcccttccgtgggtcagatatatcactcagagcggagattatcagctgagaaccaactga

SEQ ID NO: 3642 - protein, 423 aa, Xenopus laevis
MSASAVFILDLKGKPLICRNYKGDIDTLEIDHFMPLLVQKEEESNLTPLLTHGKVHFMWIKHSNLYLVALTNKNANASLVYSFLYKLVEVFTEYLKEVEEESIRDNFVIVYELLDEIMDFGFPQTTDSKILQEYITQQGNKLDTGKSRVPTTVTNAVSWRSEGIKYKKNEVFIDVIESVNILVNSNGSVLRSEIVGSVKLRVFLSGMPELRLGLNDRVLFELTGRNKNKTVELEDVKFHQCVRLSRFENDRTISFIPPDGDFELMSYRLNTQVKPLIWIESVIEKFSHSRLEIMVKAKGQFKKQSVANNVEIYVPVPSDADSPKFKTSVGSAKYVPEKNVVVWTIKSFPGGKEYLMRAHFGLPSVEREELEGKPPINVKFEIPYFTVSGIQVRYMKIIEKSGYQALPWVRYITQSGDYQLRTN

SEQ ID NO: 3643 - DNA, 1272 bp, Xenopus laevis
  CDS (1)..(1272)
atgtcagcctcggccgtctttatccttgatctaaagggaaagccccttatcagcaggaattacaagggtgatatcaacatgctggagatcgaccatttcatgcccttgctggtgcagaaggaagaggagggcaacctgactccattgctgacccacggaaaagtgcacttcatgtggatcaaacacagcaatctctatttggttgcactgaccaataagaatgccaatgcctctcttgtgtattcctttctatataaggtggtagaggtgttctcagaatactttaaagagctggaggaagagagtatccgggataactttgtcattgtgtacgagctgctggatgaaatcatggactttgggtttccacagacaacagagagcaagattctacaggagtatatcacacagcaaggaaacaaactggatacgggcaaatctcgtgtccccaccactgtgaccaacgcagtgtcctggaggtctgaagggatcaaacataaaaagaatgaagtcttcatagatgtgattgagtctgtcaatattctagtgaatagcaacggcagcgttctacggagtgagattgtgggcagtgtgaagctgaaggtctttctcaccgggatgccagagttacggctggggcttaatgacagagtcctctttgaattaagtggacgtaacaagaataaaacagtggagcttgaagatgtaaagtttcaccagtgcgtccgcctgtcccgctttgagaacgaccgcactatttcttttatccctccggatggggattttgagctcatgtcttacaggctgaacacacaggttaaaccactaatctggatagaatctgtgattgagaaattcagtcatagccggctggagattatggtgaaggccaaggggcaatttaagaaacagtcagtggcaaataatgtggagatttatgtgccagtaccaagtgatgcggattctcctaagtttaaaaccagcgtggggagtgcgaaatacgtccctgaaaaaaacgtggtggtctggacaatcaaatcatttccgggggggaaggagtatcttatgcgtgcgcacttcggcctgcccagtgtggagagagaagaggtagaaggaaaacccccaataagcgtcaagtttgaaataccctacttcacagtttcaggaatccaggttcgatacatgaagatcatcgagaaaagtggataccaagcccttccatgggtcagatatatcactcagagtggagattatcagctgcgaaccaactga

SEQ ID NO: 3644 - protein, 423 aa, Xenopus laevis
MSASAVFILDLKGKPLISRNYKGDINMLEIDHFMPLLVQKEEEGNLTPLLTHGKVHFMWIKHSNLYLVALTNKNANASLVYSFLYKVVEVFSEYFKELEEESIRDNFVIVYELLDEIMDFGFPQTTESKILQEYITQQGNKLDTGKSRVPTTVTNAVSWRSEGIKHKKNEVFIDVIESVNILVNSNGSVLRSEIVGSVKLKVFLTGMPELRLGLNDRVLFELSGRNKNKTVELEDVKFHQCVRLSRFENDRTISFIPPDGDFELMSYRLNTQVKPLIWIESVIEKFSHSRLEIMVKAKGQFKKQSVANNVEIYVPVPSDADSPKFKTSVGSAKYVPEKNVVVWTIKSFPGGKEYLMRAHFGLPSVEREEVEGKPPISVKFEIPYFTVSGIQVRYMKIIEKSGYQALPWVRYITQSGDYQLRTN

SEQ ID NO: 3645 - DNA, 1308 bp, Xenopus laevis
  CDS (1)..(1308)
atgattggaggactgttcatatataatcataagggcgaggtccttatctcccgggtatatcgagatgacattgggcggaatgccgtggatgccttccgtgttaatgtcatccatgcccggcagcaggtgcgctcgcctgtcaccaacattgcccgcacaagcttctttcacgtgaaacgttccaacatctggctagctgcagtcaccaaacaaaatgtcaacgctgccatggtctttgagttcctctacaaaatgtgtgatgtcatgactgcatactttggaaagatcagcgaggagaacataaagaacaactttgtgctgatctacgagctgctagatgaaattctggattttggttaccctcagaattctgaaacaggagcactaaagactttcatcacccaacaagggatcaaaagtcagcatcagaccaaggaggagcagtcccagattaccagccaggtgactggtcagatcgggtggagacgtgaaggaataaagtatcgtcgaaatgaattgttcttagatgtgttagagagtgtcaatctgctaatgtctcctcaagggcaggtacttagcgctcatgtgtctgggcgtgtggtgatgaagagttacctgagcggaatgccagagtgcaagtttggaatgaatgacaaaatcgtgattgagaaacaaggcaaaggaactgctgatgaaactggcaaaacgggaaaacaatcaattgccattgatgactgtacattccaccagtgtgtccggcttagcaaatttgactcggagcgcagcatcagctttatacctccagatggagaatatgagcttatgagatatcgaacgacaaaggatatcatcctaccattccgtgtcattcctcttgttcgtgaggtgggacgcacaaagcttgaggtcaaggtggtcatcaaatctaactttaaaccttcacttctggctcagaagattgaggtgaggattccaactccactcaacactagcggagtacaggtcatctgtatgaaggggaaagcaaagtataaggccagtgagaatgccattgtctggaaaataaagcgcatggctggtatgaaggagtctcagattagtgcagagattgagctgcttcctaccaacgataagaagaaatgggctcggcctccaatatccatgaactttgaggtcccgtttgctccatctggactcaaagtgcgttacctgaaggtgtttgagccaaaactaaattacagtgaccatgatgtgatcaaatgggtgcgatacattggtcgcagtgggatctatgagacacggtgttaa

SEQ ID NO: 3646 - protein, 435 aa, Xenopus laevis
MIGGLFIYNHKGEVLISRVYRDDIGRNAVDAFRVNVIHARQQVRSPVTNIARTSFFHVKRSNIWLAAVTKQNVNAAMVFEFLYKMCDVMTAYFGKISEENIKNNFVLIYELLDEILDFGYPQNSETGALKTFITQQGIKSQHQTKEEQSQITSQVTGQIGWRREGIKYRRNELFLDVLESVNLLMSPQGQVLSAHVSGRVVMKSYLSGMPECKFGMNDKIVIEKQGKGTADETGKTGKQSIAIDDCTFHQCVRLSKFDSERSISFIPPDGEYELMRYRTTKDIILPFRVIPLVREVGRTKLEVKVVIKSNFKPSLLAQKIEVRIPTPLNTSGVQVICMKGKAKYKASENAIVWKIKRMAGMKESQISAEIELLPTNDKKKWARPPISMNFEVPFAPSGLKVRYLKVFEPKLNYSDHDVIKWVRYIGRSGIYETRC

SEQ ID NO: 3647 - DNA, 900 bp, Arabidopsis thaliana
  CDS (1)..(900)
atgatcgataatggtttccctctcacaacagaacctagtatcctgaaggaaatgatagctccaccgaatctagtcagcaaaatgttgagtgttgtaacgggaaatgcttcgaatgttagtgacacgcttccgagtggggcgggctcttgtgttccttggcgaccgacagatccaaagtactctagcaacgaagtttatgtcgaccttgttgaagagatggatgcaattgtaaacagggatggagaattggtaaaatgcgagatttatggcgaagtccaaatgaattctcagctcactggttttccagatttgacattgtcgtttgcgaatccatcaatcctagaagacatgaggtttcacccgtgtgtccgctacagaccatgggaatctcatcaagttctctcctttgtccctccagatggagagttcaagcttatgagttacagggtgaagaagctaaagaacacacctgtatatgtaaaacctcaaataacatcagattcgggtacatgtcgaattagcgtgctagtgggaatccgaagcgatccagggaaaacaattgagtcgataaccttgagtttccagcttcctcactgtgtatcatctgcagatctctcatcaaatcatggaactgtaacaatcctctctaacaagacatgtacatggacaatcgggcgaatcccaaaggacaaaactccgtgtttgtcgggaacactagcgctggaaccagggttagaacggcttcacgtgtttccgacattcaaactcgggtttaagataatgggcattgctctttctggcctaagaatcgagaaacttgatcttcaaactatccctcctcgtttgtacaaagggtttcgtgctcagacacgcgctggtgagttcgatgtcaggttgtag

SEQ ID NO: 3648 - protein, 299 aa, Arabidopsis thaliana
MIDNGFPLTTEPSILKEMIAPPNLVSKMLSVVTGNASNVSDTLPSGAGSCVPWRPTDPKYSSNEVYVDLVEEMDAIVNRDGELVKCEIYGEVQMNSQLTGFPDLTLSFANPSILEDMRFHPCVRYRPWESHQVLSFVPPDGEFKLMSYRVKKLKNTPVYVKPQITSDSGTCRISVLVGIRSDPGKTIESITLSFQLPHCVSSADLSSNHGTVTILSNKTCTWTIGRIPKDKTPCLSGTLALEPGLERLHVFPTFKLGFKIMGIALSGLRIEKLDLQTIPPRLYKGFRAQTRAGEFDVRL

SEQ ID NO: 3649 - DNA, 1281 bp, Trypanosoma brucei
  CDS (1)..(1281)
atgataaccggccttttcttccttaataagcatggcgaggttattattgagaaggaattccgtgagaaggtaccccgctccagcctggaagacttctggtgcacctatatgactccattgcgttcgattgaagaggcacccgctgttattacgtacagccggtttgcctttattcaaatccatcgtaacgatgtcgtcctcctggcggttgcaacaagtgagtgtttccccctattcgtgatggaagtcctagcgctggccgcaaaagtggtgcaaaagtacctcaaagtcatctctgagagcacgttgcgtgagaatttttctttggtgtatcaattgcttgtggagctcattgacaatggatacccactgacaactgaaatgcacgtgctagaggagttggtgcttccaccgtcgttagaaaatgtgtttcgtagtgctctggaagcaccagtagcgataaagcggcgccatatgggttcccgtgccgtaccgtggcgggaccctgcgacaaagcactcatcaaatgagattttcttcgatatagtggaaaatttggattgcatagtcgattgtgaaggaaatgtggtgcagagcgctgtccgtggtgccgtggaggtgaactgtcgcctgagtgggctgcccgaagtcatcatgcggttaaccggcatcgattgcatcgaagacattgccatgcatcggtgtgttcgacgtagccgttacgaggtcgaccgcatgatcagttttatacctgttgatgggaagtttacgctgttgcagtaccgctgtaaaatgcccaatagtgtgcaggttcccttctatgttacaccgcaaattacttttaatgccagtgttggtcgatttaactgtatggtgggattccgtggttctggtctcgcagcaaggagcagggaatacgagattcagaaacttatcatccaccttccccttccgccccagacagaggcggtgcaggtgcacagcatctcacacgggaacacgaactttaagaaggcacgtaacatgctggtgtggaatgcagggtcacttcatcgtggcacgtgctcacttagtggcgagtttacgtttggtacggagagggaaaaggagggactagcgccgtgtacaggaggctctgcgttagttgagttcagcatcccaaactatttactgagtagcatccgcgtcgacagtgttcaggtgttgaatgatttgacaaagccctacaaaggtgtcaaatatgttacgacggctgggaggtttgccgtgcggacaatttga

SEQ ID NO: 3650 - protein, 426 aa, Trypanosoma brucei
MITGLFFLNKHGEVIIEKEFREKVPRSSLEDFWCTYMTPLRSIEEAPAVITYSRFAFIQIHRNDVVLLAVATSECFPLFVMEVLALAAKVVQKYLKVISESTLRENFSLVYQLLVELIDNGYPLTTEMHVLEELVLPPSLENVFRSALEAPVAIKRRHMGSRAVPWRDPATKHSSNEIFFDIVENLDCIVDCEGNVVQSAVRGAVEVNCRLSGLPEVIMRLTGIDCIEDIAMHRCVRRSRYEVDRMISFIPVDGKFTLLQYRCKMPNSVQVPFYVTPQITFNASVGRFNCMVGFRGSGLAARSREYEIQKLIIHLPLPPQTEAVQVHSISHGNTNFKKARNMLVWNAGSLHRGTCSLSGEFTFGTEREKEGLAPCTGGSALVEFSIPNYLLSSIRVDSVQVLNDLTKPYKGVKYVTTAGRFAVRTI

SEQ ID NO: 3651 - DNA, 1257 bp, Homo sapiens
  CDS (1)..(1257)
atgatccacagtctatttctcataaactgttccggtgacatatttctagagaagcactggaagagcgttgtgagccagtctgtctgtgattatttctttgaagctcaagagaaagctgctgatgttgaaaatgtaccacctgtcatttcaacacctcaccactacctcatcagtatctaccgggataagctcttctttgtatctgtcatacagaccgaagtgccacctctctttgtaattgagttcctacatcgagttgctgacacttttcaggactactttggtgagtgttcagaggctgcaattaaggataatgtggtcatagtatatgaactcttagaagaaatgttagacaatggatttccactggctaccgaatctaacattttgaaagaattgattaaaccaccaacaattctacgctctgttgtcaactctattacaggcagtagtaatgttggggacacactccccaccgtgcagctgtccaacataccatggcgtcgggcaggggtaaagtacacaaacaatgaagcctattttgatgttgttgaagaaatagacgcaattatagataaatcaggatctacagtctttgcagaaattcagggggtcattgatgcttgcattaaactatctggaatgcctgatctctccctttctttcatgaaccctaggcttctggatgatgtcagctttcacccctgcatccggttcaagcgttgggaatctgaaagagttttgtcatttattcctccagatggaaatttccgactcatatcataccgtgtcagctcacaaaatctagtggcaataccagtgtatgtgaaacatagtatcagctttaaggaggacagttcttgcggcagatttgatataacaattggaccaaagcagaatatggggaaaactattgaaggaattacagtgacagttcacatgccaaaagttgtgctgaacatgaacctgacacccacacaaggcagctatacatttgatccagtcaccaaggtactaacatgggatgtgggaaaaattactccacaaaagctcccaagtcttaaaggactggtaaatttacagtctggagcccccaaaccagaagagaatccgagcctcaacatacagtttaagatccagcagcttgctatttcaggcttaaaagtaaaccgtttggacatgtatggggagaaatataagccatttaaaggagtcaaatacgtcacgaaagctggaaagttccaagtgaggacatga

SEQ ID NO: 3652 - protein, 418 aa, Homo sapiens [sequence omitted]

SEQ ID NO: 3653 - DNA, 1308 bp, Homo sapiens
  CDS (1)..(1308)
atgatcggaggcttattcatctataatcacaagggggaggtgcttatctcccgggtctacagagatgacatcgggaggaatgctgtggatgcctttcgggtcaatgtcattcatgcacggcagcaggtgcgcagccctgtcacaaacatcgctcgcaccagcttcttccatgttaagcggtccaacatctggctggccgcagtcaccaagcagaatgtcaatgctgccatggtcttcgaattcctctacaagatgtgtgatgtaatggctgcttactttggcaaaatcagcgaggagaacatcaagaacaattttgtgctcatatacgagctgctggatgagattctggactttggctacccacagaactcagagacaggtgcactgaaaaccttcatcacccagcagggtatcaagagtcagcatcagacgaaggaagaacagtcccagatcaccagccaggtgaccgggcagattggctggcggcgagaaggcatcaagtatcgccggaatgaactcttcctagatgttctggagagtgtgaacctgcttatgtccccacaggggcaggtgctgagtgcccatgtgtcaggccgggtggtgatgaagagttacctgagtggcatgcctgagtgcaagtttggaatgaatgacaagattgtcatagaaaagcagggcaaaggcacagctgatgaaacaagcaagagtggtaagcagtcgatcgccattgatgactgcaccttccaccagtgtgtgcgactcagcaagtttgactctgagcggagcatcagcttcatccctcccgacggagagtttgaactcatgagataccgtactaccaaggacatcatccttcctttccgggtgatcccattggtgcgggaggtggggcgcaccaaactggaggtcaaggtggtcatcaagtccaacttcaagccctcacttctggcccagaagattgaggtgaggatcccgactccattgaacacaagcggggtacaggtgatctgcatgaaggggaaggccaagtacaaggccagcgagaacgccattgtatggaagatcaagcgcatggcaggcatgaaggaatcccagatcagcgcagagattgagctcctgcccaccaacgataagaagaaatgggctcggccccccatttccatgaactttgaggtgccattcgcgccttctggcctcaaggtgcgctacttgaaggtattcgaaccgaagctgaactacagcgaccatgatgtcatcaaatgggtgcgatacattggccgcagtggcatttatgaaacccgctgctag

SEQ ID NO: 3654 - protein, 435 aa, Homo sapiens
MIGGLFIYNHKGEVLISRVYRDDIGRNAVDAFRVNVIHARQQVRSPVTNIARTSFFHVKRSNIWLAAVTKQNVNAAMVFEFLYKMCDVMAAYFGKISEENIKNNFVLIYELLDEILDFGYPQNSETGALKTFITQQGIKSQHQTKEEQSQITSQVTGQIGWRREGIKYRRNELFLDVLESVNLLMSPQGQVLSAHVSGRVVMKSYLSGMPECKFGMNDKIVIEKQGKGTADETSKSGKQSIAIDDCTFHQCVRLSKFDSERSISFIPPDGEFELMRYRTTKDIILPFRVIPLVREVGRTKLEVKVVIKSNFKPSLLAQKIEVRIPTPLNTSGVQVICMKGKAKYKASENAIVWKIKRMAGMKESQISAEIELLPTNDKKKWARPPISMNFEVPFAPSGLKVRYLKVFEPKLNYSDHDVIKWVRYIGRSGIYETRC

SEQ ID NO: 3655 - DNA, 1257 bp, Homo sapiens
  CDS (1)..(1257)
atgatccacagtctatttctcataaactgttccggtgacatatttctagagaagcactggaagagcgttgtgagccagtctgtctgtgattatttctttgaagctcaagagaaagctgctgatgttgaaaatgtaccacctgtcatttcaacacctcaccactacctcatcagtatctaccgggataagctcttctttgtatctgtcatacagaccgaagtgccacctctctttgtaattgagttcctacatcgagttgctgacacttttcaggactactttggtgagtgttcagaggctgcaattaaggataatgtggtcatagtatatgaactcttagaagaaatgttagacaatggatttccactggctaccgaatctaacattttgaaagaattgattaaaccaccaacaattctacgctctgttgtcaactctattacaggcagtagtaatgttggggacacactccccaccgggcagctgtccaacataccatggcgtcgggcaggggtaaagtacacaaacaatgaagcctattttgatgttgttgaagaaatagacgcaattatagataaatcaggatctacagtctttgcagaaattcagggggtcattgatgcttgcattaaactatctggaatgcctgatctctccctttctttcatgaaccctaggcttctggatgatgtcagctttcacccctgcatccggttcaagcgttgggaatctgaaagagttttgtcatttattcctccagatggaaatttccgactcatatcataccgtgtcagctcacaaaatctagtggcaataccagtgtatgtgaaacatagtatcagctttaaggagaacagttcttgcggcagatttgatataacaattggaccaaagcagaatatggggaaaactattgaaggaattacagtgacagttcacatgccaaaagttgtgctgaacatgaacctgacacccacacaaggcagctatacatttgatccagtcaccaaggtactaacatgggatgtgggaaaaattactccacaaaagctcccaagtcttaaaggactggtaaatttacagtctggagcccccaaaccagaagagaatccgagcctcaacatacagtttaagatccagcagcttgctatttcaggcttaaaagtaaaccgtttggacatgtatggggagaaatataagccatttaaaggagtcaaatacgtcacgaaagctggaaagttccaagtgaggacatga

SEQ ID NO: 3656 - protein, 418 aa, Homo sapiens
MIHSLFLINCSGDIFLEKHWKSVVSQSVCDYFFEAQEKAADVENVPPVISTPHHYLISIYRDKLFFVSVIQTEVPPLFVIEFLHRVADTFQDYFGECSEAAIKDNVVIVYELLEEMLDNGFPLATESNILKELIKPPTILRSVVNSITGSSNVGDTLPTGQLSNIPWRRAGVKYTNNEAYFDVVEEIDAIIDKSGSTVFAEIQGVIDACIKLSGMPDLSLSFMNPRLLDDVSFHPCIRFKRWESERVLSFIPPDGNFRLISYRVSSQNLVAIPVYVKHSISFKENSSCGRFDITIGPKQNMGKTIEGITVTVHMPKVVLNMNLTPTQGSYTFDPVTKVLTWDVGKITPQKLPSLKGLVNLQSGAPKPEENPSLNIQFKIQQLAISGLKVNRLDMYGEKYKPFKGVKYVTKAGKFQVRT

SEQ ID NO: 3657 - DNA, 1257 bp, Mus musculus
  CDS (1)..(1257)
atgatccacagtctatttctcataaactgctctggcgacatttttctagaaaaacactggaagagcgttgtaagccagtcagtgtgtgactatttctttgaagctcaggagaaagctgctgatgttgaaaatgtcccacctgtcatttcaacacctcaccactacctcattagtatctaccgggataagctcttctttgtgtctgtgatacagaccgaagtgccacctctctttgtaattgaatttctgcatcgagttgctgacacttttcaggactactttggtgagtgttcagaggctgcaattaaggataatgtggtcatagtatatgagctcttggaagaaatgttagacaatggattcccactggctactgaatctaacattttgaaagaactgattaaaccaccaacaattctacgttctgtcgtcaattctattacaggcagtagtaatgttggggatacactccccactgggcagctatccaacatcccatggcgtcgagcaggagtgaagtacacaaacaatgaagcctattttgatgtagttgaagagatagatgcaattatagataaatcaggatctacagtctttgcagaaattcaaggggtcattgatgcttgcattaagctgtctggaatgcctgatctctccctctctttcatgaacccaaggctactagatgacgtcagcttccacccatgcatccgattcaaacgctgggagtctgaaagagttttgtcattcattcctccagatggaaatttccgactcatatcgtatcgtgtcagctcacaaaatctagtggcaataccagtgtatgtgaaacacagtatcagctttaaggaaaacagctcttgtggccggtttgatataacaattggaccgaaacagaatatgggaaaaacaattgaaggaatcacagtgactgttcacatgcccaaagttgtgctgaatatgaacctgacaccaacgcaaggcagctatacatttgatcccgtgaccaaggtactagcatgggatgtgggcaaaattactccacaaaagctcccaagtcttaaaggactagtaaatttacagtcaggagcacccaagccagaagagaacccaaacctcaacatacagttcaagatccagcagcttgctatttcaggcttaaaagtgaaccgcttggacatgtatggtgagaagtataagccatttaaaggagtcaaatatgtcacaaaggctgggaagttccaagtgaggacatga

SEQ ID NO: 3658 - protein, 418 aa, Mus musculus
MIHSLFLINCSGDIFLEKHWKSVVSQSVCDYFFEAQEKAADVENVPPVISTPHHYLISIYRDKLFFVSVIQTEVPPLFVIEFLHRVADTFQDYFGECSEAAIKDNVVIVYELLEEMLDNGFPLATESNILKELIKPPTILRSVVNSITGSSNVGDTLPTGQLSNIPWRRAGVKYTNNEAYFDVVEEIDAIIDKSGSTVFAEIQGVIDACIKLSGMPDLSLSFMNPRLLDDVSFHPCIRFKRWESERVLSFIPPDGNFRLISYRVSSQNLVAIPVYVKHSISFKENSSCGRFDITIGPKQNMGKTIEGITVTVHMPKVVLNMNLTPTQGSYTFDPVTKVLAWDVGKITPQKLPSLKGLVNLQSGAPKPEENPNLNIQFKIQQLAISGLKVNRLDMYGEKYKPFKGVKYVTKAGKFQVRT

SEQ ID NO: 3659 - DNA, 1257 bp, Rattus norvegicus
  CDS (1)..(1257)
atgatccacagtctatttctcatcaactgttctggcgacatatttctagaaaaacactggaagagcgttgtaagccaatctgtgtgtgactatttctttgaagctcaggagaaagctgctgatgttgaaaatgtaccaactgtcatttcaacacctcaccactacctcattagtatctaccgggataagctcttctttgtgtctgtgatacagactgaagtgccacctctctttgtaattgagtttctgcatcgagttgctgacacttttcaggactactttggtgagtgttcagaggctgcaattaaggataatgtggtcatagtgtatgagctcttggaagaaatgttagacaatggattcccactggctaccgaatctaacattctgaaagaactgattaaaccaccaacaattctacgttctgtcgtcaattctattacaggcagtagtaatgttggggacacgctccccactgggcagctgtccaacatcccatggcgtcgagcaggtgtaaagtacaccaacaatgaagcctactttgatgtagtcgaagagatagatgcgattatagataaatcaggatctacagtctttgcagaaattcaaggtgtcattgatgcttgcattaagctgtctggaatgcctgatctctctctctctttcatgaacccaaggcttctagatgatgtcagcttccacccatgcatccggttcaaacgctgggaatctgagagagttttgtcattcattcctcccgatggaaatttccgactcatatcataccgcgtcagctcacaaaatctagtggcaatcccagtgtatgtgaaacataatatcagctttaaggaaaacagctcttgtggtagatttgatataacaattggaccaaaacagaatatgggaaaaacgattgaaggaatcacagtgactgttcacatgccaaaagttgtgctgaatatgaacctgacaccaacacaaggcagctatacattcgatccagtcaccaaggtactagcatgggatgtggggaaaattactccacaaaagctcccaagtcttaaaggactggtaaatttacagtcaggagcacccaagccagaagagaacccaaacctcaacatacagttcaagatccagcagcttgctatttcaggcttaaaagtgaaccgcttggacatgtatggtgagaagtataagccatttaaaggagtcaagtatatcacaaaggccggaaagttccaagtgaggacatga

SEQ ID NO: 3660 - protein, 418 aa, Rattus norvegicus
MIHSLFLINCSGDIFLEKHWKSVVSQSVCDYFFEAQEKAADVENVPTVISTPHHYLISIYRDKLFFVSVIQTEVPPLFVIEFLHRVADTFQDYFGECSEAAIKDNVVIVYELLEEMLDNGFPLATESNILKELIKPPTILRSVVNSITGSSNVGDTLPTGQLSNIPWRRAGVKYTNNEAYFDVVEEIDAIIDKSGSTVFAEIQGVIDACIKLSGMPDLSLSFMNPRLLDDVSFHPCIRFKRWESERVLSFIPPDGNFRLISYRVSSQNLVAIPVYVKHNISFKENSSCGRFDITIGPKQNMGKTIEGITVTVHMPKVVLNMNLTPTQGSYTFDPVTKVLAWDVGKITPQKLPSLKGLVNLQSGAPKPEENPNLNIQFKIQQLAISGLKVNRLDMYGEKYKPFKGVKYITKAGKFQVRT

SEQ ID NO: 3661 - DNA, 1257 bp, Homo sapiens
  CDS (1)..(1257)
atgatccatagtcttttcttgatcaactcctctggagacattttcctggagaaacattggaaaagtgtggtcagccgttctgtttgtgattacttttttgaggcgcaagagagagctactgaggcagaaaatgtgcctccggttatccctacccctcaccactatctcttaagtgtttaccgccacaagatcttttttgtggccgtgatccagacggaggtcccccctctgtttgtcattgagtttcttcaccgagtggtggacacatttcaggattattttggagtctgttcagagccagtgatcaaagacaatgtagttgtggtttatgaggtattggaagagatgcttgacaatggttttccattggctaccgagtcgaacattcttaaagaactcataaagcctcctaccatccttcgaacggttgtcaacaccatcacaggaagcacgaatgtgggtgaccagcttcccactgggcagctgtcagtggtgccttggcgacggactggggtgaaatataccaacaatgaggcctattttgatgtgattgaagagattgatgcaattattgataaatcaggctccacaattactgctgagatccagggggtgattgatgcctgtgtcaagctgactggcatgccagaccttacactttccttcatgaaccctaggttgttggatgatgtcagcttccatccttgtgttcgtttcaaacgctgggaatctgagcgcatcctctccttcatccctcctgatggaaacttccgcctgctgtcttaccatgtcagtgcacagaatctggttgcaatcccagtgtatgtcaaacataacatcagtttccgggacagtagttcccttggacgctttgaaataacggtgggacccaagcagacgatggggaagaccattgagggagtgactgtcaccagccagatgcccaagggggtcctgaacatgagccttactccatcacaggggacacacacattcgacccagtcacaaagatgctgtcttgggatgtaggaaaaataaatccacaaaagctaccaagtttgaaggggaccatgagtcttcaggctggagcttccaaaccagatgaaaaccccacaattaacctgcagtttaagatccagcagctggccatttctggactcaaggtgaatcgtctggatatgtatggagaaaagtacaaaccctttaagggcataaaatacatgaccaaagctgggaagttccaagttcgaacctga

SEQ ID NO: 3662 - protein, 418 aa, Homo sapiens
MIHSLFLINSSGDIFLEKHWKSVVSRSVCDYFFEAQERATEAENVPPVIPTPHHYLLSVYRHKIFFVAVIQTEVPPLFVIEFLHRVVDTFQDYFGVCSEPVIKDNVVVVYEVLEEMLDNGFPLATESNILKELIKPPTILRTVVNTITGSTNVGDQLPTGQLSVVPWRRTGVKYTNNEAYFDVIEEIDAIIDKSGSTITAEIQGVIDACVKLTGMPDLTLSFMNPRLLDDVSFHPCVRFKRWESERILSFIPPDGNFRLLSYHVSAQNLVAIPVYVKHNISFRDSSSLGRFEITVGPKQTMGKTIEGVTVTSQMPKGVLNMSLTPSQGTHTFDPVTKMLSWDVGKINPQKLPSLKGTMSLQAGASKPDENPTINLQFKIQQLAISGLKVNRLDMYGEKYKPFKGIKYMTKAGKFQVRT

SEQ ID NO: 3663 - DNA, 1257 bp, Mus musculus
  CDS (1)..(1257)
atgattcacagccttttcttgattaactcttccggagatattttcctggagaaacactggaaaagtgtggtcagccgctctgtgtgtgattacttcttcgaggcccaagagagagctaccgaggcagaaaatgtgcctccggtcatccccacccctcaccactacctcctgagtgtttaccggcacaagatcttctttgtggctgtaatccagacagaggtcccgcctctgtttgtcattgaattccttcaccgagtagtggatacatttcaggactattttggggtctgttccgagccagtgatcaaagacaatgtggtggtggtgtacgaggtgttggaagagatgctggacaacgggttccccttggctacggagtcaaacatcctcaaagaactgataaagcctcccactattctccggacagtggtcaacaccatcacaggaagcaccaatgtgggggaccagcttccaactgggcagctgtcggtggtgccttggcgacggacaggggtgaaatataccaacaacgaggcctatttcgatgtggtggaagagatagacgccatcattgacaagtcaggttccacagtcaccgctgagatccaaggggtgatcgatgcctgtgttaagctgaccgggatgccggatctcactctgtccttcatgaaccccaggttgctggacgatgttagcttccacccctgtgtccgtttcaagcgctgggaatctgagcgcatcctctccttcatccctcctgacggcaacttccgcctgctcgcctaccacgtcagtgcacagaacctcgttgccattccagtctatgtcaaacatagcatcagcttccgggacagcagttcacttggacgctttgaaatcacggtgggacccaagcagaccatggggaagaccatagagggtgtgattgtcaccagccagatgcccaaaggagtcctgaatatgagcctcactccatctcaggggacacacacgtttgaccccgtgacaaagatgctgtcttgggatgtaggaaaaataaacccacagaagctgccaagtttgaaggggacgatgggtctccaggtcggagcttctaaaccagatgagaaccctacgattaacctgcagtttaagatccagcagctggccatttctggactcaaagtgaaccgtctggatatgtacggggagaagtacaagccctttaaaggcatcaaatacatgaccaaagccggcaagttccaagtccgaacctga

SEQ ID NO: 3664 - protein, 418 aa, Mus musculus
MIHSLFLINSSGDIFLEKHWKSVVSRSVCDYFFEAQERATEAENVPPVIPTPHHYLLSVYRHKIFFVAVIQTEVPPLFVIEFLHRVVDTFQDYFGVCSEPVIKDNVVVVYEVLEEMLDNGFPLATESNILKELIKPPTILRTVVNTITGSTNVGDQLPTGQLSVVPWRRTGVKYTNNEAYFDVVEEIDAIIDKSGSTVTAEIQGVIDACVKLTGMPDLTLSFMNPRLLDDVSFHPCVRFKRWESERILSFIPPDGNFRLLAYHVSAQNLVAIPVYVKHSISFRDSSSLGRFEITVGPKQTMGKTIEGVIVTSQMPKGVLNMSLTPSQGTHTFDPVTKMLSWDVGKINPQKLPSLKGTMGLQVGASKPDENPTINLQFKIQQLAISGLKVNRLDMYGEKYKPFKGIKYMTKAGKFQVRT

SEQ ID NO: 3665 - DNA, 1257 bp, Rattus norvegicus
  CDS (1)..(1257)
atgattcacagtcttttcttgatcaactctgctggggatattttcctggagaagcactggaaaagcgtggtcagccgctctgtttgcgattactttttcgaggcccaagagagagctacggaggctgaaaatgtgcctcccgtcatccccacacctcaccactaccttctgagcgtttaccggcacaagatcttctttgtggctgtgatccagacggaggtcccgcctctgtttgtcattgaattccttcaccgagtagtggacacatttcaggactatttcggggtctgctctgagccagtgatcaaagacaacgtggtggtggtctacgaggtgttggaagagatgctggacaatgggttccccttggctacggagtcgaacatcctcaaggagctgataaagcctcccaccattctccggacagtagtcaacaccatcacaggaagcaccaatgtgggcgaccagcttccaactgggcagctgtcggtggtgccttggcgacggactggggtgaaatataccaacaacgaggcctatttcgacgtggttgaagagatagacgccatcattgacaaatcaggttccacagtcaccgctgagatccaaggggtgattgatgcctgtgttaaactgaccgggatgccagatctcacgctgtccttcatgaaccccaggttgctggatgatgttagcttccacccctgtgtccgtttcaagcgctgggaatctgagcgcatcctctccttcatccctcctgacggcaacttccgcctgctctcctaccacgtcagtgcacagaacctagttgccattccagtctatgtcaaacacagcatcagcttccgggacagtggctcacttggacgctttgaaatcacagtggggccgaagcagaccatggggaagaccatagagggtgtgactgtaaccagccagatgcccaaaggagtcttgaacatgagcctcactccatcccaggggacacacacgtttgacccggtgacaaagatgctgtcttgggatgtaggaaaaataaacccgcaaaagctgccaagtttgaaggggacaatgggtctccaggtcggagcttctaaacccgatgagaaccctacaattaaccttcagttcaagatccagcagctggccatttctggactcaaagtgaaccgtctggatatgtacggagagaagtacaagccctttaagggcataaaatacatgaccaaagccggcaagttccaagtccgaacctga

SEQ ID NO: 3666 - protein, 418 aa, Rattus norvegicus
MIHSLFLINSAGDIFLEKHWKSVVSRSVCDYFFEAQERATEAENVPPVIPTPHHYLLSVYRHKIFFVAVIQTEVPPLFVIEFLHRVVDTFQDYFGVCSEPVIKDNVVVVYEVLEEMLDNGFPLATESNILKELIKPPTILRTVVNTITGSTNVGDQLPTGQLSVVPWRRTGVKYTNNEAYFDVVEEIDAIIDKSGSTVTAEIQGVIDACVKLTGMPDLTLSFMNPRLLDDVSFHPCVRFKRWESERILSFIPPDGNFRLLSYHVSAQNLVAIPVYVKHSISFRDSGSLGRFEITVGPKQTMGKTIEGVTVTSQMPKGVLNMSLTPSQGTHTFDPVTKMLSWDVGKINPQKLPSLKGTMGLQVGASKPDENPTINLQFKIQQLAISGLKVNRLDMYGEKYKPFKGIKYMTKAGKFQVRT

SEQ ID NO: 3667 - DNA, 1257 bp, Discopyge ommata
  CDS (1)..(1257)
atgatccacagcctgttcctgatgaacggcggcggcgccgtgttcctggagaaacactggaggagcgtggtgagccgctccgtctgcgcatacttgctggaggcgcagctgaaggccgggcagcccgagaacgtggcgccggtgctggccaccccgcaccactaccttgtcagcacccaccgccacggcatctccttcgtggccgtcatccaggccgaggtgcccccgctgtttgtcatcgagttcctgcaccgggtggcagaaacactgcaggattattttggagaatgttcagaggcatcgattaaagataatgttgtgatcgtgtatgaactcctagaagagatgttggacaacggtttcccattagctaccgagtccaatattttaaaggaattgattaaaccaccaactattcttcgctcagttgttaattctataacagggagcagcaatgttggagatcagcttcctactggtcaactgtccaacatcccatggcggagagtcggagtcaagtacacaaataacgaagcttattttgatgttacagaagaaattgatgccatcattgataaatcaggatcaacagtcttcgctgaaatacagggtgttattgacgcttgcattaaattaactggaatgccagacctcactctctccttcttgaacccaagattgcttgacgatgtcagctttcatccatgtgttcgtttcaaacgatgggaatccgagcgagttctatcatttattcctccagtaggaaatttccgtttaatgtcttatcacgtcaactcacaaaacctggtggcaataccggtttatgtaaaacataatatcaacttcagagatgatggatccacaggatggtttgatataacaatcgggcccaaacagaccatgggaaaggtcgtggagaacattctagtaattatccacatgcccaaagtggtgctcaacatgacccttactgcagcacagggcaatttcacatttgatccagtaaccaaggtgctaatctgggacattggaaaaattatcttgcctaaattaccaactcttaagggattgattaacctgcagtctggggaagcaaaacctgaagagaatccaacactcaatattcagtttcgaatccaacaacttgctgtatcaggtttgaaagtgaatcgactggacatgtatggagaaagatacaaaccatttaaaggtgtgaaatacgtcaccaaagcaggaaaatttcaggtcaggacatga

SEQ ID NO: 3668 - protein, 418 aa, Discopyge ommata
MIHSLFLMNGGGAVFLEKHWRSVVSRSVCAYLLEAQLKAGQPENVAPVLATPHHYLVSTHRHGISFVAVIQAEVPPLFVIEFLHRVAETLQDYFGECSEASIKDNVVIVYELLEEMLDNGFPLATESNILKELIKPPTILRSVVNSITGSSNVGDQLPTGQLSNIPWRRVGVKYTNNEAYFDVTEEIDAIIDKSGSTVFAEIQGVIDACIKLTGMPDLTLSFLNPRLLDDVSFHPCVRFKRWESERVLSFIPPVGNFRLMSYHVNSQNLVAIPVYVKHNINFRDDGSTGWFDITIGPKQTMGKVVENILVIIHMPKVVLNMTLTAAQGNFTFDPVTKVLIWDIGKIILPKLPTLKGLINLQSGEAKPEENPTLNIQFRIQQLAVSGLKVNRLDMYGERYKPFKGVKYVTKAGKFQVRT

SEQ ID NO: 3669 - DNA, 27 bp, Artificial sequence
  primer
atgtatttgtcattctatatcactgat

SEQ ID NO: 3670 - DNA, 25 bp, Artificial sequence
  primer
ctacagccttacttgaaaattgcct

SEQ ID NO: 3671 - protein, 555 aa, Artificial sequence
  consensus sequence
  Variant (3)..(11): Xaa in position 3 to 11 is any amino acid
  Variant (14)..(17): Xaa in position 14 to 17 is any amino acid
  Variant (18)..(22): Xaa in position 18 to 22 is any or no amino acid
  Variant (24)..(25): Xaa in position 24 to 25 is any amino acid
  Variant (27)..(33): Xaa in position 27 to 33 is any amino acid
  Variant (35)..(35): Xaa in position 35 is any amino acid
  Variant (37)..(38): Xaa in position 37 to 38 is any amino acid
  Variant (40)..(40): Xaa in position 40 is any amino acid
  Variant (42)..(42): Xaa in position 42 is any amino acid
  Variant (44)..(45): Xaa in position 44 to 45 is any amino acid
  Variant (47)..(50): Xaa in position 47 to 50 is any amino acid
  Variant (51)..(53): Xaa in position 51 to 53 is any or no amino acid
  Variant (55)..(80): Xaa in position 55 to 80 is any amino acid
  Variant (81)..(132): Xaa in position 81 to 132 is any or no amino acid
  Variant (135)..(138): Xaa in position 135 to 138 is any amino acid
  Variant (139)..(139): Xaa in position 139 is any or no amino acid
  Variant (141)..(143): Xaa in position 141 to 143 is any amino acid
  Variant (146)..(148): Xaa in position 146 to 148 is any amino acid
  Variant (150)..(151): Xaa in position 150 to 151 is any amino acid
  Variant (153)..(159): Xaa in position 153 to 159 is any amino acid
  Variant (160)..(161): Xaa in position 160 to 161 is any or no amino acid
  Variant (163)..(170): Xaa in position 163 to 170 is any amino acid
  Variant (171)..(205): Xaa in position 171 to 205 is any or no amino acid
  Variant (207)..(213): Xaa in position 207 to 213 is any amino acid
  Variant (215)..(215): Xaa in position 215 is any amino acid
  Variant (217)..(217): Xaa in position 217 is any amino acid
  Variant (219)..(231): Xaa in position 219 to 231 is any amino acid
  Variant (232)..(263): Xaa in position 232 to 263 is any or no amino acid
  Variant (266)..(266): Xaa in position 266 is any amino acid
  Variant (268)..(268): Xaa in position 268 is any amino acid
  Variant (270)..(277): Xaa in position 270 to 277 is any amino acid
  Variant (278)..(287): Xaa in position 278 to 287 is any or no amino acid
  Variant (290)..(290): Xaa in position 290 is any amino acid
  Variant (295)..(295): Xaa in position 295 is any amino acid
  Variant (297)..(297): Xaa in position 297 is any amino acid
  Variant (299)..(300): Xaa in position 299 to 300 is any amino acid
  Variant (302)..(343): Xaa in position 302 to 343 is any amino acid
  Variant (344)..(409): Xaa in position 344 to 409 is any or no amino acid
  Variant (411)..(420): Xaa in position 411 to 420 is any amino acid
  Variant (421)..(424): Xaa in position 421 to 424 is any or no amino acid
  Variant (426)..(461): Xaa in position 426 to 461 is any amino acid
  Variant (462)..(516): Xaa in position 462 to 516 is any or no amino acid
  Variant (519)..(530): Xaa in position 519 to 530 is any amino acid
  Variant (531)..(540): Xaa in position 531 to 540 is any or no amino acid
  Variant (542)..(544): Xaa in position 542 to 544 is any amino acid
  Variant (546)..(549): Xaa in position 546 to 549 is any amino acid
  Variant (551)..(554): Xaa in position 551 to 554 is any amino acid
FLXXXXXXXXXYFXXXXXXXXXIXXNXXXXXXXLXEXXDXGXPXXTXXXXXXXLXXXXXXXXXXXXXXXXXXXXXXXXXXXXXXXXXXXXXXXXXXXXXXXXXXXXXXXXXXXXXXXXXXXXXXXXXXXXXXWRXXXXXKXXXNEXXXDXXEXXXXXXXXXGXXXXXXXXXXXXXXXXXXXXXXXXXXXXXXXXXXXXXXXXXXXGXXXXXXXLXGXPXXXXXXXXXXXXXXXXXXXXXXXXXXXXXXXXXXXXXXXXXXXXXFHXCXRXXXXXXXXXXXXXXXXXXSFXPPDGXFXLXXYXXXXXXXXXXXXXXXXXXXXXXXXXXXXXXXXXXXXXXXXXXXXXXXXXXXXXXXXXXXXXXXXXXXXXXXXXXXXXXXXXXXXXXXXXXXXXXXXXXXXXXXXXXXXGXXXXXXXXXXXXXXWXXXXXXXXXXXXXXXXXXXXXXXXXXXXXXXXXXXXXXXXXXXXXXXXXXXXXXXXXXXXXXXXXXXXXXXXXXXXXXXXXXXXXXXXXXXSGXXXXXXXXXXXXXXXXXXXXXXKXXXYXXXXGXXXXR

SEQ ID NO: 3672 - DNA, 678 bp, Saccharomyces cerevisiae
  CDS (1)..(678)
atgaggttttctatgttaatcgggtttaatttattaactgccttgagcagcttctgtgctgccatatcagctaataatagcgacaatgtcgaacatgaacaggaagttgcggaggcggtagcgccaccttctattaatatagaggtgaaatatgatgtcgttgggaaggaatcagaaaatcatgattctttccttgagttttacgcggaggataccgctaccttagcctataatgttactaattgggaagatactaatatcacaatttttggtgtcaacggaacaattgttacatatccacatggttatcctgtggcggacattacaggtgcgagtattgggccttacgaaatggaggtcaacggaacttcaaaattcgggcaagacgttacgttaaatttaccggaaggacaatactttttaatcccatttttattagcttctaggttcgatgaaatcgtgagaattgcggcaccaccaaccctattcgaaattgttagcccacctatttcctttttcaacccacaatttttatcagttcaggtcatctttctagccatcatcggaggtgtaagttattactacatgaagtctaaaacaaatcaaagaccttccaagaagagtgccactgtcaaaaaagttgatgaatcatggttgccagaaacctataaaaaataa

SEQ ID NO: 3673 - protein, 225 aa, Saccharomyces cerevisiae
MRFSMLIGFNLLTALSSFCAAISANNSDNVEHEQEVAEAVAPPSINIEVKYDVVGKESENHDSFLEFYAEDTATLAYNVTNWEDTNITIFGVNGTIVTYPHGYPVADITGASIGPYEMEVNGTSKFGQDVTLNLPEGQYFLIPFLLASRFDEIVRIAAPPTLFEIVSPPISFFNPQFLSVQVIFLAIIGGVSYYYMKSKTNQRPSKKSATVKKVDESWLPETYKK

SEQ ID NO: 3674 - DNA, 663 bp, Eremothecium gossypii
  CDS (1)..(663)
atgaaattatctaatctcttattgtttgctaacgttgggacgttacttgttaaggctacggacgagaatatatcgccaaatgaggagaatactccaagatacgcacaattcaatattgactactcggtcctggatcaaccaaattatgaccctatggcccctatggagtttgaaaacggcgagaatatcacactagcttttaactttgccaataacgaagaagtgccagttaagttaatcgctgtgggtggtaatattattaatgcccgcagtggcgatgaagtcgcgaacatcaccagaagtagtcttggtgaaatcgaggtggatgtgaacacaagcgtttctttcaatcaagctattaatttgaagctcgatgaaggggactactttttgttacctaatgtctttgttctcaaggaaggggaattaatggcagttggtacatcaccatcgcggatcaaaatactgccacctcccatgtcatttttcaacccaaagttcttatccattcaagctgtactgatcggtgtcataagttactttacctacttcatttttagatcttccaagaaagaacgtagaggagttgtatccaaaactaaggctcctaagaaagttaagctcgatgagtcctggttgcctgagaatcatctgaagaaatga

SEQ ID NO: 3675 - protein, 220 aa, Eremothecium gossypii
MKLSNLLLFANVGTLLVKATDENISPNEENTPRYAQFNIDYSVLDQPNYDPMAPMEFENGENITLAFNFANNEEVPVKLIAVGGNIINARSGDEVANITRSSLGEIEVDVNTSVSFNQAINLKLDEGDYFLLPNVFVLKEGELMAVGTSPSRIKILPPPMSFFNPKFLSIQAVLIGVISYFTYFIFRSSKKERRGVVSKTKAPKKVKLDESWLPENHLKK

SEQ ID NO: 3676 - DNA, 738 bp, Candida glabrata CBS138
  CDS (1)..(738)
atgaagttcttgcatattggtttgatgacgcttatggctggtgtcagcaatgtgttggctcaagaagaagccaacgctgaggatgtgatggtcaacatcgaaggccaggacatgaccatggaagaggccgaagcctatatggctgctaaggagaaaatggggggtgcccagcagcagagggagatgatcaacttgcaagtcaactacgacttgctggaggaaccctttgccgatttgcaggacttcatagtatttgaagttggtgaaactgccactttgaactacacaatccataacctggaccaggaggagacctacagtatcgtcggtgtttccggtgctgtcttgtctgaggtagatcaaagaaacgttgcaaacttgaccgagactaatatcactgaaattgtgttggctccaaatgcaactggcactctaagacacaagatcgacatgaacttgactgagggtagatactacattttgccattgctgcacgtcaaggacaagaatgaagtcaagagagtcatgtccaacacattcaagttggacttgattaaccaatccatctctatctttgacccaagcttcttgtccatcatcgccgtcctcatcgctttggttggtggtactgtatacctctactccaacgtcgtcgctccaccaaagaagattaagaagaaggaagcaattccagccaagattgacgaatcctggttgccagatgttcacaagaaataa

SEQ ID NO: 3677 - protein, 245 aa, Candida glabrata CBS138
MKFLHIGLMTLMAGVSNVLAQEEANAEDVMVNIEGQDMTMEEAEAYMAAKEKMGGAQQQREMINLQVNYDLLEEPFADLQDFIVFEVGETATLNYTIHNLDQEETYSIVGVSGAVLSEVDQRNVANLTETNITEIVLAPNATGTLRHKIDMNLTEGRYYILPLLHVKDKNEVKRVMSNTFKLDLINQSISIFDPSFLSIIAVLIALVGGTVYLYSNVVAPPKKIKKKEAIPAKIDESWLPDVHKK

SEQ ID NO: 3678 - DNA, 717 bp, Kluyveromyces lactis NRRL Y-1140
  CDS (1)..(717)
atgaaatttttaaaggttgctctaattttctcggcgctaagtggtgtttatgccgacttagaacataatctcagaatacataatgatattcctgtggaatacgatagcgatgctgcttctgctgatatcggctcagaggacgagccacaccaacaagaacctaaaattgctaactttttgattgaatacgatgtgttagaagaggatggcagaatatcatccggtctgatcgaggtagaaaatggtaagtcgctttccttctcttacaattttacaaatagcgaggatgcagacgtgaatgtgtatgcatttggaggaagcatcattgatatgggaagtagccaaattattgctgatattccaagaactgatttcagcccagttcatgtggcaataaacgagagtgctcgtttactgcagaaattaccaattgatttaccggaaggcattctgtacgtcttacctcacatctacgttgacaaagacggcgaacaaatgaaagtgggtgcatctcctatttctattcaggttgttcctcctccattgtcaatattcaacccccagtttttgtctatccaactgttcttgctagggcttgttgccgcgatttcctactatgtctttggcttcagcttcaagactacgaaacaacccgtcaaaaaacaaaacagagctagtaattcaaatgaatggttaccggaaactcatatcaaatga

SEQ ID NO: 3679 - protein, 238 aa, Kluyveromyces lactis NRRL Y-1140
MKFLKVALIFSALSGVYADLEHNLRIHNDIPVEYDSDAASADIGSEDEPHQQEPKIANFLIEYDVLEEDGRISSGLIEVENGKSLSFSYNFTNSEDADVNVYAFGGSIIDMGSSQIIADIPRTDFSPVHVAINESARLLQKLPIDLPEGILYVLPHIYVDKDGEQMKVGASPISIQVVPPPLSIFNPQFLSIQLFLLGLVAAISYYVFGFSFKTTKQPVKKQNRASNSNEWLPETHIK

SEQ ID NO: 3680 - DNA, 714 bp, Debaryomyces hansenii CBS767
  CDS (1)..(714)
atgaaattatcgttttctatcattactgcattagtcgctgttgcttcttctgctattgctgctccaattgacccggaaaaggctacaggatcaattaactttgttgtagactatactatctcggaatttccagagatttcaaacaccgatgttgctgaattaaccaacggcgaggctatctctttggaatacagtgtcactaataacgaagataaggatatctccgttgtaggtgttggtggttctttccgtgacccagctaatggaaatgttaaaacaaacttaacagctgctgctgtgggtccagttttggttgctgccggtgaaaaggctagcttcatccagaagatcgacttgaatttggttgctgacaattacttgttgacacctcaaatttttgttgctgtcgaagaagatttaaagttcattcaggctagaggacaattggctaccgtcaatgatttaccaatctcattattcaaccttcaattattgttcttggaagccgttttattggctactattggtggtattctttacttcgtctatgatatttggggtaagagatatatcgagggaactgcaccaatcgctaaatcttctaagaaagcatcatctcctagtcctgtttctgttgccaccggtaaagcctacaactctgaatggattccagaagctcatttgaaacagaaaaagtcgaaaaaggcatactag

SEQ ID NO: 3681 - protein, 237 aa, Debaryomyces hansenii CBS767
MKLSFSIITALVAVASSAIAAPIDPEKATGSINFVVDYTISEFPEISNTDVAELTNGEAISLEYSVTNNEDKDISVVGVGGSFRDPANGNVKTNLTAAAVGPVLVAAGEKASFIQKIDLNLVADNYLLTPQIFVAVEEDLKFIQARGQLATVNDLPISLFNLQLLFLEAVLLATIGGILYFVYDIWGKRYIEGTAPIAKSSKKASSPSPVSVATGKAYNSEWIPEAHLKQKKSKKAY

SEQ ID NO: 3682 - DNA, 720 bp, Candida albicans SC5314
  CDS (1)..(720): transl_table=12
atgaaattatccaccatttttactgcatttgcagctacaattgccactgtagctggttacgaaactactggctcaaaacaaaccgttgatattcttattgattatatcatcaaggaaacaccagaattatctcaaaacgacgtggccaattgggaaaatggcgacactgtgacacttcaatatgttgttaacaataatgaagaatcagaaatcactgttgtcggtgtaactggtcaattcaaaaaccccataaataatgaaattgtcactaatttgactacagggaaagttggtcctattgctgttccaccgggtgaagcgattaaatttgatcaaaaaattaatgttgatttaatcccagcaaattatgaattgattcctcatgttttcattgctcaagatagtttgattaaagtcattccatgccgtggtcaattggctactattgttgacgctgctgtttcatttttcgatccaagattgatctttttggaattggtattgttgattacttttgctggtttgatatatgttggttatgaaatttggggtaaacaatatttcaaaggtgttgctccagttaaagctaagaaagtatctgctgctaaagcttcaagtcctgttgctagtggcccctctactacttctgctactggatacgatactaactggattccagaatctcatttgaaacaaaagaaaaccaagaaggttaactaa

SEQ ID NO: 3683 - protein, 239 aa, Candida albicans SC5314
MKLSTIFTAFAATIATVAGYETTGSKQTVDILIDYIIKETPELSQNDVANWENGDTVTLQYVVNNNEESEITVVGVTGQFKNPINNEIVTNLTTGKVGPIAVPPGEAIKFDQKINVDLIPANYELIPHVFIAQDSLIKVIPCRGQLATIVDAAVSFFDPRLIFLELVLLITFAGLIYVGYEIWGKQYFKGVAPVKAKKVSAAKASSPVASGPSTTSATGYDTNWIPESHLKQKKTKKVN

SEQ ID NO: 3684 - DNA, 720 bp, Candida albicans SC5314
  CDS (1)..(720): transl_table=12
atgaaattatccaccatttttactgcatttgcagctacaattgccactgtagctggttacgaaactactggctcaaaacaaaccgttgatattcttattgattatatcatcaaggaaacaccagaattatctcaaaacgacgtggccaattgggaaaatggcgacactgtgacacttcaatatgttgttaacaataatgaagaatcagaaatcactgttgtcggtgtaactggtcaattcaaaaaccccataaataatgaaattgtcactaatttgactacagggaaagttggtcctattgctgttccaccgggtgaagcgattaaatttgatcaaaaaattaatgttgatttaatcccagcaaattatgaattgattcctcatgttttcattgctcaagatagtttgattaaagtcattccatgccgtggtcaattggctactattgttgacgctgctgtttcatttttcgatccaagattgatctttttggaattggtattgttgattacttttgctggtttgatatatgttggttatgaaatttggggtaaacaatatttcaaaggtgttgctccagttaaagctaagaaagtatctgctgctaaagcatcaagtcctgttgcaactggcccctctactatttctgctactggatacgatactaactggattccagaatctcatttgaaacaaaagaaaaccaaaaaagttaactaa

SEQ ID NO: 3685 - protein, 239 aa, Candida albicans SC5314
MKLSTIFTAFAATIATVAGYETTGSKQTVDILIDYIIKETPELSQNDVANWENGDTVTLQYVVNNNEESEITVVGVTGQFKNPINNEIVTNLTTGKVGPIAVPPGEAIKFDQKINVDLIPANYELIPHVFIAQDSLIKVIPCRGQLATIVDAAVSFFDPRLIFLELVLLITFAGLIYVGYEIWGKQYFKGVAPVKAKKVSAAKASSPVATGPSTISATGYDTNWIPESHLKQKKTKKVN

SEQ ID NO: 3686 - DNA, 720 bp, Candida albicans SC5314
  CDS (1)..(720): transl_table=12
atgaaattatccaccatttttactgcatttgcagctacaattgccactgtagctggttacgaaactactggctcaaaacaaaccgttgatattcttattgattatatcatcaaggaaacaccagaattatctcaaaacgacgtggccaattgggaaaatggcgatactgttacacttcaatatgttgttaacaataatgaagaatcagaaatcactgttgtcggtgtaactggtcaattcaaaaacccagtgaataatgaaattgtcactaatttgactacagggaaagttggtcctattgctgttccaccaggtgaagcgattaaatttgatcaaaaaattaatgttgatttaatcccagcaaattatgaattgattccttatgttttcattgctcaagatagtttgattaaagtcattccatgccgtggtcaattggctactattgttgatgctgctgtttcatttttcgatccaagattgatctttttggaattggtattgttgattacttttgctggtttgatatatgttggttatgaaatttggggtaaacaatatttcaaaggtgttgctccagttaaggctaagaaagtatctgctgctaaagcttcaagtcctgttgctagtggcccctctactacttctgccactggatacgatactaactggattccagaatctcatttgaaacaaaagaaaaccaagaaggttaactaa

SEQ ID NO: 3687 - protein, 239 aa, Candida albicans SC5314
MKLSTIFTAFAATIATVAGYETTGSKQTVDILIDYIIKETPELSQNDVANWENGDTVTLQYVVNNNEESEITVVGVTGQFKNPVNNEIVTNLTTGKVGPIAVPPGEAIKFDQKINVDLIPANYELIPYVFIAQDSLIKVIPCRGQLATIVDAAVSFFDPRLIFLELVLLITFAGLIYVGYEIWGKQYFKGVAPVKAKKVSAAKASSPVASGPSTTSATGYDTNWIPESHLKQKKTKKVN

SEQ ID NO: 3688 - DNA, 720 bp, Candida albicans SC5314
  CDS (1)..(720): transl_table=12
atgaaattatccaccatttttactgcatttgcagctacaattgccactgtagctggttacgaaactactggctcaaaacaaaccgttgatattcttattgattatatcatcaaggaaacaccagaattatctcaaaacgacgtggccaattgggaaaatggcgatactgttacacttcaatatgttgttaacaataatgaagaatcagaaatcactgttgtcggtgtaactggtcaattcaaaaacccagtgaataatgaaattgtcactaatttgactacagggaaagttggtcctattgctgttccaccgggtgaagcgattaaatttgatcaaaaaattaatgttgatttaatcccagcaaattatgaattgattcctcatgttttcattgctcaagatagtttgattaaagtcattccatgccgtggtcaattggctactattgttgacgctgctgtttcatttttcgatccaagattgatctttttggaattggtattgttgattacttttgctggtttgatatatgttggttatgaaatttggggtaaacaatatttcaaaggtgttgctccagttaaagctaagaaagtatctgctgctaaagtatcaagtcctgttgctagtggcccctctactacttctgccactggatacgatactaactggattccagaatctcatttgaaacaaaagaaaaccaagaaggttaactaa

SEQ ID NO: 3689 - protein, 239 aa, Candida albicans SC5314
MKLSTIFTAFAATIATVAGYETTGSKQTVDILIDYIIKETPELSQNDVANWENGDTVTLQYVVNNNEESEITVVGVTGQFKNPVNNEIVTNLTTGKVGPIAVPPGEAIKFDQKINVDLIPANYELIPHVFIAQDSLIKVIPCRGQLATIVDAAVSFFDPRLIFLELVLLITFAGLIYVGYEIWGKQYFKGVAPVKAKKVSAAKVSSPVASGPSTTSATGYDTNWIPESHLKQKKTKKVN

SEQ ID NO: 3690 - DNA, 675 bp, Saccharomyces cerevisiae
  CDS (1)..(675)
atgaggttttctatgttaatcgggtttaatttattaactgccttgagcagcttctgtctgccatatcagctaataatagcgacaatgtcgaacatgaacaggaagttgcggaggcgtacgccaccttctattaatatagaggtgaaatatgatgtcgttgggaaggaatcagaaaatcatgattctttccttgagttttacgcggaggataccgctaccttagcctataatgttactaattgggaagatactaatatcacaatttttggtgtcaacggaacaattgttacatatccacatggttatcctgtggcggacattacaggtgcgagtattgggccttacgaaatggaggtcaacggaacttcaaaattcgggcaagacgttacgttaaatttaccggaaggacaatactttttaatcccatttttattagcttctaggttcgatgaaatcgtgagaattgcggcaccaccaaccctattcgaaattgttagcccacctatttcctttttcaacccacaatttttatcagttcaggtcatctttctagccatcatcggaggtgtaagttattactacatgaagtctaaaacaaatcaaagaccttccaagaagagtgccactgtcaaaaaagttgatgaatcatggttgccagaaacctataaaaaataa

SEQ ID NO: 3691 - protein, 224 aa, Saccharomyces cerevisiae
MRFSMLIGFNLLTALSSFCLPYQLIIATMSNMNRKLRRRTPPSINIEVKYDVVGKESENHDSFLEFYAEDTATLAYNVTNWEDTNITIFGVNGTIVTYPHGYPVADITGASIGPYEMEVNGTSKFGQDVTLNLPEGQYFLIPFLLASRFDEIVRIAAPPTLFEIVSPPISFFNPQFLSVQVIFLAIIGGVSYYYMKSKTNQRPSKKSATVKKVDESWLPETYKK

SEQ ID NO: 3692 - DNA, 25 bp, Artificial sequence
  primer
atgaggttttctatgttaatcgggt

SEQ ID NO: 3693 - DNA, 26 bp, Artificial sequence
  primer
ttattttttataggtttctggcaacc

SEQ ID NO: 3694 - protein, 266 aa, Artificial sequence
  consensus sequence
  Variant (3)..(3): Xaa in position 3 is any amino acid
  Variant (5)..(34): Xaa in position 5 to 34 is any amino acid
  Variant (35)..(68): Xaa in position 35 to 68 is any or no amino acid
  Variant (70)..(87): Xaa in position 70 to 87 is any amino acid
  Variant (89)..(91): Xaa in position 89 to 91 is any amino acid
  Variant (94)..(94): Xaa in position 94 is any amino acid
  Variant (96)..(98): Xaa in position 96 to 98 is any amino acid
  Variant (100)..(100): Xaa in position 100 is any amino acid
  Variant (102)..(108): Xaa in position 102 to 108 is any amino acid
  Variant (109)..(109): Xaa in position 109 is any or no amino acid
  Variant (112)..(112): Xaa in position 112 is any amino acid
  Variant (114)..(123): Xaa in position 114 to 123 is any amino acid
  Variant (125)..(127): Xaa in position 125 to 127 is any amino acid
  Variant (129)..(132): Xaa in position 129 to 132 is any amino acid
  Variant (135)..(144): Xaa in position 135 to 144 is any amino acid
  Variant (146)..(146): Xaa in position 146 is any amino acid
  Variant (148)..(152): Xaa in position 148 to 152 is any amino acid
  Variant (154)..(157): Xaa in position 154 to 157 is any amino acid
  Variant (159)..(159): Xaa in position 159 is any amino acid
  Variant (161)..(161): Xaa in position 161 is any amino acid
  Variant (163)..(189): Xaa in position 163 to 189 is any amino acid
  Variant (191)..(191): Xaa in position 191 is any amino acid
  Variant (193)..(193): Xaa in position 193 is any amino acid
  Variant (195)..(202): Xaa in position 195 to 202 is any amino acid
  Variant (205)..(208): Xaa in position 205 to 208 is any amino acid
  Variant (210)..(211): Xaa in position 210 to 211 is any amino acid
  Variant (213)..(217): Xaa in position 213 to 217 is any amino acid
  Variant (218)..(219): Xaa in position 218 to 219 is any or no amino acid
  Variant (221)..(234): Xaa in position 221 to 234 is any amino acid
  Variant (235)..(255): Xaa in position 235 to 255 is any or no amino acid
  Variant (257)..(258): Xaa in position 257 to 258 is any amino acid
  Variant (260)..(260): Xaa in position 260 is any amino acid
  Variant (263)..(263): Xaa in position 263 is any amino acid
  Variant (265)..(265): Xaa in position 265 is any amino acid
MKXSXXXXXXXXXXXXXXXXXXXXXXXXXXXXXXXXXXXXXXXXXXXXXXXXXXXXXXXXXXXXXXXXYXXXXXXXXXXXXXXXXXXGXXXTLXYXXXNXEXXXXXXXXGVXGXXXXXXXXXXVXXXTXXXXGPXXXXXXXXXXFXQXXXXXLXXXXYXLXPXXXXXXXXXXXXXXXXXXXXXXXXXXXSXFXPXXXXXXXXLLXXXXGXXYXXXXXXXKXXXXXXXXXXXXXXXXXXXXXXXXXXXXXXXXXXXDXXWXPEXHXK

SEQ ID NO: 3695 - DNA, 753 bp, Saccharomyces cerevisiae
  CDS (1)..(753)
atgggattgactactaaacctctatctttgaaagttaacgccgctttgttcgacgtcgacggtaccattatcatctctcaaccagccattgctgcattctggagggatttcggtaaggacaaaccttatttcgatgctgaacacgttatccaagtctcgcatggttggagaacgtttgatgccattgctaagttcgctccagactttgccaatgaagagtatgttaacaaattagaagctgaaattccggtcaagtacggtgaaaaatccattgaagtcccaggtgcagttaagctgtgcaacgctttgaacgctctaccaaaagagaaatgggctgtggcaacttccggtacccgtgatatggcacaaaaatggttcgagcatctgggaatcaggagaccaaagtacttcattaccgctaatgatgtcaaacagggtaagcctcatccagaaccatatctgaagggcaggaatggcttaggatatccgatcaatgagcaagacccttccaaatctaaggtagtagtatttgaagacgctccagcaggtattgccgccggaaaagccgccggttgtaagatcattggtattgccactactttcgacttggacttcctaaaggaaaaaggctgtgacatcattgtcaaaaaccacgaatccatcagagttggcggctacaatgccgaaacagacgaagttgaattcatttttgacgactacttatatgctaaggacgatctgttgaaatggtaa

SEQ ID NO: 3696 - protein, 250 aa, Saccharomyces cerevisiae
MGLTTKPLSLKVNAALFDVDGTIIISQPAIAAFWRDFGKDKPYFDAEHVIQVSHGWRTFDAIAKFAPDFANEEYVNKLEAEIPVKYGEKSIEVPGAVKLCNALNALPKEKWAVATSGTRDMAQKWFEHLGIRRPKYFITANDVKQGKPHPEPYLKGRNGLGYPINEQDPSKSKVVVFEDAPAGIAAGKAAGCKIIGIATTFDLDFLKEKGCDIIVKNHESIRVGGYNAETDEVEFIFDDYLYAKDDLLKW

SEQ ID NO: 3697 - DNA, 816 bp, Saccharomyces cerevisiae
  CDS (1)..(816)
atgaaacgtttcaatgttttaaaatatatcagaacaacaaaagcaaatatacaaaccatcgcaatgcctttgaccacaaaacctttatctttgaaaatcaacgccgctctattcgatgttgacggtaccatcatcatctctcaaccagccattgctgctttctggagagatttcggtaaagacaagccttacttcgatgccgaacacgttattcacatctctcacggttggagaacttacgatgccattgccaagttcgctccagactttgctgatgaagaatacgttaacaagctagaaggtgaaatcccagaaaagtacggtgaacactccatcgaagttccaggtgctgtcaagttgtgtaatgctttgaacgccttgccaaaggaaaaatgggctgtcgccacctctggtacccgtgacatggccaagaaatggttcgacattttgaagatcaagagaccagaatacttcatcaccgccaatgatgtcaagcaaggtaagcctcacccagaaccatacttaaagggtagaaacggtttgggtttcccaattaatgaacaagacccatccaaatctaaggttgttgtctttgaagacgcaccagctggtattgctgctggtaaggctgctggctgtaaaatcgttggtattgctaccactttcgatttggacttcttgaaggaaaagggttgtgacatcattgtcaagaaccacgaatctatcagagtcggtgaatacaacgctgaaaccgatgaagtcgaattgatctttgatgactacttatacgctaaggatgacttgttgaaatggtaa

SEQ ID NO: 3698 - protein, 271 aa, Saccharomyces cerevisiae
MKRFNVLKYIRTTKANIQTIAMPLTTKPLSLKINAALFDVDGTIIISQPAIAAFWRDFGKDKPYFDAEHVIHISHGWRTYDAIAKFAPDFADEEYVNKLEGEIPEKYGEHSIEVPGAVKLCNALNALPKEKWAVATSGTRDMAKKWFDILKIKRPEYFITANDVKQGKPHPEPYLKGRNGLGFPINEQDPSKSKVVVFEDAPAGIAAGKAAGCKIVGIATTFDLDFLKEKGCDIIVKNHESIRVGEYNAETDEVELIFDDYLYAKDDLLKW

SEQ ID NO: 3699 - DNA, 666 bp, Mesorhizobium loti MAFF303099
  CDS (1)..(666): transl_table=11
atgtttgctggcagaaaattcgcggccttccttttcgacatggacggcacgctgatcaattccatcgcctcggcggagcgggtgtggagcgattgggcgcgccgccatggcctcgacgtcgcttccttcctgccgacgatccacggcgtgcgggcgatcgagaccatcaccaaccttgcccttccaggcgtcgacccggcgcatgaggccgacctgctgctgaaagccgaggccgccgatctggatggcattgtcccgatcgccggcgccgtggcatttctcaaggcgctgccgggcgaaagctgggcgatcgtcacctcggcgccgcgctccctggcgcttgcgcgcatggaggctgccggcattcctgtccccgcggtcatcgttgcggctgaagacgtctcgcgtggcaagccggcccctgactgtttccggcttggcgcacaacggctcggcgtcgatgcgcgcgactgcctggtgttcgaggatgctccggccggcatcgcggcggccgaggccgcgcaggcttcggtcatggtgatcagcgccacacattcgcacccgctgccgacgcagcatgccgcgatcgctggctatgacggcgtcggcatcaccatcgacgagcgcggctggctggcgctcgaggcccagcgcgacgctgcttga

SEQ ID NO: 3700 - protein, 221 aa, Mesorhizobium loti MAFF303099
MFAGRKFAAFLFDMDGTLINSIASAERVWSDWARRHGLDVASFLPTIHGVRAIETITNLALPGVDPAHEADLLLKAEAADLDGIVPIAGAVAFLKALPGESWAIVTSAPRSLALARMEAAGIPVPAVIVAAEDVSRGKPAPDCFRLGAQRLGVDARDCLVFEDAPAGIAAAEAAQASVMVISATHSHPLPTQHAAIAGYDGVGITIDERGWLALEAQRDAA

SEQ ID NO: 3701 - DNA, 633 bp, Mesorhizobium loti MAFF303099
  CDS (1)..(633): transl_table=11
atgacaccgaaggcggttttctgggacatggacggtacgctggtcgacagcgagccgttgcacgaagcagccctcgtggcggcgatgcgcaatgtcggcctcaagccgcccgccgacctgcatgagcgcgtgctcggcgtcgccgcctggccggtctacgaaatgatgcgcgacgagttcggcctcgatcttcccttcgacgactggatcatgcgcaaatacgagcactatctgccgctggtggaggggctgaaaccgcgtcctggcgctatagaagtcttcaatgaattgcgcgcgcttggcgtgcagcaagcggtggtctcgaattcagaccggatgatcgtcgacgccaatctgcgcatggtcggcctcttttatccaggcatgaaaacgatcagccgcaacgacgtgcgtgatggcaagccgcacgccgaacctttcctgcgcgccgcgtacctggccgatgtcgatcccgcgcacgccgtggcggtcgacgacagctggccgggcgccatggcgggtctggcggcgggcatgaagacgatcttctggccggaaaagccgatggaaggcccgcctggcgccatcgtcatcaacagcgccgaggaattgcgggctcagctcgggctctaa

SEQ ID NO: 3702 - protein, 210 aa, Mesorhizobium loti MAFF303099
MTPKAVFWDMDGTLVDSEPLHEAALVAAMRNVGLKPPADLHERVLGVAAWPVYEMMRDEFGLDLPFDDWIMRKYEHYLPLVEGLKPRPGAIEVFNELRALGVQQAVVSNSDRMIVDANLRMVGLFYPGMKTISRNDVRDGKPHAEPFLRAAYLADVDPAHAVAVDDSWPGAMAGLAAGMKTIFWPEKPMEGPPGAIVINSAEELRAQLGL

SEQ ID NO: 3703 - DNA, 651 bp, Escherichia coli O157:H7
  CDS (1)..(651): transl_table=11
gtgcggtgcaaaggttttctgtttgatcttgatggaacgctggtggattccctgcctgcggtagaacgggcgtggagcaactgggccagacgtcatgggttagcgccggaagaggtgctggctttcattcacggtaaacaggcgatcacctctctgcgccattttatggcgggcaaatccgaggctgatattgccgccgagtttacgcgtttggagcaaatcgaggccacggaaaccgaaggtattaccgcgcttccgggggcaatcgccttactcaatcatttgaataaagcaggtattccgtgggccattgtgacttctggctccatgccggtagcgcgagcgcgccataaaatagcggggcttcccgcaccagaggtgtttgtaaccgctgagcgagtgaagcgcggaaaaccagaacctgatgcgtatctgttaggcgcgcagctgctggggcttgcgccgcaggagtgtgtggtggtggaagatgctcccgctggcgtgctttctggcctggcggcgggttgccatgtcattgcggttaacgctccggcagataccccgcgcctgaatgaggtcgatttggtcctccacagtctggagcaaattactgtgaccaaacagccaaatggcgatgttattattcagtga

SEQ ID NO: 3704 - protein, 216 aa, Escherichia coli O157:H7
MRCKGFLFDLDGTLVDSLPAVERAWSNWARRHGLAPEEVLAFIHGKQAITSLRHFMAGKSEADIAAEFTRLEQIEATETEGITALPGAIALLNHLNKAGIPWAIVTSGSMPVARARHKIAGLPAPEVFVTAERVKRGKPEPDAYLLGAQLLGLAPQECVVVEDAPAGVLSGLAAGCHVIAVNAPADTPRLNEVDLVLHSLEQITVTKQPNGDVIIQ

SEQ ID NO: 3705 - DNA, 567 bp, Escherichia coli O157:H7
  CDS (1)..(567): transl_table=11
atgtacgagcgttatgcaggtttaatttttgatatggatggcacaatcctggatacggagcctacgcaccgtaaagcgtggcgcgaagtattagggcactacggtcttcagtacgatgttcaggcgatgattgcgcttaatggatcgcccacctggcgtattgctcaggcaattattgagctgaatcaggccgatctcgacccgcatgcgttagcgcgtgaaaaaacagaagcagtaagaagtatgctgctggatagtgtcgagccgcttcctcttgttgaagtggtgaaaagttggcatggtcgtcgcccaatggctgtaggaacggggagtgaaagcgccatcgctgaggcattgctggctcacctgggattacgccgttattttgacgccgtcgtcgctgccgatcacgtcaaacaccataaacccgcgccagacacatttttgttgtgcgcgcagcgtatgggcgtgcaaccgacgcagtgtgtggtctttgaagatgccgatttcggtattcaggcggcccgtgcagcaggcatggacgctgtggatgttcgcttgctgtga

SEQ ID NO: 3706 - protein, 188 aa, Escherichia coli O157:H7
MYERYAGLIFDMDGTILDTEPTHRKAWREVLGHYGLQYDVQAMIALNGSPTWRIAQAIIELNQADLDPHALAREKTEAVRSMLLDSVEPLPLVEVVKSWHGRRPMAVGTGSESAIAEALLAHLGLRRYFDAVVAADHVKHHKPAPDTFLLCAQRMGVQPTQCVVFEDADFGIQAARAAGMDAVDVRLL

SEQ ID NO: 3707 - DNA, 639 bp, Clostridium acetobutylicum ATCC 824
  CDS (1)..(639): transl_table=11
atgagagcatttatatttgatatggatggagtaataattaatagtcaacctattcattatgaagtagatactatgatatttaaaaaattagggattgttttaaagaaagaagaaatggaagggtttgcaggaatgacaaatccagaaatactaagagttttaaaggaaaaatttaagtttgaggaaaatattgatgatgtattaaaggaacagataagaattaaaacaaatttattaaaacaacgcaaaattaaaccaatagaaggtataatagaattagtggacaaacttaaggataaaaacatattgatagctgtagcttcttcttcacctagaaaatttattgaggcagtacttgagactttcggtataatagaaagatttgataaaatcatttgtggtgaagaggttccaaagggaaaacctgaaccagatatttatatagaggcagctagacagctaggagtaaatatagaagaatgtgtagttttagaagattcaactcatggaatagcagcggcaaaggctgcggggatgaaatgtataggctttcgaaaccctgactcaggaagtcaagtacattcaaaagcagatattgtagtaaattctataagagaaatagatattgaagctatttaa

SEQ ID NO: 3708 - protein, 212 aa, Clostridium acetobutylicum ATCC 824
MRAFIFDMDGVIINSQPIHYEVDTMIFKKLGIVLKKEEMEGFAGMTNPEILRVLKEKFKFEENIDDVLKEQIRIKTNLLKQRKIKPIEGIIELVDKLKDKNILIAVASSSPRKFIEAVLETFGIIERFDKIICGEEVPKGKPEPDIYIEAARQLGVNIEECVVLEDSTHGIAAAKAAGMKCIGFRNPDSGSQVHSKADIVVNSIREIDIEAI

SEQ ID NO: 3709 - DNA, 669 bp, Escherichia coli K12
  CDS (1)..(669): transl_table=11
atgcctgaggaggcccgcgtgcggtgcaaaggttttctgtttgatcttgatggaacgctggtggattccctgcctgcggtagaacgggcgtggagcaactgggccagacgtcatgggttagcgccggaagaggtgctggctttcattcacggtaaacaggcgatcacctctctgcgccattttatggcgggcaaatccgaggctgatattgccgccgagtttacgcgtctggagcacatcgaggccacggaaaccgaaggtattaccgcgcttccgggggcaatcgccttactcagtcatttgaataaagcaggtattccgtgggccattgtgacttctggctccatgccggtagcgcgagcgcgccataaaatagctgggcttcccgcaccagaggtgtttgtaaccgctgagcgagtgaagcgcggaaaaccagaacctgatgcgtatctgttaggcgcgcagctgctggggcttgcgccgcaggagtgtgtggtggtggaagatgctcccgctggcgtgctttctggcctggcggcgggttgtcatgtcattgcggttaacgctccggcagataccccgcgcctgaatgaggtcgatttggtcctccacagtctggagcaaattactgtgaccaaacagccaaatggcgatgttattattcagtga

SEQ ID NO: 3710 - protein, 222 aa, Escherichia coli K12
MPEEARVRCKGFLFDLDGTLVDSLPAVERAWSNWARRHGLAPEEVLAFIHGKQAITSLRHFMAGKSEADIAAEFTRLEHIEATETEGITALPGAIALLSHLNKAGIPWAIVTSGSMPVARARHKIAGLPAPEVFVTAERVKRGKPEPDAYLLGAQLLGLAPQECVVVEDAPAGVLSGLAAGCHVIAVNAPADTPRLNEVDLVLHSLEQITVTKQPNGDVIIQ

SEQ ID NO: 3711 - DNA, 678 bp, Salmonella typhimurium LT2
  CDS (1)..(678): transl_table=11
atgcctgaggaggctcgcgtgcagtgtaaaggttttctgtttgatctggatggaacgttggttgactcattacctgccgttgaacgcgcgtggtgtagctgggccgatcgttttaaccttgctcatgatgaggtgctgggctttattcatggcaaacaggcgatcacctcgttgcggcattttatggcgggtaaatcggaggcggaaattgccgctgagtttacgcgcctggagcaaatagaagccactgaaaccgcagggatcaccgcgctgccgggggcagtcgatttactcaatcacctgaataaagtgggcattccgtgggctatcgtcacctccggttcaatgccggtcgcgcgtgcgcgccatcaggtcgcgggccttccagcgccagaggtgtttgtcaccgccgaacgagtcaaacgcggcaaaccggagccggatgcgtatttgctgggcgcacaactgcttggcctggcccctcaggagtgcgtcgtagtagaagatgccccggctggcgtgctgtccgggctggctgcgggctgccacgtcattgcggtcaatgcgccggccgacacgccgcgtctggcggatgttgattttgcgttggatagcctgacgcaattatcggtcgctaaacaaccaaacggcgatgtggtggtgttaagaaagacctga

SEQ ID NO: 3712 - protein, 225 aa, Salmonella typhimurium LT2
MPEEARVQCKGFLFDLDGTLVDSLPAVERAWCSWADRFNLAHDEVLGFIHGKQAITSLRHFMAGKSEAEIAAEFTRLEQIEATETAGITALPGAVDLLNHLNKVGIPWAIVTSGSMPVARARHQVAGLPAPEVFVTAERVKRGKPEPDAYLLGAQLLGLAPQECVVVEDAPAGVLSGLAAGCHVIAVNAPADTPRLADVDFALDSLTQLSVAKQPNGDVVVLRKT

SEQ ID NO: 3713 - DNA, 678 bp, Nostoc sp. PCC 7120
  CDS (1)..(678): transl_table=11
atgctaactgcgattctctttgatttagacggtactatcgtcaatactgatcctatacattaccaagcttggcgacaaatgttgtggaaatgcaacatagaaattgatgaaacattttataaatctcgaattagtggtcgtttaaacccagaaattgttaaggacattctgccagaattatcatcagccgcaggtagagaatttgccgatgaaaaagaagccttgtttcgggaactagcctcccatcttcaaccattaaacggatttgctgaactcatagcttggacagaagtacatcagttaaaacgtgctttagtaacaaatgctccgagattaaacgcagagtttatgttggaggtattgggaataacagatagtttccatcaaattgtcttggctgatgattgcgtagcgggtaaaccagatccagcaccttatcaagttgctttgagtaagttggggattccagcagagaaggcgatcgctttggaagattccccctctgggattcgcgcagcagttggcgcaggtattcgtactattgggattgcctccactcacgaccctgatattttgctggaggttggctcatttatggcgattcctgattttacagatttacatttgtggacgttactaaactcattaattgagccagatttaattcgtagtacgtga

SEQ ID NO: 3714 - protein, 225 aa, Nostoc sp. PCC 7120
MLTAILFDLDGTIVNTDPIHYQAWRQMLWKCNIEIDETFYKSRISGRLNPEIVKDILPELSSAAGREFADEKEALFRELASHLQPLNGFAELIAWTEVHQLKRALVTNAPRLNAEFMLEVLGITDSFHQIVLADDCVAGKPDPAPYQVALSKLGIPAEKAIALEDSPSGIRAAVGAGIRTIGIASTHDPDILLEVGSFMAIPDFTDLHLWTLLNSLIEPDLIRST

SEQ ID NO: 3715 - DNA, 687 bp, Agrobacterium tumefaciens str. C58
  CDS (1)..(687): transl_table=11
atgcacagcaaagtcccgccgcagacccagatattttcgcaagagttcgcggccttcctgttcgacatggacggaacgctggtcaattcgattgccgttgtcgagcgcgtctggcgggagtgggccgttgcaaacggtatcgagccgaacgcatttctgcaacgtatccatggcatgcgggcttccgaggtaatacgccgcgaggcggttcccggcctggacgtggatgccgaggccgacatgatcttgcgcgccgagatggatgacgtggagggcatcattccgataccgggcgccgcagactttcttgcgtctttgcccgcgggaaaatgggctatcgtcacctccgccgtgcgtgaactggcggaaaaacggctcgcggcggccggcatcacaccgccacccgtgatgatctgcgccgacgatgtggtcaacggcaagcccgatcccgaaggttaccggaaggccgccgaaaggctcggcgttgcgccggaaagctgcgtcgtcttcgaagatgcgcccgcgggcatccaggccggcgaacgcatgggggctgcggtggtggtcatcaacgtgacccattcccacccgatcgagacgccgcatcttgccatcggcagttacggtgaactggatgtggtgatcgacgggaatggtggcctgaagctgaccagcagcaaagcctaa

SEQ ID NO: 3716 - protein, 228 aa, Agrobacterium tumefaciens str. C58
MHSKVPPQTQIFSQEFAAFLFDMDGTLVNSIAVVERVWREWAVANGIEPNAFLQRIHGMRASEVIRREAVPGLDVDAEADMILRAEMDDVEGIIPIPGAADFLASLPAGKWAIVTSAVRELAEKRLAAAGITPPPVMICADDVVNGKPDPEGYRKAAERLGVAPESCVVFEDAPAGIQAGERMGAAVVVINVTHSHPIETPHLAIGSYGELDVVIDGNGGLKLTSSKA

SEQ ID NO: 3717 - DNA, 684 bp, Brucella melitensis 16M
  CDS (1)..(684): transl_table=11
gtgacctccttttcccctttcggcaaatccttcgatgcatttcttttcgatatggacggcacgatattgagttccatcgcagcgacggagcgcgtatggagcgaatgggcaaggcgccatggtatcgatcccgtgacattcctgccgaccattcatggcgtgcgcgccgttgaaaccgtgcgccgccttgcgcttccgggcgttgacccaatccgggaagctgaaattctgctggaagccgaaatggccgatctggatggcattgcaccgatcgagggggcctataaatttctgcattcgctaccggaaaaccgctgggccatcgtgacttcggctccgctcgaacttgcgcgccgccgcatcaaggccgccgggttgcccatgccgaaaacaatcgtttccgccgaagacgtggaacgcggcaagccaagccccgaatgtttcgagctgggcgcaaaacggctgggctttgcgccgcgtgattgccttgttttcgaggatgcaccggcaggcatcgtggcaggagaaaccgcgggcgcaagcgtggttgtcgtcacagccacgcatccgcattcaccccggacctcgcatttgagcatagaaagctatcgctatcttcaactcaccatcgaagaaagcggaaaactcagcctgagcccgacagtgccagcatcagttggctaa

SEQ ID NO: 3718 - protein, 227 aa, Brucella melitensis 16M
MTSFSPFGKSFDAFLFDMDGTILSSIAATERVWSEWARRHGIDPVTFLPTIHGVRAVETVRRLALPGVDPIREAEILLEAEMADLDGIAPIEGAYKFLHSLPENRWAIVTSAPLELARRRIKAAGLPMPKTIVSAEDVERGKPSPECFELGAKRLGFAPRDCLVFEDAPAGIVAGETAGASVVVVTATHPHSPRTSHLSIESYRYLQLTIEESGKLSLSPTVPASVG

SEQ ID NO: 3719 - DNA, 735 bp, Arabidopsis thaliana
  CDS (1)..(735)
atgaatggcttctctgatcttaatccttctgagagcaaaccttctctgtcacaactagctccattagaagccattctgtttgatgttgatggaacactctgtgactcagatcccatccaccttattgccttccaagaactgcttcaagagattggttttaacaatggtgtcccaatcgatgagaaattctttgttgagaacattgctggaaaacacaattctgaaattgctctacttctgttccctgatgatgtttcaagagggttaaaattctgtgatgaaaaggaagctctttaccgcaaaattgttgcagagaagataaagccacttgatgggcttataaaactgaccaaatggatcgaagatcgtggattgaaacgagctgcggtaacaaacgctccaaaagaaaacgcagagctcatgatatcgaaacttggtctgactgatttctttcaagcagtgattcttggctctgaatgtgaatttcccaaaccacaccctggaccttacttgaaggctcttgaagtgcttaacgtgtcaaaggagcacacgctagttttcgaagactcgatctctgggataaaagctggagttgcagctggaatgccagtgattggactgactacagggaatccagcaagcctgcttatgcaagcaaaacccgcttttctcatcgagaactatgcggatccaaaactgtgggctgtgttggaagaacttgataacaagtcttaa

SEQ ID NO: 3720 - protein, 244 aa, Arabidopsis thaliana
MNGFSDLNPSESKPSLSQLAPLEAILFDVDGTLCDSDPIHLIAFQELLQEIGFNNGVPIDEKFFVENIAGKHNSEIALLLFPDDVSRGLKFCDEKEALYRKIVAEKIKPLDGLIKLTKWIEDRGLKRAAVTNAPKENAELMISKLGLTDFFQAVILGSECEFPKPHPGPYLKALEVLNVSKEHTLVFEDSISGIKAGVAAGMPVIGLTTGNPASLLMQAKPAFLIENYADPKLWAVLEELDNKS

SEQ ID NO: 3721 - DNA, 657 bp, Methanosarcina acetivorans C2A
  CDS (1)..(657): transl_table=11
atgttaaaagcaatcatttttgatgtggatggggttcttgttgactccatgcgttttcaggctgaggcctgggttaagactctcaaggaagtgggtgtcaccgtcagcagggaagacatttacgagcttgagggttcaaataatttagggctgatcaaattggtctttgagaaggcaggaaaagagcctgaaccctggcattatgagcagttgcctgtaaaaaaacgagaagttcttgagtttgaccgcataaaaccctttgaaggcatgccttcctgtcttaatcaactgaaaaaacatttcaggcttgcaatggtttcggggtcgaactttgatgtcgtcagtacatttgcaaattccttttttccagactgcttcgaggtcattattaccggcggcgaccttgcgcgtggaaaaccctgtcctgacccgtaccttaaggcgcttgaaaaactcgatctggcaacgaatgagtgcattgtagttgaaaatgcccctcttggaattactgccgccaaaagagccggactttactgtgttgcggttgcaagtatgcttgcccctgaaaaggtgaagcatgctgaccttgtgttcgaaaaccatgctgcactgcttgattacctgaaaagcctcatacccggggagtctcacacttga

SEQ ID NO: 3722 - protein, 218 aa, Methanosarcina acetivorans C2A
MLKAIIFDVDGVLVDSMRFQAEAWVKTLKEVGVTVSREDIYELEGSNNLGLIKLVFEKAGKEPEPWHYEQLPVKKREVLEFDRIKPFEGMPSCLNQLKKHFRLAMVSGSNFDVVSTFANSFFPDCFEVIITGGDLARGKPCPDPYLKALEKLDLATNECIVVENAPLGITAAKRAGLYCVAVASMLAPEKVKHADLVFENHAALLDYLKSLIPGESHT

SEQ ID NO: 3723 - DNA, 651 bp, Streptomyces coelicolor A3(2)
  CDS (1)..(651): transl_table=11
atgaagctccacgcacaagccctcctgttcgacaacgacggcaccctcgtctcctccctggaatccgtccgccgctgctggacgcgctgggccgtcgagtacgggatcaccgccgagcagttcgggcaggtggaactgcacggacggccggccgccgagatagccgccgacctgctgcccaccgcgagggtcgccgaggcggtcgcgcggatcgaacagctggaggtcgaggacgtgccgggcgggggcgtgcgcctgctgcccggcacccgcgacttcctcgacgcgctcccggccgaccgctgggccgtcgtcacctccgccacccgccgcctggccgaggcccgcctcgacgccgtcggcatcctgcccaagaccctcgtggccgccgatgacatcacccgcggcaagcccgaccccgagccctatctgctcggcgcccgcgccctgggcgtcgacccggccgactgcgtcgtcttcgaggacgcccccgccgggctccaggccggccgggccgccgggatgcggaccgtggcgttggccacaacacaccgagccgacgaactcaacgccgacctcgtcgtcaccgacctctcggccttgtcggcactggccaccgagggcggagtcgagatcaccgtccggggctga

SEQ ID NO: 3724 - protein, 216 aa, Streptomyces coelicolor A3(2)
MKLHAQALLFDNDGTLVSSLESVRRCWTRWAVEYGITAEQFGQVELHGRPAAEIAADLLPTARVAEAVARIEQLEVEDVPGGGVRLLPGTRDFLDALPADRWAVVTSATRRLAEARLDAVGILPKTLVAADDITRGKPDPEPYLLGARALGVDPADCVVFEDAPAGLQAGRAAGMRTVALATTHRADELNADLVVTDLSALSALATEGGVEITVRG

SEQ ID NO: 3725 - DNA, 702 bp, Streptomyces coelicolor A3(2)
  CDS (1)..(702): transl_table=11
atgaccagtacggtccccgcgctcggaacccgtacggccgagggctccgccctgcaggcggtgctcctcgacatggacggcaccctggtggacaccgagggcttctggtgggacgtcgagctggaggtcttcgcctccctcggccacaccctggacgactcctggcgccacgtcgtggtcggcggccccatgacccgcagcgcgggcttcctcatcgaggccaccggcgccgacatcaccctcgccgagctcagcgtcctgctcaacgacggcttcgaacagcgcatcggccgcgatctgccgctgatgcccggcgccgcccggctgctcgcggagctgtccgcgcacgagatccccacggccctggtctccgcctcgcaccggcgcatcatcgatcgcgtgctcacctcgctcggtccccggcacttcgccctgaccgtcgccggtgacgaggtgccgcgcaccaagccgcaccccgacccgtacctggcggccgcggccggactgggcgtggacccggcccggtgcgccgtcgtcgaggacaccgcgaccggggtcgccgccgcggaggccgccggctgccacgtcgtggcggtcccctcggtcgcccccatcaccccggccgcccggcgcacggtggtcgcctccctggaagaggtcgacctgacatttctgcgtggtctgatgacccaaatgcgctag

SEQ ID NO: 3726 - protein, 233 aa, Streptomyces coelicolor A3(2)
MTSTVPALGTRTAEGSALQAVLLDMDGTLVDTEGFWWDVELEVFASLGHTLDDSWRHVVVGGPMTRSAGFLIEATGADITLAELSVLLNDGFEQRIGRDLPLMPGAARLLAELSAHEIPTALVSASHRRIIDRVLTSLGPRHFALTVAGDEVPRTKPHPDPYLAAAAGLGVDPARCAVVEDTATGVAAAEAAGCHVVAVPSVAPITPAARRTVVASLEEVDLTFLRGLMTQMR

SEQ ID NO: 3727 - DNA, 666 bp, Streptomyces coelicolor A3(2)
  CDS (1)..(666): transl_table=11
atgacggccaccgccagcaccgttctgcccgcccgcgccctgctgctcgacatggacggcaccctcgtcaactcggacgccgccgtggaccgcgtctggcggcgctgggccgaccggcacggactggacggcgacgaggtcatgaaggtcgtccacggacggcagggctacgcctcgatggcgctgctgctgccggaccggcccatggagcacaaccacgccgacaacgcgcgcatgctcgccgaggagaccgccgacaccgagggcgtcgtcgcgatccccggcgccgcggagttcctcgcctcgctgcgcgggctgccgcacgccctggtgacctcggccgacgtggccctgtccaccgcgcggatggccgccgccgggctcgcgcagccggacgtccgggtcaccgccgagtcggtcggcgcgagcaagcccgacccggagggcttcctcaagggcgccgccgaactgggcatcgcccccgccgactgcgtcgtcttcgaggactccggcgccggcatcgcggccgggcgcgccgccgggatgcgggtcgtcggggtaggaccgcgcgccgggttccacgggccggacgtggtcgtggaggacctgacgcgggtgcgtgtcgaggcagacgcggacggcgggctgcgcctgcacatcggctga

SEQ ID NO: 3728 - protein, 221 aa, Streptomyces coelicolor A3(2)
MTATASTVLPARALLLDMDGTLVNSDAAVDRVWRRWADRHGLDGDEVMKVVHGRQGYASMALLLPDRPMEHNHADNARMLAEETADTEGVVAIPGAAEFLASLRGLPHALVTSADVALSTARMAAAGLAQPDVRVTAESVGASKPDPEGFLKGAAELGIAPADCVVFEDSGAGIAAGRAAGMRVVGVGPRAGFHGPDVVVEDLTRVRVEADADGGLRLHIG

SEQ ID NO: 3729 - DNA, 663 bp, Yersinia pestis KIM
  CDS (1)..(663): transl_table=11
gtgcttgtggagtgtaaaggttttctttttgatttagatgggacgttggttgattcactacctgttgttgaacgtgcctggattggctgggcgcaacgtcgaggcgttaatccatcagaagttctggattttattcatggtaaacaagcgattacctctttgcgtcattttatgccgggtgccagtgaagctgaaattcaggacgagtttctggcattagagcaaattgaagccaatgatacggagggggtaactgcgctaccaggggcggtggcactgttgacccggttgaatgaactggctattccgtgggcgatagtgacttcaggttcgatacctgttgcctcagctcgccgggcggcaggttgtttgccagagccgaaagtgtttgtgaccgccgaattggtgaagcagggtaaacctgcgcccgatgcctatttattaggggccgaacgtttaggccttgcccctgcggattgtattgtggtggaagatgcccccgccgggatcctttcggggctagcggccggttgtcaggtgatcgcggttaatgcaccaacagataccccaaaactcgatcaggttgatctggtgcttcactcactggagcaattggtggtagacgccacttctcatggtgcggtggttcggttactgccttaa

SEQ ID NO: 3730 - protein, 220 aa, Yersinia pestis KIM
MLVECKGFLFDLDGTLVDSLPVVERAWIGWAQRRGVNPSEVLDFIHGKQAITSLRHFMPGASEAEIQDEFLALEQIEANDTEGVTALPGAVALLTRLNELAIPWAIVTSGSIPVASARRAAGCLPEPKVFVTAELVKQGKPAPDAYLLGAERLGLAPADCIVVEDAPAGILSGLAAGCQVIAVNAPTDTPKLDQVDLVLHSLEQLVVDATSHGAVVRLLP

SEQ ID NO: 3731 - DNA, 567 bp, Shigella flexneri 2a str. 301
  CDS (1)..(567): transl_table=11
atgtacgagcgttatgcaggtttaatttttgatatggatggcacaatcctggatacggcgcctacgcaccgtaaagcgtggcgcgaagtattagggcactacggtcttcagtacgatattcaggcgatgattgcgcttaatggatcgcccacctggcgtattgctcaggcaattattgagctgaatcaggccgatctcgacccgcatgcgttagcgcgtgaaaaaacagaagcagtaagaagtatgctgctggatagtgtcgagccgcttcctcttgttgaagtggtgaaaagttggcatggtcgtcgcccaatggctgtaggaacggggagtgaaagcgccatcgctgaggcattgctggcgcacctgggattacgccgttattttgacgccgtcgtcgctgctgatcacgtcaaacaccataaacccgcgccagacacatttttgttgtgcgcgcagcgtatgggcgtgcaaccgacgcagtgtgtggtctttgaagatgccgatttcggtattcaggcggcccgtgcagcaggcatggacgctgtggatgttcgcttgctgtga

SEQ ID NO: 3732 - protein, 188 aa, Shigella flexneri 2a str. 301
MYERYAGLIFDMDGTILDTAPTHRKAWREVLGHYGLQYDIQAMIALNGSPTWRIAQAIIELNQADLDPHALAREKTEAVRSMLLDSVEPLPLVEVVKSWHGRRPMAVGTGSESAIAEALLAHLGLRRYFDAVVAADHVKHHKPAPDTFLLCAQRMGVQPTQCVVFEDADFGIQAARAAGMDAVDVRLL

SEQ ID NO: 3733 - DNA, 651 bp, Escherichia coli CFT073
  CDS (1)..(651): transl_table=11
gtgcggtgcaaaggttttctgtttgatcttgatggaacgctggtggattccctgcctgcggtagaacgggcgtggagcaactgggccagacgtcatgggttatcgccggaagaggtgctggctttcattcacggtaaacaggcgatcacctctctgcgccattttatggcgggcaaatccgaggcagacattgccgccgagtttacgcgtctggagcacatcgaggccacggaaaccgaaggtattaccgcgcttccgggggcaatcgccttactcaatcatttgaataaagcaggtattccgtgggctattgtgacttctggctccatgccggtagcgcgagcgcgtcataaaatagcggggcttcccgcgccagaggtgtttgtaaccgctgagcgggtgaagcgcggaaaaccagaacctgatgcgtatctgttaggcgcgcagctgctgggccttgcgccgcaggagtgtgttgtggtggaagatgctcccgctggcgtgctttcaggtctggcggcgggttgccatgttattgcggttaatgccccggcagataccccgcgcctgaatgaagtcgatttagtcctccacagtctggagcaaattactgtgaccaaacagccaaatggcgatgttattattcagtga

SEQ ID NO: 3734 - protein, 216 aa, Escherichia coli CFT073
MRCKGFLFDLDGTLVDSLPAVERAWSNWARRHGLSPEEVLAFIHGKQAITSLRHFMAGKSEADIAAEFTRLEHIEATETEGITALPGAIALLNHLNKAGIPWAIVTSGSMPVARARHKIAGLPAPEVFVTAERVKRGKPEPDAYLLGAQLLGLAPQECVVVEDAPAGVLSGLAAGCHVIAVNAPADTPRLNEVDLVLHSLEQITVTKQPNGDVIIQ

SEQ ID NO: 3735 - DNA, 729 bp, Bradyrhizobium japonicum USDA 110
  CDS (1)..(729): transl_table=11
gtgtcgcgcatcgatgcgtcgtgcatttgggaaagtacggaaatgatcgaggccaaggacaatgcgacgggcagggcattgctgttcgacatcgacggtacgcttgccaataccgacccgctgcacttgaaggctttcaacgaggtgctcggccctcgcggccatgtcttcgatcacgcgcggttctcgagggagctgcaagggttcgccaatgtatcgatcggtgagcgctttctgcccgacgaggcgccggaacggcgcgcctcgatcctcgatgaaaaggaggaagtcttccgcgcgctcgtcgccgggcagatcgagccgctgccgggtctgatggcgctgctcgaccgggcggacgcggccggcgttcccatggttgccgtgaccaacgcgccgcgtctcaacgccgaactgctgctctccggcctcggcatcacggaccgtttcaaggcgctcgtgatcggcgacgagctgccgcacggcaagccgcatccgctgccctatcaggaaggcttgcgcttcgtcggcgcgaggccggaaacctcggtcgcattcgaggactcccgcaccggcgtgcaatcggccaccgcggccggcattccgaccatcggcatccggaccagcctcagccatgccgacctggttgccgccggcgcggtcgcctccgccggcgccttcgacgatccggccctgctcgcgcctctggctgccgcgatggcgtggtga

SEQ ID NO: 3736 - protein, 242 aa, Bradyrhizobium japonicum USDA 110
MSRIDASCIWESTEMIEAKDNATGRALLFDIDGTLANTDPLHLKAFNEVLGPRGHVFDHARFSRELQGFANVSIGERFLPDEAPERRASILDEKEEVFRALVAGQIEPLPGLMALLDRADAAGVPMVAVTNAPRLNAELLLSGLGITDRFKALVIGDELPHGKPHPLPYQEGLRFVGARPETSVAFEDSRTGVQSATAAGIPTIGIRTSLSHADLVAAGAVASAGAFDDPALLAPLAAAMAW

SEQ ID NO: 3737 - DNA, 657 bp, Pseudomonas syringae pv. tomato str. DC3000
  CDS (1)..(657): transl_table=11
atggccctttctgcgctgttgtttgacctggacggaaccctcatcgacaccgatgaactgcatttgaacgcctataaccagttgctggcacgctgggaccggtcgacggatatcgaatactacaaggcccatgtgatgggctttccggacgacatgatttttggcggtctgtttcccgatattcccgcttcgcaatacgcgggtctggctgccgagaaggaaacgatgtttcgcgcccagctgggtgagacgatccctgtggcaggcgtgctgcgcattcttgatcacgcacaaaaagccggactgcgcaccgcagtcgtcaccaatgcgccgcgggaaaacgcggtggccatgctcactggcctgggcatcgtggaccgtttcgaggccatcgtgatcggcggagaactgcagcgcggcaaaccgcaccccataccctacctcacggcgctggagctgctgggcgtgaaggccgaccaggccattgccttcgaggactcgctggccggcgtgcagtcagcccatgcggcgggcatccacacgtttggcgtgctgtcgggtttgcaggaacatcagcttcggcaggcgggtgcgcgtgacgtgatccgtgacttcaatgccgatgccctgtggcagtttctgcaaacggctgattga

SEQ ID NO: 3738 - protein, 218 aa, Pseudomonas syringae pv. tomato str. DC3000
MALSALLFDLDGTLIDTDELHLNAYNQLLARWDRSTDIEYYKAHVMGFPDDMIFGGLFPDIPASQYAGLAAEKETMFRAQLGETIPVAGVLRILDHAQKAGLRTAVVTNAPRENAVAMLTGLGIVDRFEAIVIGGELQRGKPHPIPYLTALELLGVKADQAIAFEDSLAGVQSAHAAGIHTFGVLSGLQEHQLRQAGARDVIRDFNADALWQFLQTAD

SEQ ID NO: 3739 - DNA, 603 bp, Vibrio parahaemolyticus RIMD 2210633
  CDS (1)..(603): transl_table=11
atgagcacgattgattttaggccatacggaggattcatcttcgatatggatggtaccttgattgataccatgcctgcccaccttgcggcttggcaagcaacggctgaccgatttgattttccgttttgtcaggagtggttacacagcttaggcggaatgccgagttttaaaattgttgctgagttgaatcgtcattatgggttatctctagatcctcaaacggtttcaaaattcaaaatggagacgtttgccgcgatggaattgcagggcgatgtcatccagtgcactggcattgttcttgaagaatatttaggccaaaagaaaattgcggtcgggacgggaagtcagcgagaaagtgcgatgcgtctgctcagtcatgcagggttgatcgacaggcttgatgccgttgtgacggctagtgatgttgaaaatcacaaaccttgtccggatacttttctattagccgcagatagattagggattgacgcgcaaaactgtctggtttttgaagatacagaattgggtaaacgtgcggctcattctgctgggatggactgtgtcatggtcgaaggaaataatctcgttttttatccgaagagataa

SEQ ID NO: 3740 - protein, 200 aa, Vibrio parahaemolyticus RIMD 2210633
MSTIDFRPYGGFIFDMDGTLIDTMPAHLAAWQATADRFDFPFCQEWLHSLGGMPSFKIVAELNRHYGLSLDPQTVSKFKMETFAAMELQGDVIQCTGIVLEEYLGQKKIAVGTGSQRESAMRLLSHAGLIDRLDAVVTASDVENHKPCPDTFLLAADRLGIDAQNCLVFEDTELGKRAAHSAGMDCVMVEGNNLVFYPKR

SEQ ID NO: 3741 - DNA, 678 bp, Salmonella enterica subsp. enterica serovar Typhi Ty2
  CDS (1)..(678): transl_table=11
atgcctgaggaggctcacgtgcagtgtaaaggttttctgtttgatctggatggaacgttggttgactcattacctgccgtcgaacgcgcgtggtgtagctgggccgatcgttttaaccttgctcatgatgaggtgctgggctttattcatggcaaacaggcgatcacctcgttgcggcattttatggcgggtaaatcggaggcggaaattgccgctgagtttacgcgcctggagcaaatagaagccactgaaaccgcagggatcaccgcgttgccgggggcagtcgatttactcaatcacctgaataaagcgggcattccgtgggctatcgtcacctccggttcaatgccggtcgcgcgtgcgcgccatcaggtcgcgggccttccagcgccagaggtgtttgtcaccgccgaacgagtcaaacgcggcaaaccggagccggatgcgtatttgctgggcgcacaactgcttggcctggcccctcaggagtgcgtcgtagtagaagatgccccggctggcgtgctgtccggactggctgcgggctgccacgtcattgcggtcaatgcgccggccgacacgccgcgtctggcggatgttgattttgcgttggatagcctgacgcaattatcggtcgctaaacaaccaaacggcgatgtggtggtgttaagaaagacctga

SEQ ID NO: 3742 - protein, 225 aa, Salmonella enterica subsp. enterica serovar Typhi Ty2
MPEEAHVQCKGFLFDLDGTLVDSLPAVERAWCSWADRFNLAHDEVLGFIHGKQAITSLRHFMAGKSEAEIAAEFTRLEQIEATETAGITALPGAVDLLNHLNKAGIPWAIVTSGSMPVARARHQVAGLPAPEVFVTAERVKRGKPEPDAYLLGAQLLGLAPQECVVVEDAPAGVLSGLAAGCHVIAVNAPADTPRLADVDFALDSLTQLSVAKQPNGDVVVLRKT

SEQ ID NO: 3743 - DNA, 675 bp, Bacteroides thetaiotaomicron VPI-5482
  CDS (1)..(675): transl_table=11
atgagaaagaaactgaaagccgtcctgttcgatatggacggcgtgctctttaactccatgccctatcactccgaagcatggcatcaagtcatgaaaactcacggccttgatctgagccgggaagaagcatatatgcacgaaggacgcacgggggcatcgactatcaatatcgtatttcaacgtgaattaggaaaagaggccacacaagaggaaatagaaagtatatatcacgaaaaaagtatcctgttcaattcttatccggaagcagaacgtatgcccggcgcatgggaacttttgcagaaagtaaagagtgaagggctgactcctatggtagtcactggttcgggacagctttctttgttggaacgtctggaacacaattttccgggaatgtttcataaagagctaatggtgaccgcttttgacgtgaaatatggcaaacctaatccagaaccttatctgatggctcttaagaaaggaggcttgaaagcggatgaagctgttgtgattgaaaacgcacctttgggcgtggaagcaggacataaagccggaattttcacaatcgcggtcaatactggtccgttggacggacaggtgttgctggatgccggagccgatctgctgtttccttctatgcagacactctgcgatagctgggatacaatcatgttataa

SEQ ID NO: 3744 - protein, 224 aa, Bacteroides thetaiotaomicron VPI-5482
MRKKLKAVLFDMDGVLFNSMPYHSEAWHQVMKTHGLDLSREEAYMHEGRTGASTINIVFQRELGKEATQEEIESIYHEKSILFNSYPEAERMPGAWELLQKVKSEGLTPMVVTGSGQLSLLERLEHNFPGMFHKELMVTAFDVKYGKPNPEPYLMALKKGGLKADEAVVIENAPLGVEAGHKAGIFTIAVNTGPLDGQVLLDAGADLLFPSMQTLCDSWDTIML

SEQ ID NO: 3745 - DNA, 687 bp, Streptomyces avermitilis MA-4680
  CDS (1)..(687): transl_table=11
gtgattggtgaacctgctcagcctggagccaagaagtatgtcctgttcgatgtcgatggcacgttgatcgatgctgtggacaaccagcgccgggtttggagggtgtgggcggagcgatacggactcgaccccggtgaggtctaccaagtggccttgcggacaaggccgatggagaccttcgcgcaggtcgctccggaccgtgacccgcaggagtgcctggccgcgctgcatgaactcgaggacgaggacgtccggtccggcgtgtatgcggccttcgacggtgcttccgagctgctggacgctctgccgccggagtcttgggcgctggtgacgtcgaattacgagcaccgggtgcgcggccgcttcgcccggaccggcttgccggtcccgagcatcatcgttgatgccgcctccgtcgaggagggcaagccctcgcctgtcccttatctactggctgccaagcggctcggtgccgacccgcaggactgtctggtcatcgaggacgcaccctccggtgtgcggtccgcactgcgtgccgggatgacggtgtggggggtcaacgcacccgtcgcggtggacggcgtgcaccgccacttcggaagcctgcgcgaagcgatccgcgacatcctcgccgtcacttccggaacccgccctcacgagccgaggggatcagcggcagtggaatga

SEQ ID NO: 3746 - protein, 228 aa, Streptomyces avermitilis MA-4680
MIGEPAQPGAKKYVLFDVDGTLIDAVDNQRRVWRVWAERYGLDPGEVYQVALRTRPMETFAQVAPDRDPQECLAALHELEDEDVRSGVYAAFDGASELLDALPPESWALVTSNYEHRVRGRFARTGLPVPSIIVDAASVEEGKPSPVPYLLAAKRLGADPQDCLVIEDAPSGVRSALRAGMTVWGVNAPVAVDGVHRHFGSLREAIRDILAVTSGTRPHEPRGSAAVE

SEQ ID NO: 3747 - DNA, 645 bp, Streptomyces avermitilis MA-4680
  CDS (1)..(645): transl_table=11
atgcgctatgacctcgtcatcttcgacaacgacggcgtcctcgtcgacagtgagcccctctccaacacgctcctcgccgcctatctcaccgagctcggccatccgacctcgtacgaggagtccctccgcgactacatgggcgccgccatgcatcgcgtacacgacctcgtccaggaacggaccgggcagcggctgcccgacgacttcgacgaggtcttccacggccgggtgttcgccgcgttcgagcgagagctggaacccgtcgccggcgccgtggacatactcgagaagctcaccgccgacggggtgccgtactgcgtcgcctcgtccgggagccatgagcggatccgggtcgggcaccgcaagaccgggctcgaccggtggttcgaggacgggcggatcttcagttcgcaggacgtcgggcgggggaagccggcgccggatctgttcctgtacgcggccgagcgcatgggcgtaccacccaagaggtgtgtcgtcgtcgaggacagtcccctgggcgtgcaggcggcgaacgcggcgggaatggacgtcttcgggtacaccgccatgacccccgccgccaagctcgccggtgccactcaactcctttccgacctgggagagttggctgacctgctcgtatga

SEQ ID NO: 3748 - protein, 214 aa, Streptomyces avermitilis MA-4680
MRYDLVIFDNDGVLVDSEPLSNTLLAAYLTELGHPTSYEESLRDYMGAAMHRVHDLVQERTGQRLPDDFDEVFHGRVFAAFERELEPVAGAVDILEKLTADGVPYCVASSGSHERIRVGHRKTGLDRWFEDGRIFSSQDVGRGKPAPDLFLYAAERMGVPPKRCVVVEDSPLGVQAANAAGMDVFGYTAMTPAAKLAGATQLLSDLGELADLLV

SEQ ID NO: 3749 - DNA, 663 bp, Streptomyces avermitilis MA-4680
  CDS (1)..(663): transl_table=11
atgccggccgccgccaccgttctgaccgcccgggcccttctgctggacatggacggcaccctcgtcaactccgacgcggtcgtggagcgttgctggcgccgctgggccgaccggcacgggctggacgccgacgaggtgatgaaggtcgtgcacgggcggcaggggtacgcctccatggcggtgctgctgccggaccggcccatggagcagaacttcgccgacaatgcgcgcatgctcgccgaggagaccgccgacatggacggcgtggtcgagatcccgggtgccttcgcgttcctcgcctccctcgccgggctgccgcacgccctcgtgacctcggcggacgtgggactgtccacggcccggatggcggcggccgggctggagctgcccgacgtacgggtcacggccgagtccgtcggggccagcaagccggaccccgagggctttctgaagggcgccgccgaactgggcgtcgcgcccgaggactgtgtcgtcttcgaggactccggggcgggaatcgaggcggggcgctccgcggggatgcgggtcgtgggggtcgggccacgggcggccgcgcaccggccggatgtggtggtgcgggacctgacacaggtgcgggtcgaaagcgcgacggacgggacgatccggctgcacgtgggctga

SEQ ID NO: 3750 - protein, 220 aa, Streptomyces avermitilis MA-4680
MPAAATVLTARALLLDMDGTLVNSDAVVERCWRRWADRHGLDADEVMKVVHGRQGYASMAVLLPDRPMEQNFADNARMLAEETADMDGVVEIPGAFAFLASLAGLPHALVTSADVGLSTARMAAAGLELPDVRVTAESVGASKPDPEGFLKGAAELGVAPEDCVVFEDSGAGIEAGRSAGMRVVGVGPRAAAHRPDVVVRDLTQVRVESATDGTIRLHVG

SEQ ID NO: 3751 - DNA, 753 bp, Streptomyces avermitilis MA-4680
  CDS (1)..(753): transl_table=11
ttgccaaaaaagggcagccggcctgatcgtccctcaaggaggtgcgcccggatgaccagtacggtccccgcgctcggtacccgttcggccgaaggctccgctctgcaggccgtgctcctcgacatggacggcaccctggtggacaccgagggcttctggtgggacgtcgaggccgaggtcttcgccgccctcgggcacccgctcgacgagtcctggcgccatgtcgtggtcggcggccccatggcgcgcagcgcgggcttcctcatcgaggccaccggtgccgacatcaccctcgccgaactcacggtgctgctcaacgacgggttcgaggcacgtatcggccgtacgctgccgctgatgccgggcgccgcacggctgctggccgaactcgcggcgcacgagatccccaccgccctggtctccgcctcgcaccggcgcatcatcgaccgggtcctgacctccctcggctcccagcacttcgcgctgaccgtggcgggcgacgaggtggcgcgcaccaagccgttccccgacccgtatctgctggcggcctccggactcggcgccgagccggcgagatgcgcggtcatcgaggacacggcgaccggtgtcgcggccgcggaggccgccggctgccgggtggtcgccgtcccgtcggtggcccccatcgcacccgccgcccggcgcactgtcgtgacctctctcgaagaggtcgacctgccatttctccgcggcttgatgacggaaatgcgctaa

SEQ ID NO: 3752 - protein, 250 aa, Streptomyces avermitilis MA-4680
MPKKGSRPDRPSRRCARMTSTVPALGTRSAEGSALQAVLLDMDGTLVDTEGFWWDVEAEVFAALGHPLDESWRHVVVGGPMARSAGFLIEATGADITLAELTVLLNDGFEARIGRTLPLMPGAARLLAELAAHEIPTALVSASHRRIIDRVLTSLGSQHFALTVAGDEVARTKPFPDPYLLAASGLGAEPARCAVIEDTATGVAAAEAAGCRVVAVPSVAPIAPAARRTVVTSLEEVDLPFLRGLMTEMR

SEQ ID NO: 3753 - DNA, 759 bp, Prochlorococcus marinus str. MIT 9313
  CDS (1)..(759): transl_table=11
atgaacaagctttgttcagtgttctgggacgttgatggcacccttgctgacacagaaatggaaggccatcgcgtggcctttaatgcagcgtttgccgaggcggaacttgcatggttttgggatcgccacctctacgctgaacttctacgaataccaggtgggagacaacgtgttgagacctatgctgggcacctgggagaagagttcaatgaagagtatttggctcagttgcgtagacgtaaacaacaccactacatcgaaagaatacgttctggatacgtcccttggagaccgggtgtgcggcgtcttctcaaggaactccaactgaatggagtggagcaatgggtggtaaccacaagcggtcgcgactctgtaaacgccttgcttgaggtgaatttccctcatggtgattcaccattccagggatgcatcaccgctgaggatgtttgccttggcaagccacatccagagggctatctgcatgcactttgcgccagtggtttcaacaagaatgaggtgatagtgatcgaagattctgcagctggacttgctgccgctagagctgcaaatctgccatgcctgctcaccccatccccatgggatcaggaactgaaatcacagttccaccaagccaatgcggtgttcgaccatcttggtgacaaagagttgccctgcaaagtgctcgtaggccccccttgtgttcaagagcaggtcaagctggagtacttacaaagactcatcgatatggctccttcatga

SEQ ID NO: 3754 - protein, 252 aa, Prochlorococcus marinus str. MIT 9313
MNKLCSVFWDVDGTLADTEMEGHRVAFNAAFAEAELAWFWDRHLYAELLRIPGGRQRVETYAGHLGEEFNEEYLAQLRRRKQHHYIERIRSGYVPWRPGVRRLLKELQLNGVEQWVVTTSGRDSVNALLEVNFPHGDSPFQGCITAEDVCLGKPHPEGYLHALCASGFNKNEVIVIEDSAAGLAAARAANLPCLLTPSPWDQELKSQFHQANAVFDHLGDKELPCKVLVGPPCVQEQVKLEYLQRLIDMAPS

SEQ ID NO: 3755 - DNA, 717 bp, Chromobacterium violaceum ATCC 12472
  CDS (1)..(717): transl_table=11
atgccccaagccgatttcaccctgctgttcgatctggacggcaccctgaccgataccgacgaactgcatttccgcgccttccgcgcgttgctggccgagcacggccgggaactggaccatgacggctatctgcggcatgtccacggctccaccaacgaagccatcatgcgcgcgctgctgccgggcattcccgagcggcaccgggagctggccgagcgcaaggagcaactgttccgcgcctcggtcggccaattgcgccccaccccgggcgcgctgcggctgttcgattgggcccaggccaaaggcgcggccgtcgccgtcgtcaccaacgcgccgcgcgccaacgccgagctgatgctggacggcctgggcctggcttcccgggtggacgcgctggtgataggcgacgagctggcttacggcaaacctcacccgctgccctatctcgccggactcgcccgagtgggagggcgggccgaacgcgcgtgcgcgttcgaagactctccatccggcatccgcgcggccaagcaggccggcctgcgcaccttcgccatcgccggcatgctgcccgaggtcgcgctgcgcgaagccggcgccgactcggtcatcgccgatttcaactcccccgaactatggcaatggctggaaagggcctccgccaccgcatccttgaatggaaggcttggccatgtcctgaatgcgaatcgccgcctctag

SEQ ID NO: 3756 - protein, 238 aa, Chromobacterium violaceum ATCC 12472
MPQADFTLLFDLDGTLTDTDELHFRAFRALLAEHGRELDHDGYLRHVHGSTNEAIMRALLPGIPERHRELAERKEQLFRASVGQLRPTPGALRLFDWAQAKGAAVAVVTNAPRANAELMLDGLGLASRVDALVIGDELAYGKPHPLPYLAGLARVGGRAERACAFEDSPSGIRAAKQAGLRTFAIAGMLPEVALREAGADSVIADFNSPELWQWLERASATASLNGRLGHVLNANRRL

SEQ ID NO: 3757 - DNA, 912 bp, Oryza sativa (japonica cultivar-group)
  CDS (1)..(912)
atggcgggaatcgtagaaaaagaaggcgagacgggtcacctcacctcaccaaccgcgccaactttaaccacaccaaccaaccaagccttcgtcaatataataacagtactgatgatggtgagcttgatggaggaagaggccatggccatggagacgatggcgacgacgacgaccaagaggatgtcggtggcggaggtgtctctggtggaggccgtgctgttcgacatcgacggcaccatgtgcgtctccgacccgttccaccacagggccttctccgagctcctccaggccctcggctacaactccggcgtccccatcacgccggagttcggcatggcccacatggccggccggagcaaccaccagatcggcagcttcctcttcccggactggccccagcaccgcctcgacgccttcttcgccgacaaggaggccctcttcgcgcgctacgccgccgagggcctccgcgaggtcgccggcctcaccgacctctgccggtgggccgccgcccgcggcctcaagcgcgccgccgtcaccaacgcgccgcgggccaacgccgacctcatgatctccatcctcggcctctccgacttcttccaggtcatcgtcgccgctgccgacgactgcgacctccccaagccctcgccggagccctacctccgggcgctcagcctgctcggcgcgtctccccgtcacacgctcgtcttcgaggactcggtggtcggggtgcaggccggcgtcgccgccgggatgccggtgatcgccgttgcggaggaggcccgggaggccaaggtcgtcgccgccggagcgtccctcgtcatcagggactacaaagaccacaagctctgggcggcattagacaagctccaagcagcagcagcagctcaatccaatggacaacttggagcatag

SEQ ID NO: 3758 - protein, 303 aa, Oryza sativa (japonica cultivar-group)
MAGIVEKEGETGHLTSPTAPTLTTPTNQAFVNIITVLMMVSLMEEEAMAMETMATTTTKRMSVAEVSLVEAVLFDIDGTMCVSDPFHHRAFSELLQALGYNSGVPITPEFGMAHMAGRSNHQIGSFLFPDWPQHRLDAFFADKEALFARYAAEGLREVAGLTDLCRWAAARGLKRAAVTNAPRANADLMISILGLSDFFQVIVAAADDCDLPKPSPEPYLRALSLLGASPRHTLVFEDSVVGVQAGVAAGMPVIAVAEEAREAKVVAAGASLVIRDYKDHKLWAALDKLQAAAAAQSNGQLGA

SEQ ID NO: 3759 - DNA, 738 bp, Oryza sativa (japonica cultivar-group)
  CDS (1)..(738)
atggcagccgccaccagcagcagtgcgctgtcaaagcttgctccactggaggcgatcttgtttgacatcgatggcaccctctgcgactctgatcctatccatttctgcgccttccgcgaactgctgcagcaggttggtttcaacaatggcgtgcccatctccgaggagttctacagcgccaatatcagcggggggcacaacgatgacctcgcaagggccttgttcccggatttggatcatgacaaggcaatgaagttcatggacgacaaggaagcattgtacagaaggttggctccagaacagttggtggcagtagaaggcctgcatgatctgtgcagatggataaaagatcacaagctgaaacgcgccgccgtaacaaatgctccaaggtcaaatgcagagctcatgctgtcactccttgggctcactgaattcttcccggtgctcgtaatcgggagcgagtgtgaccgagccaagccattccctgatccttacctcaaggctcttgagcttattggtgcatcacctgatcacacattcatttttgaggactccgcgtcagggattcgagccggtgtagctgcaaatgttcctgtagttggtctgacaactaggaatccagagaaagttctgcaagatgcaggagcaagcttgctgataaaagatttccaggacccaaagctactgtccatacttgaagagatagaacctacggttgccgccgtcgagcaagtctga

SEQ ID NO: 3760 - protein, 245 aa, Oryza sativa (japonica cultivar-group)
MAAATSSSALSKLAPLEAILFDIDGTLCDSDPIHFCAFRELLQQVGFNNGVPISEEFYSANISGGHNDDLARALFPDLDHDKAMKFMDDKEALYRRLAPEQLVAVEGLHDLCRWIKDHKLKRAAVTNAPRSNAELMLSLLGLTEFFPVLVIGSECDRAKPFPDPYLKALELIGASPDHTFIFEDSASGIRAGVAANVPVVGLTTRNPEKVLQDAGASLLIKDFQDPKLLSILEEIEPTVAAVEQV

SEQ ID NO: 3761 - DNA, 687 bp, Vibrio vulnificus YJ016
  CDS (1)..(687): transl_table=11
ttgggctatcgcaagtcacaaaagaataaacaaaacaatagggagaaagttttgcaagagtttcaagtttacctgtttgatatggatggcaccttagtgaattcggagccgttgaaggggcaagcattagccctggcttgtcaagattacggctcagtggtggattttaatatctataaagaggtgatgggggagagctggcctgtggtcactggccactttttcaaacacgcgaatatttcccctgagcttgccgagttcaatgcacactttcgggctcactacgagagattgctgtcggaaaacctcgaattaaatcgcggtgcgaaagcgtacattgaacatttgaatgcgagcggaaaacagtgtgccgtggtgagttcggcagcgacgtggatggtggaaaacatactgaatgcgctgggtctgaaggaggcgtttaaggttgtgatcacacaagaacacgtcacaaaacacaaacccgacccagaagcctttaatctggcgttgtcaaaactgggtgtgacgccagagcaggcaattatatttgaagattctcatgctggcgtcttggctggtcgagcgagcggttgtaacgtggtggccatcaggcatgagtttaatggcaaaaatgatttgagtggtgcgattgctcgtatcgagagttttgaagcgcttttggcgtaa

SEQ ID NO: 3762 - protein, 228 aa, Vibrio vulnificus YJ016
MGYRKSQKNKQNNREKVLQEFQVYLFDMDGTLVNSEPLKGQALALACQDYGSVVDFNIYKEVMGESWPVVTGHFFKHANISPELAEFNAHFRAHYERLLSENLELNRGAKAYIEHLNASGKQCAVVSSAATWMVENILNALGLKEAFKVVITQEHVTKHKPDPEAFNLALSKLGVTPEQAIIFEDSHAGVLAGRASGCNVVAIRHEFNGKNDLSGAIARIESFEALLA

SEQ ID NO: 3763 - DNA, 870 bp, Eremothecium gossypii
  CDS (1)..(870)
atgtgccctattaccgttgatgtctgcctgtttgatttggacgggacaattgtagatacaaccgatgctgtggaagcggcctggcaaaaggtcggccgggcacaccaagtagatgcggccaagatccggcggaattctcacgggcggcgtgcgagcgaaacgttcaagcagtacttcccggatgccgacaatgacgccgctgtgaaagagttcgaacatgcgctggtgtctcagtcgcactacgtgggcttgatcccaggcgcgaacgatctactcctgacgctggaccggccctctggctgcaacccgggcgaggtcttccgcgataacagatgggcgatcgttacctctgccacgccatcactcgcccgttcctggtttaacacattgctcaagaaggtcaaacctccaaaagtctttattacgtctgcggatgtggcaaagggtaaaccagatcctgaggggtatcaaaaggccaaggaccagttggcagacatccttgggctcaataaggacaaggttcgcgcggtagttttcgaggactcagcattaggtatacgggccgcgaaggcgatgggggcgattgcggtcggcatcacgtcgacctacagcaaagatgtgctataccgttctggcgcagactatgtggtggaggacctcgcgcaggtctgtgtcatgcagaatggtccagatggtattaccttagagataacggggagcatggagaaggggacttcggatgctgtgttcgaagaggacgaggaagacgaggctggtgatgagactaatgatgatgacgatgacgatgacgattacaacgaagatgaatattacgacaattcggacggcgaccacggcaaaggaaggtaa

SEQ ID NO: 3764 - protein, 289 aa, Eremothecium gossypii
MCPITVDVCLFDLDGTIVDTTDAVEAAWQKVGRAHQVDAAKIRRNSHGRRASETFKQYFPDADNDAAVKEFEHALVSQSHYVGLIPGANDLLLTLDRPSGCNPGEVFRDNRWAIVTSATPSLARSWFNTLLKKVKPPKVFITSADVAKGKPDPEGYQKAKDQLADILGLNKDKVRAVVFEDSALGIRAAKAMGAIAVGITSTYSKDVLYRSGADYVVEDLAQVCVMQNGPDGITLEITGSMEKGTSDAVFEEDEEDEAGDETNDDDDDDDDYNEDEYYDNSDGDHGKGR

SEQ ID NO: 3765 - DNA, 762 bp, Eremothecium gossypii
  CDS (1)..(762)
atgactagcacagccgaccacaagcagcccatttcgttgaaggttaacggggctctattcgacgtcgacgggaccatcatcatctcgcagcccgcgctagcggccttctggagggagtttggcaaggacaagccgtacttcgatgcggagcatgtcatcagtgccacccacggctggagaacctacgacgccatcgctaccttcgcgccagactatctgagtgaggagtacgtgacgagactggagggcgaaatcccagacaagtacggcaagttctccgtggaggttcccggcgctgtgacgctctgcaatgccttgaacgagcttccgaaggagaagtgggccgttggtacttccggcaccttcgagatggcacacaagtggttcgatgtcctcggcatcaagcgtcctagcaccttcattaccgccaacgacgtgaagcagggcaagccccacccagagccttacatcaagggccgtaacgcgttgggcttcccaatcaacgagcagaaccctaagggctccaaggtgattgtcttcgaggatgccccagctggtattgccgctggtaaggctgccggctgtaagatcgtgggtgtcgccaccaccttcgacgttgagtacttgaaggagagagggtgcgacatcattgtcaaggaccaccgcagcatcagagtcggcggttacaatcccgagactgacgaggtggagtttgtgtttgacgactatctgtacgccaaggacgacttgctagactggtga

SEQ ID NO: 3766 - protein, 253 aa, Eremothecium gossypii
MTSTADHKQPISLKVNGALFDVDGTIIISQPALAAFWREFGKDKPYFDAEHVISATHGWRTYDAIATFAPDYLSEEYVTRLEGEIPDKYGKFSVEVPGAVTLCNALNELPKEKWAVGTSGTFEMAHKWFDVLGIKRPSTFITANDVKQGKPHPEPYIKGRNALGFPINEQNPKGSKVIVFEDAPAGIAAGKAAGCKIVGVATTFDVEYLKERGCDIIVKDHRSIRVGGYNPETDEVEFVFDDYLYAKDDLLDW

SEQ ID NO: 3767 - DNA, 663 bp, Neurospora crassa
  CDS (1)..(663)
atggatggcaccatcattgactctaccgccgctgttgagaaacactgggaggccatcggtaaggagattgggcactcgcccgaggtcatcctccagacctcccatggcagaagatccattgatattctcaaagaacttgccccggagaaggcaactttggagtacgttcagcacatggagggtcttctccctaagaagtatggcgacgacgcggttgagatccccggcgcccgcgccctgcttcaagacttgatagatcgtaagaagccgtgggccatcgttacttcaggtactttgccgctcgtttctgggtggttggacgtcctctccctcccccaccccgcgcacctcatctccgccgaatccgtcgtgaacggcaagcccgatcctgcctgctacttgctcggtcgcgaacgcctcggcctctcaaacccaaacgtcgaggtcttagtgctggaagacgcgcccgcgggtatccgcgccggcaaagccgcgggctgcaaggtcattggcttggtcaccagccatacggttgaacaggtgctggaagcgggtccagattgggtggtgagggatttaagcagtgttaagtttgtgccggagagcagcggagaggggaaggttactttggaaattagggatgcgttggtcttgaagaactag

SEQ ID NO: 3768 - protein, 220 aa, Neurospora crassa
MDGTIIDSTAAVEKHWEAIGKEIGHSPEVILQTSHGRRSIDILKELAPEKATLEYVQHMEGLLPKKYGDDAVEIPGARALLQDLIDRKKPWAIVTSGTLPLVSGWLDVLSLPHPAHLISAESVVNGKPDPACYLLGRERLGLSNPNVEVLVLEDAPAGIRAGKAAGCKVIGLVTSHTVEQVLEAGPDWVVRDLSSVKFVPESSGEGKVTLEIRDALVLKN

SEQ ID NO: 3769 - DNA, 735 bp, Magnaporthe grisea 70-15
  CDS (1)..(735)
atgggaagcatacaagtacccgagggcacctttaccgccccgccgcagcaggtttccctcgacggctttctcttcgacatggacggcaccatcatagactcgactagggccattgagatgcactgggcatcggttggcaaagagatcggagtggacccggagctcatcttgaagacctcacacgggcgtcgtagcatcgacacgctcaagatatattgcccagaaaaggcaaccattgagtacgcctcggagatggagggccgcctacccaagctctacagcaaagaggcagaggagatccccggcgcccgctcgctcctcgactccataatcgccgccaaggccgccccctgggccatcgtgacgtcgggaacaaagccgctggtcaacggctggctcgaggctctgaacctgccgcggcccgcgcacatgatcacggccgagtcggtcgagaacggcaagcccgatcccacctgctacctcatgggcctcgacgggctcggcctccgcgatcgcgccgctgacgtcctcgtgctcgaggacagccccgccgggatcctggccggcaaggcggccgggtgcaaagtgctcgggctggtcaccagccacaccgtcgagcaggtggtgggcgccggcccggactgggtggtcagggatttgtcgtctgtgaggctcgtcggcgctgagggtggaagggttactttggagattgtggatgcattggagtccaagtag

SEQ ID NO: 3770 - protein, 244 aa, Magnaporthe grisea 70-15
MGSIQVPEGTFTAPPQQVSLDGFLFDMDGTIIDSTRAIEMHWASVGKEIGVDPELILKTSHGRRSIDTLKIYCPEKATIEYASEMEGRLPKLYSKEAEEIPGARSLLDSIIAAKAAPWAIVTSGTKPLVNGWLEALNLPRPAHMITAESVENGKPDPTCYLMGLDGLGLRDRAADVLVLEDSPAGILAGKAAGCKVLGLVTSHTVEQVVGAGPDWVVRDLSSVRLVGAEGGRVTLEIVDALESK

SEQ ID NO: 3771 - DNA, 723 bp, Gibberella zeae PH-1
  CDS (1)..(723)
atgggatcgacaccagagtacatccagcctccacaggaactcacctttgatgggttcctgttcgacatggatggcaccattattgactccacggaagcagtggtcaagcattgggaaacaattggcaacgagataggcgttgcacccgaagttattcttgaaacttcccatggacgacgaagcattgatatcctcaagattcttgcacctaaaaaggccaattgggactatgtacgtgacatggagggacgtcttcccaagtaccacggccacgaggccgtcgagataccaggcgcccgttccatgctagaagctctcatcgccagatctagcccctgggcgatcgtcacgtcgggcactgtacctctcgtgactggatggttgcgtgctcgagacctgcctacaccgctgccggagcacctcgtcactgcagagtcggttgagaatggcaaacccgaccccgcctgctatcgccttggccgtgagcgtctcggcctacaagcggaggatgcccagattctggtccttgaagacagcccagcagggattcgtgcaggaaaggcagctgggtgcaaggtcctcggtctggtgacaagccataccgtcgagcaggtcgtcgccgcagagccagattgggttgttcgagacctctcctcagtcgaggtgcttcggagcgagggcggcaaggtgaccatcaaaatttccaatgccctgcgactatga

SEQ ID NO: 3772 - protein, 240 aa, Gibberella zeae PH-1
MGSTPEYIQPPQELTFDGFLFDMDGTIIDSTEAVVKHWETIGNEIGVAPEVILETSHGRRSIDILKILAPKKANWDYVRDMEGRLPKYHGHEAVEIPGARSMLEALIARSSPWAIVTSGTVPLVTGWLRARDLPTPLPEHLVTAESVENGKPDPACYRLGRERLGLQAEDAQILVLEDSPAGIRAGKAAGCKVLGLVTSHTVEQVVAAEPDWVVRDLSSVEVLRSEGGKVTIKISNALRL

SEQ ID NO: 3773 - DNA, 756 bp, Candida glabrata CBS138
  CDS (1)..(756)
atgacagtcaagaaggacaaccagttcagtgtagatgtgtgtctgtttgatctagacggcactatcgtaagtaccacagtggcagctgagtctgcatggaggatgctatgtgcgaaagaaggagttgatcccgaggagctattcaaattctctcatggtgtcagaacatctgaggtgcttgctaagtttttcccaaacatcgacaacacagacaataagatgactagagagctggagttgtctatggcaaacaatttcttggatacggtgagcttgattcccggtgccaaagaccttctgttgacccttgacaaggatacagcacgccaaggagccaagttcaacgaaaggaagtgggcaattgtcacttcgggttccccagatttggccttttcttggttcaagaccatcttgaaagaggttggtaagccagacgtgtttattactgcttttgatgtgacaaaaggtaagcccgacccagaagggtacgccaaggccaagaagcttctgtgtgaaagactgcaatacgagagcgctagtgcgacatcagtggtctttgaagatgcaccagctggtataaaagcaggtaaggcaatgggcgcaataactgtagggattacgtctacttacgatctgcaaacgttgattgatgctggtgctgactatgtggttaaggacttgactcaagttgaagttttgaagaatacagaaggtgatcaaattacattagagattgaaaatcctctaaatcaatga

SEQ ID NO: 3774 - protein, 251 aa, Candida glabrata CBS138
MTVKKDNQFSVDVCLFDLDGTIVSTTVAAESAWRMLCAKEGVDPEELFKFSHGVRTSEVLAKFFPNIDNTDNKMTRELELSMANNFLDTVSLIPGAKDLLLTLDKDTARQGAKFNERKWAIVTSGSPDLAFSWFKTILKEVGKPDVFITAFDVTKGKPDPEGYAKAKKLLCERLQYESASATSVVFEDAPAGIKAGKAMGAITVGITSTYDLQTLIDAGADYVVKDLTQVEVLKNTEGDQITLEIENPLNQ

SEQ ID NO: 3775 - DNA, 744 bp, Candida glabrata CBS138
  CDS (1)..(744)
atgccagaaccaattactttgagagttaacgctgctcttttcgatgtcgatggtaccatcatcatttcccagccagctctagctgcattctggagagattttggtaaggataagccatacttcgatgctgagcatgtgatccatgtttcccatggttggagaacttacgatgctattgctaagtttgctccagacttcgccgatgaggaaaccgtcacaaagctggaaggtgaaatccctgataagtacggtaaggaagccatcgaggtcgctggtgccgtgaagctatgtaacagctttaacgagttgccaaaggaaaagtgggccgtggctacttccggtacaagagagatggcttccaagtggttcgctgttctaggcatcaagaagccaacatacttcatcactgctaacgatgtgaagaagggtaagcctaaccctgaaccatacctaaagggtagagaaggtctaggctacccaatcaacacacattaccctgagaagtctaaggttgtcgtctttgaagatgctccagctggtattgccgccggtaaagctgctggttgtaagatcatcggtatcgctaccactttctctgcctcttcgctgagagagaagggctgtgatatagtcattaaggatcacagatccgtcagggttgctggttacgacaaagagaccgacgaagtcatcctcgtattcgacgactatctatacgttagagatgatatccaaaagtggtag

SEQ ID NO: 3776 - protein, 247 aa, Candida glabrata CBS138
MPEPITLRVNAALFDVDGTIIISQPALAAFWRDFGKDKPYFDAEHVIHVSHGWRTYDAIAKFAPDFADEETVTKLEGEIPDKYGKEAIEVAGAVKLCNSFNELPKEKWAVATSGTREMASKWFAVLGIKKPTYFITANDVKKGKPNPEPYLKGREGLGYPINTHYPEKSKVVVFEDAPAGIAAGKAAGCKIIGIATTFSASSLREKGCDIVIKDHRSVRVAGYDKETDEVILVFDDYLYVRDDIQKW

SEQ ID NO: 3777 - DNA, 771 bp, Kluyveromyces lactis NRRL Y-1140
  CDS (1)..(771)
atgtctgctgctaccgcctctaacactgctcaacaacctatctctctaagagtcaacgctgctttgttcgacgttgatggtactttgatcatctctcaaccagctattgctgaattctggagagatttcggtaaggacaagccttacttcgactcccaacatgtcatcgatatctctcacggatggagaacatacgatgttatcaagcagttcgctccagattacgccaacgaagaatatgtcaccaagttggaaggtgaaatcccagaaaaattcggtcaacacgctatcgaagttccaggtgccagtaaattgtgtggtgaattgaacaagcttccaaaggaaaaatgggctgtcgccacctccggtacttacgaaatggctcacaaatggtttgacatcttgggaatcaagagaccttctaactttatcaccgctaacgatgtcaagaacggtaagcctcatccagaaccttatttaaagggcagaaacggtttgtcttacccaatcaacaaagaaaacccagccgcttcaaaggttattgtctttgaagatgctccagcaggtatcttggccggtaaagctgctggctgtaagatcgttggtattgccactactttcgacaaggaattcttgatcgaaaagggttgcgatatcgtcatcaaggaccacaccaagttgagagttgctgcctaccaccctgaaaccgatgaagttgaattcatctttgacgaatacttatatgccaaggatgatctacttgaatggtaa

SEQ ID NO: 3778 - protein, 256 aa, Kluyveromyces lactis NRRL Y-1140
MSAATASNTAQQPISLRVNAALFDVDGTLIISQPAIAEFWRDFGKDKPYFDSQHVIDISHGWRTYDVIKQFAPDYANEEYVTKLEGEIPEKFGQHAIEVPGASKLCGELNKLPKEKWAVATSGTYEMAHKWFDILGIKRPSNFITANDVKNGKPHPEPYLKGRNGLSYPINKENPAASKVIVFEDAPAGILAGKAAGCKIVGIATTFDKEFLIEKGCDIVIKDHTKLRVAAYHPETDEVEFIFDEYLYAKDDLLEW

SEQ ID NO: 3779 - DNA, 807 bp, Kluyveromyces lactis NRRL Y-1140
  CDS (1)..(807)
atgccttctattgctgttgactacgttcttttcgacttagatggcacattggtgagttccaccgatgcggctgaagaggcttggaataagctctgtgacaagtatggtgttgattattcaacactttctaaggtctcacatggttccagaactgcggagatcttagcgaagttctttcctaacgttgacaacactaataatcaggcagtcaaggaatttgaactttctattgccaatgattacatggatatcgtttgtttgattccaggttctatagatttactgatctcgttggatagaccaactggggcacaccctggtgaagttttccatcatagaaagtgggctgtagttaccagtggatcgccttgggttgctcatgcatggtttgacaacttgttaaaatccattaagaaaccagaggtattcattactgcttttgatgtttcaaagggtaaacctgacccagccggtttcgctctggccactaaacgtttgaaggaaatatggcaagatgacagaaaggaggtaagaacggtggttttcgaggatgcgcctgttggagttcaagctggtaaggccaatggctcaattgtagttgccttaaccagtacttatgataaggagttattatttgcagcgggcgcggattatgtggttgaagatttatcacaagtttgcttgcagtccaataataaagatgagactgttctaaccatcactgatccaatacctagaggtgaagaagcagaatatggtgatgacgatgatgacgatgatgacgatgatgataatgataacgaataa

SEQ ID NO: 3780 - protein, 268 aa, Kluyveromyces lactis NRRL Y-1140
MPSIAVDYVLFDLDGTLVSSTDAAEEAWNKLCDKYGVDYSTLSKVSHGSRTAEILAKFFPNVDNTNNQAVKEFELSIANDYMDIVCLIPGSIDLLISLDRPTGAHPGEVFHHRKWAVVTSGSPWVAHAWFDNLLKSIKKPEVFITAFDVSKGKPDPAGFALATKRLKEIWQDDRKEVRTVVFEDAPVGVQAGKANGSIVVALTSTYDKELLFAAGADYVVEDLSQVCLQSNNKDETVLTITDPIPRGEEAEYGDDDDDDDDDDDNDNE

SEQ ID NO: 3781 - DNA, 762 bp, Debaryomyces hansenii CBS767
  CDS (1)..(762)
atgacaattcaaaaacaaccagctgtcttctacgttaacgctgctttattcgactgtgacggaacgttagtcaattctaccggagctatttcagaattctggagagatttcggaaagactagacctcacgtcaacccagatgaaatcatcagcacctcgcacggatgtcgtacattcgatgtgattgcaaaatggtcaccagaagatgctattgaagaacaagtcaccgaatgggaaggatctattccagattcttttggtcaattcgctaagccaattcctggtgcagttgaattagtcaagtcttttgacaagttctccaagagcgaaactgaaaatggtaaacaaagatgggctattgtgacatctggtactttaccattggccaccaagtggttgaagttgttgaccatcgaaaaaccagactgtttcatcaccgctgaaaaggtcaccaagggtaagccacatccacaaggataccaatctgctagagagaccttaggttacaagggtgctcacaacaaggttgttgtcttcgaagatgctcctgctggtatcactgctggtaagggtgctggtgctttcattgttggtatctgttccacctacgacccagaaaaggttagaaaggctggtgctgacattgttgttgacgacttgacctcgttcagaatcgactcctacaacaaggaaaccgatgaattcaaggttattgtggatgactaccattacgccaacgacgaattcttgcaatccgtctaa

SEQ ID NO: 3782 - protein, 253 aa, Debaryomyces hansenii CBS767
MTIQKQPAVFYVNAALFDCDGTLVNSTGAISEFWRDFGKTRPHVNPDEIISTSHGCRTFDVIAKWSPEDAIEEQVTEWEGSIPDSFGQFAKPIPGAVELVKSFDKFSKSETENGKQRWAIVTSGTLPLATKWLKLLTIEKPDCFITAEKVTKGKPHPQGYQSARETLGYKGAHNKVVVFEDAPAGITAGKGAGAFIVGICSTYDPEKVRKAGADIVVDDLTSFRIDSYNKETDEFKVIVDDYHYANDEFLQSV

SEQ ID NO: 3783 - DNA, 726 bp, Debaryomyces hansenii CBS767
  CDS (1)..(726)
atgtctcataaaagtattatagctgatttcctattgttcgacttagatggtactcttgtaaattcaacacttgctgtagaaaagacatggattgaacaatgcaataatcataattcaacaaatgaagtacctatcgatgctgagattttattaaattcagcacatggaacaagaacggctgaaacaatcaaaagatggtttccttatttacaaaacgacaaagagtctattaatctttttgaaaaagccattgttacaaattatgggcatttagcggaagaggtcaagggtgcaacacatttgatcgatagtataaataagtttggaagtaatcagtgggctataataacttctggtactaaagatttagcatatgggtggtttgaaaaattatttgtaaattctggcaagccaaaggttttcattactgcaaatgatgtttcgcaaggtaagccgaatcccgaaggctacttggaggcatttagtcaattaaaagagacaaacaaactagttggtcatgaattttctgctgttgttttcgaagacgccccggtgggtattcaagcgggtattgctgcagggtttcatgttattgggattgcaactacttttgataaggatactttaataaacgcaggatcatcatttgtagtcgaagatttgtcaaaaatacacattacgaaaactacttcaacatcattccaattagatttggatatattataa

SEQ ID NO: 3784 - protein, 241 aa, Debaryomyces hansenii CBS767
MSHKSIIADFLLFDLDGTLVNSTLAVEKTWIEQCNNHNSTNEVPIDAEILLNSAHGTRTAETIKRWFPYLQNDKESINLFEKAIVTNYGHLAEEVKGATHLIDSINKFGSNQWAIITSGTKDLAYGWFEKLFVNSGKPKVFITANDVSQGKPNPEGYLEAFSQLKETNKLVGHEFSAVVFEDAPVGIQAGIAAGFHVIGIATTFDKDTLINAGSSFVVEDLSKIHITKTTSTSFQLDLDIL

SEQ ID NO: 3785 - DNA, 711 bp, Aspergillus nidulans FGSC A4
  CDS (1)..(711)
atggctgccacgggctcattctctgcccctccacaagtactcacatttgatggtcttctatccgactttgatggcaccatcgttgattcgacggatgctatcgtaaagcactggcataaaatcggtgctgaactcggtgtcgacccgaagacaattttggctacatctcacggccgccgaagtattgatactctacagctgtatgaccccgcaaaagccaactgggaatacgtcagctacatcgagggactcatccccaaagagtacggttctgacgctattgaaatccccggcgcgcggtccatccttgctgccctcgaagagaccggcgcaacctggggcgttgtgacgtcggggacgcgcgcgctcattgacggctggctgggtgttctcaagctcacacatccagatgtcctcgttgttgcggaggatgtagaactcgggaagccagatccgcgatgctacctgcttggacgaaagaaaatgggtctagaacattcctcctcgatagtggtgctggaggatgcgccgtcaggcataaaggctggcaaggcagccggtttcactgtcattgctttgaccaccactcacactttggagcagcttcaagcggctggggcggacgtgatagtggaggatttgaggagtattagcgtaaagggtgttgttgacgggcgtgttcagttggaggttcggaatgccttccaatag

SEQ ID NO: 3786 - protein, 236 aa, Aspergillus nidulans FGSC A4
MAATGSFSAPPQVLTFDGLLSDFDGTIVDSTDAIVKHWHKIGAELGVDPKTILATSHGRRSIDTLQLYDPAKANWEYVSYIEGLIPKEYGSDAIEIPGARSILAALEETGATWGVVTSGTRALIDGWLGVLKLTHPDVLVVAEDVELGKPDPRCYLLGRKKMGLEHSSSIVVLEDAPSGIKAGKAAGFTVIALTTTHTLEQLQAAGADVIVEDLRSISVKGVVDGRVQLEVRNAFQ

SEQ ID NO: 3787 - DNA, 765 bp, Candida albicans SC5314
  CDS (1)..(765): transl_table=12
atgacaaagactcaacaaccagctgttttttacgttcacgccgctttatttgactgtgatggtactttggttaactccactggtgctatttctgaattctggagagatttcggaaaaactagacctcatgttgatccagaagaaattatcagaacttcccatggttgccgtacatttgatgtcattgccaaatggtcaccagaagatgcaattgaagaacaagtcactgcatgggaaggtgctattcctgacacttttggccaccacgccaagccaattccaggttccgttgaattggtaaaatcattcgataaactttctaaagaagctactgaaaatggtaaacaaagatgggctgttgtcacttctggtactttgccattagccaccaaatggttgaaattattgtctattgaaaggccagactgttttataaccgctgaaaaagtgactaaaggtaaaccacatccacaaggttaccaagctgctagagatactttgggataccatgacgcccactacaaagttgttgtgtttgaagacgctccagctggtataaccgcaggtaaaggtgctggcgccatggttgtcggtatttgctcaacttacgatcctgaaaaagttagaaaatcaggtgctaacattgttgtcaaagatttatccagctttagaatcgactcatacaacaaggaaactgacgaattcaaggttgttgttgatgattatttctacgctgatgagcaatttttacaagaatctgcttaa

SEQ ID NO: 3788 - protein, 254 aa, Candida albicans SC5314
MTKTQQPAVFYVHAALFDCDGTLVNSTGAISEFWRDFGKTRPHVDPEEIIRTSHGCRTFDVIAKWSPEDAIEEQVTAWEGAIPDTFGHHAKPIPGSVELVKSFDKLSKEATENGKQRWAVVTSGTLPLATKWLKLLSIERPDCFITAEKVTKGKPHPQGYQAARDTLGYHDAHYKVVVFEDAPAGITAGKGAGAMVVGICSTYDPEKVRKSGANIVVKDLSSFRIDSYNKETDEFKVVVDDYFYADEQFLQESA

SEQ ID NO: 3789 - DNA, 714 bp, Aspergillus fumigatus Af293
  CDS (1)..(714)
atggcccattccgaaggctcattttctgcccctccacaagcccatacttttgatggactcttgtccgatttcgatggaacgatagtcgattcgacggatgcgatcgtcaagcactggcacagaatcggcgccgagctaggcgtggaccccaagaccatcctcgccacatcccacggccgaaggagtatcgataccatcaagctgtatgacccctccaaggccaactgggaatacgtcagctacatagaaggccgtatccccaaagagtacggttccgacgccgtcgagatccccggtgccagaaccctcctcaacgcgctggacgaatccggagcacgctggggcgtcgtgacatccggcacccgcgctctcgtcgacggctggctgggtgtcctcaacctcaaacatcccaaggtgctggttgtcgcggaggacgtcgagctgggcaagcccgatcccgggtgctacctgcttggccggtcacggctgaacctggagcactccacgtcccttgtggtgctagaagatgcgccctcgggtatccgggcgggcaaggccgccggtttcaaggtgattgcgctgacgacgacacacactctcgagcagtgtcgggaggccggggcggattggattgtcgaggacttgaggagcatttcggtgaagggcgtcgaggacgggaagcttcagttggaaatcaggaatgcattccaataa

SEQ ID NO: 3790 - protein, 237 aa, Aspergillus fumigatus Af293
MAHSEGSFSAPPQAHTFDGLLSDFDGTIVDSTDAIVKHWHRIGAELGVDPKTILATSHGRRSIDTIKLYDPSKANWEYVSYIEGRIPKEYGSDAVEIPGARTLLNALDESGARWGVVTSGTRALVDGWLGVLNLKHPKVLVVAEDVELGKPDPGCYLLGRSRLNLEHSTSLVVLEDAPSGIRAGKAAGFKVIALTTTHTLEQCREAGADWIVEDLRSISVKGVEDGKLQLEIRNAFQ

SEQ ID NO: 3791 - DNA, 849 bp, Ustilago maydis 521
  CDS (1)..(849)
atggtcaagacagtcagcgtcgaggtcgacaccatcctgtttgacatggatggcacgttgatcgattccacccctgctgtaaatgccacatgggcttcatttgcgcagcaatacaatctcgacctgtcctttgtcatgcaaacgtgccacggctaccgaacggttgagaatcttcgacgattcatcccatcgatctcggatgctgagttgcccaaagaagtggaacggttcgagtccaacattttggttgttgcaaagcagaatgcggcgaaagggcaaggtggatcgattgttgctatgcctggagccaaggagttgctggatcagatcaattcgggacgtccggatgctgcggtagagaaaggcaactacggctgggctatagttaccagtgcaaccaaggcgtacgcacaacaaggttttgcaagtgccggtgtgagcagtccgcccgaggtattcattacctcggacctttgcacaaaaggcaagcctgatccacaaccataccttatgggcgccgagaagaccggccaagatatcagtcgctgtcttgtcgtagaagatgcgccaccgggcgtacgtgcaggcaagcgtgcaggcgccaaaaccctcgcattgagaaccacccatgacggcgaaaaaatgcaacaagaaggcgccgactacatcgtcgaagatctacgaagcgtacaggccaagtggaaacacgatggaagcggactcgtcttaacaatccaagcagagcaacccgagaaaggcgaggcaaaaggtatctccgagttggcgaaacagattcagttgcagaacgatcccacctcaaacacccacgccgtcaacggtcagccgtag

SEQ ID NO: 3792 - protein, 282 aa, Ustilago maydis 521
MVKTVSVEVDTILFDMDGTLIDSTPAVNATWASFAQQYNLDLSFVMQTCHGYRTVENLRRFIPSISDAELPKEVERFESNILVVAKQNAAKGQGGSIVAMPGAKELLDQINSGRPDAAVEKGNYGWAIVTSATKAYAQQGFASAGVSSPPEVFITSDLCTKGKPDPQPYLMGAEKTGQDISRCLVVEDAPPGVRAGKRAGAKTLALRTTHDGEKMQQEGADYIVEDLRSVQAKWKHDGSGLVLTIQAEQPEKGEAKGISELAKQIQLQNDPTSNTHAVNGQP

SEQ ID NO: 3793 - DNA, 654 bp, Thermus thermophilus HB27
  CDS (1)..(654): transl_table=11
gtgcttaagtccgtgcttaaggcggtcctctttgacctggacggcaccctggcggacaccgaccccctgcacctcctcgcctggcgggaggtcctggcgccctacggcctcaaggtggaccccgccttctaccgggaaaggatctcggggaggctgaacccggagatcgtccgcgacctcctgggcctggagggcaaggaggcggaaaggctcatcgcggccaaggaggcccgcttccgggccctcgcccaggggctaaggcccaccccggggcttccggaatttttggagcgaatcagggaaaaggggctcctctggggcgtggtgaccaacgcccccaaggaaaacgcccgccacgtcctcgaggccctgggcctgaggccgcccctcctggtcctggcggaggaggtgggccgggggaagcccgaccccctcccctaccaactggccctaaggcgcctcggggtggcccccgaggaagccctggcctttgaggactccccttccggggtgagaagcgccgtgggggcggggatccccacctacggcctcctcacggggcacgaggcggaggccctaattcgggagggggcgtctggggtgattagaaattttaccgagtttgcctggcctgagtatacttccgaaaaataa

SEQ ID NO: 3794 - protein, 217 aa, Thermus thermophilus HB27
MLKSVLKAVLFDLDGTLADTDPLHLLAWREVLAPYGLKVDPAFYRERISGRLNPEIVRDLLGLEGKEAERLIAAKEARFRALAQGLRPTPGLPEFLERIREKGLLWGVVTNAPKENARHVLEALGLRPPLLVLAEEVGRGKPDPLPYQLALRRLGVAPEEALAFEDSPSGVRSAVGAGIPTYGLLTGHEAEALIREGASGVIRNFTEFAWPEYTSEK

SEQ ID NO: 3795 - DNA, 675 bp, Erwinia carotovora subsp. atroseptica SCRI1043
  CDS (1)..(675): transl_table=11
atgaaaaaggggctttctgtggagtgtaaaggttttctgttcgacctcgatggtacgctagttgattcactgcctgctgtagaacgcgcgtggattaactgggcaaaagatcacgatattgaaccacaggaagtgctcgactttattcatggtaagcaggcaattacgtccttgcgtcactttcttcaggggcagagcgaagaaacgattcaacaggagtttgatgcgctggagaaaacagaggcttctgatacgcaaggtattgttgccatgcctggagcgaaggcgctgttggaacgtttagatgcgctggatatcccctgggcaattgtgacatctggcacggtgccaattgccagcgcacgtcatcaacgcggagaactacccgcacctcgcgcctttattacggcggagcaagtcgccaaaggcaagccgaatcctgatgcttatttacttggcgcacagcagttagggctgaagccggaagagtgtgtggtcgttgaggatgcgccagcgggcgtgctatcgggtctggcggctggctgcaaagtcatcgcggtgaaagcgccagcggatacgccgaaactggatcaggtcgatctgattcttgattcgctggagcagatagaaatagaacaattaccgaacggcgctaaggtgcttctgcgccagtag

SEQ ID NO: 3796 - protein, 224 aa, Erwinia carotovora subsp. atroseptica SCRI1043
MKKGLSVECKGFLFDLDGTLVDSLPAVERAWINWAKDHDIEPQEVLDFIHGKQAITSLRHFLQGQSEETIQQEFDALEKTEASDTQGIVAMPGAKALLERLDALDIPWAIVTSGTVPIASARHQRGELPAPRAFITAEQVAKGKPNPDAYLLGAQQLGLKPEECVVVEDAPAGVLSGLAAGCKVIAVKAPADTPKLDQVDLILDSLEQIEIEQLPNGAKVLLRQ

SEQ ID NO: 3797 - DNA, 714 bp, Leifsonia xyli subsp. xyli str. CTCB07
  CDS (1)..(714): transl_table=11
atgcagcagctgaccgcggccggattcctcttcgatatggacggcactctcgtcgactccacccccgtcgtggaggcggtgtggaccgagttcagccgggcgaacggcctcgaccccgccgaggttctcgggtacgcgcacggccgtcaggcgatcgacaccctggcacgcttcctcccgcagcgttcccctgccgagcgcggcgaactcctctccgcccttgtcgccgaggaggtcgcccgcaccgagggcatcgtggaggtgcccggggccggggcgctcctgaccgcgctgatcggcgccggcgcccccgtcgccgtggtcaccagcgcaccgcgcgagctggccgttgcccggatgacggcggcgggtgtcccggtcccgcctgtcctggtggcggcggaggacgtcgagcgcggcaagcccgacccgcaggcctacctgctggctgccgagagactgggcgttcccgctgcgtcctgcttcgccttcgaggacgcgccggccgggctggccgccgctgtcgcctccggtgcgtgtgtggtcgtcgtcggcgtgtacgagtccgccgtgagcgaggggctcggacgggtcctcgactacgtgggtgagctctcggtcaccgaggccggaggagagtggagcaccggccttgtcgccgcatccacgacaccggctgcgcgcacggcggcaggccagccctcggcgcggtag

SEQ ID NO: 3798 - protein, 237 aa, Leifsonia xyli subsp. xyli str. CTCB07
MQQLTAAGFLFDMDGTLVDSTPVVEAVWTEFSRANGLDPAEVLGYAHGRQAIDTLARFLPQRSPAERGELLSALVAEEVARTEGIVEVPGAGALLTALIGAGAPVAVVTSAPRELAVARMTAAGVPVPPVLVAAEDVERGKPDPQAYLLAAERLGVPAASCFAFEDAPAGLAAAVASGACVVVVGVYESAVSEGLGRVLDYVGELSVTEAGGEWSTGLVAASTTPAARTAAGQPSAR

SEQ ID NO: 3799 - DNA, 663 bp, Yersinia pseudotuberculosis IP 32953
  CDS (1)..(663): transl_table=11
gtgcttgtggagtgtaaaggttttctttttgatttagatgggacgttggttgattcactacctgttgttgaacgtgcctggattggctgggcgcaacgtcgaggcgttaatccatcaaaagttctggattttattcatggtaaacaagcgattacctctttgcgtcattttatgccgggtgccagtgaagctgaaattcaggacgagtttctggcattagagcaaattgaagccaatgatacggagggggtaactgcgctaccaggggcggtggcactgttgacccggttgaatgaactggctattccgtgggcgatagtgacttcaggttcgatacctgttgcctcagctcgccgggcggcaggttgtttgccagagccgaaagtgtttgtgaccgccgaattggtgaagcagggtaaacctgcgcccgatgcctatttattaggggccgaacgtttaggccttgcccctgcggattgtattgtggtggaagatgcccccgccgggatcctttcggggctagcggccggttgtcaggtgatcgcggttaatgcaccaacagataccccaaaactcgatcaggttgatctggtgcttcactcactggagcaattggtggtagacgccactgctcatggtgcggtggttcggttactgccttaa

SEQ ID NO: 3800 - protein, 220 aa, Yersinia pseudotuberculosis IP 32953
MLVECKGFLFDLDGTLVDSLPVVERAWIGWAQRRGVNPSKVLDFIHGKQAITSLRHFMPGASEAEIQDEFLALEQIEANDTEGVTALPGAVALLTRLNELAIPWAIVTSGSIPVASARRAAGCLPEPKVFVTAELVKQGKPAPDAYLLGAERLGLAPADCIVVEDAPAGILSGLAAGCQVIAVNAPTDTPKLDQVDLVLHSLEQLVVDATAHGAVVRLLP

SEQ ID NO: 3801 - DNA, 729 bp, Bacteroides fragilis YCH46
  CDS (1)..(729): transl_table=11
atgtttcaggaagcaattgcgcaatatctcaagcaaaatcattatgaatctatccaactgaaatccgtgcttttcgatatggacggcgtacttttcgactccatgccttatcatgccgaagcatggcacaagaccatgaaggcccatgggctgaatttaagtcgggaagaagcttacatgcacgaaggccgtacgggggccggaactatcaacatcgtatgtcaacgtcaattgggacgtgacgccactcaagaagaaatagagagtatttatctcgaaaagagcatcgaattcaacaagcatccccaagccgaacgcatgccgggtgcatgggaattactacaaaaaatcaaagcggaaggtatcatcccgaccgtggttaccggttccggacaagcctcactgctggatagactcgagcataactttccgggaatgtttcgtcaggaattgatggtgactgccttcgatgtcaaatacggaaagccgaatccggaaccctatctgatggcattggaaaaaggaggattgaaacctaatgaagctattgtcatcgaaaatgcccctttaggtgtagaagccggacataaagccggaatattcaccattgctgtcaacaccggacctctgaacggggaaatactactgaatgccggtgccgatttattattcccttcaatgcaagccttatgtgaatcctgggagaaattagtccggctcctacattaa

SEQ ID NO: 3802 - protein, 242 aa, Bacteroides fragilis YCH46
MFQEAIAQYLKQNHYESIQLKSVLFDMDGVLFDSMPYHAEAWHKTMKAHGLNLSREEAYMHEGRTGAGTINIVCQRQLGRDATQEEIESIYLEKSIEFNKHPQAERMPGAWELLQKIKAEGIIPTVVTGSGQASLLDRLEHNFPGMFRQELMVTAFDVKYGKPNPEPYLMALEKGGLKPNEAIVIENAPLGVEAGHKAGIFTIAVNTGPLNGEILLNAGADLLFPSMQALCESWEKLVRLLH

SEQ ID NO: 3803 - DNA, 627 bp, Thermus thermophilus HB8
  CDS (1)..(627): transl_table=11
gtgcttaaggcggtcctctttgacctggacggcaccctggccgacaccgaccccctgcacctcctcgcctggcgggaggtcctggcgccctacggcctcaaggtggaccccgccttctaccgggaaaggatctcggggaggctgaacccggagatcgtccgcgacctcctgggcctggagggcaaggaggcggaaaggctcatcgcggccaaggaggcccgcttccgggccctcgcccaggggctaaggcccaccccggggcttccggaatttttggagcgaatcagggaaaaggggctcctctggggcgtggtgaccaacgcccccaaggaaaacgcccgccacgtcctcgaggccctgggcctgaggccgcccctcctggtcctggcggaggaggtgggccgggggaagcccgacccccttccctaccaactggccctaaggcgcctcggggtggcccccgaggaagccctggcctttgaggactccccttccggggtgagaagcgccgtgggggcggggatccccacctacggcctcctcacggggcataagggggaggctcttttgcaggcgggagccaagggggtgttccgggacttccgggaagccctaggcctcctttag

SEQ ID NO: 3804 - protein, 208 aa, Thermus thermophilus HB8
MLKAVLFDLDGTLADTDPLHLLAWREVLAPYGLKVDPAFYRERISGRLNPEIVRDLLGLEGKEAERLIAAKEARFRALAQGLRPTPGLPEFLERIREKGLLWGVVTNAPKENARHVLEALGLRPPLLVLAEEVGRGKPDPLPYQLALRRLGVAPEEALAFEDSPSGVRSAVGAGIPTYGLLTGHKGEALLQAGAKGVFRDFREALGLL

SEQ ID NO: 3805 - DNA, 678 bp, Salmonella enterica subsp. enterica serovar Paratyphi A str. ATCC
  CDS (1)..(678): transl_table=11
atgcctgaggaggctcgcgtgcagtgtaaaggttttctgtttgatctggatggaacgttggttgactcattacctgccgtcgaacgcgcgtggtgtagctgggccgatcgttttaaccttgctcatgatgaggtgctgggctttattcatggcaaacaggcgatcacctcgttgcggcattttatggcgggtaaatcggaggcgaaaattgccgctgagtttacgcgcctggagcaaatagaagccactgaaaccgcagggatcaccgcgttgccgggggcagtcgatttactcaatcacctgaataaagcgggcattccgtgggctatcgtcacctccggttcaatgccggtcgcgcgtgcgcgccatcaggtcgcgggccttccagcgccagaggtgtttgtcaccgccgaacgagtcaaacgcggcaaaccggagccggatgcgtatttgctgggcgcacaactgcttggcctggcccctcaggagtgcgtcgtagtagaagatgccccggctggcgtgctgtccggactggctgcgggctgccacgtcattgcggtcaatgcgccggccgacacgccgcgtctggcggatgttgattttgcgttggatagcctgacgcaattatcggtcgctaaacaaccaaacggcgatgtggtggtgttaagaaagacctga

SEQ ID NO: 3806 - protein, 225 aa, Salmonella enterica subsp. enterica serovar Paratyphi A str. ATCC
MPEEARVQCKGFLFDLDGTLVDSLPAVERAWCSWADRFNLAHDEVLGFIHGKQAITSLRHFMAGKSEAKIAAEFTRLEQIEATETAGITALPGAVDLLNHLNKAGIPWAIVTSGSMPVARARHQVAGLPAPEVFVTAERVKRGKPEPDAYLLGAQLLGLAPQECVVVEDAPAGVLSGLAAGCHVIAVNAPADTPRLADVDFALDSLTQLSVAKQPNGDVVVLRKT

SEQ ID NO: 3807 - DNA, 642 bp, Bacillus clausii KSM-K16
  CDS (1)..(642): transl_table=11
atgaccattaatacgttgctatttgatttggatgggacattgatagatacaaatgaattgattatccaatcttttctccatacattggaaccagattttccaggtgtctatacccgggaaacggtgttgccatttatcggtcccccgcttgtagacagcttttcacgcattgatgcttcccgtgccgaaaaatgggttcgcacataccgtgattttaaccatcaacaacatgatgcgcttgtaaaggaatacccaggtgtaaaaacaggcatccaaacactgcataaacaaggttacaagctagcggtcgtgacgactaaaatcagggaaaccgcgcaaatgggcttagagttgatggggctttccccgtactttgatgtaatcgtcgccttggacgatgtaaaacatgcaaaaccgcatcccgatccattattggaagctcttaggcaacttgattcaaaacctgaagaagcgatcatggttggtgacaattcacacgacgtattggcaggaaaagcagcaggtacgaaaacggttgcggttggctgggcattaaaaggcgctgagcatttgcgcacatttgcgccagattacataccagcaacgatggaagagctggttgaaatcgtgaatcgcctgtga

SEQ ID NO: 3808 - protein, 213 aa, Bacillus clausii KSM-K16
MTINTLLFDLDGTLIDTNELIIQSFLHTLEPDFPGVYTRETVLPFIGPPLVDSFSRIDASRAEKWVRTYRDFNHQQHDALVKEYPGVKTGIQTLHKQGYKLAVVTTKIRETAQMGLELMGLSPYFDVIVALDDVKHAKPHPDPLLEALRQLDSKPEEAIMVGDNSHDVLAGKAAGTKTVAVGWALKGAEHLRTFAPDYIPATMEELVEIVNRL

SEQ ID NO: 3809 - DNA, 663 bp, Bacteroides fragilis NCTC 9343
  CDS (1)..(663): transl_table=11
atgtttatggatgcaacaaagaaaataacggcattattcgattgtgatggtgtaattgtcgatacagaagggcagtataccgttttctggaatgaaatgggccaaaagtatgtaaatgatgcaaactttggttccaaggttaagggccagacactggtacagatttatgataaatactttgcaggagaaccggaaaaacagcgggatataaccgaggcattgaaccgctttgaaataaaaatgaattatgactatgttcccggaatagttgagtttatagcagatctgcgtcggcatggtgtgaaaatagctttggttaccagttccaatacggcaaaaatggagaatgtttatcatgcccatcccgagtttaaatccctttttgatgaaatattgactgcagagcgttttaagcgttctaagcctgatcctgaatgtttcttgttgggaatgacaattttcggttccgattcaaaagattcgtatgtgttcgaagattcatttcatggtttgcaggccggtagatcatccggagccattgttgtcggattggcaactacgaattcacgcgaagccattgccgacaaggcagactatgtaatagacgatttcagagggatgacttacgaaaaactgctgactataacttcacgttatatctga

SEQ ID NO: 3810 - protein, 220 aa, Bacteroides fragilis NCTC 9343
MFMDATKKITALFDCDGVIVDTEGQYTVFWNEMGQKYVNDANFGSKVKGQTLVQIYDKYFAGEPEKQRDITEALNRFEIKMNYDYVPGIVEFIADLRRHGVKIALVTSSNTAKMENVYHAHPEFKSLFDEILTAERFKRSKPDPECFLLGMTIFGSDSKDSYVFEDSFHGLQAGRSSGAIVVGLATTNSREAIADKADYVIDDFRGMTYEKLLTITSRYI

SEQ ID NO: 3811 - DNA, 663 bp, Bacteroides fragilis NCTC 9343
  CDS (1)..(663): transl_table=11
gtgcttttcgatatggacggcgtacttttcgactccatgccttatcatgccgaagcatggcacaagaccatgaaggcccatgggctgaatttaagtcgggaagaagcttacatgcacgaaggccgtacgggggccggaactatcaacatcgtatgtcaacgtcaattgggacgtgacgccactcaagaagaaatagagagtatttatctcgaaaagagcatcgaattcaacaagcatccccaagccgaacgcatgccgggtgcatgggaattactacaaaaaatcaaagcggaaggtatcatcccgaccgtggttaccggttccggacaagcctcactgctggatagactcgagcataactttccgggaatgtttcgtcaggaattgatggtgactgccttcgatgtcaaatacggaaagccgaatccggaaccctatctgatggcattggaaaaaggaggattgaaacctaatgaagctattgtcatcgaaaatgcccctttaggtgtagaagccggacataaagccggaatattcaccattgctgtcaacaccggacctctgaacggggaaatactgctgaatgccggtgccgatttattattcccttcaatgcaagccttatgtgaatcctgggagaaattagtccgactcctacattaa

SEQ ID NO: 3812 - protein, 220 aa, Bacteroides fragilis NCTC 9343
MLFDMDGVLFDSMPYHAEAWHKTMKAHGLNLSREEAYMHEGRTGAGTINIVCQRQLGRDATQEEIESIYLEKSIEFNKHPQAERMPGAWELLQKIKAEGIIPTVVTGSGQASLLDRLEHNFPGMFRQELMVTAFDVKYGKPNPEPYLMALEKGGLKPNEAIVIENAPLGVEAGHKAGIFTIAVNTGPLNGEILLNAGADLLFPSMQALCESWEKLVRLLH

SEQ ID NO: 3813 - DNA, 699 bp, Salmonella enterica subsp. enterica serovar Choleraesuis str
  CDS (1)..(699): transl_table=11
atgaaatcaatcaaatcattaatgcctgaggaggctcgcgtgcagtgtaaaggttttctgtttgatctggatggaacgttggttgactcattacctgccgttgaacgcgcgtggtgtagctgggccgatcgttttaaccttgctcatgatgaggtgctgggctttattcatggcaaacaggcgatcacctcgttgcggcattttatggcgggtaaatcggaggcggaaattgccgctgagtttacgcgcctggagcaaatagaagccactgaaaccgcagggatcaccgcgttgccgggggcagtcgatttactcaatcacctgaataaagcgggcattccgtgggctatcgtcacctccggttcaatgccggtcgcgcgtgcgcgccatcaggtcgcgggccttccagcgccagaggtgtttgtcaccgccgaacgagtcaaacgcggcaaaccggagccggatgcgtatttgctgggcgcacaactgcttggcctggcccctcaggagtgcgtcgtagtagaagatgccccggctggcgtgctgtccggactggctgcgggctgccacgtcattgcggtcaatgcgccggccgacacgccgcgtctggcggatgttgattttgcgttggatagcctgacgcaattatcggtcgctaaacaaccaaacggcgatgtggtggtgttaagaaagacctga

SEQ ID NO: 3814 - protein, 232 aa, Salmonella enterica subsp. enterica serovar Choleraesuis str
MKSIKSLMPEEARVQCKGFLFDLDGTLVDSLPAVERAWCSWADRFNLAHDEVLGFIHGKQAITSLRHFMAGKSEAEIAAEFTRLEQIEATETAGITALPGAVDLLNHLNKAGIPWAIVTSGSMPVARARHQVAGLPAPEVFVTAERVKRGKPEPDAYLLGAQLLGLAPQECVVVEDAPAGVLSGLAAGCHVIAVNAPADTPRLADVDFALDSLTQLSVAKQPNGDVVVLRKT

SEQ ID NO: 3815 - DNA, 684 bp, Brucella abortus biovar 1 str. 9-941
  CDS (1)..(684): transl_table=11
gtgacctccttttcccctttcggcaaatccttcgatgcatttcttttcgatatggacggcacgatattgagttccatcgcagcgacggagcgcgtatggagcgaatgggcaaggcgccatggtatcgatcccgtgacattcctgccgaccattcatggcgtgcgcgccgttgaaaccgtgcgccgccttgcgcttccgggcgttgacccaatccgggaagctgaaattctgctggaagccgaaatggccgatctggatggcattgcaccgatcgagggggcctatgaatttctgcattcgctaccggaaaaccgctgggccatcgtgacttcggctccgctcgaacttgcgcgccgccgcatcaaggccgccgggttgcccatgccgaaaacaatcgtttccgccgaagacgtggaacgcggcaagccaagccccgaatgtttcgagctgggcgcaaaacggctgggctttgcgccgcgtgattgccttgttttcgaggatgcaccggcaggcatcgtggcaggagaaaccgcgggcgcaagcgtggttgtcgtcacagccacgcatccgcattcaccccggacctcgcatttgagcatagaaagctatcgctatcttcaactcaccatcgaagaaagcggaaaactcagcctgagcccgacagtgccagcatcagttggctaa

SEQ ID NO: 3816 - protein, 227 aa, Brucella abortus biovar 1 str. 9-941
MTSFSPFGKSFDAFLFDMDGTILSSIAATERVWSEWARRHGIDPVTFLPTIHGVRAVETVRRLALPGVDPIREAEILLEAEMADLDGIAPIEGAYEFLHSLPENRWAIVTSAPLELARRRIKAAGLPMPKTIVSAEDVERGKPSPECFELGAKRLGFAPRDCLVFEDAPAGIVAGETAGASVVVVTATHPHSPRTSHLSIESYRYLQLTIEESGKLSLSPTVPASVG

SEQ ID NO: 3817 - DNA, 669 bp, Thermobifida fusca YX
  CDS (1)..(669): transl_table=11
atgaccgttgagcagcaacttccgcaggcggtgctgttcgatatggacggcacgctgatcgacaccgagccgctgtggatcgccacggaggccgaggtcgccgccgaactcggctgtaccacgtggacggtcgaggaccagcggcgctgcttggggagctccgcggcgatggtggcctcctacatcgctgagcgctcggggacgtcggttccgcagagtgagatcgtcaccatgctgtacacgtcggtggcgcggcggatggccgacagtccccccgtgcagccgggcgctaaggagctgctcagcgaactggatgccctgggggtgccgatggcgctggtcacttccacgtaccggtcgctgctgggcacggcactgcgcggtctgggggagcactatttcgcggcgacggtggccggggacgaagtgtcccaggccaagccgcacccggagccttatctcacggcggcacgcctgctgggtgtggatccgcgccgctgtgtggcggtggaggattcgcccgctggcgtggctgcggcccaagccgcagggtgtgtcgtggtcgcggtgccgcatgtggctccgatcgaggaggcggagcggcggtatgtggtctcttccctgacggagatcagcgtggactggctacgacaagtggtcaactcgtga

SEQ ID NO: 3818 - protein, 222 aa, Thermobifida fusca YX
MTVEQQLPQAVLFDMDGTLIDTEPLWIATEAEVAAELGCTTWTVEDQRRCLGSSAAMVASYIAERSGTSVPQSEIVTMLYTSVARRMADSPPVQPGAKELLSELDALGVPMALVTSTYRSLLGTALRGLGEHYFAATVAGDEVSQAKPHPEPYLTAARLLGVDPRRCVAVEDSPAGVAAAQAAGCVVVAVPHVAPIEEAERRYVVSSLTEISVDWLRQVVNS

SEQ ID NO: 3819 - DNA, 714 bp, Thermobifida fusca YX
  CDS (1)..(714): transl_table=11
atgggcttgaggacaaccgagagcgagtgggcgacgccgcgcgcggccctgttcgacctcgacggaactctcatcaacagcgaaccgcggagtgtggcggtgtgggccagggtgctccaggaccgcggggtcgaaccggacgaggcgctgctgtgcaagttcatggggcggcgcggcgaagacgtgatcaacgagctcgcccacctgttcccgggcgagtccgtggaggacatcttcgctgaccgctggcgctacggccaggatccggacctgcccccggtggagcagctgcccgagtccgtggcgtttctgaagtacctacacgcccagggagtgccgtttgcgttggtgacctcggccgggcggcagtgggcagaaagcaccctggaatggctgggggtccgcgacatgttccgcgggatcatctctgcggacgatgtcacggtcggcaaaccgcaccctgaggggtatctcagcggagccgagcttgtcggctacggccccgagcacatcgtggtgttcgaggacaccccggcggggatcatggcggggcgcaacgcggggatgcgggtcgtcggagtcacgacgacgcatccgccgcaggcgctggcccacgcccatctcgtcgtggagcatctgggacaggtgggctggccgcagttggttttgcgggatccggagccgccccagactgctctggcaggtcaagggtga

SEQ ID NO: 3820 - protein, 237 aa, Thermobifida fusca YX
MGLRTTESEWATPRAALFDLDGTLINSEPRSVAVWARVLQDRGVEPDEALLCKFMGRRGEDVINELAHLFPGESVEDIFADRWRYGQDPDLPPVEQLPESVAFLKYLHAQGVPFALVTSAGRQWAESTLEWLGVRDMFRGIISADDVTVGKPHPEGYLSGAELVGYGPEHIVVFEDTPAGIMAGRNAGMRVVGVTTTHPPQALAHAHLVVEHLGQVGWPQLVLRDPEPPQTALAGQG

SEQ ID NO: 3821 - DNA, 645 bp, Methanosarcina barkeri str. fusaro
  CDS (1)..(645): transl_table=11
atgttaaaagcaataatttttgatgtggacggagttcttatagattccatgaattttcaggccgaggcctgggttaaaaccttcaaggaaatcggtattaacattactagaaaagatatttatgagcttgaaggctcaaacaataagagattaattaaatcaattttcgaaaagtccggaaaagagcttgagccctggtatttcgaaaaactgcctgaaaagaaacgtgaagttctcgagtttgatcggataaagccttatgaaggtatccaagactgcattaaggcattgaaacggcatttcaagctcgctctggtctcagggtcacatactgatacagtaaataaagttgtcaataagtatttctctaaatgttttgacgtcataattaccgggagtgaccttgagcacggaaaaccggacccggacccttacctcaaagcccttgaaaaacttgacctgacaaaaaacgagtgcatggtaattgaaaatgcacctctggggataactgccgccaagagggcagggctttactgtgttgcagttacgggtatgcttgagcctgaaaagatagaacatgcggatctcgtgctcgaaaaccatgctgcccttttcaagtatctaaagaatctcattccaaagtga

SEQ ID NO: 3822 - protein, 214 aa, Methanosarcina barkeri str. fusaro
MLKAIIFDVDGVLIDSMNFQAEAWVKTFKEIGINITRKDIYELEGSNNKRLIKSIFEKSGKELEPWYFEKLPEKKREVLEFDRIKPYEGIQDCIKALKRHFKLALVSGSHTDTVNKVVNKYFSKCFDVIITGSDLEHGKPDPDPYLKALEKLDLTKNECMVIENAPLGITAAKRAGLYCVAVTGMLEPEKIEHADLVLENHAALFKYLKNLIPK

SEQ ID NO: 3823 - DNA, 705 bp, Arthrobacter sp. FB24
  CDS (1)..(705): transl_table=11
atgagctttcaccccgacgcccccgcagcggtcaccgcggcttcgtccgctgccatcgtcaccgcccgtgccgtcctgttcgacatggacggcaccctcgttgattccacggccgtcgtggagcaggtgtggggtgaattcgccgtgcgttacggcctggacatcgccgagatcctccgcacctcccatggcgtccaggcaggggacacagtgcggcgatttgcgcccgccggcgccgacgttgccgccctgaccgcggaactgggcgccatggagcgggtccggacagagggcattgtggcgttgcccggggcggccgacctgctgcgcagcctcccggcggatgccgtggcgctagtgacttcagccgaccggatcctggccgatatccgaatgggcgccgcgaagcttgccatgccggccacagccgtcacggcagatctcgtcacccggggcaagccgcatccggaaggttacctccgcgccgcagaactgctcggcgtggagccggccgatgccctggtctttgaggatgccccggcaggcattgcggccggtgttgccgccgggatccggaccgtggccatcgggcccaacaccggcccgctgccggacggcgtcctgcacattgccgactactccgcggtatccgtcaccacggacgtggacgacgccggcgtccggacgatttccttccggttctga

SEQ ID NO: 3824 - protein, 234 aa, Arthrobacter sp. FB24
MSFHPDAPAAVTAASSAAIVTARAVLFDMDGTLVDSTAVVEQVWGEFAVRYGLDIAEILRTSHGVQAGDTVRRFAPAGADVAALTAELGAMERVRTEGIVALPGAADLLRSLPADAVALVTSADRILADIRMGAAKLAMPATAVTADLVTRGKPHPEGYLRAAELLGVEPADALVFEDAPAGIAAGVAAGIRTVAIGPNTGPLPDGVLHIADYSAVSVTTDVDDAGVRTISFRF

SEQ ID NO: 3825 - DNA, 723 bp, Candida albicans
  CDS (1)..(723): transl_table=12
atgacagaaattgtcactattaacacaagcgtccttttattcgatcttgacggtacattggtcgattccactgctgctgttgaaaagacttgggaaaaccaagtgaatcaacataatcaagagtttccagacaaatttattgatttacctacattgttgaatgtctcccatggatcacgtactgttgaaacatttgctgcttatttcccggaattaaaaactgacagagattctgtgtatgcatgggaaatgggtattgtgcaaaattatggacatttgggtaaagcaatcaatggttcagtacaaactttaatcacattgaatgaaaaaaatattccatgggctattgttacatcagccaaccctaaattagctgggttttggttggataagttgtttcatggtgtcaagaaaccagatgtttttattactgcaagtgatgtaagtaaaggcaaaccagaccctgaaggatattgtacagcatttgaaagattgaaaaaagtttataatttgaatgggtctgctaagggagttgtatttgaggatgcacctgctggtattaaagctggtgttaatggtggtttcacagttgtgggcatagctagcacttttccaaaagaagtcttgttacaagccggcgccacttatgttgttgaagattttaccaaagttaaaatcgaccaatcaggggaagcagttaaactagttttagaaattctttag

SEQ ID NO: 3826 - protein, 240 aa, Candida albicans
MTEIVTINTSVLLFDLDGTLVDSTAAVEKTWENQVNQHNQEFPDKFIDLPTLLNVSHGSRTVETFAAYFPELKTDRDSVYAWEMGIVQNYGHLGKAINGSVQTLITLNEKNIPWAIVTSANPKLAGFWLDKLFHGVKKPDVFITASDVSKGKPDPEGYCTAFERLKKVYNLNGSAKGVVFEDAPAGIKAGVNGGFTVVGIASTFPKEVLLQAGATYVVEDFTKVKIDQSGEAVKLVLEIL

SEQ ID NO: 3827 - DNA, 702 bp, Rhizobium meliloti
  CDS (1)..(702): transl_table=11
gtgaactcgaaatccaagggacccggtttggacacgtcctcttccgcaatcttcacgaagaatttcgccgccctccttttcgacatggacggcacgctactcaactcgatggcagtcgttgaaagggtctggggatcctgggcactccgcaacggaatagatcccgtggcgctcatgaagatcgtccatggcgtgcgagccgtcgacacgatccgcgccctgggcctgccggtcgatccggaacaggaggcgcgtattcttgccgaggcggagattgccgatgtcgagggaattgtcgaaattccgggcgccgtctccttcctgaagacattgccgccggaaaggtgggcgatcgttacgtcggcgccgctcgaactcgccgcgcgccggctcgaggcggccggtattccggtgccgcgccacatggtgaccggtgaggatgtctcggtcgggaagcccgacccgcagggctatctgctcgcggcccagagactcggggtgcgtgccgaagattgcctcgtcttcgaggacgcgcctgcaggcgtgctcgcgggcaaatccgcgggcgccgaggtcgccgtcatcaccggggcgcatgccgcggcggccgagatgccgcatatcatgctgtcgcattacagcgacgtcgaggctcgcctcgtcgaggacgggtggctttcgctgcatcgccgccgcggctag

SEQ ID NO: 3828 - protein, 233 aa, Rhizobium meliloti
MNSKSKGPGLDTSSSAIFTKNFAALLFDMDGTLLNSMAVVERVWGSWALRNGIDPVALMKIVHGVRAVDTIRALGLPVDPEQEARILAEAEIADVEGIVEIPGAVSFLKTLPPERWAIVTSAPLELAARRLEAAGIPVPRHMVTGEDVSVGKPDPQGYLLAAQRLGVRAEDCLVFEDAPAGVLAGKSAGAEVAVITGAHAAAAEMPHIMLSHYSDVEARLVEDGWLSLHRRRG

SEQ ID NO: 3829 - DNA, 747 bp, Oryza sativa
  CDS (1)..(747)
atgattatcggttccaattctttcagacctctggcttcatcagttccaattgaggcagttctgttcgacattgatgggaccttgtgcgactcagatcctcttcatcatgtggccttccaagaaatgcttcttgagattgggtataacaacggtgtgccaatagacgaggagtttttcataaacaatattgctggaaggagtgatgttgaagctgctcagaatttgttccctgattggccccttgagaaggggctgaaattcctcgaggacaaggaagctaaatacagaagtttggcaaaggagcgtttggaacctgtaaagggccttgctaaagtggttcagtgggtcaaagatcatggatacaagcgtgcggctgtaaccaatgcccccaggattaattccgagctcatgatctcccttcttggcctcacagatttcttccaggccgtcatcgttggaggcgaatgtgagaagccgaaacccgccccattcccctacctgaaggctctcaaggagcttcaggtgtctgcggaccacaccttcatctttgaggattctgcttcaggcacacgtgcaggcgttgctgctggaattcctgttgttgctgtggcaacaaggaacccagagaagtccctactggatgcaggagccacgttgatcatcaaggattatgaagaccccaagctttggagcgcacttgaagagatagacagagaggaagccaagctaaagaaagctgatgcatga

SEQ ID NO: 3830 - protein, 248 aa, Oryza sativa
MIIGSNSFRPLASSVPIEAVLFDIDGTLCDSDPLHHVAFQEMLLEIGYNNGVPIDEEFFINNIAGRSDVEAAQNLFPDWPLEKGLKFLEDKEAKYRSLAKERLEPVKGLAKVVQWVKDHGYKRAAVTNAPRINSELMISLLGLTDFFQAVIVGGECEKPKPAPFPYLKALKELQVSADHTFIFEDSASGTRAGVAAGIPVVAVATRNPEKSLLDAGATLIIKDYEDPKLWSALEEIDREEAKLKKADA

SEQ ID NO: 3831 - DNA, 741 bp, Saccharomyces cerevisiae
  CDS (1)..(741)
atggcagaattttcagctgatctatgtctttttgacctagatggtaccatagtgagtacaacagtggccgcagagaaagcatggaccaagttgtgttacgaatacggtgttgatccttccgagttatttaagcattctcatggtgcaagaacacaagaggttttgagaaggtttttccctaaattggatgatacagacaataaaggtgttcttgctctagaaaaagatattgcccatagttacttggacacagtaagccttattcctggtgcagagaacttactgttatcgttagatgtagatactgagactcaaaaaaagttacctgaaaggaaatgggctatcgttacctctggttctccatatttggcattttcatggttcgagacaatattgaaaaatgttggaaagcccaaagttttcattactgggtttgacgtgaagaacggtaagcctgatcccgagggttattcaagagctcgtgatttattgcgtcaagatttgcaattaactggtaaacaggatctgaagtatgttgtcttcgaagatgcacccgtgggcataaaggccggcaaagcaatgggcgccattactgtgggtataacatcctcgtatgacaagagcgttttatttgacgcaggagcagattatgtagtctgtgatttgacacaggtttccgtggttaagaacaatgaaaacggtattgtcatccaggtaaacaaccctttgacaagggcctga

SEQ ID NO: 3832 - protein, 246 aa, Saccharomyces cerevisiae
MAEFSADLCLFDLDGTIVSTTVAAEKAWTKLCYEYGVDPSELFKHSHGARTQEVLRRFFPKLDDTDNKGVLALEKDIAHSYLDTVSLIPGAENLLLSLDVDTETQKKLPERKWAIVTSGSPYLAFSWFETILKNVGKPKVFITGFDVKNGKPDPEGYSRARDLLRQDLQLTGKQDLKYVVFEDAPVGIKAGKAMGAITVGITSSYDKSVLFDAGADYVVCDLTQVSVVKNNENGIVIQVNNPLTRA

SEQ ID NO: 3833 - DNA, 741 bp, Saccharomyces cerevisiae
  CDS (1)..(741)
atgccacaattttcagtagatctttgtctttttgacctagatgggactattgtcagcacaacaactgcagcggaaagtgcctggaaaaaattatgccgtcagcatggggttgatcctgttgagttattcaagcattcccatggtgcaagatcacaagaaatgatgaagaaattttttccaaaattggacaataccgataataaaggtgttcttgcgttagaaaaggatatggcagataattatttggacacagtaagccttatccctggtgcagagaatttattgttatcgttagatgtagatactgagactcaaaaaaagttacctgaaaggaaatgggctatcgttacctctggttctccatatttggcattttcatggttcgagacaatattgaaaaatgttggaaagcccaaagttttcattactggatttgacgtgaagaacggtaagcctgatcccgagggttactcaagagctcgtgatttattgcgtcaagatttgcaattaactggtaaacaggatctgaagtatgttgtctttgaagatgcacccgtgggcataaaggccggcaaagcaatgggcgcaattactgtgggtataacatcctcgtatgataagagcgttttatttgacgcaggtgcagattatgtggtctgtgatttgacacaggtttccgtggttaagaacaatgagaacggtatcgttatccaggtaaacaaccctttgacgagagattaa

SEQ ID NO: 3834 - protein, 246 aa, Saccharomyces cerevisiae
MPQFSVDLCLFDLDGTIVSTTTAAESAWKKLCRQHGVDPVELFKHSHGARSQEMMKKFFPKLDNTDNKGVLALEKDMADNYLDTVSLIPGAENLLLSLDVDTETQKKLPERKWAIVTSGSPYLAFSWFETILKNVGKPKVFITGFDVKNGKPDPEGYSRARDLLRQDLQLTGKQDLKYVVFEDAPVGIKAGKAMGAITVGITSSYDKSVLFDAGADYVVCDLTQVSVVKNNENGIVIQVNNPLTRD

SEQ ID NO: 3835 - DNA, 753 bp, Saccharomyces cerevisiae
  CDS (1)..(753)
atgcctttgaccacaaaacctttatctttgaaaatcaacgccgctctattcgatgttgacggtaccatcatcatctctcaaccagccattgctgctttctggagagatttcggtaaagacaagccttacttcgatgccgaacacgttattcacatctctcacggttggagaacttacgatgccattgccaagttcgctccagactttgctgatgaagaatacgttaacaagctagaaggtgaaatcccagaaaagtacggtgaacactccatcgaagttccaggtgctgtcaagttgtgtaatgctttgaacgccttgccaaaggaaaaatgggctgtcgccacctctggtacccgtgacatggccaagaaatggttcgacattttgaagatcaagagaccagaatacttcatcaccgccaatgatgtcaagcaaggtaagcctcacccagaaccatacttaaagggtagaaacggtttgggtttcccaattaatgaacaagacccatccaaatctaaggttgttgtctttgaagacgcaccagctggtattgctgctggtaaggctgctggctgtaaaatcgttggtattgctaccactttcgatttggacttcttgaaggaaaagggttgtgacatcattgtcaagaaccacgaatctatcagagtcggtgaatacaacgctgaaaccgatgaagtcgaattgatctttgatgactacttatacgctaaggatgacttgttgaaatggtaa

SEQ ID NO: 3836 - protein, 250 aa, Saccharomyces cerevisiae
MPLTTKPLSLKINAALFDVDGTIIISQPAIAAFWRDFGKDKPYFDAEHVIHISHGWRTYDAIAKFAPDFADEEYVNKLEGEIPEKYGEHSIEVPGAVKLCNALNALPKEKWAVATSGTRDMAKKWFDILKIKRPEYFITANDVKQGKPHPEPYLKGRNGLGFPINEQDPSKSKVVVFEDAPAGIAAGKAAGCKIVGIATTFDLDFLKEKGCDIIVKNHESIRVGEYNAETDEVELIFDDYLYAKDDLLKW

SEQ ID NO: 3837 - DNA, 645 bp, Clostridium perfringens
  CDS (1)..(645): transl_table=11
atgataaaagcagtattgtttgacctagatggaacattgataaatactaatgatttaatactaaaatcatttaaacatacatttaaaactatgttagatttagagccaagtgaagaagagattactatgaactatggtagaccattgcaggaaatttttaaatcctatgatgaaaatagaatagaagaaatgattaattgttatagaaaaataaacttagaattacatgatgatgaatgtaaagagtttgctgacgtagatttaatgctaaaaacattaaagagtaaaggaattaaaattggagttgtaacttcaaagaaaagtgatatggcagagcgtggagctaaattaatgggtatatttaagtattttgatacttttataactcctgaaattactacaaagcataagccagatggggagccagttttaaaggcttgtgaaaatttaggagtatctcctagtgaagctcttatggtaggtgattcaccttacgatattttagcaggtaaaaatgctggagctaagacctgtggagttaaatacacagcattgcctcttgaaaaattaggagagagtaacccagacttttatgtagataaacctttagaaattttagatcttgttgaaaaattaaattcttaa

SEQ ID NO: 3838 - protein, 214 aa, Clostridium perfringens
MIKAVLFDLDGTLINTNDLILKSFKHTFKTMLDLEPSEEEITMNYGRPLQEIFKSYDENRIEEMINCYRKINLELHDDECKEFADVDLMLKTLKSKGIKIGVVTSKKSDMAERGAKLMGIFKYFDTFITPEITTKHKPDGEPVLKACENLGVSPSEALMVGDSPYDILAGKNAGAKTCGVKYTALPLEKLGESNPDFYVDKPLEILDLVEKLNS

SEQ ID NO: 3839 - DNA, 603 bp, Haemophilus influenzae
  CDS (1)..(603): transl_table=11
atgttagattacgagatcttcaatccatatgaaggattgatttttgatatggatggaactttaattgatacaatgcccgtgcatgcacaagcttggacaatggtgggaaagaaatttggctatgaatttgattttcaaattatgtataacttcggcggggcgacggttcgaactatcgcgggggaaatgatgaaagcggcgaatatgccactagatcgaattgaggatgtgctggctgcaaaacgtgagttgtcttatcaacttattccgactcaatcaaagttattgccaacctttgaaattgttaaatccttccatcagaaaaagccgatcgctttaggttctggctcacaccgtaaaattattgatatgttgatggataaactggctatcgcaccttactttaatgcaattgtcagtgcagatgatgtaaaagaacataaaccacacccagaaacttttttacgttgtgcggagttaattcaagcaaatccaagtcgttgtatcgtatttgaagatgcggatttaggcgtgcaagcaggattaagtgcgggaatggatgtgtttgatgttcgcacacgagaaattatttcgccaagataa

SEQ ID NO: 3840 - protein, 200 aa, Haemophilus influenzae
MLDYEIFNPYEGLIFDMDGTLIDTMPVHAQAWTMVGKKFGYEFDFQIMYNFGGATVRTIAGEMMKAANMPLDRIEDVLAAKRELSYQLIPTQSKLLPTFEIVKSFHQKKPIALGSGSHRKIIDMLMDKLAIAPYFNAIVSADDVKEHKPHPETFLRCAELIQANPSRCIVFEDADLGVQAGLSAGMDVFDVRTREIISPR

SEQ ID NO: 3841 - DNA, 651 bp, Escherichia coli
  CDS (1)..(651)
atgcggtgcaaaggttttctgtttgatcttgatggaacgctggtggattccctgcctgcggtagaacgggcgtggagcaactgggccagacgtcatgggttagcgccggaagaggtgctggctttcattcacggtaaacaggcgatcacctctctgcgccattttatggcgggcaaatccgaggctgatattgccgccgagtttacgcgtctggagcacatcgaggccacggaaaccgaaggtattaccgcgcttccgggggcaatcgccttactcagtcatttgaataaagcaggtattccgtgggccattgtgacttctggctccatgccggtagcgcgagcgcgccataaaatagctgggcttcccgcaccagaggtgtttgtaaccgctgagcgagtgaagcgcggaaaaccagaacctgatgcgtatctgttaggcgcgcagctgctggggcttgcgccgcaggagtgtgtggtggtggaagatgctcccgctggcgtgctttctggcctggcggcgggttgtcatgtcattgcggttaacgctccggcagataccccgcgcctgaatgaggtcgatttggtcctccacagtctggagcaaattactgtgaccaaacagccaaatggcgatgttattattcagtga

SEQ ID NO: 3842 - protein, 216 aa, Escherichia coli
MRCKGFLFDLDGTLVDSLPAVERAWSNWARRHGLAPEEVLAFIHGKQAITSLRHFMAGKSEADIAAEFTRLEHIEATETEGITALPGAIALLSHLNKAGIPWAIVTSGSMPVARARHKIAGLPAPEVFVTAERVKRGKPEPDAYLLGAQLLGLAPQECVVVEDAPAGVLSGLAAGCHVIAVNAPADTPRLNEVDLVLHSLEQITVTKQPNGDVIIQ

SEQ ID NO: 3843 - DNA, 567 bp, Escherichia coli
  CDS (1)..(567): transl_table=11
atgtacgagcgttatgcaggtttaatttttgatatggatggcacaatcctggatacggagcctacgcaccgtaaagcgtggcgcgaagtattagggcactacggtcttcagtacgatattcaggcgatgattgcgcttaatggatcgcccacctggcgtattgctcaggcaattattgagctgaatcaggccgatctcgacccgcatgcgttagcgcgtgaaaaaacagaagcagtaagaagtatgctgctggatagcgtcgaaccgcttcctcttgttgatgtggtgaaaagttggcatggtcgtcgcccaatggctgtaggaacggggagtgaaagcgccatcgctgaggcattgctggcgcacctgggattacgccattattttgacgccgtcgtcgctgccgatcacgtcaaacaccataaacccgcgccagacacatttttgttgtgcgcgcagcgtatgggcgtgcaaccgacgcagtgtgtggtctttgaagatgccgatttcggtattcaggcggcccgtgcagcaggcatggacgccgtggatgttcgcttgctgtga

SEQ ID NO: 3844 - protein, 188 aa, Escherichia coli
MYERYAGLIFDMDGTILDTEPTHRKAWREVLGHYGLQYDIQAMIALNGSPTWRIAQAIIELNQADLDPHALAREKTEAVRSMLLDSVEPLPLVDVVKSWHGRRPMAVGTGSESAIAEALLAHLGLRHYFDAVVAADHVKHHKPAPDTFLLCAQRMGVQPTQCVVFEDADFGIQAARAAGMDAVDVRLL

SEQ ID NO: 3845 - DNA, 25 bp, Artificial sequence
  primer
atgggattgactactaaacctctat

SEQ ID NO: 3846 - DNA, 25 bp, Artificial sequence
  primer
ttaccatttcaacagatcgtcctta

SEQ ID NO: 3847 - protein, 206 aa, Artificial sequence
  consensus sequence
  Variant (4)..(4): Xaa in position 4 is any amino acid
  Variant (8)..(37): Xaa in position 8 to 37 is any amino acid
  Variant (38)..(46): Xaa in position 38 to 46 is any or no amino acid
  Variant (48)..(85): Xaa in position 48 to 85 is any amino acid
  Variant (86)..(97): Xaa in position 86 to 97 is any or no amino acid
  Variant (99)..(109): Xaa in position 99 to 109 is any amino acid
  Variant (110)..(123): Xaa in position 110 to 123 is any or no amino acid
  Variant (125)..(125): Xaa in position 125 is any amino acid
  Variant (128)..(153): Xaa in position 128 to 153 is any amino acid
  Variant (154)..(157): Xaa in position 154 to 157 is any or no amino acid
  Variant (159)..(161): Xaa in position 159 to 161 is any amino acid
  Variant (164)..(164): Xaa in position 164 is any amino acid
  Variant (166)..(183): Xaa in position 166 to 183 is any amino acid
  Variant (184)..(190): Xaa in position 184 to 190 is any or no amino acid
  Variant (192)..(192): Xaa in position 192 is any amino acid
  Variant (195)..(197): Xaa in position 195 to 197 is any amino acid
  Variant (199)..(204): Xaa in position 199 to 204 is any amino acid
LFDXDGTXXXXXXXXXXXXXXXXXXXXXXXXXXXXXXXXXXXXXXXGXXXXXXXXXXXXXXXXXXXXXXXXXXXXXXXXXXXXXXXXXXXXXXXXXXGXXXXXXXXXXXXXXXXXXXXXXXXXAXVTXXXXXXXXXXXXXXXXXXXXXXXXXXXXXXVXXXKPXPXXXXXXXXXXXXXXXXXXXXXXXXXVXEDXXXGXXXXXXAG

SEQ ID NO: 3848 - DNA, 1215 bp, Saccharomyces cerevisiae
  CDS (1)..(1215)
atgcctaacaaagtgtttaacgtggccgttttcttcgttgtgttcagagagtgcttggaagcagtgattgttatttccgtgctgctatcgtttttgaaacaggcaatcggggaacatgaccgggcgctgtaccgtaaattaaggattcaggtttgggtcggtgtgttactcgggttcatcatttgtctggccatcggtgcaggtttcatcggtgcgtactattcgctgcagaaggatattttcggaagcgcggaagacttgtgggaaggtatcttttgtatgattgcgacgataatgatctcgatgatgggtattcctatgttgagaatgaataagatgcagagtaagtggagagtgaagattgcgcggtcgttggtggagattcctcaccgtaagagagactatttcaagattgggttcttgagtagaagatatgctatgttccttttgccgtttattactgtcttgagagaaggtttggaagctgttgtgttcgttgccggtgcaggtattaccacacagggctcgcacgcctctgcttacccattgcccgttgtggttggtttgatatgtggtggtcttgttgggtatttgttgtactatggtgcttcgaaatcctcgctgcagattttcttgattttgtctacttcgatcttgtacctgatctccgccggtcttttctctcgtggtgcgtggtactttgaaaattacagattcaaccttgccagtggtggtgatgcttccgaaggcggtgatggtaatgggtcttataacatcagaaaggccgtttaccatgtcaattgttgcaacccagaactggacaatgggtgggatatcttcaatgctttgcttggatggcagaacaccggctacttgtcatccatgctttgttacaacatctattggttggttcttatcattgtgttgagtttaatgatattcgaagaaaggcgtggtcacttgcctttcaccaaaaacttacaattgaaacacttgaacccaggatactggatcaagaacaagaaaaagcaggagttgacggaagagcaaaagagacaactgtttgccaagatggagaacatcaacttcaatgaagatggtgagatcaatgtgcaagagaactacgaacttcccgagcaaactaccagtcattcctcgtctcaaaacgtcgccacagacaaggaagtcctccacgttaaagccgactctctttga

SEQ ID NO: 3849 - protein, 404 aa, Saccharomyces cerevisiae
MPNKVFNVAVFFVVFRECLEAVIVISVLLSFLKQAIGEHDRALYRKLRIQVWVGVLLGFIICLAIGAGFIGAYYSLQKDIFGSAEDLWEGIFCMIATIMISMMGIPMLRMNKMQSKWRVKIARSLVEIPHRKRDYFKIGFLSRRYAMFLLPFITVLREGLEAVVFVAGAGITTQGSHASAYPLPVVVGLICGGLVGYLLYYGASKSSLQIFLILSTSILYLISAGLFSRGAWYFENYRFNLASGGDASEGGDGNGSYNIRKAVYHVNCCNPELDNGWDIFNALLGWQNTGYLSSMLCYNIYWLVLIIVLSLMIFEERRGHLPFTKNLQLKHLNPGYWIKNKKKQELTEEQKRQLFAKMENINFNEDGEINVQENYELPEQTTSHSSSQNVATDKEVLHVKADSL

SEQ ID NO: 3850 - DNA, 822 bp, Thermotoga maritima MSB8
  CDS (1)..(822): transl_table=11
gtgcatctcggtgctcttttgataacattcagagaagctctggaagccagtgtgatcattgcagtgatcctcgcctatttgaaaagaaccggaagagaaactcagaaaagagaagtttggttgggaatgtttttttctatctttgcaagtcttgttcttggagcgatcgttatctggttctatggaggtattgaagaaaaggaactttttgagagtgtagcttcgtacgttgcagtggtggtgcttacaagcatgatctattggatggccacgaagggaaaaagtatcaagtcagagatagaacgaaaagtcagtaaggttatcagcagatgggcattgattggttttgttttcgttgttgtgttcagggaaggctttgagacagtattgttcgttacacctttcatgacgcagaatcttgctggaactgttgtgggaattgtcctgggattgatatttgccggagcgattgcttataccctttacgttgtgggagtaaagatcaacctaagaaggttcttctattacagctccattctgttgattttcgtcgctgctgggcttgttggttacggaacacatgaattcatagagtggtctgaagaaaaagggttcgatcttggcttttttgaaaaagaagcttataacttaggaatccccgaaagcagtgtgtggcatcacaaaggattgataggttccattcttatggttctattcggttattccgtgaaaatggaatgggggagagtgcttgtacaattcggctatcttgttttggctcttattctgatcactcgagcgtacaaaagaaaagaaatttga

SEQ ID NO: 3851 - protein, 273 aa, Thermotoga maritima MSB8
MHLGALLITFREALEASVIIAVILAYLKRTGRETQKREVWLGMFFSIFASLVLGAIVIWFYGGIEEKELFESVASYVAVVVLTSMIYWMATKGKSIKSEIERKVSKVISRWALIGFVFVVVFREGFETVLFVTPFMTQNLAGTVVGIVLGLIFAGAIAYTLYVVGVKINLRRFFYYSSILLIFVAAGLVGYGTHEFIEWSEEKGFDLGFFEKEAYNLGIPESSVWHHKGLIGSILMVLFGYSVKMEWGRVLVQFGYLVLALILITRAYKRKEI

SEQ ID NO: 3852 - DNA, 849 bp, Yersinia pestis CO92
  CDS (1)..(849): transl_table=11
atgttcgtcccatttcttattatgtttcgtgaagggctggaggcggcactgattgtcagtctgattgccagttacctcaagcgtactcaacgcggtcagtggatgggcgcagtctgggttggtgtggtggtggcagcggtgctttgtctcgctatcggtatctttatcaatgaaaccaccggtgagtttccacagaaacagcaagagctgttcgaagggattatcgctgtagtcgcggtttgcatattaacttatatggttttctggatgcgcaaagtctccaagtccgtcaaagttcacttggaaggggcaattgataatgcgcttaactctgggcgcggccaaggttgggcattagtggctatggtcttctttgctgtggcccgagagggtcttgaatctgttttcttcttgttagctgccttccaacaggatgtcggtatcggggcacctattggcgcgatactcgggttggtctgcgctattttggtcggaatggccatctattggggcggcgttaaattacatttagccaaatttttcaaatggaccagcctgtttattctgttcgttgccgcagggcttgccgccggtgctatcagagcctttcacgaagctggcttatggaaccatttccaagatattgcttttgatctgaccgatgtgctctctactcactcattattggggacgttccttgaagggatgtttggctatcaggaagcaccaacggtgagcgaagtgtctgtctactttatctatcttattccggcgttgattctgtttttccttccaccacgttccactgcgggttcggctatcgctgcggcgcggaaaattaatccataa

SEQ ID NO: 3853 - protein, 282 aa, Yersinia pestis CO92
MFVPFLIMFREGLEAALIVSLIASYLKRTQRGQWMGAVWVGVVVAAVLCLAIGIFINETTGEFPQKQQELFEGIIAVVAVCILTYMVFWMRKVSKSVKVHLEGAIDNALNSGRGQGWALVAMVFFAVAREGLESVFFLLAAFQQDVGIGAPIGAILGLVCAILVGMAIYWGGVKLHLAKFFKWTSLFILFVAAGLAAGAIRAFHEAGLWNHFQDIAFDLTDVLSTHSLLGTFLEGMFGYQEAPTVSEVSVYFIYLIPALILFFLPPRSTAGSAIAAARKINP

SEQ ID NO: 3854 - DNA, 858 bp, Yersinia pestis KIM
  CDS (1)..(858): transl_table=11
gtgtttagcatgttcgtcccatttcttattatgtttcgtgaagggctggaggcggcactgattgtcagtctgattgccagttacctcaagcgtactcaacgcggtcagtggatgggcgcagtctgggttggtgtggtggtggcagcggtgctttgtctcgctatcggtatctttatcaatgaaaccaccggtgagtttccacagaaacagcaagagctgttcgaagggattatcgctgtagtcgcggtttgcatattaacttatatggttttctggatgcgcaaagtctccaagtccgtcaaagttcacttggaaggggcaattgataatgcgcttaactctgggcgcggccaaggttgggcattagtggctatggtcttctttgctgtggcccgagagggtcttgaatctgttttcttcttgttagctgccttccaacaggatgtcggtatcggggcacctattggcgcgatactcgggttggtctgcgctattttggtcggaatggccatctattggggcggcgttaaattacatttagccaaatttttcaaatggaccagcctgtttattctgttcgttgccgcagggcttgccgccggtgctatcagagcctttcacgaagctggcttatggaaccatttccaagatattgcttttgatctgaccgatgtgctctctactcactcattattggggacgttccttgaagggatgtttggctatcaggaagcaccaacggtgagcgaagtgtctgtctactttatctatcttattccggcgttgattctgtttttccttccaccacgttccactgcgggttcggctatcgctgcggcgcggaaaattaatccataa

SEQ ID NO: 3855 - protein, 285 aa, Yersinia pestis KIM
MFSMFVPFLIMFREGLEAALIVSLIASYLKRTQRGQWMGAVWVGVVVAAVLCLAIGIFINETTGEFPQKQQELFEGIIAVVAVCILTYMVFWMRKVSKSVKVHLEGAIDNALNSGRGQGWALVAMVFFAVAREGLESVFFLLAAFQQDVGIGAPIGAILGLVCAILVGMAIYWGGVKLHLAKFFKWTSLFILFVAAGLAAGAIRAFHEAGLWNHFQDIAFDLTDVLSTHSLLGTFLEGMFGYQEAPTVSEVSVYFIYLIPALILFFLPPRSTAGSAIAAARKINP

SEQ ID NO: 3856 - DNA, 1245 bp, Eremothecium gossypii
  CDS (1)..(1245)
atgcaggttgaaaagtacttctcgttccagatcttcttcatcttcctccgggagtcgctggagatcgtgatcatcatctcgatcctgctcacgatcgtgaagcaggcgctgttgaagccggagtcggcgtccagcaagtacctgggcggcgggcggctggaggcagaggaagaggtggagctgaacgcggcgctgcaggaggcggggccgctggaggcggtggagaacagccagctgtaccggaggctgaaggtccagattctgagcgggggcgcgctagggctgctatgctgcatgctggtgggcggattgtttatcgtgctgttctactacgtgggcaaggacctgtgggccgcgagcgagcactactacgagggcgttttgagcattgtggcgtcggtaatcatctcgttcatggggctgttctttctgcggatgggccggctgcgcgacaagttccgcatcaagctggcgtcgatgctttacgcgcagagtagcgacccgctggcgccgagccggcgcgcgcggaagttcagtgagaagtacgcgctgttcatcctgccgttcgtgacgtcgctgcgggaggggctggaggcggtggtgtttgtcggcggcattggcatcgaccagccgctgagctcgatcccgctgtcgatgctgtcggcagccgttgtgagctacgcgttcggacgcttctttttcgcatcgtcggggtccttctcgctcgaggtctgcctggtgacagccacatgcctgctgtacctcgtggcagccgggctcttctcgaagggcgtgtggcagttcgagctgcagcactacgtggacctctgtaacgggcaggacatgtccgaggttgggagcgggccgggctcctacgacatctccaactcggtctggcacgtcaactgctgcaacggcgagcgcgacggcctctggatgatattcacggcgatctttggctggaccaacagtgcaacatatggctccgtcatcagctacatcatctactggctggccgtcataggcgtgctgcacgtgctgaagatcgaggagacgctcggctacatcccatacgtgcccatcaaatggcaagctaggcgaatcaagaagcgcctggcactaatcgagaaggcgagggcgctgcaaagcaggccgccatcaggatcgcccccagtataccagacggctagattgtctcaagagagcacgaatagcaataccctcctattgtcgtcgcaggaataa

SEQ ID NO: 3857 - protein, 414 aa, Eremothecium gossypii
MQVEKYFSFQIFFIFLRESLEIVIIISILLTIVKQALLKPESASSKYLGGGRLEAEEEVELNAALQEAGPLEAVENSQLYRRLKVQILSGGALGLLCCMLVGGLFIVLFYYVGKDLWAASEHYYEGVLSIVASVIISFMGLFFLRMGRLRDKFRIKLASMLYAQSSDPLAPSRRARKFSEKYALFILPFVTSLREGLEAVVFVGGIGIDQPLSSIPLSMLSAAVVSYAFGRFFFASSGSFSLEVCLVTATCLLYLVAAGLFSKGVWQFELQHYVDLCNGQDMSEVGSGPGSYDISNSVWHVNCCNGERDGLWMIFTAIFGWTNSATYGSVISYIIYWLAVIGVLHVLKIEETLGYIPYVPIKWQARRIKKRLALIEKARALQSRPPSGSPPVYQTARLSQESTNSNTLLLSSQE

SEQ ID NO: 3858 - DNA, 1101 bp, Eremothecium gossypii
  CDS (1)..(1101)
atgtcagagaaggtattcaacgttgctgtattcttcgttgtgttccgcgagtgtctggaggccgctgtcatcgtgtcggtgttgctgtcgttcgtaaaccagtcgctcggcaccaacagcccggccctgcgcaagaagctctggtggcaggtgtggctcggtgttgcgctcgggttcctcgtgtgcctgatcatcggcggcgccatgatcggcgtctactaccggtacaacagcgacatctacggcaagtccgaggacttgtgggaggccatcttctgtttcatcgcgacaatcatgatcagcgtgatgggcctgcccatgctccgtatcagcaagttgcagaccaagtggcgcgttaagctcgcccaggcgctgctcgaggtcccggagcgcaagcgcgaccgcttccgctttggagccctcatgaagcgctacgccatgttcctgctgccctgcatcaccgtccttcgtgagggcctcgaggctatcgtcttcgttgccggcgtaggcgcaacctcccagggcgccgccgcatcctcctacccgctccccgtcatcgtcggcctcatcgccggcgccgccgtcggcaccctcctttactacggcgcctcgcgctcatccatgcagatcttcctcatcttctccacctgcctgctgtacctcattgccgccggcctctgctcccgcggcgcctggtacgccgagacctaccgcttcaatatggccaccggcggcgacgcctccgaaagtggcagcggcaacggctcctacaacatcctccagaccgtctaccacatcaactgctgcaaccccagtctcgacaagggctgggacatcttcaacgcccttctgggctggcagaacaccggatacctcgctagtatcctcgcctacaacctctactggctcgtcatcatcgccatcgtgtcactcatgatctacgatgagcgccgcggccacctccccttcactcgccaccgcctgcgcgacctcaacccgctgcgtcgtcgtcgcaaggagctctcggctgccgagcaggacgaactcttcgagcgtgccggaaggctcggtttcgagcccgacggccgcgttgccaactga

SEQ ID NO: 3859 - protein, 366 aa, Eremothecium gossypii
MSEKVFNVAVFFVVFRECLEAAVIVSVLLSFVNQSLGTNSPALRKKLWWQVWLGVALGFLVCLIIGGAMIGVYYRYNSDIYGKSEDLWEAIFCFIATIMISVMGLPMLRISKLQTKWRVKLAQALLEVPERKRDRFRFGALMKRYAMFLLPCITVLREGLEAIVFVAGVGATSQGAAASSYPLPVIVGLIAGAAVGTLLYYGASRSSMQIFLIFSTCLLYLIAAGLCSRGAWYAETYRFNMATGGDASESGSGNGSYNILQTVYHINCCNPSLDKGWDIFNALLGWQNTGYLASILAYNLYWLVIIAIVSLMIYDERRGHLPFTRHRLRDLNPLRRRRKELSAAEQDELFERAGRLGFEPDGRVAN

SEQ ID NO: 3860 - DNA, 1152 bp, Eremothecium gossypii
  CDS (1)..(1152)
atggcgaacaaggtgtttaacgtggcggtgttcttcgtcgtcttccgggagtgtctggaggcggcggtaatcgtgtcggtgctgctgtcgttcgtgcagcaggccgtgggcgacgcggacaaggtggtgcaccgcaagctgaagtggcagatctggatcggcgtggcgctggggatgctcatctgcctggcggtgggcggcggcttcatcggcgcgttctactcgctcaagaaagacatcatgggcaagaccgaggacctgtgggagggcattttctgcatggttgccacggtgatgatcagcgtgatgggcgtggccatgctgcgcatcaacaagctgcaggccaagtggcgcgtgaagatcgcgcaggcgctggtcgcgctgcctgcgcgccgccgcgaccgcatgcgcctgggctttctggccaagcgctacgcaatgttcctgctgccctttgtgaccgtgctgcgcgagggcctggaggccgtggtttttgtcgcgggcgccggcgtgtcgtcctcgaccgccagcgcgtcctcctacccgctgcccgtgatcgtaggcttgctggccggcgcggccgtgggcgccctgctgtactacggcgcgtcccgctcctccatgcaggtcttcctgatcctgtccacgtgtattctatacctgatagccgccggcctgtgctcacgcggcgcctggttttttgaaaaccaccgctacaacctgggcacgggcggcgacgcatccgagagcggcagcggcaacggctcctacaacatcctgcaggccgtgtaccacgtcaactgctgcaacccggagatcgacaacggctgggacatcttcaactcgttgctgggctggcagaacaccggctacctggccagcattctggcctacaacctgtactggctcgtgctcatcgtcgtgttgctgctcatgatctacgatgagcgccacgggcacctgccgctgtgtcgcggcctgcgcctgcgccacctctctccgggctactggctgaagcgccgccgcgcggcagagctcaccgacgcacagaagcagcagctgttcagccgtgtcgatgagctggtcgtcacggaggacggcgtgcacgcccagccggcccagccggcgcagccagccgcgccgtcgcactaa

SEQ ID NO: 3861 - protein, 383 aa, Eremothecium gossypii
MANKVFNVAVFFVVFRECLEAAVIVSVLLSFVQQAVGDADKVVHRKLKWQIWIGVALGMLICLAVGGGFIGAFYSLKKDIMGKTEDLWEGIFCMVATVMISVMGVAMLRINKLQAKWRVKIAQALVALPARRRDRMRLGFLAKRYAMFLLPFVTVLREGLEAVVFVAGAGVSSSTASASSYPLPVIVGLLAGAAVGALLYYGASRSSMQVFLILSTCILYLIAAGLCSRGAWFFENHRYNLGTGGDASESGSGNGSYNILQAVYHVNCCNPEIDNGWDIFNSLLGWQNTGYLASILAYNLYWLVLIVVLLLMIYDERHGHLPLCRGLRLRHLSPGYWLKRRRAAELTDAQKQQLFSRVDELVVTEDGVHAQPAQPAQPAAPSH

SEQ ID NO: 3862 - DNA, 1269 bp, Neurospora crassa
  CDS (1)..(1269)
atgcaactcttttccgtccccatcttcctcctcgtcttccgcgagaccatcgagacatccatcattgtctcggtcctcctcgtctttctcaagcaaaccctcgcctccccgtcgtcgtcatcatctccagcagaggcaataagccatgccgccgccaccgctgccgctgctgacgatgatgaactcaaacatccctcctcctcctccaccaccaacaacaactccgattcaccacaacaacaacccgtagttgttgatctccgtgtgtacaatgccctccgccgccaaatcctccttggtaccgtcctcggcttcattctgtgcattgccattggcggcgccgtcattggcgtcttttacacccttggcgtcaacaagtgggagagctcgggcgcagagctcaactgggaaggagcattttgtctcttggccagtgtgattatcagtgtggtgggcgcggcgctgttgcgagtgggcaggatgaaggagaaatggaggggcaagatgattaaggctatggaggggaaggagaagaacaagaagaagtcaaagggtgggagagttgccgggggggaggaagatatggagcgaggagagaccgtggaaagacaacgtggatggtgggtcaagttcaaggcgtggatggaacgatatgtcatgtttattctacccttcgtgacggtcctgcgagagggcgtggaggcgattgtctttgttgctggtgtgtcgttcgcggcgccggcgacttcgattccgattcctgccattgttggcgtcatcgtgggatcgttggtgggggtggttctgtacaaattcggatcctcaaccaaattgcaactctttctcgtcctctcgacatctctcctctacctcgtcgcagctggcctcttctctcgcgcaatctgggccttggagagccagcaatgggccaaagccatcggaagtgatgctgtggaactcggtagtggccctggatcctacgatattgacaaatctgtctggcatgtggactgttgcagcccgcaagtgaacggtggaggcggttggggcattttcaacgccatcttcggctggaccaactcggcgacatacggctccgttattggatacgacctgtactggctggttgtcattgtgtcgttcctcgtcatgcgataccgcgaggtgaaggggaaatggccgttgatcccacagaagaccgaggttgaagatggcagcgaaaagggtagcctttttggcaggttgagctggagaaagggcagggcttga

SEQ ID NO: 3863 - protein, 422 aa, Neurospora crassa
MQLFSVPIFLLVFRETIETSIIVSVLLVFLKQTLASPSSSSSPAEAISHAAATAAAADDDELKHPSSSSTTNNNSDSPQQQPVVVDLRVYNALRRQILLGTVLGFILCIAIGGAVIGVFYTLGVNKWESSGAELNWEGAFCLLASVIISVVGAALLRVGRMKEKWRGKMIKAMEGKEKNKKKSKGGRVAGGEEDMERGETVERQRGWWVKFKAWMERYVMFILPFVTVLREGVEAIVFVAGVSFAAPATSIPIPAIVGVIVGSLVGVVLYKFGSSTKLQLFLVLSTSLLYLVAAGLFSRAIWALESQQWAKAIGSDAVELGSGPGSYDIDKSVWHVDCCSPQVNGGGGWGIFNAIFGWTNSATYGSVIGYDLYWLVVIVSFLVMRYREVKGKWPLIPQKTEVEDGSEKGSLFGRLSWRKGRA

SEQ ID NO: 3864 - DNA, 1131 bp, Magnaporthe grisea 70-15
  CDS (1)..(1131)
atggaaatattcgcgttacccatctttttcatcacctttcgcgagtccctcgagaccgccatcatcgtgtctgtgctcctggccctggtcaagcgaaccctcggcgacggcagcagcagcaaccaagatgaagacgccgagctgcagcgccgcatgatccggcaggtctggctcggcacctttgccggcctggccgtctgcatcctgatgggcgttctcgtcatcgccggcgccaacggcctgggcgtagacgagtgggccgtggccgaagacgtctgggagggcgcctttgccctcctggcctcggtcatcatcaccgccatgggcgccgtgctgctgcgcgtgtcgcgcctgcaggacaagtggagggacaagctgctcaaggccttccgcgcctcgtcggccgggcgtgacgacgagtcttctgccggcgatggtgccgagtcgccgaggacggtcaagaggaatcgcttccttgatcgtcttgcctttttgggcgaggagtattcgctgttcctgctgccgttcatcacggtcttgcgtgaggggtttgagggtgtcatctttatcgctggcgtcgggctcggctatcccgtctcggctctcatctttacagccgctgtaggactgctagccggtgcagtctttggctatgccatttacaatctcgacatcaggggctccaactttgcatcgatgcaaaagttcctcgctgcgtctacatgcttcctgtacttggtcgcagccggtcttttctccaagggagtatggcatctcgaggccaatgagtggaacaagattgtcggcggcgatgctgccgagctcggctcggggcctggctcatacgacataaccaagagcgtgtggcatgtgaactgctgcaacccagactttgaaggaggcggactctggggagtcttcaactccatcctaggctggaccaattcggccactgtcggctcagttgtctcatacaacctctattggatcgtcgtctccataggcttcctttgcatggcacacaaagaaaagacgggccactaccctttcctgcagagggctagcaagatcactaggagtgttttggatggggatcgccaaccgcttctctcgaatgctcgaacagcctag

SEQ ID NO: 3865 - protein, 376 aa, Magnaporthe grisea 70-15
MEIFALPIFFITFRESLETAIIVSVLLALVKRTLGDGSSSNQDEDAELQRRMIRQVWLGTFAGLAVCILMGVLVIAGANGLGVDEWAVAEDVWEGAFALLASVIITAMGAVLLRVSRLQDKWRDKLLKAFRASSAGRDDESSAGDGAESPRTVKRNRFLDRLAFLGEEYSLFLLPFITVLREGFEGVIFIAGVGLGYPVSALIFTAAVGLLAGAVFGYAIYNLDIRGSNFASMQKFLAASTCFLYLVAAGLFSKGVWHLEANEWNKIVGGDAAELGSGPGSYDITKSVWHVNCCNPDFEGGGLWGVFNSILGWTNSATVGSVVSYNLYWIVVSIGFLCMAHKEKTGHYPFLQRASKITRSVLDGDRQPLLSNARTA

SEQ ID NO: 3866 - DNA, 1020 bp, Gibberella zeae PH-1
  CDS (1)..(1020)
atgctcgaattgttttcggtccccgtgtttgtcgttgtctttcgagagactctcgagactgccatcattgtctctgtcttgctggcttttctcaagcagacccttgatggctcacatcgcgatgccaacctttataaaaccctgcgcacacaggtctgggctggaactgcgactggcttcgctgtctgcgccattgcctctggtatcatcattggtacattctacatcctaggcagcgatacctgggcagaccatgagtactactatgaaggcgtgttttcgctcatttccgccatcatcatcaccataatgggcggcgctttgctgcgcgtcggaaagatggaggataagtggcgagccaagctatccaaggcgattgaggagcccgtcgtagctggtcacggaaaaagggcctggctgatcaacttgtttgagaagtatgccatgtttgtattgccttgtatcactgttcttcgcgagggtattgaaggcatcgttttcgttgcgggcgtgtcattctctgcgcccgcttcagctgtacctttgcccgtcattttgggtttgacactgggcgctctcgttggatatgctctctaccggggtggttcatctgcaaagctgcagtatttcctcgtcgcttcgacctgtcttttgtaccttgtcgcggcaggcttgttctcccgtgccatttggctttttgagcagcagcagtggaacaaggttgtcggtggcgatgccgcggaactcggggatggtcctggatcgtacgatattgaccgtagtatctggcacgtcaacctgacaacccagtgctgcaacccccaactcaacggcggaggaggctgggctatcctgaatgctgttgtcggatggaacaattccgccacatatggatctgttctcgcatacaacttgtactgggtgtttgtcattgcacagtttactgcaatggcatacaaggaggatcatggccattggcctcttgtcaaggccaaggaagtgcacgccaggacagactag

SEQ ID NO: 3867 - protein, 339 aa, Gibberella zeae PH-1
MLELFSVPVFVVVFRETLETAIIVSVLLAFLKQTLDGSHRDANLYKTLRTQVWAGTATGFAVCAIASGIIIGTFYILGSDTWADHEYYYEGVFSLISAIIITIMGGALLRVGKMEDKWRAKLSKAIEEPVVAGHGKRAWLINLFEKYAMFVLPCITVLREGIEGIVFVAGVSFSAPASAVPLPVILGLTLGALVGYALYRGGSSAKLQYFLVASTCLLYLVAAGLFSRAIWLFEQQQWNKVVGGDAAELGDGPGSYDIDRSIWHVNLTTQCCNPQLNGGGGWAILNAVVGWNNSATYGSVLAYNLYWVFVIAQFTAMAYKEDHGHWPLVKAKEVHARTD

SEQ ID NO: 3868 - DNA, 1035 bp, Gibberella zeae PH-1
  CDS (1)..(1035)
atggctgttgatgtctttgcggttcccgttttccttgtcgtctttcgagagactctcgagacggtcatcatcgtctccgttctccttgctttccttaagcagaccctcgacggacccaacggtgatgttaaagtatacaagcaactaaaacgccaggtttggctcggaacgggtattggtttctttatctgtatggtcgttgctgcagctctcatcggcgtcttctatactgtcggaagcaactcttgggaaaagcacgagtactactatgagggcgcattctgtctatttgcttccctcatcatctctgtcatgggcgctgctcttctccgtatcggtaagatgcagtccaagtggcgcgtcaagttagcaaaagctctcgagtccccaatcaaaactggtaacaagggctggttcaagcaatttgttgaaagatacgctatgtttgtcctgccctttgtcacagtactacgagagggtatcgaggctgttgtcttcgttgctggagtatctttctcggcttcggccaagtgtctgattcttaatgctgactgtgactctaggggtggtgcgagcaccaaacttcaattcttccttgttctgtccacctgcctcttgtaccttgttggtgctggtctcttttctcggtctgtatggagcttcgagatggccaaatggaacgagtatattggtggcgaggcagacgagttcggtaacggacccggctcctacgatattgatcaaagtgtctggcacgtcaactgttgtacttctaccgataagatccagaatggctggggcatcttcaacgctattttgggctggacaaactcggctacatatggctccgtcatttcttacaacctatactggatttgtgtcatgactggcttcattgtcatgcgtttcaaggagacacatggcaggtattctttcggaaaggcaaaggctcctgccaacgccgttgatgatgctgagagccacgcaacttcttctccaagaaatgtctccagtgaaaagaccacaacagcatag

SEQ ID NO: 3869 - protein, 344 aa, Gibberella zeae PH-1
MAVDVFAVPVFLVVFRETLETVIIVSVLLAFLKQTLDGPNGDVKVYKQLKRQVWLGTGIGFFICMVVAAALIGVFYTVGSNSWEKHEYYYEGAFCLFASLIISVMGAALLRIGKMQSKWRVKLAKALESPIKTGNKGWFKQFVERYAMFVLPFVTVLREGIEAVVFVAGVSFSASAKCLILNADCDSRGGASTKLQFFLVLSTCLLYLVGAGLFSRSVWSFEMAKWNEYIGGEADEFGNGPGSYDIDQSVWHVNCCTSTDKIQNGWGIFNAILGWTNSATYGSVISYNLYWICVMTGFIVMRFKETHGRYSFGKAKAPANAVDDAESHATSSPRNVSSEKTTTA

SEQ ID NO: 3870 - DNA, 1227 bp, Candida glabrata CBS138
  CDS (1)..(1227)
atgcctaacaaagtatttaacgtggcagtcttctttgtcgtgttcagagaatgtttggaagctgttgttatcgtttccattctattgtctttcctgaagcaagcaattggttccaaagatattaaattatatcgcaaattgcgtaagcatgtttggattggtgtcgcactcgggttctttatctgtttagtgattggtgctggtttcattggtgcctactactctttacagaaagatatctttggttctacagaagatttatgggaaggtattttctgtatgattgctactactatgatcagtatgatgggtattccaatgttgcgtattaacaagttgcaaagtaaatggcgtgtgaagcttgctcgttcacttgttgatattccaaagagaaagcgtgattacttcaggattggttatttgactagacgttatgcgatgttcatcttacctttcatcactgttttaagagaaggtttggaagctgtcgtttttgtcgctggtgccggtattaccacgaagggttctcacgcatccgcttatcctttaccagtcgttgttggtctaattgctggttttatagttggattcctattatattacggtacttcaaagtcttccatgcaaatctttttagttatttctacctccattctttacttaattgcagccggtttgttctcaagaggtgcttggtacttcgaaaactacagattcaacaaggcaacgggtggtgatgcttctgaaggtggtgacggtaatggttcctataatatcgctaaatcagtttaccatgttaactgttgtaatcctgaactggacaacggttgggatattttcaacgctttgttgggatggcaaaatactggttatctgtccagtattctttgttacaatatttactgggttgttctaattattgtcttaggtttgatgatgcacgaagaaagatatggccacttaccatttatgagaaacgttggtatgagacacttaaacccaggttattggataaagaacaagaagaaggacgaattgactgatgaacaaaaggctgagctgctaaaccgtatggacaacattcaattcaatgaagaaggtgatattgtcgctcatgctaacgaagaagaacacgaccaggagagttctttgttgagaggcaactctaacaagatgggatccaaggaagaattgaacttcaaggttaccactaccagttccgactaa

SEQ ID NO: 3871 - protein, 408 aa, Candida glabrata CBS138
MPNKVFNVAVFFVVFRECLEAVVIVSILLSFLKQAIGSKDIKLYRKLRKHVWIGVALGFFICLVIGAGFIGAYYSLQKDIFGSTEDLWEGIFCMIATTMISMMGIPMLRINKLQSKWRVKLARSLVDIPKRKRDYFRIGYLTRRYAMFILPFITVLREGLEAVVFVAGAGITTKGSHASAYPLPVVVGLIAGFIVGFLLYYGTSKSSMQIFLVISTSILYLIAAGLFSRGAWYFENYRFNKATGGDASEGGDGNGSYNIAKSVYHVNCCNPELDNGWDIFNALLGWQNTGYLSSILCYNIYWVVLIIVLGLMMHEERYGHLPFMRNVGMRHLNPGYWIKNKKKDELTDEQKAELLNRMDNIQFNEEGDIVAHANEEEHDQESSLLRGNSNKMGSKEELNFKVTTTSSD

SEQ ID NO: 3872 - DNA, 1308 bp, Candida glabrata CBS138
  CDS (1)..(1308)
atggctttcgaagactatttctcattccaagtgtttttcatattcctccgggagtctctagagattgccgttattatttctattcttttaaccattgtcaagcaaggtttatctgtcggtgatgactctgaagatacagggaatcaaatcagccatggtatcgatgatggcattccaataaatgatgtaaatgcagaacgtatacctttaacagttgaagaagaggaagaagcattcaatattgagggtgaatcaatggttccatcaactgacgaatcactttcatatgcagataacttaaaactttacaaaaaactaaaaattcaaattgtatccgggggtgctctgggtctaataatatgtgcctttattggtggtgcttttattgcggtcttttatcatatcggtaccgatctttggactatgagtgagcactattacgaaggtatattgagtcttgtggcctcggtgatcatttcggtaatgggcttgttcttcttaagaatgggtaaattaagagagaaattcagggtcaaacttgcgtctatcatatattctgaccgtggtggaatgatctctaaagtaaattcgagtaaagcagtgagctttagtgagaaatatgcattttttatcttaccgtttgttacatcattacgtgaaggtttggaagctgttgtgtttattggtggtgtaggcctcgatcaaccaatgagcgctattatggtttctatggcttgtgcagtctgtattagtggcgtgtttggtgtatttttcttccgctactctagttcgctatctcttaaaatctgtcttgttgttactacctgcttcatgtacctgattgcatcaggattattctcaaaaggtgtatggcaactggagttacaagattatgttaataaatgtaatggacaagatatgagtgaagttggaagtggacctggatcctacgatatctcacgctcagtctggcatgtaaactgttgtaatggcgaaactgatggtggatggatgattctaacagctatctttggatggacaaatagtgccacatatggctctgttttaagttacattatatactggctaattttaattggctgcctgaaattacttactctggaagagcaatacggttacattcctgggttgccagtttcatggcaaaagaagaggataataaaaaggctgaaaattgcccatgcttcactaaaactaaaacaaaatattggttctacctctatgagtaatggtgttcaatcacagcgtgtttcaaaggatagcactaccccactaataagtcactga

SEQ ID NO: 3873 - protein, 435 aa, Candida glabrata CBS138
MAFEDYFSFQVFFIFLRESLEIAVIISILLTIVKQGLSVGDDSEDTGNQISHGIDDGIPINDVNAERIPLTVEEEEEAFNIEGESMVPSTDESLSYADNLKLYKKLKIQIVSGGALGLIICAFIGGAFIAVFYHIGTDLWTMSEHYYEGILSLVASVIISVMGLFFLRMGKLREKFRVKLASIIYSDRGGMISKVNSSKAVSFSEKYAFFILPFVTSLREGLEAVVFIGGVGLDQPMSAIMVSMACAVCISGVFGVFFFRYSSSLSLKICLVVTTCFMYLIASGLFSKGVWQLELQDYVNKCNGQDMSEVGSGPGSYDISRSVWHVNCCNGETDGGWMILTAIFGWTNSATYGSVLSYIIYWLILIGCLKLLTLEEQYGYIPGLPVSWQKKRIIKRLKIAHASLKLKQNIGSTSMSNGVQSQRVSKDSTTPLISH

SEQ ID NO: 3874 - DNA, 1161 bp, Kluyveromyces lactis NRRL Y-1140
  CDS (1)..(1161)
atggctgctaacaaggttttcaacgttgctgtgttcttcgttgtgttcagagaatgtttagaagcagcggtgattgtttccgtgttgctttctttcttgaaacaatccatcggttctaatgatatggccacttataaaaggttgagaatgcatgtctggatcggtgttgttgctggtttcatcatttgtatggccattggtggtggtttcattggtgcttactaccgttacgaaaatgatattttcggttctgctgaagatttatgggaaggtgtcttctgtatcatcgctaccttaatgatttctgtcatgggtattgctatgttaagagtcaacaagatgcaagccaaatggagagttaagattgccaaggccatgcttgaagttccaaaggacagacgtaagaaatggagtcttaaatactgggctaccagatattctatgtttttgttgccatttatcactgttttgagagaaggtttggaagccgtcgtgttcgttgctggtgccggtattaccaccaaggattccaaggccactgcgtacccattgcctgtcgtcattgggttaattgctggtatcatcgtaggtactttgttgtactacggtacttctaagtcatctctacaaatcttcttggtcatttctacttgtgttctttacttgattgcttccgggttgttctccagaggtgtgtggtacttcgataactattacttcaacaagaagaccggtggtgacgcatccgaatccggtgatggtaacgggtcctataacatcttaagaaccgtgtaccacgttaactgttgtaacccggaattggacaacggttgggatatcttcaactcgttgttgggctggcaaaacactggttatttgtcatccatccttgcttacaacttgtactggttggtcttaatgattgttatcggactaatgatgtacgaagaaagaaatggccatttaccattctgtaagaatctaaaactgagacaattgaagccaagctactatttaaaacgtaagcagaacgaagagttgaccgctgctgaacaagaggaattgttcaaacaagtcaacaatttgggcgtcgacgaagaaggtaacgtcgtcgttaacaaaggtgacactaccaaagtcaacgtcgaactcgtgaaataa

SEQ ID NO: 3875 - protein, 386 aa, Kluyveromyces lactis NRRL Y-1140
MAANKVFNVAVFFVVFRECLEAAVIVSVLLSFLKQSIGSNDMATYKRLRMHVWIGVVAGFIICMAIGGGFIGAYYRYENDIFGSAEDLWEGVFCIIATLMISVMGIAMLRVNKMQAKWRVKIAKAMLEVPKDRRKKWSLKYWATRYSMFLLPFITVLREGLEAVVFVAGAGITTKDSKATAYPLPVVIGLIAGIIVGTLLYYGTSKSSLQIFLVISTCVLYLIASGLFSRGVWYFDNYYFNKKTGGDASESGDGNGSYNILRTVYHVNCCNPELDNGWDIFNSLLGWQNTGYLSSILAYNLYWLVLMIVIGLMMYEERNGHLPFCKNLKLRQLKPSYYLKRKQNEELTAAEQEELFKQVNNLGVDEEGNVVVNKGDTTKVNVELVK

SEQ ID NO: 3876 - DNA, 1323 bp, Kluyveromyces lactis NRRL Y-1140
  CDS (1)..(1323)
atgtcaaagtcaagttttgagaattatttctcgtttcaaatttttttcatcttcttgagagagtcgttagagatcatcataatcgtttccatcttgttgacaatcgtcaaacaagccttattctcgcatgataccaccgctgaatccgatacagagtcttcaaaaaatgctgccccggttaccattcaagaggaagaagcttcagatttattattgagagttaatgactccgattctccaaatctaggtctagaagttgataaccagcagttatataaaaaactaaaacttcaaatcatttctggaggtttgttaggccttttggcatgtatgtttattggtggtggatttattgtggcattttattatgttggcacggatttgtggtctatgagtgaacattattatgaaggtgttttaagcgttattgcgtctgtcatcatttcagttatgggattgttcttcttaagaatgggtaaacttagagagaagttcagagttaaattggcatccatcatttactcagacaaattacttccgatggaaaatggcgaaagcaaagctaaaagtttcagcgagaaatactcattattcatcctaccatttgttacttctttgagagaagggctagaggctgtcgtcttcattggtggtatcggtatcgatagtccattaacctctattccactatcgatgctttctgctacggcgatctcggcaattttcggtgtattcttcttcaaatactcaaagtcgttttcattgcaaatttgccttgtggtaacaacatgtttcctatatcttattgccggcggattattctccaagggtgtatggcagtttgaacttcagaagtatgttgatgcttgtaacggtcaagatatgagcgaagttggaaacggtccaggttcttatgatatctcgcgttcggtatggcatgttaactgttgtaacggtgaaagggatggattttggatgattttgaccgccatttttggatggactaactcagctacctatggttcagttagcagttatattatgtactggttaattgttatcgctgttataaagctaatgatgctcgaagagaaacatggatatattccatttttgcctgtcagtctacaaagaaggagaatgaacaaaagattatctattattgaaaagtctcttgcactcaaatctcaatcatccacgagtggctggaactcatcttccactaccaaaaacttgcctgatattccgagagcttcatcggatactcacaatagctctagcctcctgttagattctaattcgcctgctcaaggttatcagtga

SEQ ID NO: 3877 - protein, 440 aa, Kluyveromyces lactis NRRL Y-1140
MSKSSFENYFSFQIFFIFLRESLEIIIIVSILLTIVKQALFSHDTTAESDTESSKNAAPVTIQEEEASDLLLRVNDSDSPNLGLEVDNQQLYKKLKLQIISGGLLGLLACMFIGGGFIVAFYYVGTDLWSMSEHYYEGVLSVIASVIISVMGLFFLRMGKLREKFRVKLASIIYSDKLLPMENGESKAKSFSEKYSLFILPFVTSLREGLEAVVFIGGIGIDSPLTSIPLSMLSATAISAIFGVFFFKYSKSFSLQICLVVTTCFLYLIAGGLFSKGVWQFELQKYVDACNGQDMSEVGNGPGSYDISRSVWHVNCCNGERDGFWMILTAIFGWTNSATYGSVSSYIMYWLIVIAVIKLMMLEEKHGYIPFLPVSLQRRRMNKRLSIIEKSLALKSQSSTSGWNSSSTTKNLPDIPRASSDTHNSSSLLLDSNSPAQGYQ

SEQ ID NO: 3878 - DNA, 1260 bp, Debaryomyces hansenii CBS767
  CDS (1)..(1260)
atgattcaagtttctgactatttctctattgagatatttttcataatattaagagaaacattagaaactgctattattatatcagttttgctttcatttataaaccaaagatcacattcccatgacggttcagggaattcggtaagttctcaaagacatgctgaagaacaaagaaaacttagacttcaggtgtgggcgggtgctgtcattggtttattaatatgcctcgttataggattggtctttattacatgcttttatattattggtaaggattattggtcgtacactgaaagattatgggaaggaatattttcattgatttcgtctgtaattatcaccgtaatgggcattgggttattacgaattaataaagttatgaaagttaaatggtggattaaattgggctcggcttataacaccgaagacaatagcggacgtcttgaaactagcgaagggagtgatgatatagatagtgaattatctggcactccagtaagtcaagaaaggcctcgaaaacattcctttacaaagaaatatttcttggcaatattaccattgatcactacattaagagagggtttggaagctgtggtgtttgtaggtggaattggtatgtcacaacctccaacctcaattccgctttcgattgtaggggggattctagtaggttcaggcattggctacatgttgtataaaggtggtaacaaaatgtcattacagtatttcttaattttcctgacatgtttcttgtacatagttagtgctggattgatgagcagaggtgtttggttcatggaattggaaagatatgttaggttatgtggtggcttggatgtaagtgaaacaggaagtggtcctggatcgtacgatattgcaaacagtgtttggcatgtcaattgttgtaatggattaactgatggttggtggatggtcttgaatgctattattggatggacaaattcagcaacttacggtagtgttatctcttactgtacatactggctatttgtttctttatggttggagataaaattatacgaagagaaactgggagtattaccattggttccaattaagtggcaattgaaaagaataaagaagaaagtcaaattatacgaaaccagacttaaacagcaacgtgaatctcaccagcaacatgaagtgaacaccaacgaatatcatgaactagacagtaatccatctatggagatcaaccctagagaagctgagggccaattattattgtccaatgattga

SEQ ID NO: 3879 - protein, 419 aa, Debaryomyces hansenii CBS767
MIQVSDYFSIEIFFIILRETLETAIIISVLLSFINQRSHSHDGSGNSVSSQRHAEEQRKLRLQVWAGAVIGLLICLVIGLVFITCFYIIGKDYWSYTERLWEGIFSLISSVIITVMGIGLLRINKVMKVKWWIKLGSAYNTEDNSGRLETSEGSDDIDSELSGTPVSQERPRKHSFTKKYFLAILPLITTLREGLEAVVFVGGIGMSQPPTSIPLSIVGGILVGSGIGYMLYKGGNKMSLQYFLIFLTCFLYIVSAGLMSRGVWFMELERYVRLCGGLDVSETGSGPGSYDIANSVWHVNCCNGLTDGWWMVLNAIIGWTNSATYGSVISYCTYWLFVSLWLEIKLYEEKLGVLPLVPIKWQLKRIKKKVKLYETRLKQQRESHQQHEVNTNEYHELDSNPSMEINPREAEGQLLLSND

SEQ ID NO: 3880 - DNA, 1284 bp, Debaryomyces hansenii CBS767
  CDS (1)..(1284)
atgaggacgttagacaactacttctcggtacaagtatttcttattgtgttgcgagaaacactagaactggcaattattatatcagtattattagcattcattaaacagagttttaattccaataatcttttaaattctaaccataacacgttgaataagaatcatattgttgatggtgatgaaacatcagaagtattacacgagaccggtcattcagagatctcagatgatcagcatactagcgttgctgtagacaactcgtcgatatacaattacttgaggctccagatatggatcggtgggttattaggagttacgtgttgtttaataattggatcgataatcttggcaatattttacataataggcaaagatttttggtcagtaacagagcattactgggaaggcacgttttccatactagctagtatcattatatcagtaatgggtataaaaatattgagagtaagtaaaatgcaagataaatggaaaaataagttgtcaacattgattaaccagtctaattatattgggaatataatgagacaaccaagtgataattctgaattatcaggaaaggtttctaatttttctgaaaagtacgccatgtttattttgccctttgtgaccacgctaagagaaggaatggaggctatagttttcatcggaggtattgggatcaacgaaaatacttcaatttgggctatttttaattcattggtaacagcgttaagtcttggtttgctaatcggtggtttactctaccgcctgggaaacacattatccttgcagtggtttttgatcgcatccactgggttcttatatttagttgcggcgggattattctctaagggtgtatggaattttgaattgcaaagatttatcgatttatgcgatggatttgatgtgagtgaaacgggccatagaccaggctcatatgatatatccaaaagtatatggcatgtaaactgttgtaacggcgagctacaggatgacggtcctctttggatggtccttactgcagtgttaggttggaccaatagtgctacttatgggagtgtcataagttacaacgcttattggatcacggtaattttggtatttgcttcattgttgtttgaagaaaaacatggtcgcttaccagttattccattaacctggcaaaagaagagaattgccaaaaggtcaagctctcattatgctccagtatcgctgattgatacttcagctattccccgggaaagtattgattccgtaaattcaaagactcccttaaatagctaa

SEQ ID NO: 3881 - protein, 427 aa, Debaryomyces hansenii CBS767
MRTLDNYFSVQVFLIVLRETLELAIIISVLLAFIKQSFNSNNLLNSNHNTLNKNHIVDGDETSEVLHETGHSEISDDQHTSVAVDNSSIYNYLRLQIWIGGLLGVTCCLIIGSIILAIFYIIGKDFWSVTEHYWEGTFSILASIIISVMGIKILRVSKMQDKWKNKLSTLINQSNYIGNIMRQPSDNSELSGKVSNFSEKYAMFILPFVTTLREGMEAIVFIGGIGINENTSIWAIFNSLVTALSLGLLIGGLLYRLGNTLSLQWFLIASTGFLYLVAAGLFSKGVWNFELQRFIDLCDGFDVSETGHRPGSYDISKSIWHVNCCNGELQDDGPLWMVLTAVLGWTNSATYGSVISYNAYWITVILVFASLLFEEKHGRLPVIPLTWQKKRIAKRSSSHYAPVSLIDTSAIPRESIDSVNSKTPLNS

SEQ ID NO: 3882 - DNA, 1155 bp, Debaryomyces hansenii CBS767
  CDS (1)..(1155)
atggttaacgtatttaacgttcagatttttttcattgtctttcgtgaaaccttagaagctgttgtcgtcgtttcggtcttattagccttcttaaagcaaggtttagggggagcaacaaatgacccagctgtatataaaaagttagtcagacaggtttgggtaggggcgcttctagggttgttgatatgtcttattttgggaggtgcttttattggtacattctattcgttaggtaaagatatttggggtaattctgaagatttatgggaagggattttctgtataattgcgacggtattaatttcgatgatgggtattgctatgttgcgtgttaataagatgaaagaaaaatggagagttaaattggcacaggctttaatcaaggaaccaccaaagggaaaagacagattcagaattgggtacttgactaagaaatactgtatgtttatcttgccattcattaccactctcagagaagggttagaagctgtcgttttcgttggtggtgttggtttagacagtcctgcatcatctttcccacttccagttgtctgtggtttgatcgcaggtctttttgtcggtaccttgttgtattattttggttctactgtttctttacaagttttcttgatcatttccactggtatcttgtacttgattgctgcagggttattttccagaggtgtttggttctttgaaaccaacacttataataaggcgactggtggtgatgcttctgaaaatggttcaggtcctggtacttacgatatttccaaatcggtctggcacgttaattgttgcaaccctgaaaccgataatggttgggatgtcttcaacgctcttttgggatggcaaaattctgccacatacggttcagtcatttcttacaacatctactggattgctgtgattgtaaccttgttattgatgatgtacgaagaaaagacaggacatttaccattcttgaagaatgtcacattagtcaaattgaacccaatgtatcacattaaaaataagaagaagcatgaacttactaaagaacaacaagaagaattgttcgaaaaagtcagaaatcaaaggattgtggctgacggtgagtcaaacgagagttctatgctttctaataaggaagctattaatgcagttgagaaataa

SEQ ID NO: 3883 - protein, 384 aa, Debaryomyces hansenii CBS767
MVNVFNVQIFFIVFRETLEAVVVVSVLLAFLKQGLGGATNDPAVYKKLVRQVWVGALLGLLICLILGGAFIGTFYSLGKDIWGNSEDLWEGIFCIIATVLISMMGIAMLRVNKMKEKWRVKLAQALIKEPPKGKDRFRIGYLTKKYCMFILPFITTLREGLEAVVFVGGVGLDSPASSFPLPVVCGLIAGLFVGTLLYYFGSTVSLQVFLIISTGILYLIAAGLFSRGVWFFETNTYNKATGGDASENGSGPGTYDISKSVWHVNCCNPETDNGWDVFNALLGWQNSATYGSVISYNIYWIAVIVTLLLMMYEEKTGHLPFLKNVTLVKLNPMYHIKNKKKHELTKEQQEELFEKVRNQRIVADGESNESSMLSNKEAINAVEK

SEQ ID NO: 3884 - DNA, 1140 bp, Debaryomyces hansenii CBS767
  CDS (1)..(1140)
atggttgatgtattcaatattcaaattttcttcgttttattcagagaaacattggaaggcgtcgtcattatttctattttgcttgccttcttgaagcagggattagcaggcccttcaaatgacgcagttgtatataagaaattagtacgacaggtctggtttgggactatattaggggtggtattttgtctcattgtaggtagtatttttattggcatattctacactgttggaagtgacgtatggcaaaaatctgaagacttatggaccggagtcttttgtatgattgcgtctgttttaatttcaatgatgggcattgctatgttacgtgttaataaaatgaaagaaaaatggagaatcaagatagcacaggcattgcttaatgttccagaaaagaaacttgatcgctttaagttaggttatttgacaaaaaagtactgtttttttattttgccatttgttacttgtatacgtgaaggtttagaggctgttgtatttgttgggggagtaggattaaatcgacctgtttcttctttcccgcttccagttatctgtggtttacttgctggaattgcagttggttttgcattatactactgggggtcaacaatctcagtacaaatatttttgatcatttccacttgtatcttgtatttaatagcttccggtttgttctctagaggtgtgtggtattttgaaacaaatacttataatcagaaaactgggggagatgcatctgaaaatggatctggtccaggtacctatgatattagcaaatctgtgtggcacgtcaattgctgtaatccacagaaagataatggttgggatgtatttaatgcactactaggttggcaaaattctgccacgtacggctcagttatatcgtactgtgtctattggctctgcatgatagtagttttattgttgatgtcatacgaagagaaacatggacacctaccattctccaagaacttgactttggctcaattgaatccaatgtatcatattaaaggcaagaagaataataacctttctaggagagagaaagacgagttattcgccaaagtaaagattaaaaatattgttattagtaaaaattttgattttgaagaatcaaattcaaatatttctcgcctgtaa

SEQ ID NO: 3885 - protein, 379 aa, Debaryomyces hansenii CBS767
MVDVFNIQIFFVLFRETLEGVVIISILLAFLKQGLAGPSNDAVVYKKLVRQVWFGTILGVVFCLIVGSIFIGIFYTVGSDVWQKSEDLWTGVFCMIASVLISMMGIAMLRVNKMKEKWRIKIAQALLNVPEKKLDRFKLGYLTKKYCFFILPFVTCIREGLEAVVFVGGVGLNRPVSSFPLPVICGLLAGIAVGFALYYWGSTISVQIFLIISTCILYLIASGLFSRGVWYFETNTYNQKTGGDASENGSGPGTYDISKSVWHVNCCNPQKDNGWDVFNALLGWQNSATYGSVISYCVYWLCMIVVLLLMSYEEKHGHLPFSKNLTLAQLNPMYHIKGKKNNNLSRREKDELFAKVKIKNIVISKNFDFEESNSNISRL

SEQ ID NO: 3886 - DNA, 1221 bp, Yarrowia lipolytica CLIB99
  CDS (1)..(1221)
atggtcaactacgcggactttttcgagaattatttctcggttcaggtcttcttcatcatcttccgagagaccattgagacggcgattatcatctccgtgcttctggcgttcctcaaccagggtctgggcgataatgtgtcccagaaggacttgcaagtgtatcgacggcttgttacccaggtatggctgggtggaatcttcggtctgctcatctgtctggccgtgggaggtgcgttcattgccaccttttacatctacggacacgatctgtggggcatgactgagaacgtgtgggagggcgtcttctccattgtctcgtccatcattatcaccatcatgggagccgccatgctgcgaatcaacaagatgcgagaaaagtggcgacacaagattgccaagattctggtcgagacccacgagggccacggcggctggggcctcaagtacctgtctcgaaagtacgctctggccatcctaccgtttgtgaccacccttcgagagggaatggaggccgtggttttcctcggcggtatcggtgtcaaccagcctttctctgctttcccccttcccgtcatcaccgccattgcccttggtgctttcattggttacgccatgtacaagtatggcaacgccatctccatcaactacttcctcattggctccacgtgcttcctgtacctggtggccgccggtcttttctcccgtggagtgtggttcctggagctgcagcagttcgttaacagagttggtatggacgtatctgagaccggctctggacccggctcctacgacatcaccaagtccgtgtggcacgtcaactgctgcaacggtcagaccgatggaggatggatgattgccaacgcgctgtttggatggaccaactcggccacctacggctctgtcatctcctacaacttttactggatcttcatcattgtggccgtctacgtgtctttggtcaaggagaagactggctacaaccccctgtaccctcgagcgtggcagtccaagaagtttactcgacttcctcagaacgacgacgaggaccgactcttccagcgagcctcggctgtttactccgctgatatgaacgttgagggccagggcactaacaagagctcccagtacggcaccaacagcatgcccaactcggccaacaccgcggccgagaaccgagagtctgtggactctgacgctcctcttcttgccagcacttcttaa

SEQ ID NO: 3887 - protein, 406 aa, Yarrowia lipolytica CLIB99
MVNYADFFENYFSVQVFFIIFRETIETAIIISVLLAFLNQGLGDNVSQKDLQVYRRLVTQVWLGGIFGLLICLAVGGAFIATFYIYGHDLWGMTENVWEGVFSIVSSIIITIMGAAMLRINKMREKWRHKIAKILVETHEGHGGWGLKYLSRKYALAILPFVTTLREGMEAVVFLGGIGVNQPFSAFPLPVITAIALGAFIGYAMYKYGNAISINYFLIGSTCFLYLVAAGLFSRGVWFLELQQFVNRVGMDVSETGSGPGSYDITKSVWHVNCCNGQTDGGWMIANALFGWTNSATYGSVISYNFYWIFIIVAVYVSLVKEKTGYNPLYPRAWQSKKFTRLPQNDDEDRLFQRASAVYSADMNVEGQGTNKSSQYGTNSMPNSANTAAENRESVDSDAPLLASTS

SEQ ID NO: 3888 - DNA, 1245 bp, Yarrowia lipolytica CLIB99
  CDS (1)..(1245)
atggccaacgcgttttccgttccggtcttcttcattgtctttcgagagactctggaggccgccatcatcatttcggtgctgctggccttcatcaagcagtctctgggcccggctcctgtgacggaccatcccgattatgaccccgaaaaccccgagaaggatctcagtcccgtggcaacctccgccgatgacgcctttgccggccagtccgaggctgacaaggctctgctgcagaagaagctcatcaagcaggtgtggattggcgccgctcttggtcttctcatctgtttcattctcggaggcaccttcatcggtgtcttctactcgctggacaaggatctctgggcttcgtttgaagacctgtgggaaggtatcttctgtatcattgctaccatcatgatcaccttcatgggtctggccatgctgcgaatcaacaagatgaaggagaagtggcgaatcaagattgccaagaccctgctgcagaacaagggcgagtacaaggacacttccttcaagggccgactcaagagtctcttcaacttccgatacaactccaagaagtacgctctgggcattctcgccttcgttactaccctgcgagaaggtattgaggccgtggtctttgtcggaggtgttggactcggtgaggatgccaccgcattccctcttcccgtcttttgtggtctggcagccggcggtctgatcggatacttcatctaccgaggaggtaacttcatgtctatccagatcttcctcatcgcctccacctgtttcctctacctcattgctgccggtctcttctcccgagctatctggtacttccagatgtaccgattctccaagaagtctggtggagatgtcgccgagggaggctccggccctggctcctacaacatcaaggaggtggtctggcacgtcaactgctgcgaccctctcaacgacggtggctggcagatcttcaacgcgctgtttggatggcaaaactcccccacctacggctccgtcatctcatacaatgtgtactggatctgcatcattctcgccattttcgccatgctcttcaacgagaagcacggctactaccccatgctcaagcgatgggccaagactgaggacaagactgccgacaatgccatgtacgaccgggccgtgttccatgctcgacaggatgctggcgtcgagaagaatgctgtcgtgacggagaactccgcgtctagcagcgacgaacgaaaggaggttgcctaa

SEQ ID NO: 3889 - protein, 414 aa, Yarrowia lipolytica CLIB99
MANAFSVPVFFIVFRETLEAAIIISVLLAFIKQSLGPAPVTDHPDYDPENPEKDLSPVATSADDAFAGQSEADKALLQKKLIKQVWIGAALGLLICFILGGTFIGVFYSLDKDLWASFEDLWEGIFCIIATIMITFMGLAMLRINKMKEKWRIKIAKTLLQNKGEYKDTSFKGRLKSLFNFRYNSKKYALGILAFVTTLREGIEAVVFVGGVGLGEDATAFPLPVFCGLAAGGLIGYFIYRGGNFMSIQIFLIASTCFLYLIAAGLFSRAIWYFQMYRFSKKSGGDVAEGGSGPGSYNIKEVVWHVNCCDPLNDGGWQIFNALFGWQNSPTYGSVISYNVYWICIILAIFAMLFNEKHGYYPMLKRWAKTEDKTADNAMYDRAVFHARQDAGVEKNAVVTENSASSSDERKEVA

SEQ ID NO: 3890 - DNA, 1221 bp, Yarrowia lipolytica CLIB99
  CDS (1)..(1221)
atgactgccgacgtcttttccgtcgaagtcttcttcatctgtttccgagaatgtctcgaggctgccattgtcatttcggtgctcctgtcctttgtcaagcagggtcttggcggcggagaggacaagactctctacaaaaagctgcttaagcagatctggatcggtgccgctggaggcattgtcatctgtctgtgtatcggtggaggtttcatcggcgcctactactcgtttgaagatgatatctggtccaagtccgaggatctgtgggagggtatcttctccgtcattgctaccattctgatcaccgttatgggcctggccatgctgcgaatcaacaagatgaaggaaaagtggcgaatgaagatcgccaaggcgctgctggaagaccaccagcaagtcaaggggttcaaaaagttcctcaacttccgcttctactccaaaaagtacgccatggccattctgcctttcatcaccacccttcgagagggagtcgaagccattgtgttcattggtggagtcgctgtcggtagacctgccaccgccttccctctcgctgtcttttgcggtcttctggccggatgtgcctgtggatatctcatttaccgaggaggtaacatgatgtctattcagatcttcctcatcgcctccacttgcttcctctatctcattgccgccggtcttatctctcgagccgtgtggtacttccagatgtaccgattttcgctcaagactggcggggacgtggccgagcagggctccggaccgggctcgtacaatgtccacgaggtggtgtggcacgtcaactgctgcaaccccgagacggacaacggctgggagatttttaacgctctgtttggctggcaaaactcccccacctacggctccgtcatcatctacaacctctactggctgtgcatcattggcgccatcttcgccatgctgttccaggagaagcacggctactaccccggcttcaagtgggccaagcggttccagaagaaggagtactccaaggaggagattgatgagatgttccaccgggccgccgccacccagatcaacgaggctgcccagtaccacgccggctcgtcgtcagaggacctcgacaagggcgtcaacgatgtggagagcaagggcgtcgacgatatttctcctggctcctccaaccccgaggtgtctcgagttcagatcgagatgaccgacaagtcgcaggagaaataa

SEQ ID NO: 3891 - protein, 406 aa, Yarrowia lipolytica CLIB99
MTADVFSVEVFFICFRECLEAAIVISVLLSFVKQGLGGGEDKTLYKKLLKQIWIGAAGGIVICLCIGGGFIGAYYSFEDDIWSKSEDLWEGIFSVIATILITVMGLAMLRINKMKEKWRMKIAKALLEDHQQVKGFKKFLNFRFYSKKYAMAILPFITTLREGVEAIVFIGGVAVGRPATAFPLAVFCGLLAGCACGYLIYRGGNMMSIQIFLIASTCFLYLIAAGLISRAVWYFQMYRFSLKTGGDVAEQGSGPGSYNVHEVVWHVNCCNPETDNGWEIFNALFGWQNSPTYGSVIIYNLYWLCIIGAIFAMLFQEKHGYYPGFKWAKRFQKKEYSKEEIDEMFHRAAATQINEAAQYHAGSSSEDLDKGVNDVESKGVDDISPGSSNPEVSRVQIEMTDKSQEK

SEQ ID NO: 3892 - DNA, 1326 bp, Cryptococcus neoformans var. neoformans JEC21
  CDS (1)..(1326)
atggcaaaagacgttttctcagtccccatcttcttcatcgtcttccgtgagacgattgaagctgctatcatcgtctccgtccttctttcttttgtcgagcagcttatggccgctggttcactcgcccacgacgagagcgagcccagtatcgaaaacgcatccaacaatggatcagccgcggatgcagaagacctcacgaaccctcttaccgacaaggagcgacgagcaaagttagttaagaggatgagaattcaaatctgggcgggtacagctgtcggtttcttcattgctctttgtatcggtgctgctttcatcgctgtcttttacaccacactcaacgatctgtgggccgacactgaacaaatttgggaaggtgtcttctccgtcatcgctgctggtatcatctatataatggccactgccttcctcaaaatggacagaagccgtatcaagtggcgatggaagcttgccgccgcttttgaccgaagccaagccaaagcgctcgcccgtgaaaagatgtctaagcacgagagaaagcttgcagaaaaggaaggcaagagtggaaagtgggcattattccttctcccgttcatcactgtgttgcgtgaaggtcttgaggctgttgtctttgtcggtggtgtgtcccttggtattcccgctacctctatcccgctagccgtcgttgtcggcattattgccggtttcgctgtcggctacgcgatctaccgaaccggctctaccaccactctccattggttcctcgtcggttccacctctttcctctgtctcatcggggccggtcttctgtccaaaggtgtcggcttcttccaatactaccatttcagtaaaggtgtgggtggggatgtagcggagactggagatggacctggttcgttccaggttgcagggaatgtttggcatttggagtatggaaacccagagactggttctgctacgactaacggtggttggcaaatcttcaacgccattttcggctggaacaatacggccaccctgggcactatcctctcctacgtgttctactggatcctcgtcattgccactcttgtctatcttaaatggaaggaaggccgtttctcgttccttggatataaatccgccgctcttcaacgtcgtcatgcctttcgggaagagaagaaggccaaggaagcggctcgtctgcaggagggtgaggaatgccaaaccggtgctagggcgggtgatggaactcagcggaatgtggaaggagggagcagtgatgaaggcaagagtccggttctgacccccgtggacgaaaagaaaattgctgcgctggagaggcattga

SEQ ID NO: 3893 - protein, 441 aa, Cryptococcus neoformans var. neoformans JEC21
MAKDVFSVPIFFIVFRETIEAAIIVSVLLSFVEQLMAAGSLAHDESEPSIENASNNGSAADAEDLTNPLTDKERRAKLVKRMRIQIWAGTAVGFFIALCIGAAFIAVFYTTLNDLWADTEQIWEGVFSVIAAGIIYIMATAFLKMDRSRIKWRWKLAAAFDRSQAKALAREKMSKHERKLAEKEGKSGKWALFLLPFITVLREGLEAVVFVGGVSLGIPATSIPLAVVVGIIAGFAVGYAIYRTGSTTTLHWFLVGSTSFLCLIGAGLLSKGVGFFQYYHFSKGVGGDVAETGDGPGSFQVAGNVWHLEYGNPETGSATTNGGWQIFNAIFGWNNTATLGTILSYVFYWILVIATLVYLKWKEGRFSFLGYKSAALQRRHAFREEKKAKEAARLQEGEECQTGARAGDGTQRNVEGGSSDEGKSPVLTPVDEKKIAALERH

SEQ ID NO: 3894 - DNA, 1401 bp, Cryptococcus neoformans var. neoformans JEC21
  CDS (1)..(1401)
atgacactgacagactatttctcaccggtggcattcttcatcctccttcgagaaagtctcgaagcaggcatcatcatcgctgtgcttctaggttttattacccaaataatccccaaaccatcatcgcatcctcgcactctctcaactcccggtcacccagctaaccttccacgccactcgggggaatctgcgcagtcggagaactcgggtactcaactcctctcttctggccgtgcgagtatagatagggggtatggtgcttcttcaagaagcgtgtctcctgcaagaatagagagacttgaggttgaaaatgtggcagaggaagtaggcaaagatgaggggttgcttggtgctgacgtggatcgacgtgcgatcatgaagaagatgagagtgcaaatctggagtggagcgattttgggcggtagtgtagctattgcaattggcactgtttttctttacgtcttttatacctacaccagagacctgtggcaagatgcggaaaacctatgggaaggcgggttttgtctacttgcggctgtcctaatcttggtcatgtccctggctttcctccgacttccccatgcccaaaccaaatggcgattaaagctgttgagcgcatatcaatcgcagtccaacgatgtcgagtctgattctcgacctggttctcctgacggacgccctcatgataatagtctcggacacccatcacaagttaccacaaaccctcgtcgcaggcgagctaatcgagcttccgctatcctctttgggttgccattcatcactgtcctccgcgaaggtcttgaagggatcgtgttcttgggtggtatcggcctttcggagtcgccttcatccgtcattggcggcggcatttgtggtcttttcgcaggtgccctctgcgcttatctcttgttctcatccaccactccgctctctgttcacacttttaccacattttcctctctccttcttttcctcatcggagctgggcttgcatctcgctccgcttacgctcttgaacgtcagtactttatcaaccatgtaggcgcagctgctgccgagagtggcaatggccctggcagctatcgcgtcaagggtaacatctggcatttgacttggtgggatcccgaacccgggagcggggataattgggcgcaagtcgcacaagccgttctgggatggaacaataccggtacttggtggaccatctcaacgtacatgttttattggctgctcataacgtttactctcatctacatgaaatgggccgaaggccgttgcgctatttttggtgtcctctcatcaaggggtaaagagctggagaggagtcgacgggtgagaggcacggcgggtgaagatgatgaggaggtgctcttagatgaccgtagtgacgttggcgagtag

SEQ ID NO: 3895 - protein, 466 aa, Cryptococcus neoformans var. neoformans JEC21
MTLTDYFSPVAFFILLRESLEAGIIIAVLLGFITQIIPKPSSHPRTLSTPGHPANLPRHSGESAQSENSGTQLLSSGRASIDRGYGASSRSVSPARIERLEVENVAEEVGKDEGLLGADVDRRAIMKKMRVQIWSGAILGGSVAIAIGTVFLYVFYTYTRDLWQDAENLWEGGFCLLAAVLILVMSLAFLRLPHAQTKWRLKLLSAYQSQSNDVESDSRPGSPDGRPHDNSLGHPSQVTTNPRRRRANRASAILFGLPFITVLREGLEGIVFLGGIGLSESPSSVIGGGICGLFAGALCAYLLFSSTTPLSVHTFTTFSSLLLFLIGAGLASRSAYALERQYFINHVGAAAAESGNGPGSYRVKGNIWHLTWWDPEPGSGDNWAQVAQAVLGWNNTGTWWTISTYMFYWLLITFTLIYMKWAEGRCAIFGVLSSRGKELERSRRVRGTAGEDDEEVLLDDRSDVGE

SEQ ID NO: 3896 - DNA, 1302 bp, Cryptococcus neoformans var. neoformans JEC21
  CDS (1)..(1302)
atggcgaaggacctgttctcggtcaccatcttcttcatcgtcttccgtgagacggtcgaggcggccatcatcgtttcggttttgctgtccttcgtggaacagcttatggcctctggaggccccaagaaagatgatgcccaagttcaacatctttcagaggaagaggaaataaagaaaacgaaacgaatccttcggcgaatgcgtattcaaatttgggcgggtactttgactggtttcattattgccgttgctgtcggcgctgcttttattgctggttggtatactactctgacagacttgtgggccaacacagaagaattatgggagggtattttcagtcttattgcttgcatcatcatctacgtcatgggtctcacctttttgaagatggaccaatctcgtgtcaaatggcgtatcaagctttccgaagctttcgctcaccgtgccggcaaggccctcttcagtttcggcggcaataaggaagatggcgagcctgacaggccactcaccgaggaggaacttgccgaagagcaagccatgaagaagaaggctcgaagtggaaagtatgccatcttcttcctgcctttcatcactgtgatacgagagggtttggaggctattgtcttcgttggtggtgtttctttgggtcaagatggtgcctctatccctattgctgcgatcgtcggtctcatcgccggtatcttcgttggttggtgtatctaccgcactggctctactctggcccttcactggttcttgattgtttctacttgcttcttgttcctcattggttcgggattattcagcaaaggtgtttacgatttcgaatactaccgattctcttctgctgtcggtggtgatgtcgctgagtccggtaacggccccggttcattccaggttgctggtaacgtctggcatcttgagtacggaaatcccgagccgggagctgtcggcaccaacggtggttggcagattttcaatgccattttgggttggaacaacactgcttctctcggatctatcctctcttactgtttctattggattgcggttatcgttggtttggctgtcatgaagtggcacgaaggtcgttttacaatctttggtcgaggctctaaggcccatggccgtatccaagcaagagctgaaataaagagggctgccgagggtcaagtttcagaaggatctgagaaggacgaaggcgcttctgaggagggcaccgctcgcgacacaacgcatctcaataagaatggggattctcctgaggactctctcactcccatgattgagaatagcctttga

SEQ ID NO: 3897 - protein, 433 aa, Cryptococcus neoformans var. neoformans JEC21
MAKDLFSVTIFFIVFRETVEAAIIVSVLLSFVEQLMASGGPKKDDAQVQHLSEEEEIKKTKRILRRMRIQIWAGTLTGFIIAVAVGAAFIAGWYTTLTDLWANTEELWEGIFSLIACIIIYVMGLTFLKMDQSRVKWRIKLSEAFAHRAGKALFSFGGNKEDGEPDRPLTEEELAEEQAMKKKARSGKYAIFFLPFITVIREGLEAIVFVGGVSLGQDGASIPIAAIVGLIAGIFVGWCIYRTGSTLALHWFLIVSTCFLFLIGSGLFSKGVYDFEYYRFSSAVGGDVAESGNGPGSFQVAGNVWHLEYGNPEPGAVGTNGGWQIFNAILGWNNTASLGSILSYCFYWIAVIVGLAVMKWHEGRFTIFGRGSKAHGRIQARAEIKRAAEGQVSEGSEKDEGASEEGTARDTTHLNKNGDSPEDSLTPMIENSL

SEQ ID NO: 3898 - DNA, 1146 bp, Candida albicans SC5314
  CDS (1)..(1146): transl_table=12
atggttgacgtatttaacgttcaaattttcttcatcgttttcagagaatctttggaagctatcattgttgtttcagtgcttttggcattcgttaagcaatctatgggtggtagttccgaccctcaattgaaaaaacgattgtatcgtcagatttggctaggggcggggctaggggttctagtctgtcttattattggttgtgctttcatcggtgcgttctacggtttaggtaaagatatttggggtaattccgaagatctatgggaaggtatcttttgtatcattgccacggtcttgatcactgctatgggtattccaatgttgagaatcaacaagatgaaagaaaaatggagagtcaaattagctcaagctttaattaaatctccaactaacaaaaaagatagatttaaattgggttaccttggtaagaaatatgctcttttcattttaccattcattacttgtttgcgtgaaggtttagaagctgttgtcttcgttggtggtgttggtttgaatagtccagccacctctttcccaattccagtcattgttggtttaattgccggtatcgttgttggtgcattattgtactactttggttccagtatgtccatgcaaatcttcttaattatttccacctgtattttgtacttgattgctgctggtttgttctccagaggtatttggtatttcgaaaccaacacttacaataaaaaaactggtggtgatgcttctgaaaacggttctggtccaggtacttacgacatttctaaatctgtttggcacgtcaactgttgtaatccagaaaccgataacggttgggatatcttcaatgccattttgggatggcaaaactctgccacttacggttctgtcatttcctacaacatttactggctctttattatctgtgttttgttgttaatggtttacgaagaaaaacacggccacttgccattcaccaagaatttgactttggtccaattgaacccaatgtaccacatcaagggtaagaagaagttagaattaaacaaagctgaaaaggatgaattgttcactaaacttcaacaacaaaactttggtcaagctgcagaagttgatgaaacttcatcaaacaaattgatcgaatccaaagaaaacaaataa

SEQ ID NO: 3899 - protein, 381 aa, Candida albicans SC5314
MVDVFNVQIFFIVFRESLEAIIVVSVLLAFVKQSMGGSSDPQLKKRLYRQIWLGAGLGVLVCLIIGCAFIGAFYGLGKDIWGNSEDLWEGIFCIIATVLITAMGIPMLRINKMKEKWRVKLAQALIKSPTNKKDRFKLGYLGKKYALFILPFITCLREGLEAVVFVGGVGLNSPATSFPIPVIVGLIAGIVVGALLYYFGSSMSMQIFLIISTCILYLIAAGLFSRGIWYFETNTYNKKTGGDASENGSGPGTYDISKSVWHVNCCNPETDNGWDIFNAILGWQNSATYGSVISYNIYWLFIICVLLLMVYEEKHGHLPFTKNLTLVQLNPMYHIKGKKKLELNKAEKDELFTKLQQQNFGQAAEVDETSSNKLIESKENK

SEQ ID NO: 3900 - DNA, 1149 bp, Candida albicans SC5314
  CDS (1)..(1149): transl_table=12
atggttgatcttttcaatgttcaagtcttttttgttgttttcagagaagccttggaagcagttattgttgtttcagtgcttttagcatttgtcaaacaatcaatgggctcctcagcaaacggtccagagttgaagaaaaagttgtatcgtcagatttggctaggggcggggctaggtgttcttatttgtataatcattggtggcgcttttattggtaccttttacgggttgggtaaagatatctggggaaaatcagaagacttgtgggaagggatattttgtatcattgccacagtcttgatcactgctatgggtattccaatgttgagaatcaacaagatgaaagaaaaatggagagttaaattagcacaagctttaatcaaatctccagaaaataagaagaaccgattcaaattgggatatcttgggaaaaagtacgcactttttattttgccattcatcacttgcttgcgtgaaggtttagaagctgttgttttcgttggtggggtcggtattactagtcctgcttcatctttcccaatcccagttattgttggtataatttgtggtcttgcagtgggtgccttgttgtactactttggttccaatatgtcgatgcaaatcttcttgatcatctccacttgtatcttgtacttgatcgctgctggtttgttctccagaggtgtctggttctttgagagttatcaatacaataaaaaaactggtggtgatgcggctgagaatggttctggcccgggtacatatgacatttccaaatctgtttggcatgtcaactgctgtaacccattgaccgacaatggttgggatatcttcaacgccattttgggatggcaaaactctgccacttacggttctgtcatttcctacaatgtttactggattttcatcatttctgttttgttattgatggtctatgaagaaaaacacggacatttaccgttaaccaaaaacttaactttggtccaattgaatccaatgtaccacatcaaaggtaagaagaagttagaattaaacaaagctgaaaaggaagaattgttcaccaaacttcaaaaacaaaagtttggtgatgttcaagaaattgacgaaacttcttctaacaaattagtcgaaactcaagaaaataaataa

SEQ ID NO: 3901 - protein, 382 aa, Candida albicans SC5314
MVDLFNVQVFFVVFREALEAVIVVSVLLAFVKQSMGSSANGPELKKKLYRQIWLGAGLGVLICIIIGGAFIGTFYGLGKDIWGKSEDLWEGIFCIIATVLITAMGIPMLRINKMKEKWRVKLAQALIKSPENKKNRFKLGYLGKKYALFILPFITCLREGLEAVVFVGGVGITSPASSFPIPVIVGIICGLAVGALLYYFGSNMSMQIFLIISTCILYLIAAGLFSRGVWFFESYQYNKKTGGDAAENGSGPGTYDISKSVWHVNCCNPLTDNGWDIFNAILGWQNSATYGSVISYNVYWIFIISVLLLMVYEEKHGHLPLTKNLTLVQLNPMYHIKGKKKLELNKAEKEELFTKLQKQKFGDVQEIDETSSNKLVETQENK

SEQ ID NO: 3902 - DNA, 1275 bp, Candida albicans SC5314
  CDS (1)..(1275): transl_table=12
atggcgggtacttcatttgaagagtacttctcaatccagacattcttaattgtctttagagaaacacttgaatctgctattatcatctcagtattgctttcatttgtgcatcaaacattcaatggcaacaccaaaaaatcaaatcgtgacactcgcaaccaaacttataacagcactgaaagttcaagttcattgatcccaactgaatctgatgaccttacttttgaaaaaaatgatgctaaactttgcagatatttacaattgcaaatatggattggtggattattaggacttttggtttgtctaataattggtgctatcattcttggtatattctatattattggtaatgatttgtggaccgtagctgaacactattgggaaggcacattttcaataattgccagtattatcatctcagtaatggggatcaaaatccttcgtgtgaataaaatgcaagaaaaatggaaattgaagcttggcaaaatattgcaaagttcgggatacttgaataactcaaacaatcaacaatcttttaacaaagctggtcgtacatgggcaactagaattgaattatggtcagaaaaatacaatatgttcatattgccatttgtcactactttaagagaaggtttggaagcaatagctgtcatcggaggtatcggtatcaatgaaaatacttcagtgatggctcttgtaaatgctgctgtgttggccattatgctggggattttggtaggagctatattgtatcgttatggtaatactttgtcgttgaagatgttcttaatcacatcaacgtgtttcttatatttagttgcagctggtttgttctccaaaggagtttggaatttcgaattacagagatttattgataaatgtgggggattagatgtgagtgagactggtcacggtccagggtcatatgatattgcaatatctgtttggcatgtcaattgctgcaatggagaaatgcaagaagacggagttttctggatggttttcactgctatcttaggatggacaaattctgctactattggtagtgttgttagttataatgtttattggattgttatcatattggtattctggtctttgatttatgaagaaaagaacggatttttacctttgatccctatttcctggcaattgaaaagaattcaaaagagaaagaacttgtaccaacctttagatgctcctgagattggtgtacacgaggaagttagagaaagtatggactcgttgaattcagaaacccctttacaaagatga

SEQ ID NO: 3903 - protein, 424 aa, Candida albicans SC5314
MAGTSFEEYFSIQTFLIVFRETLESAIIISVLLSFVHQTFNGNTKKSNRDTRNQTYNSTESSSSLIPTESDDLTFEKNDAKLCRYLQLQIWIGGLLGLLVCLIIGAIILGIFYIIGNDLWTVAEHYWEGTFSIIASIIISVMGIKILRVNKMQEKWKLKLGKILQSSGYLNNSNNQQSFNKAGRTWATRIELWSEKYNMFILPFVTTLREGLEAIAVIGGIGINENTSVMALVNAAVLAIMSGILVGAILYRYGNTLSLKMFLITSTCFLYLVAAGLFSKGVWNFELQRFIDKCGGLDVSETGHGPGSYDIAISVWHVNCCNGEMQEDGVFWMVFTAILGWTNSATIGSVVSYNVYWIVIILVFWSLIYEEKNGFLPLIPISWQLKRIQKRKNLYQPLDAPEIGVHEEVRESMDSLNSETPLQR

SEQ ID NO: 3904 - DNA, 1275 bp, Candida albicans SC5314
  CDS (1)..(1275): transl_table=12
atggcgggtacttcatttgaagagtacttctcaatccagacattcttaattgtctttagagaaacacttgaatctgctattatcatctcagtattgctttcatttgtgcatcaaacattcaatggcaacaccaaaaaatcaaaccgtgacactcgcaaccaaacttataacagcactgaaagttcaagttcattgatcccaactgaatctgatgaccttacttttgaaaaaaatgatgctaaactttgcagatatttacaattgcaaatatggattggtggattattaggacttttggtttgtctaataattggtgctatcattcttggtatattctatattattggtaatgatttgtggaccgtagctgaacattattgggaaggcacattttcaataattgccagtattatcatctcagtaatggggatcaaaatccttcgtgtgaataaaatgcaagaacaatggaaattgaagcttggcaaaatattgcaaagttcgggatacttgaataactcaaacaatcaacaatcttttaacaaagctggtcgtacatgggcaactagaattgaattatggtcagaaaaatacaatatgttcatattgccatttgtcactactttaagagaaggtttggaagcaatagctgtcatcggaggtatcggtatcaatgaaaatacttcagtgatggctcttgtaaatgctgctgtgttggccattatgctggggattttggtaggagctatattgtatcgttatggtaatactttgtcgttgaagatgtttttaatcacatcaacgtgtttcttatatttagttgcagctggtttgttctccaaaggagtttggaatttcgaattacagagatttattgataaatgtggtggattagatgtgagtgagactggtcacggtccagggtcatatgatatcgcaatatctgtttggcatgtcaattgctgcaatggagaaatgcaagaagacggagttttctggatggttttcactgctatcttaggatggacaaattctgctactattggtagtgttgttagttataatgtttattggattgttatcatattggtattctggtctttgatttatgaagaaaagaacggatttttacctttgattcctatttcctggcaattgaaaagaattcaaaagagaaagaacttgtaccaacctttagatgctcctgagattggtgtacacgaggaagttagagaaagtatggactcgttgaattcagaaacccctttacaaagatga

SEQ ID NO: 3905 - protein, 424 aa, Candida albicans SC5314
MAGTSFEEYFSIQTFLIVFRETLESAIIISVLLSFVHQTFNGNTKKSNRDTRNQTYNSTESSSSLIPTESDDLTFEKNDAKLCRYLQLQIWIGGLLGLLVCLIIGAIILGIFYIIGNDLWTVAEHYWEGTFSIIASIIISVMGIKILRVNKMQEQWKLKLGKILQSSGYLNNSNNQQSFNKAGRTWATRIELWSEKYNMFILPFVTTLREGLEAIAVIGGIGINENTSVMALVNAAVLAIMSGILVGAILYRYGNTLSLKMFLITSTCFLYLVAAGLFSKGVWNFELQRFIDKCGGLDVSETGHGPGSYDIAISVWHVNCCNGEMQEDGVFWMVFTAILGWTNSATIGSVVSYNVYWIVIILVFWSLIYEEKNGFLPLIPISWQLKRIQKRKNLYQPLDAPEIGVHEEVRESMDSLNSETPLQR

SEQ ID NO: 3906 - DNA, 858 bp, Yersinia pseudotuberculosis IP 32953
  CDS (1)..(858): transl_table=11
gtgtttagcacgttcgtcccatttcttattatgtttcgtgaagggctggaggcggcactgattgtcagtctgattgccagttacctcaagcgtactcaacgcggtcagtggatgggcgcagtctgggttggtgtggtggtggcagcggtgctttgtctcgctatcggtatctttatcaatgaaaccaccggtgagtttccacagaaacagcaagagctgttcgaagggattatcgctgtagtcgcggtttgcatattaacttatatggttttctggatgcgcaaagtctccaagtccgtcaaagttcacttggaaggggcaattgataatgcgcttaactctgggcgcggccaaggttgggcattagtggctatggtcttctttgctgtggcccgagagggtcttgaatctgttttcttcttgttagctgccttccaacaggatgtcggtatcggggcacctattggcgcgatactcgggttggtctgcgctattttggtcggaatggccatctattggggcggcgttaaattacatttagccaaatttttcaaatggaccagcctgtttattctgttcgttgccgcagggcttgccgccggtgctatcagagcctttcacgaagctggcttatggaaccatttccaagatattgcttttgatctgaccgatgtgctctctactcactcattattggggacgttccttgaagggatgtttggctatcaggaagcaccaacggtgagcgaagtgtctgtctactttatctatcttattccggcgttgattctgtttttccttccaccacgttccactgcgggttcggctatcgctgcggcgcggaaaattaatccataa

SEQ ID NO: 3907 - protein, 285 aa, Yersinia pseudotuberculosis IP 32953
MFSTFVPFLIMFREGLEAALIVSLIASYLKRTQRGQWMGAVWVGVVVAAVLCLAIGIFINETTGEFPQKQQELFEGIIAVVAVCILTYMVFWMRKVSKSVKVHLEGAIDNALNSGRGQGWALVAMVFFAVAREGLESVFFLLAAFQQDVGIGAPIGAILGLVCAILVGMAIYWGGVKLHLAKFFKWTSLFILFVAAGLAAGAIRAFHEAGLWNHFQDIAFDLTDVLSTHSLLGTFLEGMFGYQEAPTVSEVSVYFIYLIPALILFFLPPRSTAGSAIAAARKINP

SEQ ID NO: 3908 - DNA, 843 bp, Burkholderia mallei ATCC 23344
  CDS (1)..(843): transl_table=11
atgggtcagatcttgttcatcgtctggcgggagagcgtcgaggcgttgctcgtcgtcggcatcctctacgcgtggctgaagaacggcgacgacgaagcgcgccgcggcctgccttacctgtgggcgggcgtcggcgccggcctgctgatggcggtgggcctgggcgccgcgctcgtcggcttcaccgaggtgctgtcgggcgacgcgcaggactactttcagaccgcgatggtgctgatcgcgtgcgtgctgatcgtgcagatggtgctgtggatgaagcagcacgggcgcacgctcaagcgcgacatggagcgctctttgcagaagagcacgcaggacgcgaactggtggggcgtcgcggtgcttgtcgcgctcgcgatcgcgcgcgagggcagcgagacggcgatcttcctctacgggctcggcttcggccagtctggccacgtcgacggcagccagatgctcgccgtgctgatcggcctgggcctcgcgttcctgacgttctacgtgctgcagctcggtggcaagtatttctcgtggcggcacttttttcgcgtcaccgaaatcatgctgctgtttcttggcgcgggcctgttccagacgggtatcgacaagctgatcgacaaggaaatcctgccgctcggcatcgcgcaattgtgggatacgtcggcgatcctcgacgattcgagcacgttcggctcgctcgtgtcgacgttgaccggctatcgcgcgcatccgtcgttgaccaatctcgtcgcctacgtggcctactgggcgatcgtctatctgctgctcaagcgcgccgcgcgccgcccggcggcgactgcggggcggccggcatga

SEQ ID NO: 3909 - protein, 280 aa, Burkholderia mallei ATCC 23344
MGQILFIVWRESVEALLVVGILYAWLKNGDDEARRGLPYLWAGVGAGLLMAVGLGAALVGFTEVLSGDAQDYFQTAMVLIACVLIVQMVLWMKQHGRTLKRDMERSLQKSTQDANWWGVAVLVALAIAREGSETAIFLYGLGFGQSGHVDGSQMLAVLIGLGLAFLTFYVLQLGGKYFSWRHFFRVTEIMLLFLGAGLFQTGIDKLIDKEILPLGIAQLWDTSAILDDSSTFGSLVSTLTGYRAHPSLTNLVAYVAYWAIVYLLLKRAARRPAATAGRPA

SEQ ID NO: 3910 - DNA, 855 bp, Pseudomonas syringae pv. syringae B728a
  CDS (1)..(855): transl_table=11
atgctcgttccctttttgatcatgctgcgcgaaggcatcgaagccgcacttatcgttggcattatcgccagttacctgaagcagaccggccgtggcgagtggatgcctgcggtgtggatcggcgtatttctggctgtcgcgctctcgctgttcgtcggtggcgggcttgagttgatgagcgccgagtttccgcagaagcagcaggaactgttcgaaggcatcgtcggcctgatcgccgttggcattctcagttccatggtgttctggatgcgcaaggtggcacgatcgatcaaacacgcgctgcacgaatcgctggacgcagccctcaccggctcgaaaaaccagacctacgcgctgatcgccatggtgtttttcgccgtggcccgcgaagggctggaaaccgtattctttctgctcgctgtgttccagcagagcgaaggctccggcgcgccgttgggcgccctgctcggtctgttgctggcggtcggtttcggcgtggccatctacagcggcagcatgcgtctcaacctgagcctgtttttccgctggaccgggctgttcattctggtagtggcggcgggcattctcgccaactccgttcaggcactgcatgaagccggggtctggaatcacctgcaggaagtggtcttcgacatcagtgcacggttgccgatggacggccctgccggttcggtgctggcaggcatgttcggttaccaggacgcgccgacggtcagcactctgagtgcctacctgatttacctgatcggggcgctgctgctgttcttcaagccgcacaccccgaccgctggcaaggtcatgcagccaaacacctcttctgttacgaacgaataa

SEQ ID NO: 3911 - protein, 284 aa, Pseudomonas syringae pv. syringae B728a
MLVPFLIMLREGIEAALIVGIIASYLKQTGRGEWMPAVWIGVFLAVALSLFVGGGLELMSAEFPQKQQELFEGIVGLIAVGILSSMVFWMRKVARSIKHALHESLDAALTGSKNQTYALIAMVFFAVAREGLETVFFLLAVFQQSEGSGAPLGALLGLLLAVGFGVAIYSGSMRLNLSLFFRWTGLFILVVAAGILANSVQALHEAGVWNHLQEVVFDISARLPMDGPAGSVLAGMFGYQDAPTVSTLSAYLIYLIGALLLFFKPHTPTAGKVMQPNTSSVTNE

SEQ ID NO: 3912 - DNA, 849 bp, Pseudomonas fluorescens Pf-5
  CDS (1)..(849): transl_table=11
atgctcgttccatttctgatcatgttgcgcgaagggattgaagccgcgcttatcgttggcatcatcgccagctacctgaaacagactggccgtggccagtggatgcccgccgtgtggatcggggtcttcctcgccgcggccctggccctgctggtgggcggcggcctggaactgatgagcgccgaattcccgcagaagcagcaggaactcttcgaaggcatcgtcggcctggtggccgtcggcatcctcagttccatggtgttctggatgcgcaaggtggcgcgttcgatcaaacattccctgcatgtctccctggaccacgccctggccggctccaagcaccaggtcacggcgctgatcgccatggtgttcttcgccgtggcccgcgaaggcctggaaaccgtgttcttcctgctggcggtgttccagcagagcgaaggcccgggcgcgcccataggcgccctgctgggcctgatctcagcgatcatcgtcggcttcctgatctacaccggcagcatgcgcctgaaccttggcgccttctttcgctggaccgggctgttcatcctggtggtggccgccggcatcctcgccaattcggtgcaggccctgcatgaagccggggtctggaaccacctgcagaccgtactcttcgacttcagcgccagcctgcccatggatggcccggtgggttcggtactggccggcatgttcggctaccaggacgcccccaccatcagcaccctcggcgcctatgtgctgtacctggccgtgaccctggtgctgttcttcctgcccggcggcgccccagccaaggcgcccggctcaacgtcttccgtttccagtcagtaa

SEQ ID NO: 3913 - protein, 282 aa, Pseudomonas fluorescens Pf-5
MLVPFLIMLREGIEAALIVGIIASYLKQTGRGQWMPAVWIGVFLAAALALLVGGGLELMSAEFPQKQQELFEGIVGLVAVGILSSMVFWMRKVARSIKHSLHVSLDHALAGSKHQVTALIAMVFFAVAREGLETVFFLLAVFQQSEGPGAPIGALLGLISAIIVGFLIYTGSMRLNLGAFFRWTGLFILVVAAGILANSVQALHEAGVWNHLQTVLFDFSASLPMDGPVGSVLAGMFGYQDAPTISTLGAYVLYLAVTLVLFFLPGGAPAKAPGSTSSVSSQ

SEQ ID NO: 3914 - DNA, 855 bp, Pseudomonas syringae pv. phaseolicola 1448A
  CDS (1)..(855): transl_table=11
atgctcgttccgtttttgatcatgctgcgcgaaggcatcgaagccgcgctgattgttggcattatcgccagttacctgaagcagaccggccgcggcgagtggatgcctgcggtgtggatcggcgtgttcctcgctgccgcgctgtcgctgttcgtcggtggcgggcttgagttgatgagcgccgagttcccgcagaagcaacaggagttgttcgaaggcattgtcggcctgatcgccgtgggcattttaagctcgatggtgttctggatgcgcaaggtcgcccgctcgatcaagcacgcgctgcatgagtctctggacgctgccctcaccggttcgaaaaaccagacctacgcgttgatcgccatggtgtttttcgccgtggcccgcgaagggctggagaccgtattctttctgctcgcagtattccagcagagtgaaggctcgggcgcgccgctgggtgccctgctcgggctgttgctggccgtgggcttcggcgtggccatttacagcggcagcatgcgtctgaacctgagcctgtttttccgctggaccgggctgtttattctggtggtggccgcgggcattctcgctaattccgttcaggcgctgcatgaagccggagtctggaatcatctgcaggaagtggttttcgacatcagcgcactgttgccgatggacgggcctgccggctcggtactggctggcatgttcggttaccaggacgctccgaccgtcagcaccttgagcgtctacctgatttacctgatcggggcgctgctgctgttcttcatgccgcacaccccggcgtccggcaagaccctacagccgaaaacatcttctgtgacgaacgaataa

SEQ ID NO: 3915 - protein, 284 aa, Pseudomonas syringae pv. phaseolicola 1448A
MLVPFLIMLREGIEAALIVGIIASYLKQTGRGEWMPAVWIGVFLAAALSLFVGGGLELMSAEFPQKQQELFEGIVGLIAVGILSSMVFWMRKVARSIKHALHESLDAALTGSKNQTYALIAMVFFAVAREGLETVFFLLAVFQQSEGSGAPLGALLGLLLAVGFGVAIYSGSMRLNLSLFFRWTGLFILVVAAGILANSVQALHEAGVWNHLQEVVFDISALLPMDGPAGSVLAGMFGYQDAPTVSTLSVYLIYLIGALLLFFMPHTPASGKTLQPKTSSVTNE

SEQ ID NO: 3916 - DNA, 834 bp, Pseudomonas syringae pv. syringae B728a
  CDS (1)..(834)
atgctgcgcgaaggcatcgaagccgcacttatcgttggcattatcgccagttacctgaagcagaccggccgtggcgagtggatgcctgcggtgtggatcggcgtatttctggctgtcgcgctctcgctgttcgtcggtggcgggcttgagttgatgagcgccgagtttccgcagaagcagcaggaactgttcgaaggcatcgtcggcctgatcgccgttggcattctcagttccatggtgttctggatgcgcaaggtggcacgatcgatcaaacacgcgctgcacgaatcgctggacgcagccctcaccggctcgaaaaaccagacctacgcgctgatcgccatggtgtttttcgccgtggcccgcgaagggctggaaaccgtattctttctgctcgctgtgttccagcagagcgaaggctccggcgcgccgttgggcgccctgctcggtctgttgctggcggtcggtttcggcgtggccatctacagcggcagcatgcgtctcaacctgagcctgtttttccgctggaccgggctgttcattctggtagtggcggcgggcattctcgccaactccgttcaggcactgcatgaagccggggtctggaatcacctgcaggaagtggtcttcgacatcagtgcacggttgccgatggacggccctgccggttcggtgctggcaggcatgttcggttaccaggacgcgccgacggtcagcactctgagtgcctacctgatttacctgatcggggcgctgctgctgttcttcaagccgcacaccccgaccgctggcaaggtcatgcagccaaacacctcttctgttacgaacgaataa

SEQ ID NO: 3917 - protein, 277 aa, Pseudomonas syringae pv. syringae B728a
MLREGIEAALIVGIIASYLKQTGRGEWMPAVWIGVFLAVALSLFVGGGLELMSAEFPQKQQELFEGIVGLIAVGILSSMVFWMRKVARSIKHALHESLDAALTGSKNQTYALIAMVFFAVAREGLETVFFLLAVFQQSEGSGAPLGALLGLLLAVGFGVAIYSGSMRLNLSLFFRWTGLFILVVAAGILANSVQALHEAGVWNHLQEVVFDISARLPMDGPAGSVLAGMFGYQDAPTVSTLSAYLIYLIGALLLFFKPHTPTAGKVMQPNTSSVTNE

SEQ ID NO: 3918 - DNA, 843 bp, Burkholderia cepacia R18194
  CDS (1)..(843)
atgggtcagatcttgttcatcgtctggcgggagagcgtcgaagcgctgctcgtcgtcggcattctctatgcatggctgaaaaacggcgacgacgacgcgcgccgcggcctgccttttctctggaccggcgtcggtgtcggcctgctgatggccgtcggcctcggtgccgcactggtcggtttcactgaagtgctgtccggcgacgcgcaggactacttccagaccgccatggtgctgatcgcatgcgtgctgatcgtgcagatggtgctgtggatgcgccgccacggccgcacgctgaagcgcgacatggagcaatcgctgcagcagagcacgcgcgattcgaactggtggggcgtcgcggtgctggtcgcgctggcgatcgcgcgcgaaggcagcgaaacggtgatcttcctgtacggtctcggattcggccagtcgggtcacgtcgacggcagccagatgcttgcggtcgtgatcggtctcggcctcgcattcctcacgttctatctgctgcagctcggcggcaagtacttctcgtggcggcatttcttccgcgtcaccgaagtgatgctgctgttcctcggcgcgggcctgttccagaccggcgtcgacaagctgatcgacaaggaaatcctgccgctcggcatttcgcaggtgtgggacacgtccgcgatcctcgatgattcgagcacgttcggctcgctcgtcgcaacgctgaccggctatcgtgcgcacccggcactgaccaacctggttgcctacgcggtgtactgggcggtggtctggctgctgatgaagcgtgcgagccgtcgtccggccgtcgcggcaggtcgcgcggcatga

SEQ ID NO: 3919 - protein, 280 aa, Burkholderia cepacia R18194
MGQILFIVWRESVEALLVVGILYAWLKNGDDDARRGLPFLWTGVGVGLLMAVGLGAALVGFTEVLSGDAQDYFQTAMVLIACVLIVQMVLWMRRHGRTLKRDMEQSLQQSTRDSNWWGVAVLVALAIAREGSETVIFLYGLGFGQSGHVDGSQMLAVVIGLGLAFLTFYLLQLGGKYFSWRHFFRVTEVMLLFLGAGLFQTGVDKLIDKEILPLGISQVWDTSAILDDSSTFGSLVATLTGYRAHPALTNLVAYAVYWAVVWLLMKRASRRPAVAAGRAA

SEQ ID NO: 3920 - DNA, 819 bp, Pseudomonas fluorescens PfO-1
  CDS (1)..(819)
atgttgcgcgaaggcatcgaagccgcgctgatcgttggcatcatcgccagctacctgcaacagaccggccgtggccagtggatgccggcggtgtggatcggggtgtttctcgctgctgcgctggcgttgctggtcggcggtggcctggagctggtcagtgccgaattcccgcaaaagcagcaggaactgttcgaaggcgtggtcggcctcgtcgctgtgggcattctcagttcaatggtgttctggatgcgcaaggtggcgcgttcgatcaagcattcactgcaagcctccctcgatcatgcgctgaccgcgtcgaagcatcaggtcatcgcgttgatcgccatggtgttctttgccgtggcccgggaaggtctggaaaccgtgttcttcctgctcgccgtgttccagcagagcgaaggcccggccgcgccgatcggcgccctgctcggcctgatcctggcgattgtcgtcggcttcctgatctacagcggcagcatgcgcctgaacctgtcggcgttcttccgctggaccgggctgttcatcctcgtggtcgccgccgggattctcgccaactcggtgcaggccctacatgaagccggggtctggaaccacctgcaagccgtgctcttcgacttcagcgcgacgctgccgatggacggcccgctgggctcggtgctggccggcatgttcggttatcaggatgcaccgaccgtcagcacccttggcgcgtacctgatttatctgctggtggcgctggtcatgttcttcatgccggcacccaagcctgctgcccaatcgtcttccgtttccagccaataa

SEQ ID NO: 3921 - protein, 272 aa, Pseudomonas fluorescens PfO-1
MLREGIEAALIVGIIASYLQQTGRGQWMPAVWIGVFLAAALALLVGGGLELVSAEFPQKQQELFEGVVGLVAVGILSSMVFWMRKVARSIKHSLQASLDHALTASKHQVIALIAMVFFAVAREGLETVFFLLAVFQQSEGPAAPIGALLGLILAIVVGFLIYSGSMRLNLSAFFRWTGLFILVVAAGILANSVQALHEAGVWNHLQAVLFDFSATLPMDGPLGSVLAGMFGYQDAPTVSTLGAYLIYLLVALVMFFMPAPKPAAQSSSVSSQ

SEQ ID NO: 3922 - DNA, 846 bp, Burkholderia fungorum LB400
  CDS (1)..(846)
atgggtcagattctgttcgtcgtgtggcgggaaagtgtcgaggcgctgctggtcgtcggcattctgtacgcatggctgaaaaatggcgacgacgatgcgcgccgcggtttgccgtacctgtggggcggcgtggcagccggattgatcgcggcagtggcgctcggcgcggcgctggtcggcttcaccgaagtgctctccggcgacgcgcaggattatttccagaccgcgatggtgctgatcgcctgcgtgctgatcgtgcaaatggtgctgtggatgaagcagcatggccgctcgctcaagcgtgacatggaacagtcgctgcaaaaaagccagcgcgattcgaactggtggggcgtcgcgctgctggtggcactggcgatcgcgcgtgaaggcagcgaaacggtgatcttcctgtacggcctcggctttggccagtccgggcacgtggacggcagccagatgcttgcggtcgtgatcggtctcggcctcgcgttcctgaccttctacgtgctgcaactgggcggcaaattcttctcgtggcggctctttttccgcgtcacggagatcatgctgctgttcctcggtgcgggcctgttccagaccggtgtcgacaagctgatcgacaaggaaatcctgccgacgctcgtcgaccagatgtggaattcgtcggcgatcctcgacgactcgagcacctttggctcgctggtctcgacgctgaccggttatcgcgcgcatccggcgctgatgaatctgctggcgtacgcgctgtactgggcggtggtttatctgctggtgcgccgcgcgaatcgcaagccggtgcagcaagccgccgggcgtgcggcatga

SEQ ID NO: 3923 - protein, 281 aa, Burkholderia fungorum LB400
MGQILFVVWRESVEALLVVGILYAWLKNGDDDARRGLPYLWGGVAAGLIAAVALGAALVGFTEVLSGDAQDYFQTAMVLIACVLIVQMVLWMKQHGRSLKRDMEQSLQKSQRDSNWWGVALLVALAIAREGSETVIFLYGLGFGQSGHVDGSQMLAVVIGLGLAFLTFYVLQLGGKFFSWRLFFRVTEIMLLFLGAGLFQTGVDKLIDKEILPTLVDQMWNSSAILDDSSTFGSLVSTLTGYRAHPALMNLLAYALYWAVVYLLVRRANRKPVQQAAGRAA

SEQ ID NO: 3924 - DNA, 843 bp, Burkholderia vietnamiensis G4
  CDS (1)..(843): transl_table=11
atgggtcagatcttgttcatcgtgtggcgggagagcgtcgaagcgctgctcgtcgtcggcatcctctatgcctggctgaagaacggcgacgacgacgcgcgccgcggcctgccgtttctgtgggcgggcgttgccgtcgggctgctgatggcggtcggtctcggcgccgcgctcgtcggcttcaccgaagtgctgtccggcgacgcgcaggattacttccagaccgcgatggtgctgatcgcgtgcgtgctgatcgtgcagatggtgctgtggatgcgccggcacggccgcacgctcaagcgcgacatggagcaatcgttgcagcgcagtacgcgcgactcgaactggtggggcgtcgcggtgctggtcgcgctcgcgatcgcgcgcgaaggcagcgagacggtgatcttcctgtacgggctcggcttcggtcagtcggggcatgtggacggcagccagatgctcgcggtgctgatcggcctcggcctcgcgttcctcacgttctatctgctgcaactcggcggcaagtacttctcgtggcggcatttcttccgcgtcaccgaagtgatgctgctgttcctcggcgccggcctgttccagaccggggtcgacaagctgatcgacaaggagatcctgccgctcggcatctcgcagctgtgggatacctcggcgattctcgacgattcgggcacgttcggctcgctggtggcgacgctgaccggctatcgcgcgcatccggcgctgaccaacctgatcgcctatgcggtgtactgggccgtggtgtggctgctgatgaagcgcgcgagccgtcgcccggccgttcccgcgggtcgcgcagcatga

SEQ ID NO: 3925 - protein, 280 aa, Burkholderia vietnamiensis G4
MGQILFIVWRESVEALLVVGILYAWLKNGDDDARRGLPFLWAGVAVGLLMAVGLGAALVGFTEVLSGDAQDYFQTAMVLIACVLIVQMVLWMRRHGRTLKRDMEQSLQRSTRDSNWWGVAVLVALAIAREGSETVIFLYGLGFGQSGHVDGSQMLAVLIGLGLAFLTFYLLQLGGKYFSWRHFFRVTEVMLLFLGAGLFQTGVDKLIDKEILPLGISQLWDTSAILDDSGTFGSLVATLTGYRAHPALTNLIAYAVYWAVVWLLMKRASRRPAVPAGRAA

SEQ ID NO: 3926 - DNA, 843 bp, Burkholderia cenocepacia AU 1054
  CDS (1)..(843): transl_table=11
atgggtcagatcttgttcatcgtctggcgggagagcgtcgaagcgctgctcgtcgtcggcattctctatgcatggctgaaaaacggcgacgacgacgcgcgccgcggcctgcctttcctctgggccggcgtcggcgtcggcctgctgatggccgtcggcctcggcgccgcgctggtcgggttcactgaagtgttgtccggcgacgcgcaggactatttccagacggcgatggtgctgatcgcctgcgtgctgatcgtgcagatggtgctgtggatgcgccggcacggccgcacgctcaagcgcgacatggagcaatcgctgcagcaaagcacgcgcgattcgaactggtggggcgtcgcggtgctggtcgcgctcgcgatcgcgcgcgaaggcagcgagacggtgatcttcctgtacggcctcggtttcggccagtcgggccacgtcgacggcagccagatgctcgcggtcgtgatcggtctcggcctcgcgtttctcaccttctatctgctgcagctcggcggcaagtacttctcgtggcggcatttcttccgcgttaccgaagtgatgctgctgttcctcggcgcgggcctgttccagaccggcgtcgacaagctgatcgacaaggaaatcctgccgctcggcatctcgcagctgtgggatacgtccgcgatcctcgatgattcgggcacgttcggttcgctcgtcgcgacgctgaccggctatcgcgcacacccggcgctgaccaacctggtggcctatgcggtgtactgggcggtcgtctggctgctgatgaagcgcgcgagccgccgtccggccgttgcagcgggtcgcgcggcatga

SEQ ID NO: 3927 - protein, 280 aa, Burkholderia cenocepacia AU 1054
MGQILFIVWRESVEALLVVGILYAWLKNGDDDARRGLPFLWAGVGVGLLMAVGLGAALVGFTEVLSGDAQDYFQTAMVLIACVLIVQMVLWMRRHGRTLKRDMEQSLQQSTRDSNWWGVAVLVALAIAREGSETVIFLYGLGFGQSGHVDGSQMLAVVIGLGLAFLTFYLLQLGGKYFSWRHFFRVTEVMLLFLGAGLFQTGVDKLIDKEILPLGISQLWDTSAILDDSGTFGSLVATLTGYRAHPALTNLVAYAVYWAVVWLLMKRASRRPAVAAGRAA

SEQ ID NO: 3928 - DNA, 843 bp, Burkholderia ambifaria AMMD
  CDS (1)..(843): transl_table=11
atgggtcagatcttgttcatcgtctggcgggagagcgtcgaagcgctgctcgtcgtcggcatcctctatgcatggctgaagaacggcgacgacgacgcgcgccgcggcttgccctttctgtggacgggtgtggcggtcggcctgctgatggccatcggtctcggcgccgcactcgtcggcttcaccgaagtgctgtccggcgacgcacaggactatttccagaccgcgatggtgctgatcgcctgcgtgctgatcgtgcagatggtgttgtggatgcgccggcacggccgcacgctgaagcgcgacatggagcagtcgctgcagcagagcacgcgcgattcgaactggtggggcgttgccgtgctggtcgcgctcgcgatcgcccgcgaaggcagcgagacggtgatcttcctgtacggcctcggtttcggccagtcggggcacgtggacgccagccagatgctcgcggtcgtgatcggcctcggcctcgcgttcctcacgttctatctgctgcagctcggcggcaagtacttctcgtggcggcatttcttccgcgtgaccgaagtgatgctgttgttcctcggcgcgggcctgttccagaccggcgtcgacaagctgatcgacaaggaaatcctgccgctcggcatctcgcagctgtgggacacgtccgcgatcctcgatgattccggcacgttcggttcgctcgtcgcgacgctgaccggttatcgcgcgcatccggcactgaccaacctggtcgcctatgcggtgtactgggcggtcgtctggctgctgatgaagcgcgcgagccgccgcccggccgtcacagcgggccgcacggcatga

SEQ ID NO: 3929 - protein, 280 aa, Burkholderia ambifaria AMMD
MGQILFIVWRESVEALLVVGILYAWLKNGDDDARRGLPFLWTGVAVGLLMAIGLGAALVGFTEVLSGDAQDYFQTAMVLIACVLIVQMVLWMRRHGRTLKRDMEQSLQQSTRDSNWWGVAVLVALAIAREGSETVIFLYGLGFGQSGHVDASQMLAVVIGLGLAFLTFYLLQLGGKYFSWRHFFRVTEVMLLFLGAGLFQTGVDKLIDKEILPLGISQLWDTSAILDDSGTFGSLVATLTGYRAHPALTNLVAYAVYWAVVWLLMKRASRRPAVTAGRTA

SEQ ID NO: 3930 - DNA, 1077 bp, Cryptococcus gattii
  CDS (1)..(1077)
atggcgaaggacctgttctcggtcactatcttcttcatcgtcttccgtgagactatcgaggcggcaatcattgtttcggttttgctgtccttcgtagaacagcttatggtttctggaggcctcgagaatgaaggtgcccaagttgaacggctctcagaagaggaggaaataaagaaaacgaaacgcattcttcggcgaatgcgcatccaaatttgggcgggtactttgactggtttcgttattgccgttgctgtcggatctgctttcattgctgtctggtatactactcttaccgacttgtggtctaacacagaagaattatgggagggtattttcagccttatcgcttgtatcatcatctacatcatgggcctcacctttttgaagatggaccaatctcgagtcaagtggcgtatcaagctttccgaagcttttgcccatcgcgccggcaaagccctcttcaatttccggggcaacaacgaagatggcgagcctgagaggcagctcaccgaggaggaactcgccgaagagcaagccatgaagaagaaggctcgaagtggaaagtacgccatcttcttcctgcctttcatcactgtcatgcgagagggcttggaggctattgtctttgttggtggtgtttctctgggtcaagatggtgcctctatccccattgctgctatcgtcggtctcgtcgccggtatcttcgttggttggtgtatctaccgtactggttctactcttgctcttcactggttcttgattgtttctacctgcttcttgttcctcatcggctcgggattgtttagcaaaggtgtttacgattttgaatactaccgattctcttctgctgttggtggtgatgtcgccgagtctggtaactcggtcccggttcattccaagtcgctggtaacgtctggcatcttgagtacggaaatcccgagcccggagctgtcggcaccaacggtggttggcaaatattcaacgccattttgggttggaacaacaccgcttctctcggctctatcctctcttactgttcctactggatcgcggtcatcattggcttggctgtcatga

SEQ ID NO: 3931 - protein, 358 aa, Cryptococcus gattii
MAKDLFSVTIFFIVFRETIEAAIIVSVLLSFVEQLMVSGGLENEGAQVERLSEEEEIKKTKRILRRMRIQIWAGTLTGFVIAVAVGSAFIAVWYTTLTDLWSNTEELWEGIFSLIACIIIYIMGLTFLKMDQSRVKWRIKLSEAFAHRAGKALFNFRGNNEDGEPERQLTEEELAEEQAMKKKARSGKYAIFFLPFITVMREGLEAIVFVGGVSLGQDGASIPIAAIVGLVAGIFVGWCIYRTGSTLALHWFLIVSTCFLFLIGSGLFSKGVYDFEYYRFSSAVGGDVAESGNSVPVHSKSLVTSGILSTEIPSPELSAPTVVGKYSTPFWVGTTPLLSALSSLTVPTGSRSSLAWLS

SEQ ID NO: 3932 - DNA, 1302 bp, Cryptococcus neoformans var
  CDS (1)..(1302)
atggcgaaggacctgttctcggtcaccatcttcttcatcgtcttccgtgagacggtcgaggcggccatcatcgtttcggttttgctgtccttcgtggaacagcttatggcctctggaggccccaagaaagatgatgcccaagttcaacatctttcagaggaagaggaaataaagaaaacgaaacgaatccttcggcgaatgcgtattcaaatttgggcgggtactttgactggtttcattattgccgttgctgtcggcgctgcttttattgctgtctggtatactactctgacagacttgtgggccaacacagaagaattatgggagggtattttcagtcttattgcttgcatcatcatctacgtcatgggtctcacctttttgaagatggaccaatctcgtgtcaaatggcgtatcaagctttccgaagctttcgctcaccgtgccggcaaggccctcttcagtttcggcggcaataaggaagatggcgagcctgacaggccactcaccgaggaggaacttgccgaagagcaagccatgaagaagaaggctcgaagtggaaagtatgccatcttcttcctgcctttcatcactgtgatacgagagggtttggaggctattgtcttcgttggtggtgtttctttgggtcaagatggtgcctctatccctattgctgcgatcgtcggtctcatcgccggtatcttcgttggttggtgtatctaccgcactggctctactctggcccttcactggttcttgattgtttctacttgcttcttgttcctcattggttcgggattattcagcaaaggtgtttacgatttcgaatactaccgattctcttctgctgtcggtggtgatgtcgctgagtccggtaacggccccggttcattccaggttgctggtaacgtctggcatcttgagtacggaaatcccgagccgggagctgtcggcaccaacggtggttggcagattttcaatgccattttgggttggaacaacactgcttctctcggatctatcctctcttactgtttctattggattgcggttatcgttggtttggctgtcatgaagtggcacgaaggtcgttttacaatctttggtcgaggctctaaggcccatggccgtatccaagcaagagctgaaataaagagggctgccgagggtcaagtttcagaaggatctgagaaggacgaaggcgcttctgaggagggcaccgctcgcgacacaacgcatctcaataagaatggggattctcctgaggactctctcactcccatgattgagaatagcctttga

SEQ ID NO: 3933 - protein, 433 aa, Cryptococcus neoformans var
MAKDLFSVTIFFIVFRETVEAAIIVSVLLSFVEQLMASGGPKKDDAQVQHLSEEEEIKKTKRILRRMRIQIWAGTLTGFIIAVAVGAAFIAVWYTTLTDLWANTEELWEGIFSLIACIIIYVMGLTFLKMDQSRVKWRIKLSEAFAHRAGKALFSFGGNKEDGEPDRPLTEEELAEEQAMKKKARSGKYAIFFLPFITVIREGLEAIVFVGGVSLGQDGASIPIAAIVGLIAGIFVGWCIYRTGSTLALHWFLIVSTCFLFLIGSGLFSKGVYDFEYYRFSSAVGGDVAESGNGPGSFQVAGNVWHLEYGNPEPGAVGTNGGWQIFNAILGWNNTASLGSILSYCFYWIAVIVGLAVMKWHEGRFTIFGRGSKAHGRIQARAEIKRAAEGQVSEGSEKDEGASEEGTARDTTHLNKNGDSPEDSLTPMIENSL

SEQ ID NO: 3934 - DNA, 1098 bp, Pichia pastoris
  CDS (1)..(1098)
atggtgaatgtttttaatgtcgaaatcttctttgttgtttttagagaaaccttagaggcagtaattgtcgtgtctgtgcttcttgcatttattaagcaaggtctctccgaagatgagacagtttataaacgacttcgaaaacagatttggattggtgctatttcaggtttcctgatttgtttaatcttgggttgtgccttcattggagctttctattctttaggaaaggatgtttgggctaaatcagaggatctttgggaaggcatattttgcgtaattgcaactgtaatgatttcacttatgggtattccaatgctgagaattaacaaaatgcagactaaatggaggttgaagcttgctcgtgctctggtggtttccaaaaacgaaaagaaaggtcgttttgcttttggtcattggacaaagaaatacgctatgttccttttgccttttgtaacaacattaagagaggggttagaagctgttgtgttcataggtggtgttggcctgggatctccagctacatcttttcccatccctgtgattgttggtcttattgctggtatttctgtcggtgtgcttttgtactattcaggatcaactctttctttgcaagttttcttatgtatatcgacggctattttgtacttgattgctgctgggttgttttctagggctatctggttctttgaaacctacaaatacaaccaaaagactggaggagatgcttctgaaaatggttcgggacccggtacttatgacattaagacttctgtttggcatgtgaactgctgtaaccctgaaactgataatggttgggatatttttaacgcgttgttgggatggcaaaactctgccacttatggctcagtcataggctacaacatatactggctggcggtaatgatcactttgtatttactctggttcgaagaaaagaataaccacttgccatttatgaaaaatctgaagttgagacaactgaacccattatactggatgaagggtaaaaacaagaaggaggtctccaaggaagatcaggaaaaattatttgagcaattgaagagtaaggagtttgccaataaacttgcggaggaataa

SEQ ID NO: 3935 - protein, 365 aa, Pichia pastoris
MVNVFNVEIFFVVFRETLEAVIVVSVLLAFIKQGLSEDETVYKRLRKQIWIGAISGFLICLILGCAFIGAFYSLGKDVWAKSEDLWEGIFCVIATVMISLMGIPMLRINKMQTKWRLKLARALVVSKNEKKGRFAFGHWTKKYAMFLLPFVTTLREGLEAVVFIGGVGLGSPATSFPIPVIVGLIAGISVGVLLYYSGSTLSLQVFLCISTAILYLIAAGLFSRAIWFFETYKYNQKTGGDASENGSGPGTYDIKTSVWHVNCCNPETDNGWDIFNALLGWQNSATYGSVIGYNIYWLAVMITLYLLWFEEKNNHLPFMKNLKLRQLNPLYWMKGKNKKEVSKEDQEKLFEQLKSKEFANKLAEE

SEQ ID NO: 3936 - DNA, 1113 bp, Aspergillus fumigatus
  CDS (1)..(1113)
atggcaaaagacgtatttgctgttccaatcttttttatctgtttccgagaatgtgtcgagaccagcatcattgtctctgtgttactctcatttatcaagcagaccttgggacaagagcaagatgctaccactcgtaagaggctgatcagacaggtgtggtggggggttgccattgggttgttcatcagtgtttgcatcggagctggcatgatcggagcgttctatggatatggtaaggatcacttcgctagcacggaggacctgtgggagggcatcttctccctgatcgccagtgtcatcatcaccattatgggtgctgccctgcttcgtgtcaccaagttgcaggagaagtggcgcgtcaagctagctcaagccctggaagcaaagccgttgactggcggcacattcaaaaacaacctcaaactttgggcggagaaatacgccatgtttctcctccccttcatcaccgttctccgagaaggcctggaagcagtggtgttcattggaggcgtcagtctcagttttcctgcaactgccttccctctacctgtttttactggcattctcgcaggagtggccattgggtacctactgtatcgaggaggaaaccaagcctccctccagatcttcctgatcatctccacttgcatcctctacctggttgctgccggcctcttctcccgaggcgtctggtatctggagaacaatacttggaaccacgtaattggtggtgatgctgccgagacaggtgccggtccgggatcgtatgacatccgacagagcgtctggcatgtcaactgctgtagtcctctcgttaatggtggcgggggatggggtatcttcaacgccatccttggctggacaaactcggcaacctatggctccgttctttcatacaacctttactggattgcggtgatcgtctggtttgtggctatgcgtcacaaggaacgccatggacgattgcctgtggtcgaccctctgctgaatcggctgcgaggccgaaagtctgccgaacctgggaatggagagcaagatgtcgaggtcagcacgataccatctgatttgcagacggagtccaaaataccgaaaagcggagcatcccttgtctga

SEQ ID NO: 3937 - protein, 370 aa, Aspergillus fumigatus
MAKDVFAVPIFFICFRECVETSIIVSVLLSFIKQTLGQEQDATTRKRLIRQVWWGVAIGLFISVCIGAGMIGAFYGYGKDHFASTEDLWEGIFSLIASVIITIMGAALLRVTKLQEKWRVKLAQALEAKPLTGGTFKNNLKLWAEKYAMFLLPFITVLREGLEAVVFIGGVSLSFPATAFPLPVFTGILAGVAIGYLLYRGGNQASLQIFLIISTCILYLVAAGLFSRGVWYLENNTWNHVIGGDAAETGAGPGSYDIRQSVWHVNCCSPLVNGGGGWGIFNAILGWTNSATYGSVLSYNLYWIAVIVWFVAMRHKERHGRLPVVDPLLNRLRGRKSAEPGNGEQDVEVSTIPSDLQTESKIPKSGASLV

SEQ ID NO: 3938 - DNA, 1107 bp, Rhizopus oryzae
  CDS (1)..(1107)
atgtctcaagatctcttcaacgtaccgatcttctttatcctttttcgtgaaacgactgaggcagccatcattatttctgtcctcttgtcattcttgaagagaatgtttaatacagaatctcctgtttataaacgtctcagaaatcaagtctggattggtggtgcagctggtctgtttatctgtttatgtatcggtgctgccttcattgccgtttactacactgtccttaatgacttgtggggaaattctgaagatatctgggaaggtgtcttctctctggttgctgtgatcatgatcactgccatgggtcttgctatgctcaagactgaacgtatgcaagaaaagtggaaggtcaagttggctaaagcaatgcaaaagtccaacagtgaaaagtcatcctttaaagaaaaacttcaaaaatacgcgttctttgtcttgccttttatcaccgttctcagagaaggacttgaagctgttgtctttattggtggtgtctccttgggtatccaaggaaaatcaattcctattgctgccatcatgggtatcatctgtggttgtttggtcggtttccttatttaccgtggtggttccttgattcaacttcgttggttctttgtgttctctactgtcgttctttaccttgtcgctgctggtttgatggctaaaggtgttggttaccttgaacaaaatgcttggaatcaagtcattggtggtgaagctgctgatgtcattagttacagagtctcaaccgctgtctggcacgtttcttggggagacccagaagccaacaatgatacctctggtggttggcaaatctttaacgccattcttggttggaacaatacggctacttatggttctatcatcagttactgtctctactggctctttgtctgctgttatcttgtctttagttactttaaggaaaagcgtgctgctatccgtaaagccgaggctggtgaatgggatgatggtgatgaagctttggagaatgccaaacaatacattggtaatgatggtgaattcatcgttgaagacaaagaatctgatgaagaagccaacaatcatcccaaggaaaaaatcgaatctgatgctattaaggcttaa

SEQ ID NO: 3939 - protein, 368 aa, Rhizopus oryzae
MSQDLFNVPIFFILFRETTEAAIIISVLLSFLKRMFNTESPVYKRLRNQVWIGGAAGLFICLCIGAAFIAVYYTVLNDLWGNSEDIWEGVFSLVAVIMITAMGLAMLKTERMQEKWKVKLAKAMQKSNSEKSSFKEKLQKYAFFVLPFITVLREGLEAVVFIGGVSLGIQGKSIPIAAIMGIICGCLVGFLIYRGGSLIQLRWFFVFSTVVLYLVAAGLMAKGVGYLEQNAWNQVIGGEAADVISYRVSTAVWHVSWGDPEANNDTSGGWQIFNAILGWNNTATYGSIISYCLYWLFVCCYLVFSYFKEKRAAIRKAEAGEWDDGDEALENAKQYIGNDGEFIVEDKESDEEANNHPKEKIESDAIKA

SEQ ID NO: 3940 - DNA, 1080 bp, Claviceps purpurea
  CDS (1)..(1080)
atggccaaggacgtgttttccgtgcccgtcttcctcgttgtctttcgagagacgctggagacggtcattattgtgtccgtgctgctggcctttctcaagcagacgctggatggaccaaatcgcgatgtcaagacctacaaggctctgcgtcggcagatctggcttggtgtagccgctggcttcttggtctgcatgattgttgccggcgccttgattggcgtcttctacactgtcggttccaatgcatgggaaaacaacgagaattactacgagggtgcgttttgtctctttgccgccgccatcatcaccgtcatgggggctgctctgttgcgcattggaaaaatgcaggcaaagtggcgtgtcaagcttgccaaggcaattgagtcgcccatcaagacacgggcgcgaggctgcgttgcacactggctggagaaatacgccatgtttgtgttgcccttcatcacggtgctgcgtgagggtatcgaggcggtcgtgtttgtcgccggtgtcaccttttctgcgccggcttatgcagtgccgttgcctgttgttgtcggtctccttgtcggaggcttcatcggctggctcttgtacaaaggtggttcaactgccaagctgcaaatattcctggtggcctcgacctgtatcttgtatctggtctctgctggtctcttttcccgcggtgtatggcatctgcaggcacagaaatggaataatgccatcggcggtgatgccagtgagacgggcagtggcccaggctcttacgacattgaccagagcgtttggcacgtcaactgctgttcaccgaccgccaccaacgacggcggctggggcgtcttcaacgccattctcggctggcaaaactcggccacctacggctccgtcatctcgtacaacctctactggctctttgtcatggccggcttcgccaccatgcgcttcaaggagaccaagggccactaccccttcttcaaggccaaggcgaccgctccatccgtggcggattcgcaaagtagcagctcacagcatgagattggggacaaggcgcctgcagtcaaggtagctgtaccaaggacatga

SEQ ID NO: 3941 - protein, 359 aa, Claviceps purpurea
MAKDVFSVPVFLVVFRETLETVIIVSVLLAFLKQTLDGPNRDVKTYKALRRQIWLGVAAGFLVCMIVAGALIGVFYTVGSNAWENNENYYEGAFCLFAAAIITVMGAALLRIGKMQAKWRVKLAKAIESPIKTRARGCVAHWLEKYAMFVLPFITVLREGIEAVVFVAGVTFSAPAYAVPLPVVVGLLVGGFIGWLLYKGGSTAKLQIFLVASTCILYLVSAGLFSRGVWHLQAQKWNNAIGGDASETGSGPGSYDIDQSVWHVNCCSPTATNDGGWGVFNAILGWQNSATYGSVISYNLYWLFVMAGFATMRFKETKGHYPFFKAKATAPSVADSQSSSSQHEIGDKAPAVKVAVPRT

SEQ ID NO: 3942 - DNA, 1149 bp, Candida albicans
  CDS (1)..(1149): transl_table=12
atggttgatgttttcaatgttcaagtcttttttgttgttttcagagaagccttggaagcagttattgttgtttcagtgcttttagcatttgtcaaacaatcaatgggctcctcagcaaacggtccagagttgaagaaaaagttgtatcgtcagatttggctaggggcggggctaggtgttcttatttgtataatcattggtggcgcttttattggtaccttttacgggttgggtaaagatatctggggaaaatcagaagacttgtgggaagggatattttgtatcattgccacagtcttgatcactgctatgggtattccaatgttgagaatcaacaagatgaaagaaaaatggagagttaaattagcacaagctttaatcaaatctccagaaaataagaagaaccgattcaaattgggatatcttgggaaaaagtacgcactttttattttgccattcatcacttgcttgcgtgaaggtttagaagctgttgttttcgttggtggggtcggtattactagtcctgcttcatctttcccaatcccagttattgttggtataatttgtggtcttgcagtgggtgccttgttgtactactttggttccaatatgtcgatgcaaatcttcttgatcatctccacttgtatcttgtacttgatcgctgctggtttgttctccagaggtgtctggttctttgagagttatcaatacaataaaaaaactggtggtgatgcggctgagaatggttctggcccgggtacatatgacatttccaaatctgtttggcatgtcaactgctgtaacccattgaccgacaatggttgggatatcttcaacgccattttgggatggcaaaactctgccacttacggttctgtcatttcctacaatgtttactggattttcatcatttctgttttgttattgatggtctatgaagaaaaacacggacatttaccgttaaccaaaaacttaactttggtccaattgaatccaatgtaccacatcaaaggtaagaagaagttagaattaaacaaagctgaaaaggaagaattgttcaccaaacttcaaaaacaaaagtttggtgatgttcaagaaattgacgaaacttcttctaacaaattagtcgaaactcaagaaaataaataa

SEQ ID NO: 3943 - protein, 382 aa, Candida albicans
MVDVFNVQVFFVVFREALEAVIVVSVLLAFVKQSMGSSANGPELKKKLYRQIWLGAGLGVLICIIIGGAFIGTFYGLGKDIWGKSEDLWEGIFCIIATVLITAMGIPMLRINKMKEKWRVKLAQALIKSPENKKNRFKLGYLGKKYALFILPFITCLREGLEAVVFVGGVGITSPASSFPIPVIVGIICGLAVGALLYYFGSNMSMQIFLIISTCILYLIAAGLFSRGVWFFESYQYNKKTGGDAAENGSGPGTYDISKSVWHVNCCNPLTDNGWDIFNAILGWQNSATYGSVISYNVYWIFIISVLLLMVYEEKHGHLPLTKNLTLVQLNPMYHIKGKKKLELNKAEKEELFTKLQKQKFGDVQEIDETSSNKLVETQENK

SEQ ID NO: 3944 - DNA, 1146 bp, Candida albicans
  CDS (1)..(1146): transl_table=12
atggttgacgtatttaacgttcaaattttcttcatcgttttcagagaatctttggaagctatcattgttgtttcagtgcttttggcattcgttaagcaatctatgggtggtagttccgaccctcaattgaaaaaacgattgtatcgtcagatttggctaggggcggggctaggggttctagtctgtctatatggtgtgctttccatcggtgcgtcctacggtttaggtaaagatatttttggggtaatctccgaagatctatgggaaggtatcttttgtatcattgccacggtcttgatcactgctatgggtattccaatgttgagaatcaacaagatgaaagaaaaatggagagtcaaattagctcaagctttaattaaatctccaactaacaaaaaagatagatttaaattgggttaccttggtaagaaatatgctcttttcattttaccattccttcaagttttgcgtgaaggtttagaagctgttgtcttcgttggtggtgttggtttgaatagtccagccacctctttcccaattccagtcattgttggtttaattgccggtatcgttgttggtgcattattgtactactttggttccagtatgtccatgcaaatcttcttgattatttccacctgtatcttgtacttgattgctgctggtttgttctccagaggtatttggtatttcgaaaccaacacttacaataaaaaaactggtggtgatgcttctgaaaacggttctggtccaggtacttacgacatttctaaatctgtctggcacgtcaactgtcgtaatccagaaaccgataacggttgggatatcttcaatgccattttgggatggcaaaactctgccacttacggttctgtcatttcctacaacatttactggctctttattatctgtgttttgttgttaatggtttacgaagaaaaacacggccacttgccattcaccaagaatttgactttggtccaattgaacccaatgtaccacatcaagggtaagaagaagttagaattaaacaaagctgaaaaggatgaattgttcactaaacttcaacaacaaaactttggtcaagctgcagaagttgatgaaacttcatcaaacaaatggatggattcccaagaaaacagttag

SEQ ID NO: 3945 - protein, 381 aa, Candida albicans
MVDVFNVQIFFIVFRESLEAIIVVSVLLAFVKQSMGGSSDPQLKKRLYRQIWLGAGLGVLVCLYGVLSIGASYGLGKDIFGVISEDLWEGIFCIIATVLITAMGIPMLRINKMKEKWRVKLAQALIKSPTNKKDRFKLGYLGKKYALFILPFLQVLREGLEAVVFVGGVGLNSPATSFPIPVIVGLIAGIVVGALLYYFGSSMSMQIFLIISTCILYLIAAGLFSRGIWYFETNTYNKKTGGDASENGSGPGTYDISKSVWHVNCRNPETDNGWDIFNAILGWQNSATYGSVISYNIYWLFIICVLLLMVYEEKHGHLPFTKNLTLVQLNPMYHIKGKKKLELNKAEKDELFTKLQQQNFGQAAEVDETSSNKWMDSQENS

SEQ ID NO: 3946 - DNA, 1194 bp, Schizosaccharomyces pombe
  CDS (1)..(1194)
atggcaaaagacgtcttttccgtcgctatcttcttcatcgtccttcgtgagacccttgaggcttccatcatcgtctcagtcttgatgtccttcatctcccaaacactcatggataaagatggaaacgtgacggatccaaaactaaagcgaaaatttatgctgcaggtttggatcggttcgtttactgctttgttcatttgtttagccattggcggtggctttatcggtgctttttatgccctcgacaaagatatttggagtggttccgaagaaatttgggaaggtgtcttctctctcatcgctgtcgtcttgatcaccgtaatggggttcgctatgcttcgtgtctcgcatttacaggagaaatggcgcaagaaacttatgaaaagtatcgccaatcgcaaggccaaaggtatctccaattggggtaaaaagtattccatgtttctccttccctttttcaccgttctgcgtgagggtttggaagtcgtcgtctttgtcggtggtgtcggtttggaaacacctgccaccgctttccctcttccagtcatttgcggtctcatcgttggttgtcttatcggttactttatctatcgtggtggtaatgtgatgaacttgcaatggttcttgattgcctcaacatgtatcctctaccttatctccgccggtcttatgtccaaggccaccttttactttgaaatgaataagtggaatcatcaaactggtggtgatgctggtgagctcggtgatggtcccggttcctatcccttcaaatccgccgtttggcacgtcaactatggtaatccagagatgaattccaatggtggttacatgatcttcaatgccattctaggttggaacaacactggtacctatggttccatccttagctacatcatctattggcttttcgtagccttcatcatgttcctcatgtggtacaaggaacgtcgtgctgcaagactccttattgccaagctcggcgacaaagttgtcgacttggaggctgcctcttcacacactcccgtgcaatcctcctcctctgaagatgaattcaaaatcaattctcctaccgatgataaaggcgacaaagccatcgatatcgttaccgaagttcgcgagtcttcttctcccgtcgaagaacataaagacgacaaaactgtcgatgtcatcaatgaaattcgtgagtctcattaa

SEQ ID NO: 3947 - protein, 397 aa, Schizosaccharomyces pombe
MAKDVFSVAIFFIVLRETLEASIIVSVLMSFISQTLMDKDGNVTDPKLKRKFMLQVWIGSFTALFICLAIGGGFIGAFYALDKDIWSGSEEIWEGVFSLIAVVLITVMGFAMLRVSHLQEKWRKKLMKSIANRKAKGISNWGKKYSMFLLPFFTVLREGLEVVVFVGGVGLETPATAFPLPVICGLIVGCLIGYFIYRGGNVMNLQWFLIASTCILYLISAGLMSKATFYFEMNKWNHQTGGDAGELGDGPGSYPFKSAVWHVNYGNPEMNSNGGYMIFNAILGWNNTGTYGSILSYIIYWLFVAFIMFLMWYKERRAARLLIAKLGDKVVDLEAASSHTPVQSSSSEDEFKINSPTDDKGDKAIDIVTEVRESSSPVEEHKDDKTVDVINEIRESH

SEQ ID NO: 3948 - DNA, 1398 bp, Saccharomyces cerevisiae
  CDS (1)..(1398)
atggcgtttgaggattatttttctttccagatattcttcattttcttaaggaaatccttagaaattgttgtcattgtttctatcctgttgacgatcgtcaaacaagatctgtctgttgaggacgacagcccgtttgaaggaagttcctcttctgctggtcttccaagtccaaatacgaacacaaacgcagattcgaccactgccttcttacaagcagggccttcagacggtaatgctattggaacgtccgctacggctgctaataataaatcgaggccgctaaatgtggaggaagaagaagaaatttacgagtactctaatgagcttagagaccaggaccgcgagtccgatgaacatacggctgacaacgttaagctatatcagaaattaaaaatacaaattctagcgggcggcgcatttggtttgttgctgtgtatgttaatcgggggtgcgtttgttagtatcttttatcatattggaaccgacttatggacactgagtgaacattattatgaaggtgtcttaagtcttgtcgcgtccgttattatttctgtcatggggttgttttttttaagaatggggaagttaagagagaagttcagagtgaaattagcttctatcatttattcaaaggacaataatttgctgggaaacaaaacccaaaaaggtgtgaaattcagtcaaaagtactccttcttcatattaccatttataacgactttgagagaagggttagaagctgtgtattcaattggaggtatcggtattgaccaaccactatcctcgattcccctctctatggtccttgctactgcaatcagtacggtgttcggtatttttttcttcaggtactcaagttctctttcacttaagatatgccttgtagtcgccacctgcttcctctacttgatcgcggctggtttgttttccaaaggtgtatggcaacttgaattgcaagactacgtcaacaaatgtaacggtcaagacatgagtgaagtagaaaatggacccggttcgtacgacatatctcgttctgtttggcatgttaattgttgcaatggtgaaaaagatggaggttggatgatttttactgccatttttggttggacgaatagtgctaccgtcggctctgtaattagctacaacgcctactggttggtattaaaatacgctttgaagcttctaatgatagaaggaaaatgcggatatatcccatatctacctattagctggcaaaagaaacgtattatgaaaagattaagcattgccaaggcatcgctcgatctcaaacatcatacttctgaactcaactctagcacatcagagccagacagtcaaagacggtccaaagatagttctgtgcccctaataattgatagcagtggttcagcaaattga

SEQ ID NO: 3949 - protein, 465 aa, Saccharomyces cerevisiae
MAFEDYFSFQIFFIFLRKSLEIVVIVSILLTIVKQDLSVEDDSPFEGSSSSAGLPSPNTNTNADSTTAFLQAGPSDGNAIGTSATAANNKSRPLNVEEEEEIYEYSNELRDQDRESDEHTADNVKLYQKLKIQILAGGAFGLLLCMLIGGAFVSIFYHIGTDLWTLSEHYYEGVLSLVASVIISVMGLFFLRMGKLREKFRVKLASIIYSKDNNLLGNKTQKGVKFSQKYSFFILPFITTLREGLEAVYSIGGIGIDQPLSSIPLSMVLATAISTVFGIFFFRYSSSLSLKICLVVATCFLYLIAAGLFSKGVWQLELQDYVNKCNGQDMSEVENGPGSYDISRSVWHVNCCNGEKDGGWMIFTAIFGWTNSATVGSVISYNAYWLVLKYALKLLMIEGKCGYIPYLPISWQKKRIMKRLSIAKASLDLKHHTSELNSSTSEPDSQRRSKDSSVPLIIDSSGSAN

SEQ ID NO: 3950 - DNA, 25 bp, Artificial sequence
  primer
atgcctaacaaagtgtttaacgtgg

SEQ ID NO: 3951 - DNA, 24 bp, Artificial sequence
  primer
tcaaagagagtcggctttaacgtg

SEQ ID NO: 3952 - protein, 411 aa, Artificial sequence
  consensus sequence
  Variant (2)..(5): Xaa in position 2 to 5 is any amino acid
  Variant (8)..(9): Xaa in position 8 to 9 is any amino acid
  Variant (11)..(17): Xaa in position 11 to 17 is any amino acid
  Variant (19)..(34): Xaa in position 19 to 34 is any amino acid
  Variant (35)..(123): Xaa in position 35 to 123 is any or no amino acid
  Variant (125)..(125): Xaa in position 125 is any amino acid
  Variant (127)..(129): Xaa in position 127 to 129 is any amino acid
  Variant (131)..(136): Xaa in position 131 to 136 is any amino acid
  Variant (137)..(137): Xaa in position 137 is any or no amino acid
  Variant (139)..(154): Xaa in position 139 to 154 is any amino acid
  Variant (155)..(162): Xaa in position 155 to 162 is any or no amino acid
  Variant (165)..(169): Xaa in position 165 to 169 is any amino acid
  Variant (171)..(173): Xaa in position 171 to 173 is any amino acid
  Variant (175)..(176): Xaa in position 175 to 176 is any amino acid
  Variant (178)..(207): Xaa in position 178 to 207 is any amino acid
  Variant (208)..(248): Xaa in position 208 to 248 is any or no amino acid
  Variant (250)..(250): Xaa in position 250 is any amino acid
  Variant (252)..(255): Xaa in position 252 to 255 is any amino acid
  Variant (259)..(259): Xaa in position 259 is any amino acid
  Variant (261)..(263): Xaa in position 261 to 263 is any amino acid
  Variant (265)..(266): Xaa in position 265 to 266 is any amino acid
  Variant (268)..(282): Xaa in position 268 to 282 is any amino acid
  Variant (283)..(286): Xaa in position 283 to 286 is any or no amino acid
  Variant (288)..(294): Xaa in position 288 to 294 is any amino acid
  Variant (296)..(306): Xaa in position 296 to 306 is any amino acid
  Variant (307)..(313): Xaa in position 307 to 313 is any or no amino acid
  Variant (315)..(321): Xaa in position 315 to 321 is any amino acid
  Variant (323)..(326): Xaa in position 323 to 326 is any amino acid
  Variant (330)..(370): Xaa in position 330 to 370 is any amino acid
  Variant (371)..(393): Xaa in position 371 to 393 is any or no amino acid
  Variant (395)..(404): Xaa in position 395 to 404 is any amino acid
  Variant (405)..(406): Xaa in position 405 to 406 is any or no amino acid
  Variant (408)..(409): Xaa in position 408 to 409 is any amino acid
FXXXXREXXEXXXXXXXLXXXXXXXXXXXXXXXXXXXXXXXXXXXXXXXXXXXXXXXXXXXXXXXXXXXXXXXXXXXXXXXXXXXXXXXXXXXXXXXXXXXXXXXXXXXXXXXXXXXXXXXXXWXGXXXGXXXXXXXGXXXXXXXXXXXXXXXXXXXXXXXXEGXXXXXAXXXIXXMXXXXXXXXXXXXXXXXXXXXXXXXXXXXXXXXXXXXXXXXXXXXXXXXXXXXXXXXXXXXXXXXXXXXXXXLXFXXXXREGXEXXXFXXGXXXXXXXXXXXXXXXXXXXGXXXXXXXGXXXXXXXXXXXXXXXXXXFXXXXXXXLXXXXAGLXXXXXXXXXXXXXXXXXXXXXXXXXXXXXXXXXXXXXXXXXXXXXXXXXXXXXXXXXXXXXXXXGXXXXXXXXXXXXYXXYW

SEQ ID NO: 3953 - DNA, 282 bp, Saccharomyces cerevisiae
  CDS (1)..(282)
atgagtctaccggagattttgcctttggaagtcatagataaaacaattaaccagaaagtgttgattgtgctgcagtcgaaccgcgagttcgagggcacgttagttggtttcgacgacttcgtcaacgttatactggaagacgctgtcgagtggcttatcgatcctgaggacgagagcagaaatgagaaagttatgcagcaccatggcagaatgcttttaagcggcaacaatattgccatccttgtgccaggcggcaaaaagacccctacggaggcgttgtaa

SEQ ID NO: 3954 - protein, 93 aa, Saccharomyces cerevisiae
MSLPEILPLEVIDKTINQKVLIVLQSNREFEGTLVGFDDFVNVILEDAVEWLIDPEDESRNEKVMQHHGRMLLSGNNIAILVPGGKKTPTEAL

SEQ ID NO: 3955 - DNA, 351 bp, Gallus gallus
  CDS (1)..(351)
atggcgaacgtcggagggggcggcggtggtgcgggcaagatggcggataaggagaagaagaagaaggagagcattttagatctttccaaatacattggcaaaacgatccgggtgaagttccagggtgggagagaagcaagtggtgtcttgaaaggatttgaccctctactgaaccttgtacttgatggtaccattgaatatatgcgagacccagatgatcaatacaaattaacagaagacacacgtcagctgggacttgtggtctgcagagggacttcagtggttctcatttgcccacaggatggaatggaagcaattccaaaccctctcattcagcaacaagatggataa

SEQ ID NO: 3956 - protein, 116 aa, Gallus gallus
MANVGGGGGGAGKMADKEKKKKESILDLSKYIGKTIRVKFQGGREASGVLKGFDPLLNLVLDGTIEYMRDPDDQYKLTEDTRQLGLVVCRGTSVVLICPQDGMEAIPNPLIQQQDG

SEQ ID NO: 3957 - DNA, 216 bp, Thermoplasma volcanium GSS1
  CDS (1)..(216): transl_table=11
atgataatgccaatgaaattactggaagagagtgtgaataaaagagtatcgctgctactaaaggacaatagggttttggagggaacactgacaggatatgacgattatatgaacatggttctcgatgacgtagacgagaacagcgaaaacgtttccagaaagcttggaactgtggtaatcaggggcagcaacgtagtaaggatagttccaaaataa

SEQ ID NO: 3958 - protein, 71 aa, Thermoplasma volcanium GSS1
MIMPMKLLEESVNKRVSLLLKDNRVLEGTLTGYDDYMNMVLDDVDENSENVSRKLGTVVIRGSNVVRIVPK

SEQ ID NO: 3959 - DNA, 267 bp, Arabidopsis thaliana
  CDS (1)..(267)
atggcgaacaatccttcacagcttcttccttcagagctaatcgataggtgtatagggtctaagatttgggtgataatgaaaggagataaggagctcgttggtattctcaaaggattcgatgtttatgtcaacatggttcttgaagatgtcaccgaatatgagattacggcagaaggaagacgggtcacaaagcttgatcagattctactcaatggcaacaacatcgccattctggtgccaggtgggtctcccgaagatggagaatga

SEQ ID NO: 3960 - protein, 88 aa, Arabidopsis thaliana
MANNPSQLLPSELIDRCIGSKIWVIMKGDKELVGILKGFDVYVNMVLEDVTEYEITAEGRRVTKLDQILLNGNNIAILVPGGSPEDGE

SEQ ID NO: 3961 - DNA, 204 bp, Thermoplasma acidophilum DSM 1728
  CDS (1)..(204): transl_table=11
atgaagatgcttgaggaaagtgttaataaaagggtttctttgcttctgaaggataatagagttcttgaaggcgttctcacaggatttgacgaatatatgaacatggtgctggatgatgttgacgagaacagcgagaacgtttcaagaaaactgggtaccgttgttgttagaggcagcaacgttgtccgtatagttcccaagtga

SEQ ID NO: 3962 - protein, 67 aa, Thermoplasma acidophilum DSM 1728
MKMLEESVNKRVSLLLKDNRVLEGVLTGFDEYMNMVLDDVDENSENVSRKLGTVVVRGSNVVRIVPK

SEQ ID NO: 3963 - DNA, 276 bp, Caenorhabditis elegans
  CDS (1)..(276)
atggcaacctcaacatccaccaacccaaacacacttctcccactggagctcattgacaagtgcatcggctcgaaaatctgggtgataatgaagaacgacaaggagatcgtcggcactctgacaggcttcgatgactacgtgaacatggttctggaggacgtcgtcgaatacgagaacaccgccgacggcaagcgaatgaccaagttggacacgattcttctcaacggaaatcacatcacgatgctcgtgccgggaggagaaggaccagagatttaa

SEQ ID NO: 3964 - protein, 91 aa, Caenorhabditis elegans
MATSTSTNPNTLLPLELIDKCIGSKIWVIMKNDKEIVGTLTGFDDYVNMVLEDVVEYENTADGKRMTKLDTILLNGNHITMLVPGGEGPEI

SEQ ID NO: 3965 - DNA, 267 bp, Arabidopsis thaliana
  CDS (1)..(267)
atggcgagcaccaaagttcagaggattatgactcaacccattaatctgattttcagatttctccaaagtaaagctcggattcagatttggctttttgagcagaaagatttgaggattgagggacgaattactggttttgatgagtacatgaatttggtgctggatgaggcagaggaagtgagcatcaagaagaaaaccagaaaaccacttggtcggattttgcttaaaggagacaacataactctcatgatgaacgcgggcaagtga

SEQ ID NO: 3966 - protein, 88 aa, Arabidopsis thaliana
MASTKVQRIMTQPINLIFRFLQSKARIQIWLFEQKDLRIEGRITGFDEYMNLVLDEAEEVSIKKKTRKPLGRILLKGDNITLMMNAGK

SEQ ID NO: 3967 - DNA, 243 bp, Schizosaccharomyces pombe 972h-
  CDS (1)..(243)
atgtcgatgacaattttacctttagaattaattgataaatgcattggatcaaacttatgggtgatcatgaaaagtgaacgcgaatttgcggggacacttgttggattcgatgattatgtgaatattgttctaaaagatgttacagaatatgatactgttaccggcgttaccgaaaaacactctgaaatgcttttgaacggaaatgggatgtgcatgttgattcctggtggaaaacccgaataa

SEQ ID NO: 3968 - protein, 80 aa, Schizosaccharomyces pombe 972h-
MSMTILPLELIDKCIGSNLWVIMKSEREFAGTLVGFDDYVNIVLKDVTEYDTVTGVTEKHSEMLLNGNGMCMLIPGGKPE

SEQ ID NO: 3969 - DNA, 276 bp, Drosophila melanogaster
  CDS (1)..(276)
atgactgccgttccacccccctccaacatctctaccctaatgccattggaattggtggacaaatgcatcggttcccgcatccacattatcatgaagaacgacaaggagatggtgggaactctcttaggattcgatgactttgtgaatatgctcttggacgacgtaacggagtatgaaaatacccccgacggccgccgcatcaccaaactggatcagattctgctcaacgggaacaatatcacaatgttggtgcctggcggagagctggcggagtag

SEQ ID NO: 3970 - protein, 91 aa, Drosophila melanogaster
MTAVPPPSNISTLMPLELVDKCIGSRIHIIMKNDKEMVGTLLGFDDFVNMLLDDVTEYENTPDGRRITKLDQILLNGNNITMLVPGGELAE

SEQ ID NO: 3971 - DNA, 327 bp, Plasmodium falciparum 3D7
  CDS (1)..(327)
atgtcattattacctacagcagcacctacacctaataaggacaataaatttatgacagacattaaaaagtttatgaatcaaaaaattagggtcaaatttgatggaggtcgtgaagttgttggaacgttgattgggcatgatgcaatcttcaacctggttttagataaaacagaagaatatataagagacccgaatgatagttttgttgtaacggataaaacgaggagtattggtttaattgttgccaggggaacttcggttgctttaattacacccgtagaaggaacacaagaaatatccaatccatttataacagaagaaaaataa

SEQ ID NO: 3972 - protein, 108 aa, Plasmodium falciparum 3D7
MSLLPTAAPTPNKDNKFMTDIKKFMNQKIRVKFDGGREVVGTLIGHDAIFNLVLDKTEEYIRDPNDSFVVTDKTRSIGLIVARGTSVALITPVEGTQEISNPFITEEK

SEQ ID NO: 3973 - DNA, 306 bp, Plasmodium falciparum 3D7
  CDS (1)..(306)
atggctacaattagtgggtcagaaacatttttacccttggctttaatggataagtgtattggaagtaaaatatggataatgatgaaaggcgataaagaaattgtaggtaaattggttggattcgatgaatatgtaaatatggtattagaagatgttacagaatacacgtacgcaaataatgttaaaaaagtaaataaaattaaaaaattattattaaatggattaaatataactattatggttccaggaggaactccagtgaattattatgattacgaagaaaagttagaagaaaatatagcataa

SEQ ID NO: 3974 - protein, 101 aa, Plasmodium falciparum 3D7
MATISGSETFLPLALMDKCIGSKIWIMMKGDKEIVGKLVGFDEYVNMVLEDVTEYTYANNVKKVNKIKKLLLNGLNITIMVPGGTPVNYYDYEEKLEENIA

SEQ ID NO: 3975 - DNA, 294 bp, Eremothecium gossypii
  CDS (1)..(294)
atgtccggaaagcagcagaagcccatgatgccgccaataaactgtatatataactacctgcagcagcagacgacagtaacattctggctgttccaacagacgcagatgcgcatcaaggggagaatcagcgggttcgacgagttcatgaacgtggtggtggacgaggcggtggaggtgccggtggacgagaagagcggggaggagcaggtgggccgcagcacgcggctggggcggatcctgctgaagggggacaacatcacgctgattacggcggcggaggaggagggtgtatag

SEQ ID NO: 3976 - protein, 97 aa, Eremothecium gossypii
MSGKQQKPMMPPINCIYNYLQQQTTVTFWLFQQTQMRIKGRISGFDEFMNVVVDEAVEVPVDEKSGEEQVGRSTRLGRILLKGDNITLITAAEEEGV

SEQ ID NO: 3977 - DNA, 243 bp, Eremothecium gossypii
  CDS (1)..(243)
atggaggtgctgccactggagatcatcgacagagccatcaaccagcccatctgggtcctgctcacctcgaaccgcgagttcaccggcaccctcgtcggcttcgacgacttcgtcaacgtcgtcatcgaggacgtcgtcgagtacgatgcccccgaccgcgccgtcaagcgccaccctggccgcatgctgctgagcggcaacaacatcaccgtcctggtccctggcggcaagccgcccgcctag

SEQ ID NO: 3978 - protein, 80 aa, Eremothecium gossypii
MEVLPLEIIDRAINQPIWVLLTSNREFTGTLVGFDDFVNVVIEDVVEYDAPDRAVKRHPGRMLLSGNNITVLVPGGKPPA

SEQ ID NO: 3979 - DNA, 279 bp, Anopheles gambiae str. PEST
  CDS (1)..(279)
atgataatggcacaaacaaccgtcgcgaatcaatcaacattgctaccactcgagctggtagataaatgcatcggttcgcggatacacatcatcatgaagaatgataaggagattgtgggcacgctgcttgggttcgacgacttcgtcaacatgctgctggaggacgtgacggagtacgagaacacaccggaaggccggcggataaccaaactcgaccagatcctgctgaacggcaacaacattacgatggtgaggggtttaccttccctgttggcgtag

SEQ ID NO: 3980 - protein, 92 aa, Anopheles gambiae str. PEST
MIMAQTTVANQSTLLPLELVDKCIGSRIHIIMKNDKEIVGTLLGFDDFVNMLLEDVTEYENTPEGRRITKLDQILLNGNNITMVRGLPSLLA

SEQ ID NO: 3981 - DNA, 312 bp, Rattus norvegicus
  CDS (1)..(312)
atggcggacaaagagaaaaagaagaaagaaagcatcttggacctgtccaagtatattgataagaccattcgagtcaagttccagggtggccgggaagccagcggcatcctgaaagggtttgacccactgctcaacctggtgctggatgggaccattgaatacatgcgagaccccgatgaccagtacaagctgacagaggacactcggcagctggggctcgtagtgtgccgtggcacctcggtggtgctcatctgcccgcaggatggcatggaggccatccctaacccctttgtgcagcagcaggacacttag

SEQ ID NO: 3982 - protein, 103 aa, Rattus norvegicus
MADKEKKKKESILDLSKYIDKTIRVKFQGGREASGILKGFDPLLNLVLDGTIEYMRDPDDQYKLTEDTRQLGLVVCRGTSVVLICPQDGMEAIPNPFVQQQDT

SEQ ID NO: 3983 - DNA, 348 bp, Magnaporthe grisea 70-15
  CDS (1)..(348)
atggcgacacaactgcttccattaggtaaggaaagatctcagaggatctggaaaacacagctcatcgacaagtgtgtcggctcccgcatttgggtgatcatgaagggtgacaaggaattcagcgggttacttgtgggatttgacgactacgttaatatggtccttgaggacgtgacagagttgtatgtccccccgtcgtgtcattacgcaacgcgccctagcccatacttatattctttgtcatccagcgattactctgggaaccacacaaaaatgtccaagattctcctcaacggaaacaacatttgcatgctgatcccaggaggcgagggtcctctacaggcatga

SEQ ID NO: 3984 - protein, 115 aa, Magnaporthe grisea 70-15
MATQLLPLGKERSQRIWKTQLIDKCVGSRIWVIMKGDKEFSGLLVGFDDYVNMVLEDVTELYVPPSCHYATRPSPYLYSLSSSDYSGNHTKMSKILLNGNNICMLIPGGEGPLQA

SEQ ID NO: 3985 - DNA, 270 bp, Gibberella zeae PH-1
  CDS (1)..(270)
atggcctcccaactgctacccctcgagcttatcgacaagtgtgtcggctctagaatttgggtcatcatgaagggtgataagggtaagatgagcctggcagaattcagtggaacactcgttggattcgatgactacgtcaacatggtccttgaggatgtgactgagtttgattactcgggaaaccacaccaagctacccaagattctactcaacggtaacaacatttgcatgttgatccccggtggtgagggcccagaaggggctgcttga

SEQ ID NO: 3986 - protein, 89 aa, Gibberella zeae PH-1
MASQLLPLELIDKCVGSRIWVIMKGDKGKMSLAEFSGTLVGFDDYVNMVLEDVTEFDYSGNHTKLPKILLNGNNICMLIPGGEGPEGAA

SEQ ID NO: 3987 - DNA, 354 bp, Ustilago maydis 521
  CDS (1)..(354)
atgtcacctccaggtcaaccgacacctgcaggatctgctgctgccgcagccgctctacccaccatcttgcccctcgagttgatcgacaagtgcatcggatcgagcatctgggtcatcatgaagaccgatcgagaatttagtggaaccctgttgggcttcgatgattacgtcaatgcaatgattgacaaccactcctccttggccgttcatgcagacatggtgcttgaagacgtgacagagtatgagactacgccggacggcaagaagaaaaaaaccaaactcggccaaaccctgctcaacggcaacaacatctgcatgctcattccgggatccgaaggccccgaagactcgtaa

SEQ ID NO: 3988 - protein, 117 aa, Ustilago maydis 521
MSPPGQPTPAGSAAAAAALPTILPLELIDKCIGSSIWVIMKTDREFSGTLLGFDDYVNAMIDNHSSLAVHADMVLEDVTEYETTPDGKKKKTKLGQTLLNGNNICMLIPGSEGPEDS

SEQ ID NO: 3989 - DNA, 333 bp, Ustilago maydis 521
  CDS (1)..(333)
atggcgcaagtcgaacgatcatccccagcggcggccgccagtacgggaccatcacccctcggctcggtaacagaaccattcgatcttatccgtctgtccatttcagaacgtgtctacgtcaagttgaggggcgaccgtgaactgcgtggcacattgcatgcatacgatggacacatgaacttgatcctgggtgatgtggaggagaccatctacgttgttgatgtcaacgacgaaagtgggtctgagactgttcgagtggttaaacgtcaaagcgaaatgctctttgtccgtggagatagcgtcattctcgtctcgcctccttccagcacctag

SEQ ID NO: 3990 - protein, 110 aa, Ustilago maydis 521
MAQVERSSPAAAASTGPSPLGSVTEPFDLIRLSISERVYVKLRGDRELRGTLHAYDGHMNLILGDVEETIYVVDVNDESGSETVRVVKRQSEMLFVRGDSVILVSPPSST

SEQ ID NO: 3991 - DNA, 333 bp, Aspergillus nidulans FGSC A4
  CDS (1)..(333)
atgggatcctcaatgccaagtctcgcattggaatcgtccatccaaggctcaagatccaccaactacaaatatcatatcccctcggctttatacaactcgcagaaggttttctgttgggaatctcctgcatatcctaaaatggcatctcaacttctccctctggaattctctggcactttgctcggattcgatgactacgtcaatatggtattggaagatgtgaccgaatttgattacactggtgcgcaggtcaagctgccaaaaatcctccttaacggaaataatatctgcatgttaattcctggtggtgaagggcctgttggtagttcttga

SEQ ID NO: 3992 - protein, 110 aa, Aspergillus nidulans FGSC A4
MGSSMPSLALESSIQGSRSTNYKYHIPSALYNSQKVFCWESPAYPKMASQLLPLEFSGTLLGFDDYVNMVLEDVTEFDYTGAQVKLPKILLNGNNICMLIPGGEGPVGSS

SEQ ID NO: 3993 - DNA, 492 bp, Gallus gallus
  CDS (1)..(492)
atgagcctgttccaggaaaacggattgacagcatccttcttcacagctgacacggttgtttttatgaaaagggaaggaaggcccgctgaggccacagcccacggggagcggcggcggcgggagaacgagggctctgccggccgctactcagggctgcgtcccgcccgccccagcctctacttccgcgggaggcggcagcgattgggcaggtctggcggcaatatggcggccaacgcgagcaccaacccctcgcagctcctgccgctcgagcttgtggacaaatgtataggttctcgcatccacatcgtgatgaagagtgataaagaaattgttggaacgctactagggtttgatgactttgtcaatatggtgttagaagacgttacagaatttgagatcacgcctgaaggcagaagaatcacaaaactagaccagattttgctaaatggaaataacataacaatgctggttcctggaggagaaggaccttga

SEQ ID NO: 3994 - protein, 163 aa, Gallus gallus
MSLFQENGLTASFFTADTVVFMKREGRPAEATAHGERRRRENEGSAGRYSGLRPARPSLYFRGRRQRLGRSGGNMAANASTNPSQLLPLELVDKCIGSRIHIVMKSDKEIVGTLLGFDDFVNMVLEDVTEFEITPEGRRITKLDQILLNGNNITMLVPGGEGP

SEQ ID NO: 3995 - DNA, 273 bp, Candida glabrata CBS138
  CDS (1)..(273)
atgagcagtttagacgttttgccattggaagttatagacaagaccatagaccagcaggtacacataatattacagtcaaatcgcgaatttagcggtaagttggtgggatttgatgagtttgtaaatgtgatcttggaagatccaatcgaatacactacagaaattacagcaaatgacggtttgaaaagtgaagtggtaatggaacaccatggaaggatgctattaagtggtaataacattactatgcttgtgcctggtggtaagaagctataa

SEQ ID NO: 3996 - protein, 90 aa, Candida glabrata CBS138
MSSLDVLPLEVIDKTIDQQVHIILQSNREFSGKLVGFDEFVNVILEDPIEYTTEITANDGLKSEVVMEHHGRMLLSGNNITMLVPGGKKL

SEQ ID NO: 3997 - DNA, 282 bp, Kluyveromyces lactis NRRL Y-1140
  CDS (1)..(282)
atgtccggctctaaagtaggagctcctatggtacctccaatcaattgcatatacaactaccttcatcatcagacaacagtaacgttttggttatacgaacaagtacagacacgtataagaggcaagatcagaggctttgatgagttcatgaatgtggtaatagatgacgctttcgaaatagctgtagatccgaaaagtggtaaagagagcgatgataaagcagtgtttcttgggagaattatgttgaaaggtgataatataacacttgttgtggcaaattga

SEQ ID NO: 3998 - protein, 93 aa, Kluyveromyces lactis NRRL Y-1140
MSGSKVGAPMVPPINCIYNYLHHQTTVTFWLYEQVQTRIRGKIRGFDEFMNVVIDDAFEIAVDPKSGKESDDKAVFLGRIMLKGDNITLVVAN

SEQ ID NO: 3999 - DNA, 255 bp, Kluyveromyces lactis NRRL Y-1140
  CDS (1)..(255)
atgagtagtgtttcagagattttgcccctagaggtcattgacaaaacaataggacaggaagtgaccattctacttaaagattacagagaattctttggtacgctagtagggttcgatgattacgttaatgttgtcattgaaaatgcggtagagtatttggaagaccaggagattaaaagattccagggaaagatgttattgactggtaacaacattgctatgttgatacctggtggaaaacctgcttcaaattaa

SEQ ID NO: 4000 - protein, 84 aa, Kluyveromyces lactis NRRL Y-1140
MSSVSEILPLEVIDKTIGQEVTILLKDYREFFGTLVGFDDYVNVVIENAVEYLEDQEIKRFQGKMLLTGNNIAMLIPGGKPASN

SEQ ID NO: 4001 - DNA, 267 bp, Debaryomyces hansenii CBS767
  CDS (1)..(267)
atgtcaactgtaaggacagaacaacaacaacaagaaccacttgacttagttcgttatcagttagacgaattggttttggtcaaattaagaggtgctcgtgaaatgaaaggtaaattgcaaggatatgattcccactgtaacatgatattaagtgacgcagttgaatatatatacgatgtaccagaaggacaagaaccagttactaaaaatacggatatggtttttgtaagaggagattctgtgattttgattagtcctgtgaactaa

SEQ ID NO: 4002 - protein, 88 aa, Debaryomyces hansenii CBS767
MSTVRTEQQQQEPLDLVRYQLDELVLVKLRGAREMKGKLQGYDSHCNMILSDAVEYIYDVPEGQEPVTKNTDMVFVRGDSVILISPVN

SEQ ID NO: 4003 - DNA, 282 bp, Debaryomyces hansenii CBS767
  CDS (1)..(282)
atgtctgaagcaaatacctcaagtaaccaaccggctgcgggagaatctcctttgagcacgatccttccattggaaattattgataagtcaattggacataaaattcaagtattgatgacgaacgataaggaatttaaaggaactttgatagggtttgatgattacgtcaatatggttttagaaaacgtcgaagaatttgacaatgaaggtccaaaaggaaaggttattaagaaaatgttgttgaacggaagtcaagtcgctatgttaattccaagtctctag

SEQ ID NO: 4004 - protein, 93 aa, Debaryomyces hansenii CBS767
MSEANTSSNQPAAGESPLSTILPLEIIDKSIGHKIQVLMTNDKEFKGTLIGFDDYVNMVLENVEEFDNEGPKGKVIKKMLLNGSQVAMLIPSL

SEQ ID NO: 4005 - DNA, 273 bp, Debaryomyces hansenii CBS767
  CDS (1)..(273)
atgtcttcaagtgctaagacaaataagaaaacgatgattcctccaatcaatcttatttttaaatatttacagcaacaatcaccagttacaatatggttatatgaacaaactcatctgagaatacaaggaaagataagagggtttgacgagtttatgaacgttgtaattgatgacgctatggaggtgaatacaaacgacgggtcaaaagaagaattagggaggatactacttaaaggtgataacattacgttaatttctagcttggatgtgtag

SEQ ID NO: 4006 - protein, 90 aa, Debaryomyces hansenii CBS767
MSSSAKTNKKTMIPPINLIFKYLQQQSPVTIWLYEQTHLRIQGKIRGFDEFMNVVIDDAMEVNTNDGSKEELGRILLKGDNITLISSLDV

SEQ ID NO: 4007 - DNA, 276 bp, Debaryomyces hansenii CBS767
  CDS (1)..(276)
atgtcaagtcttaaagagttcttagagaatgctaggttattcgaaggaacactccaaggattcgataattcaacaaacgttatcattaacaattgcatagaaagattaatttatcctgacgaacaagatgataatcaggaaataccgttgggactatatttgatgcgagggggaaatattgtttgtattggagaggtagatgatacaatagaagctgatatagattggatgaaagtcaaaggagagacattaaagggaacaaagaatccgttataa

SEQ ID NO: 4008 - protein, 91 aa, Debaryomyces hansenii CBS767
MSSLKEFLENARLFEGTLQGFDNSTNVIINNCIERLIYPDEQDDNQEIPLGLYLMRGGNIVCIGEVDDTIEADIDWMKVKGETLKGTKNPL

SEQ ID NO: 4009 - DNA, 258 bp, Yarrowia lipolytica CLIB99
  CDS (1)..(258)
atgagcgagcaagctgagccccaggtatcgcaaattctgcctctggagctggtcgacaagtgcataggatccaagattctggtgctggtcaagtccaaggtcgagttcactggcactctggtcggattcgacgatttcgtcaacatggtgctggaggacgtgaccgaggtcaacacaaaaactggcaaggagaccaatcacagcaagctgttgttgagtggaaagagcatctacatgcttgtccctggaggactttaa

SEQ ID NO: 4010 - protein, 85 aa, Yarrowia lipolytica CLIB99
MSEQAEPQVSQILPLELVDKCIGSKILVLVKSKVEFTGTLVGFDDFVNMVLEDVTEVNTKTGKETNHSKLLLSGKSIYMLVPGGL

SEQ ID NO: 4011 - DNA, 258 bp, Yarrowia lipolytica CLIB99
  CDS (1)..(258)
atgtccgacagattacagcagcgagttatgctcgtgcctatcaaggtactgttcaagtttctgcagttgcatgccacggtccaggtgtggctgtttgaacagagcgacacccgaatccaaggcactctggtgggctttgacgagttcatgaatgtggtgcttgaggacgccatccagatttgtggcgacaaggagcgaaagattggcaagatcatgttgaagggtgacaacatcacgctgattagtaacatgagctag

SEQ ID NO: 4012 - protein, 85 aa, Yarrowia lipolytica CLIB99
MSDRLQQRVMLVPIKVLFKFLQLHATVQVWLFEQSDTRIQGTLVGFDEFMNVVLEDAIQICGDKERKIGKIMLKGDNITLISNMS

SEQ ID NO: 4013 - DNA, 396 bp, Pan troglodytes
  CDS (1)..(396)
atggcggtgagcgcgcggcggaatctggaacccgggggcgtggggctcgggccgcgctccaggcctcatgcgctctgctttccccgcaggataaggagaagaagagaaaaggagagcatcttggacttgtccaagtacatcgacaagacgatccgggtaaagttccagggaggccgcgaagccagtggaatcctgaagggcttcgacccactcctcaaccttgtgctggacggcaccattgagtacatgcgagaccctgacgaccagtacaagctcacggaggacacccggcagctgggcctcgtggtgtgccggggcacgtccgtggtgctaatctgcccgcaggacggcatggaggccatccccaaccccttcatccagcagcaggacgcctag

SEQ ID NO: 4014 - protein, 131 aa, Pan troglodytes
MAVSARRNLEPGGVGLGPRSRPHALCFPRRIRRRREKESILDLSKYIDKTIRVKFQGGREASGILKGFDPLLNLVLDGTIEYMRDPDDQYKLTEDTRQLGLVVCRGTSVVLICPQDGMEAIPNPFIQQQDA

SEQ ID NO: 4015 - DNA, 276 bp, Pan troglodytes
  CDS (1)..(276)
atggcggctaacgctactaccaacccgtcgcagctgctgccgttagagcttgtggacaaatgtataggatcaagaattcacatcgtgatgaagagtgataaggaaattgttggtactcttctaggatttgatgactttgtcaatatggtactggaagatgtcactgagtttgaaatcacaccagaaggaagaaggattactaaattagatcagattttgctaaatggaaataatataacaatgctggttcctggaggagaaggacctgaagtgtga

SEQ ID NO: 4016 - protein, 91 aa, Pan troglodytes
MAANATTNPSQLLPLELVDKCIGSRIHIVMKSDKEIVGTLLGFDDFVNMVLEDVTEFEITPEGRRITKLDQILLNGNNITMLVPGGEGPEV

SEQ ID NO: 4017 - DNA, 279 bp, Cryptococcus neoformans var. neoformans JEC21
  CDS (1)..(279)
atgtctggccgaaaagtgatggttcagcccatcaacatcattttctcccaccttcaaaagcacaaccgtgtcgcaatttggctttacgacaacaacgacttccgtatcgaagcgtacatcattggttttgatgagttcatgaacgtggttttggatgacgccgaagaagtgtatgactgtggtgctaagcccggaaaggaggttcccccacggagagaactcggacgtatattgttgaagggtgataacatcactctgatacaacccgtgacggcttaa

SEQ ID NO: 4018 - protein, 92 aa, Cryptococcus neoformans var. neoformans JEC21
MSGRKVMVQPINIIFSHLQKHNRVAIWLYDNNDFRIEAYIIGFDEFMNVVLDDAEEVYDCGAKPGKEVPPRRELGRILLKGDNITLIQPVTA

SEQ ID NO: 4019 - DNA, 504 bp, Bos taurus
  CDS (1)..(504)
atggatgatttaatgcttatggaaattgctcaaagaaagaaccagagggatgaagagaagacaagaataagaaggaaagagcagaacactgagagtgaacaaattgctgaacttgagtgtgcaatattaccgaaggacaagtacctggtcatgttcttctgtgttcgttctggaagttgctttctgagagagagtgtggagcactgtggtgcttgtgagcgtccagcatggcgtacggggccagggccagaaggtgcagaaggtgatggtgcacccatcaatctcatcttcagatacttgcaaaatagatcacggattcaggtgtggctttatgagcaagtgaatatgcagatagagggctgtatcattggttttgatgagtatatgaacctcatattagatgacgcagaagagattcattctaaaacaaagtcaagaaaacaactgggtcggatcatgctaaaaggagataacattactctgctccaaagtgtctccaactag

SEQ ID NO: 4020 - protein, 167 aa, Bos taurus
MDDLMLMEIAQRKNQRDEEKTRIRRKEQNTESEQIAELECAILPKDKYLVMFFCVRSGSCFLRESVEHCGACERPAWRTGPGPEGAEGDGAPINLIFRYLQNRSRIQVWLYEQVNMQIEGCIIGFDEYMNLILDDAEEIHSKTKSRKQLGRIMLKGDNITLLQSVSN

SEQ ID NO: 4021 - DNA, 369 bp, Cryptosporidium parvum
  CDS (1)..(369)
atgagttataaagtaaattacatgagcgagacaccagctaataaatctcagggaggaagtaatcagaagggagggaatataatccttccattagcactgatagacaagtgtattgggaatagaatatatgtggtgatgaaaggagataaagagtttagtggagtgctaagaggatttgacgaatatgtaaatatggtattggatgatgttcaggagtatgggtttaaggcagatgaggaggacatatcaggaggaaacaagaagttaaaaagagtgatggtgaatcgtttagagactatattgttgagtgggaataatgtagcaatgttggttcctggaggggatccagacagctttaacttttcttag

SEQ ID NO: 4022 - protein, 122 aa, Cryptosporidium parvum
MSYKVNYMSETPANKSQGGSNQKGGNIILPLALIDKCIGNRIYVVMKGDKEFSGVLRGFDEYVNMVLDDVQEYGFKADEEDISGGNKKLKRVMVNRLETILLSGNNVAMLVPGGDPDSFNFS

SEQ ID NO: 4023 - DNA, 294 bp, Dictyostelium discoideum
  CDS (1)..(294)
atgtctgaagttgaaaattcaaatacagtggatttacaatcacaattattaccattagaattaattgaaaaatgtattggttcaagaatttggattgcaatgaaaaatgataaagaatttgttggtacattattaggttttgatgcttacgttaatatatttttaaaagatgttactgaatacgaatatactccagaaggtttaaaaacagttaaattagataatattcttttaaatggaaatcatgtttgtttgcttgttccaggtggtgaaggtccaaaagttaaagcataa

SEQ ID NO: 4024 - protein, 97 aa, Dictyostelium discoideum
MSEVENSNTVDLQSQLLPLELIEKCIGSRIWIAMKNDKEFVGTLLGFDAYVNIFLKDVTEYEYTPEGLKTVKLDNILLNGNHVCLLVPGGEGPKVKA

SEQ ID NO: 4025 - DNA, 348 bp, Cryptosporidium hominis
  CDS (1)..(348)
atgagcgagacaccaactaataaatctcagggaggaagtaatcagaagggagggaatataatccttccattagcactgatagacaagtgtattgggaatagaatatatgtggtgatgaaaggggataaagagtttagtggagtgctaagaggatttgacgaatatgtaaatatggtattggatgatgttcaggagtatgggtttaaggcagatgaggaggacatgtcaggaggaaacaagaagttaaaaagagtgatggtaaatcgtttagaaactatattgttgagtggaaataatgtagcaatgttggttcctggaggggatccaaacagctttaacttttcttag

SEQ ID NO: 4026 - protein, 115 aa, Cryptosporidium hominis
MSETPTNKSQGGSNQKGGNIILPLALIDKCIGNRIYVVMKGDKEFSGVLRGFDEYVNMVLDDVQEYGFKADEEDMSGGNKKLKRVMVNRLETILLSGNNVAMLVPGGDPNSFNFS

SEQ ID NO: 4027 - DNA, 327 bp, Plasmodium berghei
  CDS (1)..(327)
atgtctgtattaccagggcctacagaaaatatcaacaaggataacaaatttatgaatgatataaaaaaatttatgaaccaaaaaattagggtaaaattcgatggaggaagagaagttgttggtaatttaattggtcatgatgcaatatttaatttagttctagacaaaactgaagaatttatacgagacccaaatgatagttatgtaataaccgaaaaaagtaggaatattggcttaattgtagcccgaggaacttcggttgccctgattacccctgttaatggcactcaagaaatttctaatccatttatatcggaagaaaaatag

SEQ ID NO: 4028 - protein, 108 aa, Plasmodium berghei
MSVLPGPTENINKDNKFMNDIKKFMNQKIRVKFDGGREVVGNLIGHDAIFNLVLDKTEEFIRDPNDSYVITEKSRNIGLIVARGTSVALITPVNGTQEISNPFISEEK

SEQ ID NO: 4029 - DNA, 312 bp, Danio rerio
  CDS (1)..(312)
atggcggacaaagacaagaaaaagaaggagagtatttttgatttgtcgaaatacatcgacaaacatatacgtgtaaagtttcaaggaggtcgcgaagcaagtggcgtcttaaaaggcttcgacccgttgttgaatcttgtgttggacggcaccattgaatacatgcgagatcctgatgaccagtataaactgaccgaagacaccaggcagctgggtctggttgtttgtcgagggacgtctgttgtgctcatctgtccacaggatgggatggaagctatcccgaaccctttcatccagcagcaggatggataa

SEQ ID NO: 4030 - protein, 103 aa, Danio rerio
MADKDKKKKESIFDLSKYIDKHIRVKFQGGREASGVLKGFDPLLNLVLDGTIEYMRDPDDQYKLTEDTRQLGLVVCRGTSVVLICPQDGMEAIPNPFIQQQDG

SEQ ID NO: 4031 - DNA, 276 bp, Danio rerio
  CDS (1)..(276)
atggcggcaatcacagcaacgaatccttcgcagcttttaccactcgagctggtggataagtgcattggctctcggattcacatcgttatgaagaacgataaagagattgtgggaactctgcttgggtttgacgactttgtcaacatggtcctagaggatgtcacagaatttgaaatcacaccagagggaagaagaatcacaaaactggatcagattctccttaatggcaataacatcacaatgctgattccaggaggagaaggaccagaagtttga

SEQ ID NO: 4032 - protein, 91 aa, Danio rerio
MAAITATNPSQLLPLELVDKCIGSRIHIVMKNDKEIVGTLLGFDDFVNMVLEDVTEFEITPEGRRITKLDQILLNGNNITMLIPGGEGPEV

SEQ ID NO: 4033 - DNA, 324 bp, Danio rerio
  CDS (1)..(324)
atgtttttggatcctcaggacaaagacaagaaaaagaaggagagtatttttgatttgtcgaaatacatcgacaaacatatacgtgtaaagtttcaaggaggtcgcgaagcaagtggcgtcttaaaaggcttcgacccgttgttgaatcttgtgttggacggcaccattgaatacatgcgagatcctgatgaccagtataaactgaccgaagacaccaggcagctgggtctggttgtttgtcgagggacgtctgttgtgctcatctgtccacaggatgggatggaagctatcccgaaccctttcatccagcagcaggatggataa

SEQ ID NO: 4034 - protein, 107 aa, Danio rerio
MFLDPQDKDKKKKESIFDLSKYIDKHIRVKFQGGREASGVLKGFDPLLNLVLDGTIEYMRDPDDQYKLTEDTRQLGLVVCRGTSVVLICPQDGMEAIPNPFIQQQDG

SEQ ID NO: 4035 - DNA, 360 bp, Candida albicans SC5314
  CDS (1)..(360): transl_table=12
atggtgtgtgaacgtatttgggtgataacagactcatctagccgtagaatcatggtggagagcggaaataaaatttttttttttgttgaaaccaaaaaaaaacctttttcttttttgtcaacaatcatgtcagacgaaacagtcccacaaacggtgttgcctttggaagtaatagataggtcagttggtaagagggtccgggtgttgatgactggagataaagagtttaatggaaagttgattggttttgatgattatgtgaatatggttttagaggatgtcactgaagtcgatggaggtgctccaattaagaagatgctattaaatggtggccacattgccatgatcgttcctgagtaa

SEQ ID NO: 4036 - protein, 119 aa, Candida albicans SC5314
MVCERIWVITDSSSRRIMVESGNKIFFFVETKKKPFSFLSTIMSDETVPQTVLPLEVIDRSVGKRVRVLMTGDKEFNGKLIGFDDYVNMVLEDVTEVDGGAPIKKMLLNGGHIAMIVPE

SEQ ID NO: 4037 - DNA, 252 bp, Aspergillus fumigatus Af293
  CDS (1)..(252)
atggcgtcccaacttcttcctttggaattaatcgataagtgtgtgggatcgagaatttgggtcatcatgaagggtgacaaagaattctctggcacattacttggattcgacgactatgtcaatatggttctggaagatgtaactgaattcgattactctggcgcgcaggtcaagctgcctaagatcctgctaaacgggaacaatatctgcatgttaattcctggcggcgagggaccagttggcagctcctga

SEQ ID NO: 4038 - protein, 83 aa, Aspergillus fumigatus Af293
MASQLLPLELIDKCVGSRIWVIMKGDKEFSGTLLGFDDYVNMVLEDVTEFDYSGAQVKLPKILLNGNNICMLIPGGEGPVGSS

SEQ ID NO: 4039 - DNA, 315 bp, Theileria parva
  CDS (1)..(315)
atgactgcaccgagcaaatcttttagagatgtaaaaagtgttattaatttaaacaaacatttaaacaaagaagtttatgttaaatttagtggaggtcgagaagtcaaaggagttcttaggggtcacgacgccatgtccaacttggtgttggatgatacagtggaatatctgaaggattcttctgattcaagtaaattgactggagaaaaaagaaatctcggacttctagtagctagaggaacttcagtgactgttgtatatcccgttgagggaactgaaaagatcgataacccattcctggaatccaacgactag

SEQ ID NO: 4040 - protein, 104 aa, Theileria parva
MTAPSKSFRDVKSVINLNKHLNKEVYVKFSGGREVKGVLRGHDAMSNLVLDDTVEYLKDSSDSSKLTGEKRNLGLLVARGTSVTVVYPVEGTEKIDNPFLESND

SEQ ID NO: 4041 - DNA, 273 bp, Theileria parva
  CDS (1)..(273)
atgtcgacaattgaagccagcgccgtctatcttccgttggcactcattgataaatgtctcggaagtaaaatttggatcataatgaagaacgataaggaaattacaggaacccttagaggctttgacgactatatgaacatggtcctggaggatgttgtcgactactccttctcaccggatggagtcaaaacaacagagttgaatgacgccttagttaatggaaacaatgtagcaatgctagttccaggtggaaagccgacaaatgttaaataa

SEQ ID NO: 4042 - protein, 90 aa, Theileria parva
MSTIEASAVYLPLALIDKCLGSKIWIIMKNDKEITGTLRGFDDYMNMVLEDVVDYSFSPDGVKTTELNDALVNGNNVAMLVPGGKPTNVK

SEQ ID NO: 4043 - DNA, 300 bp, Strongylocentrotus purpuratus
  CDS (1)..(300)
atggcgtataaagggcagaaggtgcagaaagtgatggttcaaccaatcaacttgattttcagatatcttcagaataggtcaagagttcagatctggctgtacgaccaatcaaatctcaggattgaaggacatatcattggatttgacgagtacatgaatgtagtactagatgatgctgaggagtaccacaagaaaaataagacgaggaaaccattaggacggatattgctgaaaggagacaacatcacgctgattcagaacgtccaagaagccgccggggctgcagagccggctcattag

SEQ ID NO: 4044 - protein, 99 aa, Strongylocentrotus purpuratus
MAYKGQKVQKVMVQPINLIFRYLQNRSRVQIWLYDQSNLRIEGHIIGFDEYMNVVLDDAEEYHKKNKTRKPLGRILLKGDNITLIQNVQEAAGAAEPAH

SEQ ID NO: 4045 - DNA, 234 bp, Strongylocentrotus purpuratus
  CDS (1)..(234)
atgtctcttaggtcaagagttcagatctggctgtacgaccaatcaaatctcaggattgaaggacatatcattggatttgacgagtacatgaatgtagtactagatgatgctgaggagtaccacaagaaaaataagacgagaaaaccattaggacggatattgctgaaaggagataacataacactgattcagaacgtccaagaagccgcgggggccgcagagccggctcattag

SEQ ID NO: 4046 - protein, 77 aa, Strongylocentrotus purpuratus
MSLRSRVQIWLYDQSNLRIEGHIIGFDEYMNVVLDDAEEYHKKNKTRKPLGRILLKGDNITLIQNVQEAAGAAEPAH

SEQ ID NO: 4047 - DNA, 267 bp, Strongylocentrotus purpuratus
  CDS (1)..(267)
atgactacttctaacccatcacaccttttaccacttgagcttgtcgacaagtgcatcggctccagaatacacattgttatgaagacagataaggagattgttggaactcttctgggctttgatgactttgtcaacatggtacttgaagacgtcgtagagtttgaaaccacagcagagggtaggagagtcaccaagctagatcagattctcttgaatgggaacaatatcaccatgcttatcccaggtagtgaaggtccagaagtttga

SEQ ID NO: 4048 - protein, 88 aa, Strongylocentrotus purpuratus
MTTSNPSHLLPLELVDKCIGSRIHIVMKTDKEIVGTLLGFDDFVNMVLEDVVEFETTAEGRRVTKLDQILLNGNNITMLIPGSEGPEV

SEQ ID NO: 4049 - DNA, 372 bp, Strongylocentrotus purpuratus
  CDS (1)..(372)
atgcccatctgtaacttagatctccagaaacagcggaatgggggggggggggggagggggcggcaacaggagcagcagaagaaaaagaaggagagtatcttagatttgtcaaaatatattgacaagcaaatacgtgtcaaattccaaggaggcagagaagtgaccggggtcctgaagggatttgatcctctcctgaatttggtactggatggaacaacagagtttatgcgagatccagatgacccattcaagctcactgatgatacgaggaaccttggtcttgcagtatgtagaggaacatcggtggtcctgatatgtcctgcggagggaatggagcctatagctaacccttttgttcaacaagacgggtga

SEQ ID NO: 4050 - protein, 123 aa, Strongylocentrotus purpuratus
MPICNLDLQKQRNGGGGGRGRQQEQQKKKKESILDLSKYIDKQIRVKFQGGREVTGVLKGFDPLLNLVLDGTTEFMRDPDDPFKLTDDTRNLGLAVCRGTSVVLICPAEGMEPIANPFVQQDG

SEQ ID NO: 4051 - DNA, 312 bp, Canis familiaris
  CDS (1)..(312)
atggcggacaaagagaagaagaaaaaagagagcatcttggacttgtcgaagtacatcgacaagacgattcgggtgaagtttcagggaggccgcgaagccagcggcatcttgaaggggttcgacccactcctcaatctcgtgcttgacggcaccgtggagtacatgagagaccccgacgaccagtacaagctgacagaggacacccgccagctgggcctggtggtgtgcaggggcacatccgtggtgctcatctgccctcaggacggcatggaggccatccccaaccccttcatccagcagcaggacgcctag

SEQ ID NO: 4052 - protein, 103 aa, Canis familiaris
MADKEKKKKESILDLSKYIDKTIRVKFQGGREASGILKGFDPLLNLVLDGTVEYMRDPDDQYKLTEDTRQLGLVVCRGTSVVLICPQDGMEAIPNPFIQQQDA

SEQ ID NO: 4053 - DNA, 249 bp, Picrophilus torridus DSM 9790
  CDS (1)..(249): transl_table=11
atggctaataaaacagcttatgtttcaaaacccatggacgtgttgaagaattcactggagaaaaatatcatggtcgatgtaaagggaaacagaacgtactctggaacacttgagggctatgatatatacatgaatgttgttctttcaaacgtttcagagacgataaatggcgagaacaagggtgtttttgagaagatgcttgtaagaggagataatataatatttgtttcaccttcaaggagtgattaa

SEQ ID NO: 4054 - protein, 82 aa, Picrophilus torridus DSM 9790
MANKTAYVSKPMDVLKNSLEKNIMVDVKGNRTYSGTLEGYDIYMNVVLSNVSETINGENKGVFEKMLVRGDNIIFVSPSRSD

SEQ ID NO: 4055 - DNA, 216 bp, Picrophilus torridus DSM 9790
  CDS (1)..(216): transl_table=11
atggcgctattaccaatgaagatgcttgaggagagtttaaataagaaggtatcactgcttttaaaggacaacagggttcttgaaggcacccttgcaggctatgatgagtacatgaacatgacgcttgatgatgccgaggagagcggtgagacccagagaaagcttggaactgttgttataaggggcagcaacgttgtaagaattgccccaaaataa

SEQ ID NO: 4056 - protein, 71 aa, Picrophilus torridus DSM 9790
MALLPMKMLEESLNKKVSLLLKDNRVLEGTLAGYDEYMNMTLDDAEESGETQRKLGTVVIRGSNVVRIAPK

SEQ ID NO: 4057 - DNA, 219 bp, Methanosarcina barkeri str. fusaro
  CDS (1)..(219): transl_table=11
atggcaaaccgacctctggatattttgaacaacgcactggacacacctgtaatcgttagattgaaaggcgcacgcgagtttagaggcgagctgaaaggatacgatattcacatgaacctcgtgcttgacaatgctgaagagctaagagaaggagaagttgtaagcaagttcggcagtgtcgttattcgcggtgacaacgtggtatatgtatctccgtaa

SEQ ID NO: 4058 - protein, 72 aa, Methanosarcina barkeri str. fusaro
MANRPLDILNNALDTPVIVRLKGAREFRGELKGYDIHMNLVLDNAEELREGEVVSKFGSVVIRGDNVVYVSP

SEQ ID NO: 4059 - DNA, 219 bp, Methanococcoides burtonii DSM 6242
  CDS (1)..(219): transl_table=11
atgggaaacagacctctggatatattgaatgatgcattgaacacatcagtgattgtaagattgaagggcgcaagagaatttagaggcgtacttcagggatatgatgtccacatgaaccttgttctggacgaagcagaagaattaaaggacggagagatcgttcgcaagataggtggagttgttatcagaggggataacgtagtctacgtgtctccgtaa

SEQ ID NO: 4060 - protein, 72 aa, Methanococcoides burtonii DSM 6242
MGNRPLDILNDALNTSVIVRLKGAREFRGVLQGYDVHMNLVLDEAEELKDGEIVRKIGGVVIRGDNVVYVSP

SEQ ID NO: 4061 - DNA, 216 bp, Ferroplasma acidarmanus Fer1
  CDS (1)..(216): transl_table=11
atggcaacattaccaatgaaaatgcttgaggaaaatttaaacaaaaaagttacgttattattaaaggacaacaggtcgcttgtaggtacactggttgggtatgatgagtatatgaacatgaccctggacgatgcagaggagaacggagaggttcagagaaaaatcggcaaagtcatcatacgtggaagcaatgtggtaaggatcaccacaaaataa

SEQ ID NO: 4062 - protein, 71 aa, Ferroplasma acidarmanus Fer1
MATLPMKMLEENLNKKVTLLLKDNRSLVGTLVGYDEYMNMTLDDAEENGEVQRKIGKVIIRGSNVVRITTK

SEQ ID NO: 4063 - DNA, 309 bp, Tetraodon nigroviridis
  CDS (1)..(309)
atggcggacaaagaaaagaagaaaaaggaaagcatcttcgacttgtcaaaatatatcgacaaacatattcgggttaagtttcaaggaggacgagaagccagcggtgttcttaaaggatttgatccgctgttaaacctggtgctggatggaacaatagaatatatgcgagatcctgatgaccagatgaagctgacggaggacaccaggcagctggggctggtggtctgcagaggaacctcggtggttctcatctgtcctcaggatgggatggaggccattccgaaccctttcatccagcagcaggactag

SEQ ID NO: 4064 - protein, 102 aa, Tetraodon nigroviridis
MADKEKKKKESIFDLSKYIDKHIRVKFQGGREASGVLKGFDPLLNLVLDGTIEYMRDPDDQMKLTEDTRQLGLVVCRGTSVVLICPQDGMEAIPNPFIQQQD

SEQ ID NO: 4065 - DNA, 267 bp, Tetraodon nigroviridis
  CDS (1)..(267)
atggcggccacgaatccttcgcagttgcttccacttgagctggtggacaaatgcattggttcaagaattcacattgtcatgaaaactgacaaagagatcgtcggcaccctgctgggattcgatgatttcgtcaacatggtcctggaagacgtgacagaatttgaagtcacaccagaagggagaagaatcaccaaactggaccagattctgctcaacggcaacaacatcaccatgctcatccctggaggagaaggtcctgaagtatga

SEQ ID NO: 4066 - protein, 88 aa, Tetraodon nigroviridis
MAATNPSQLLPLELVDKCIGSRIHIVMKTDKEIVGTLLGFDDFVNMVLEDVTEFEVTPEGRRITKLDQILLNGNNITMLIPGGEGPEV

SEQ ID NO: 4067 - DNA, 273 bp, Theileria annulata
  CDS (1)..(273)
atgtcgacaattgaagccagcgccgtttatcttcctttggccctcatcgataaatgtctcggaagtaagatttggataataatgaagaatgataaggagataacggggaccttaaggggttttgacgattatatgaacatggttctagaggatgttgtcgactattccttctcagctgacggagtcaaaactacagaattaaacgatgctttagttaacggaaacaatgtagcaatgctggtcccaggcggaaaacctgcaaacctcaaatga

SEQ ID NO: 4068 - protein, 90 aa, Theileria annulata
MSTIEASAVYLPLALIDKCLGSKIWIIMKNDKEITGTLRGFDDYMNMVLEDVVDYSFSADGVKTTELNDALVNGNNVAMLVPGGKPANLK

SEQ ID NO: 4069 - DNA, 651 bp, Cryptococcus neoformans var
  CDS (1)..(651)
atggccagtacaatcctccccctcgaacttgtcgacagatgtatcggctcccctatctgggtcttgatgaagaatgaacgagagtttactgggactttgatgggtttcgatgactatgttaacatggttttgaaagatgtcaaggaatacgaagttactgcttcgggaatcacagagaccgatcttggggatactttgttaaacgggaacaacatcgccatggtacgtacaactacccatcttccctcgcctctcgaaatcgagctttgctcttggtatggctattattgtactatcagccgtaattacatgtctgctcctttctttttgggaagagactgctttccgcggcgagattccatattatgtgtcttgtggaaaagagaatactgggggcggaatgctgatatatttccttcctacccacacagcttataccaggtggcaagggacccaaggcttagatcctatccatccatccatctcccgacaaatgcaaatacaacaaatcataaaataccaaccactattatgaatatcgagatgaagatgaaggtgctgaggcagagggacaatacgggacggaaaaggagtgatgttgatgtggcaggataccgtcggcagttatggatcgagattggtctgggatga

SEQ ID NO: 4070 - protein, 216 aa, Cryptococcus neoformans var
MASTILPLELVDRCIGSPIWVLMKNEREFTGTLMGFDDYVNMVLKDVKEYEVTASGITETDLGDTLLNGNNIAMVRTTTHLPSPLEIELCSWYGYYCTISRNYMSAPFFLGRDCFPRRDSILCVLWKREYWGRNADIFPSYPHSLYQVARDPRLRSYPSIHLPTNANTTNHKIPTTIMNIEMKMKVLRQRDNTGRKRSDVDVAGYRRQLWIEIGLG

SEQ ID NO: 4071 - DNA, 270 bp, Oryza sativa
  CDS (1)..(270)
atgtctcagaacaacccctcccagctcctcccctcagagctgattgaccgctgcatcgggtccaagatttgggtgattatgaagggtgacaaggagctcgtcggcactctctgtgggttcgatgtgtacgtcaacatggtgctcgaggacgttactgagtatgaatacactgctgaaggccgtcgcataacaaagcttgatcagatactcctaaacggcaacaatatagctattttggttcctggtggttctcccccagatgtggcataa

SEQ ID NO: 4072 - protein, 89 aa, Oryza sativa
MSQNNPSQLLPSELIDRCIGSKIWVIMKGDKELVGTLCGFDVYVNMVLEDVTEYEYTAEGRRITKLDQILLNGNNIAILVPGGSPPDVA

SEQ ID NO: 4073 - DNA, 276 bp, Xenopus laevis
  CDS (1)..(276)
atggcggctaccgtgcctcccaattcgtcgcaacttctcccgctcgaacttgtggacaagtgcataggatctcgcatccatatcgttatgaagagtgataaagaaattgttggcacccttcttggctttgatgattttgtcaacatggtgttagaagatgttacagaatttgaaatcacaccggaaggaaggcgaattacaaaactcgatcaaatattactgaatggaaataacataactatgctggtgcctggaggtgaaggtcctgaagtataa

SEQ ID NO: 4074 - protein, 91 aa, Xenopus laevis
MAATVPPNSSQLLPLELVDKCIGSRIHIVMKSDKEIVGTLLGFDDFVNMVLEDVTEFEITPEGRRITKLDQILLNGNNITMLVPGGEGPEV

SEQ ID NO: 4075 - DNA, 312 bp, Xenopus laevis
  CDS (1)..(312)
atggcggacaaagagaagaagaaaaaggaaagcattctagacctctccaaatacatagacaagacaattcgagtaaagtttcagggtggaagagaagcaagtggagtgctgaaagggtttgatccattgctgaatcttgtactggatggcacaatagaatacatgagagatccagatgaccagtataaattaacagaggacacacggcagttggggctggtagtctgcagaggaacatctgtagtactgatttgtccgcaggatggcatggaagcaatccctaacccttttgttcagcaacaagagggttaa

SEQ ID NO: 4076 - protein, 103 aa, Xenopus laevis
MADKEKKKKESILDLSKYIDKTIRVKFQGGREASGVLKGFDPLLNLVLDGTIEYMRDPDDQYKLTEDTRQLGLVVCRGTSVVLICPQDGMEAIPNPFVQQQEG

SEQ ID NO: 4077 - DNA, 255 bp, Neurospora crassa
  CDS (1)..(255)
atggcctcgcaattacttcctctcgagctcatcgacaagtgtgttggttcccgcatctgggttgtcatgaagggagacaaggagttcgctggcactcttgttggtttcgatgactacgttaacatggttttggaggacgtcactgagttcgactactccggcaaccacaccaagttgaagaagatcctgttgaacggcaacaacatctgcatgttgattcccggtggtgaaggcccaattgcggcatctgcctga

SEQ ID NO: 4078 - protein, 84 aa, Neurospora crassa
MASQLLPLELIDKCVGSRIWVVMKGDKEFAGTLVGFDDYVNMVLEDVTEFDYSGNHTKLKKILLNGNNICMLIPGGEGPIAASA

SEQ ID NO: 4079 - DNA, 276 bp, Homo sapiens; identical to SEQ ID NO: 4015
  CDS (1)..(276)

SEQ ID NO: 4080 - protein, 91 aa, Homo sapiens; identical to SEQ ID NO: 4016

SEQ ID NO: 4081 - DNA, 312 bp, Homo sapiens
  CDS (1)..(312)
atggcggataaggagaagaagaaaaaggagagcatcttggacttgtccaagtacatcgacaagacgatccgggtaaagttccagggaggccgcgaagccagtggaatcctgaagggcttcgacccactcctcaaccttgtgctggacggcaccattgagtacatgcgagaccctgacgaccagtacaagctcacggaggacacccggcagctgggcctcgtggtgtgccggggcacgtccgtggtgctaatctgcccgcaggacggcatggaggccatccccaaccccttcatccagcagcaggacgcctag

SEQ ID NO: 4082 - protein, 103 aa, Homo sapiens
MADKEKKKKESILDLSKYIDKTIRVKFQGGREASGILKGFDPLLNLVLDGTIEYMRDPDDQYKLTEDTRQLGLVVCRGTSVVLICPQDGMEAIPNPFIQQQDA

SEQ ID NO: 4083 - DNA, 312 bp, Mus musculus
  CDS (1)..(312)
atggcggacaaagagaaaaagaagaaagaaagcatcttggacctctccaagtacatcgataagaccattcgggtgaagttccagggtggccgggaagccagcggtatcctgaagggctttgacccactgctcaacctggtgctggatgggaccatggagtacatgagagaccctgatgaccagtacaagctgacggaggacactcggcagctggggcttgtcgtatgtcgtggcacctcggtggtgctcatctgcccacaggacggcatggaggccatccccaaccccttcgtgcagcagcaggacacttag

SEQ ID NO: 4084 - protein, 103 aa, Mus musculus
MADKEKKKKESILDLSKYIDKTIRVKFQGGREASGILKGFDPLLNLVLDGTMEYMRDPDDQYKLTEDTRQLGLVVCRGTSVVLICPQDGMEAIPNPFVQQQDT

SEQ ID NO: 4085 - DNA, 234 bp, Archaeoglobus fulgidus
  CDS (1)..(234): transl_table=11
atgccaccaagaccattggatgtgctaaacaggtccctgaaatccccagtcatcgtaaggctgaaggggggtagggaatttagaggaacgctggatggatacgacatccacatgaatctcgtgctgcttgatgcggaggaaattcagaatggagaggtcgtcagaaaggtaggaagtgtggttataagaggagacacggttgttttcgtttcaccagctccgggtggtgagtga

SEQ ID NO: 4086 - protein, 77 aa, Archaeoglobus fulgidus
MPPRPLDVLNRSLKSPVIVRLKGGREFRGTLDGYDIHMNLVLLDAEEIQNGEVVRKVGSVVIRGDTVVFVSPAPGGE

SEQ ID NO: 4087 - DNA, 246 bp, Methanobacterium thermoautotrophicum
  CDS (1)..(246): transl_table=11
gtgatagatgtgagttcacagagagttaacgtacagagaccactcgatgcccttggaaattcactgaattcccctgtgatcataaaactcaagggtgacagggagttcaggggagttctaaagagcttcgatctccacatgaacctcgtgctgaatgatgcagaggagctggaggatggagaggtcacaagaagacttggaaccgtccttatacgtggagataacatagtgtacatatccccgtag

SEQ ID NO: 4088 - protein, 81 aa, Methanobacterium thermoautotrophicum
MIDVSSQRVNVQRPLDALGNSLNSPVIIKLKGDREFRGVLKSFDLHMNLVLNDAEELEDGEVTRRLGTVLIRGDNIVYISP

SEQ ID NO: 4089 - DNA, 228 bp, Pyrococcus abyssi
  CDS (1)..(228): transl_table=11
atggccgagagacctcttgatgttatccacaggtcacttgataaagatgtgctcgtgattctcaagaagggattcgaattcaggggcaggctcattggatatgacattcacctgaatgtcgttctcgctgacgctgaaatgatccaggatggggaagttgtgaagagatatgggaagatagtgataagaggggacaacgtccttgcgatatcaccgactgaagagtga

SEQ ID NO: 4090 - protein, 75 aa, Pyrococcus abyssi
MAERPLDVIHRSLDKDVLVILKKGFEFRGRLIGYDIHLNVVLADAEMIQDGEVVKRYGKIVIRGDNVLAISPTEE

SEQ ID NO: 4091 - DNA, 231 bp, Pyrococcus furiosus
  CDS (1)..(231): transl_table=11
atggcggaaaggcctctcgatgtcatacacaagtccttggataaagatgtgctcgtgatactaaagaagggattcgaatttaggggtaagctcattggatatgacattcacctcaacgtagttttagccaatgctgaattgctccaagatggagaagttgtaaagaagtacggcaaaatcgtgatcagaggtgacaatgtcttggcgatttctccaacagaagaaggttga

SEQ ID NO: 4092 - protein, 76 aa, Pyrococcus furiosus
MAERPLDVIHKSLDKDVLVILKKGFEFRGKLIGYDIHLNVVLANAELLQDGEVVKKYGKIVIRGDNVLAISPTEEG

SEQ ID NO: 4093 - DNA, 228 bp, Pyrococcus horikoshii
  CDS (1)..(228): transl_table=11
atggccgagagaccgcttgacgttatccacaggtcattagataaagatgtgctcgtgattcttaagaaaggattcgagtttaggggtaggctcattgggtatgacattcacctgaatgtagttctcgctgacgctgaaatggttcaggatggggaagtcgtgaagaaatacggtaagatagttatcagaggagacaatgtacttgcaatatctccaacggaagagtga

SEQ ID NO: 4094 - protein, 75 aa, Pyrococcus horikoshii
MAERPLDVIHRSLDKDVLVILKKGFEFRGRLIGYDIHLNVVLADAEMVQDGEVVKKYGKIVIRGDNVLAISPTEE

SEQ ID NO: 4095 - DNA, 231 bp, Pyrococcus kodakaraensis
  CDS (1)..(231): transl_table=11
atggcggaaagaccactcgatgttatccacaagtcccttgacaaggacgtcctcgtgctcctgaagagggggaacgagttcaggggtaagctcatcggttacgacatccaccttaacgttgtcctcgccgatgccgagctcatccaggacggcgaggtcgttaagaagtacggtaaaatcgtcataaggggagacaacgtcttggccctctcccctgtcgagcttgagtga

SEQ ID NO: 4096 - protein, 76 aa, Pyrococcus kodakaraensis
MAERPLDVIHKSLDKDVLVLLKRGNEFRGKLIGYDIHLNVVLADAELIQDGEVVKKYGKIVIRGDNVLALSPVELE

SEQ ID NO: 4097 - DNA, 252 bp, Thermoplasma acidophilum
  CDS (1)..(252): transl_table=11
atgcctaaaacaccagctaatgttaagccaatggatgtactgaaatcagcgctatccagaaacgtgttgatagatgttaagggaaacagggagtattcagggatacttgaaggctacgatgtttacatgaacatcgtgctgcagaacgccagcgaaatcataaatggggagaacaagggcgtgtatgatcgtgttctggtgaggggcgataacgtcatattcgtctctccatctaagggtgatggttcatga

SEQ ID NO: 4098 - protein, 83 aa, Thermoplasma acidophilum
MPKTPANVKPMDVLKSALSRNVLIDVKGNREYSGILEGYDVYMNIVLQNASEIINGENKGVYDRVLVRGDNVIFVSPSKGDGS

SEQ ID NO: 4099 - DNA, 252 bp, Thermoplasma volcanium
  CDS (1)..(252)
atgcctaagactgtagcgaacacaaagccaatggatgtcctaaagaatgcactttcacgaaatgtgcttatagatgtaaagggcaatagggaatattcaggcatactggaaggatacgacgtttacatgaacgttgtccttcaaaacgcgagcgaaattattaacggagaaaacaaaggtgtattcgacaggatacttgttagaggcgataacgtaatttttgtttctccatcgaagggtgataatgaatga

SEQ ID NO: 4100 - protein, 83 aa, Thermoplasma volcanium
MPKTVANTKPMDVLKNALSRNVLIDVKGNREYSGILEGYDVYMNVVLQNASEIINGENKGVFDRILVRGDNVIFVSPSKGDNE

SEQ ID NO: 4101 - DNA, 24 bp, Artificial sequence
  primer
atgagtctaccggagattttgcct

SEQ ID NO: 4102 - DNA, 22 bp, Artificial sequence
  primer
ttacaacgcctccgtaggggtc

SEQ ID NO: 4103 - protein, 85 aa, Artificial sequence
  consensus sequence
  Variant (2)..(2): Xaa in position 2 is any amino acid
  Variant (4)..(4): Xaa in position 4 is any amino acid
  Variant (6)..(6): Xaa in position 6 is any amino acid
  Variant (8)..(10): Xaa in position 8 to 10 is any amino acid
  Variant (12)..(12): Xaa in position 12 is any amino acid
  Variant (13)..(26): Xaa in position 13 to 26 is any or no amino acid
  Variant (29)..(32): Xaa in position 29 to 32 is any amino acid
  Variant (34)..(46): Xaa in position 34 to 46 is any amino acid
  Variant (47)..(71): Xaa in position 47 to 71 is any or no amino acid
  Variant (73)..(79): Xaa in position 73 to 79 is any amino acid
  Variant (80)..(84): Xaa in position 80 to 84 is any or no amino acid
GXLXGXDXXXNXXXXXXXXXXXXXXXVLXXXXEXXXXXXXXXXXXXXXXXXXXXXXXXXXXXXXXXXXXXXGXXXXXXXXXXXXP

SEQ ID NO: 4104 - DNA, 3399 bp, Saccharomyces cerevisiae
  CDS (1)..(3399)
atggaaaaagaatcagtatacaacttagcactaaaatgtgctgagcggcaattgacctccatggaattttcgaacctttacaaggaattctttaatgaaaagttcccgtctttgattcaagaggaagaagaagatacaacaacaactgcaaatataaatgaggtcaagaaagcgtccgatttggtggatacacccagcaacaacacggctgctactgcagatactacacacttacacgaggctctagatattgtttgctccgattttgttaaaatattaaacctggagaagcctcttatcttggcagattatatcgttgaggtattgcttgtgaactacaactcagatatgataaaatgctttctgcctaaattgaattccgttaggaactccttgctattggcccattttttctccaaatcttgttcattctttgccaaattatcagatactttgataattgatcaagtacgcaaggatttgggcaacgtcatagtaccgaatatcttaagtctagacatgaatagtatgaataaagaattgattgccatagtatcaaagcttttgcaaacaactttaaaactctctccttcaccaattcttttaacttctgccggctgtaaaaatgggtcttttacgctactaaatcagttgtctcaaaccaacaagttactttttaaaagggtttctcagacttttgaagcaaaattacatttcaaagataccaagccatttttaaacaaagattccactaacgaattcgtaggttctccttcattaacctcccctcaatatatcccaagtccactttcttcaacaaaacctccaggatcagtcaattctgctgccaaatacaaagacatgaagcttcttcgttactataaaaacatttggctgaacaataaaattatcaattgggaaatatcgaacccagacttcctatcaaaatattctgcgattacttcttctatatttcaagagagctttaattcagttcaaaacttggaccagttactcacagacttgattgagacatcgtttacttgttttgctcaattcgttagcaataagcaatatcatcaggcaaattctaatttgactctgttagaaagaaagtgggtcatatttataacaaaacatctaccattattaatcctggaaaactcttcaagaagtcctcgtgtagtcacgaatgctctggataatattgacgaaaaagtcgttaaagcaatcagaatatacttcaccgaaaaagatgataacaaaaccaataatgaagatctatttgatgattatccatctacaagcttggatataagacacgattttatcaaagggttgattatgttaaatttacagcctgcgtccgttatcaacaattacttaagagaggaccaaatgatcgacaccagtattttacctacccgtgatgatttgtttgttcgtaatttgcaaggcattcaagaagtcgtccataataccaacagtttcatcatttcatccttagatactttagagttagaatcgataaccgaatcgatcacacatgattcgagtaacggactatttcaagtattacacaattttgaatctgtagctccgacaaaacaacgtgagatagtaaaagcctttttatctatatttgaagatgcaataaaagaattgaattataatagaatagccaagatatgtgctcttttgtttttcaacttttcacattcattgaccacaattctatcattttcttcgccagcagcactaatgaaaacattgataaaattcgttgatttgtctagaaatggcagaaatggctcaaacggtaatgatgaaagttcagaatatgaaacgataaatatatctttgtcattttcttgggcaattttactgataatcaacctaacacaaacatatggcatatctgtggtggatgtggcacttaagtatcctgaattgagcataaaaaattcctttataatcaatttcatttcaaatctacctaatgtctcagataagtactatttggaagaatcaaatgtgaatgattcagatatgctaacaaagtctcataataccgttcaaagctggctttgtgatctttttgttaatgggtccataacagatcaattgatccaaaatattgaaacaaggcaattggctaatctcataccatttattgttaaacaggttttgctatctgttgaaataggcgttttaacggatatttcaagtctgataggtggcttcgaatatttcttacaacctttactattagttgggctaatcaaaactttttattggctagaacaatttctttcttgcgtcaagaacgacacaatatctgaagatattttacaagggatattcaatttattgaatacacttttcaacccagtaactcttaacgaggattcgaaagcgttccacacggctgtactgaggttgaatgcaattccactactcaaagttctccgcaaatttagagttcagagccagtcaaattatggtatctactcttctgatgcccaaggtgatcctaacttagaacctttgatagccaaattagttgccgttcttaatgtatcacccgtttatgacgtcgatccaagaattatcaattcagagaacgattattctagaaagcagttgggttacggtaaattcctaattttgaacgaaaacccgattaacaagataatgacgaaccaaattaactcattctggagtctccacagcagcacatattataacttagattatctatttgagttaattgaattggttaccccaaaaagtttcctttttgatgttttgaaaacattagaatataaactagccacttatggggtccctggttctgaaaataagaggggatcattggattcagagcatgttttcgattatttcttctactttcttgtactatatgatgtgaaaaccgcggaggaagccagtcaactaatagaatatatggagaacgacgcaaaaaaaagtaagggggacgttgatataaagggagaagacttacatgagaaaaatgactcagctgaggtgaggcaagaaactcaaccaaaagctgaagctacccaagacgatgatttcgatatgctttttggcgagaatgatacaagcactcaagcttacgaagaagaagaagagaatgaggataacgacggcaataatagaacaaacaatgtaccaatgataaaagcagaagaaactcctagtaaaactaataagatatccattttaaagagacattcgtttgcggtacttctgcatgaaagaaaattattgaatgatttagctttggaaaacggcgaaataaccaagacagaaaatgagaaatttatcagttatcacgataagtacttgtgtatgctgaaaacatgcgtattctga

SEQ ID NO: 4105 - protein, 1132 aa, Saccharomyces cerevisiae
MEKESVYNLALKCAERQLTSMEFSNLYKEFFNEKFPSLIQEEEEDTTTTANINEVKKASDLVDTPSNNTAATADTTHLHEALDIVCSDFVKILNLEKPLILADYIVEVLLVNYNSDMIKCFLPKLNSVRNSLLLAHFFSKSCSFFAKLSDTLIIDQVRKDLGNVIVPNILSLDMNSMNKELIAIVSKLLQTTLKLSPSPILLTSAGCKNGSFTLLNQLSQTNKLLFKRVSQTFEAKLHFKDTKPFLNKDSTNEFVGSPSLTSPQYIPSPLSSTKPPGSVNSAAKYKDMKLLRYYKNIWLNNKIINWEISNPDFLSKYSAITSSIFQESFNSVQNLDQLLTDLIETSFTCFAQFVSNKQYHQANSNLTLLERKWVIFITKHLPLLILENSSRSPRVVTNALDNIDEKVVKAIRIYFTEKDDNKTNNEDLFDDYPSTSLDIRHDFIKGLIMLNLQPASVINNYLREDQMIDTSILPTRDDLFVRNLQGIQEVVHNTNSFIISSLDTLELESITESITHDSSNGLFQVLHNFESVAPTKQREIVKAFLSIFEDAIKELNYNRIAKICALLFFNFSHSLTTILSFSSPAALMKTLIKFVDLSRNGRNGSNGNDESSEYETINISLSFSWAILLIINLTQTYGISVVDVALKYPELSIKNSFIINFISNLPNVSDKYYLEESNVNDSDMLTKSHNTVQSWLCDLFVNGSITDQLIQNIETRQLANLIPFIVKQVLLSVEIGVLTDISSLIGGFEYFLQPLLLVGLIKTFYWLEQFLSCVKNDTISEDILQGIFNLLNTLFNPVTLNEDSKAFHTAVLRLNAIPLLKVLRKFRVQSQSNYGIYSSDAQGDPNLEPLIAKLVAVLNVSPVYDVDPRIINSENDYSRKQLGYGKFLILNENPINKIMTNQINSFWSLHSSTYYNLDYLFELIELVTPKSFLFDVLKTLEYKLATYGVPGSENKRGSLDSEHVFDYFFYFLVLYDVKTAEEASQLIEYMENDAKKSKGDVDIKGEDLHEKNDSAEVRQETQPKAEATQDDDFDMLFGENDTSTQAYEEEEENEDNDGNNRTNNVPMIKAEETPSKTNKISILKRHSFAVLLHERKLLNDLALENGEITKTENEKFISYHDKYLCMLKTCVF

SEQ ID NO: 4106 - DNA, 3297 bp, Eremothecium gossypii
  CDS (1)..(3297)
atggttagggctcaggagactgtttatgacttgatcaccaaatgctcggtaagaagggttcctccgaaacaatttgtgaatttttataatgaattcttcaacgagcgctatgattcagtgctggagaacggcaaccctgcgggcgaaagcaggcctacggcgccggtatacgaggaggtcgcgcaagatctggtgcgcatactaaacgacagccgcgtgaacctggtggcggactatgtgctggagatcgtgctgattaatctcaacgtggacctgctgcggctgttcctgccgaagcttcaccatgtacgtaacgtgatgctgctggtacacctcttctcacgggcgaccgcgttcatttcaggcctggataacaagctgctggcggagcagatcagcgacacggtgtacacggacgtgactccggcggtcctgagcttcaacatgcaggcgattgatgaccagttggtaattgtgcttgcgaagttcctgcacgccgtgctgcgactaccggagggccagcagaagatgggatcggtcccgaccaaacaaaaggcggccacgcttctacagaggctatccactatagacaggcttctgtacaaacggttcattgcagatctggacggcaagctgcgcttatccggtgcgcccgcggacatgagcttccctctgccaccaagtaacatgccgtcgccgtcggtgacctcgccgaaatacgagacatcttcagttggggttatgaagcggtccacgtcgatgtctaacgaggcgaagtaccaggatataaagcttgcgaggtactataaaaacctgtggctaaacaacaaaatacactattgcactgtgtcggaccctctctttcttgaaaagtacgattcaatcttagaactggccacgggcggtggtctgtccgctgatcggcccgtgaaggccaagattgcagacctcgttgaaacagctttcacctgttttgcgcaatttgtgagtaacaagttgtatcatcaatcgaactcgaatttctcgctgttggagcgcaagtggacggtgtttgtaacaaaacagctgcccctaatcattaagagctctatacccgacaagacagatatcgttctgcgcaccttggagaatatcgacgacaaagtcataaaggctatcaagtcctataataccgagaaggaggaagtaaaaaaccgcacagaggacctgttcgatgactaccccgtgaatagtctagatatcaggcatgaatttctgaagaatttaatcatgatggggttgcaaccgccgactgtacttaacgaatacctgcgagaagatcaaatggtagacctcaagtcgttggtaacgtccgagcacctaattattgacaatagccagggggtccgagagacaattctgaatgttcggaattttatcacaaagtcgatagagtcactagagtttgaaaacctttttgatgatggcaatcagctacttgttactaatgaccatggtattatccagattgcccataatttggagactatttcacccacaaagcagctggaaatcgcaaacatactgtatgatcttctatctgctgccatcgagtcattggaccacaaaacaatttccaaggtcctgaccatcttgacattgaatgtaggtcatttactgacaaatattttctgtctcaccggctacgagaagtttgcaagggcagtcatcaggtttattgatgtgatatgggaatcaaacaagtccaagtccaatgatatggtatcagatgacagcgagtttgaaaatattaactctgccatggcctatactttgtctttatgctttattatccatgtagttgacatttatggtgtgaatgtggaagctctggtagaaaacccatccaaatctaccgtattgagattcttatcaaagttaggtgaaattccagaagtattcgttgccccagaaggcgacttagagtcctctaaaaccttactacagcaatggctacgggaactgtttgtgaaaaacctgatctccgataatctgatgaagtctgcagatgtaaaagtgatgggttttatgatccctttcattttcaaacaaaccctgcttaacgtcgagtacggaataatctctgatatttcaagctttgtcaacggctttgagtacttcttgcaaccgttcctctccgttgggcttattaatattgttttctggttggagaaatatttacttgccctaaagacaacggaatcattcccgaagataaacggtgcgttattcgatattcttggtgcaatcattgcccccaagagcataggctcagatgccaaagctatccattctgtggtcttgaagttaaagtgtgttgggttgctcaaggaattaaaatcattccaagtgccttcagaatccaattatggcatatactcatcgcagacccggcaagatccaagattggaagcgttgatctccaagctagaattaatcgcccaatcttcggccttgtatgatgttgaccctcgaattatcagtgccgtcaacaataattactcccaaaagcacattagttataacaaagtggtactgacgtctgacattccgattaacaaaattatgacaaaccaaattaattctttctggaatcttcacagcagcacttactataactttgattatttgcttgagttgattgatcttgtcacaccttttaagtttgtacaagacgtatttcaaactttaaagtataaggtgacagcatatggcgtgccgggttccgcaaccaagccttcttcggctgctttagaccaagtattgggttatgttttttacttcatggttttgcgagatattaaatgccctgaagagaagagtttactgttggaatacttggattcaggaagattcccttcaagtatatcagccacagtgttaactagtgacccaactactatatccggcatgccgcctgtatccatgccttatgacgtgaagagcgagcaggacgcgatggaaggtgttgacgaagactttgatatgttatttggcgaatcattcagcggactaccagatgatgtacaaaagtctgctgatatgaaacccgacaccggcataaaggaggacgattccgagaagtccagttatgtttccgcggccaggttaacagaaagttttggggttatattctcgaagatgaaaaaggataagctcgaggcgtaccaagccgggcaaataagtgaagaacgataccaatgctttatgggtttatatgataaatacgttcaaactttgcgccactcggttatataa

SEQ ID NO: 4107 - protein, 1098 aa, Eremothecium gossypii
MVRAQETVYDLITKCSVRRVPPKQFVNFYNEFFNERYDSVLENGNPAGESRPTAPVYEEVAQDLVRILNDSRVNLVADYVLEIVLINLNVDLLRLFLPKLHHVRNVMLLVHLFSRATAFISGLDNKLLAEQISDTVYTDVTPAVLSFNMQAIDDQLVIVLAKFLHAVLRLPEGQQKMGSVPTKQKAATLLQRLSTIDRLLYKRFIADLDGKLRLSGAPADMSFPLPPSNMPSPSVTSPKYETSSVGVMKRSTSMSNEAKYQDIKLARYYKNLWLNNKIHYCTVSDPLFLEKYDSILELATGGGLSADRPVKAKIADLVETAFTCFAQFVSNKLYHQSNSNFSLLERKWTVFVTKQLPLIIKSSIPDKTDIVLRTLENIDDKVIKAIKSYNTEKEEVKNRTEDLFDDYPVNSLDIRHEFLKNLIMMGLQPPTVLNEYLREDQMVDLKSLVTSEHLIIDNSQGVRETILNVRNFITKSIESLEFENLFDDGNQLLVTNDHGIIQIAHNLETISPTKQLEIANILYDLLSAAIESLDHKTISKVLTILTLNVGHLLTNIFCLTGYEKFARAVIRFIDVIWESNKSKSNDMVSDDSEFENINSAMAYTLSLCFIIHVVDIYGVNVEALVENPSKSTVLRFLSKLGEIPEVFVAPEGDLESSKTLLQQWLRELFVKNLISDNLMKSADVKVMGFMIPFIFKQTLLNVEYGIISDISSFVNGFEYFLQPFLSVGLINIVFWLEKYLLALKTTESFPKINGALFDILGAIIAPKSIGSDAKAIHSVVLKLKCVGLLKELKSFQVPSESNYGIYSSQTRQDPRLEALISKLELIAQSSALYDVDPRIISAVNNNYSQKHISYNKVVLTSDIPINKIMTNQINSFWNLHSSTYYNFDYLLELIDLVTPFKFVQDVFQTLKYKVTAYGVPGSATKPSSAALDQVLGYVFYFMVLRDIKCPEEKSLLLEYLDSGRFPSSISATVLTSDPTTISGMPPVSMPYDVKSEQDAMEGVDEDFDMLFGESFSGLPDDVQKSADMKPDTGIKEDDSEKSSYVSAARLTESFGVIFSKMKKDKLEAYQAGQISEERYQCFMGLYDKYVQTLRHSVI

SEQ ID NO: 4108 - DNA, 3177 bp, Gibberella zeae PH-1
  CDS (1)..(3177)
atggagaaccccgcggcagctggagacgctatgcgcgtagcaattgattactggtgccagttcgtcgctcgctgtgtttccgaacgactcgagacagataaattcgaagcctacgtcaagattgtccacgaccaacatcctctacctcctactcttgtcgccgacttcttccttcgccctcatccttcagacgatagcagcctcgatcctcgaatacccccatatctccaagtcctcacgaaactgggctatgtcgacacaccgtcaatactaagagccttgtacaagtactcttcatcccatgctcacgcacaaactcaaaaagaccacctgcaatcaaacactgaagaaggtaaaggaaaggagaaggaaaaggcaacaagtgacgacaaagaaaaggctgaagggaaggaggatgcgcaacccaagaagaatatcacacggtggaggagctcttactgggctgaggaggttctcttctatagactcaccaagtccgtagtcgagggtagggcgattcaagattcgaggacggctttggaggtggccatgataatctcaaagttcatggaattgttcaccactgccttgcccgcaaccgcattcgctgctgatatgcttgagcagcagttccctaatggccagttgagagacgagatggagtcatcgcgagcagctctagtcgcactactcttgcgcctgtgcgagaacaacattctcgtcagtgctataagcaaaccgttggccaaagatgtccgaaaagcgctgtctacaagcctagccagctttttacctgcactacagctcataccggagatagctgacaaactcgaactgttccgcactgagattcttgccagctctgaccctgcagataagaagaagcaggttgccaatgctgccatggacgaacttcttgattctactgttggtctggagaactttgtggtagcaccgatttctgtcagcaataccagagcaggtttatacatctatctcaatgctgcgcttattggacgccctattctggacgaccatgctctgttctcctacatgagcaacaagtacggagctgacattcagtcaagtgccattgatttagttctggcatcattcgacattttagctaatgctgtgttccgcaatgagggacaaaaggacgctcacctcctgcgttcattcttgatcaacaaactccccttgctcctatatcagcttctacctcctggcttctcaggcacatcggccgaattctgcatcacagaagcgctaactcatgtggacaccagcctattccccacggcttcgcttatgtttgatgagtccagaaacaacaacccgtatactgaaagtatcagagaggagttctgcgccgcctgtgtccttcacgggcttgtacaacgggagcatgttgagaggatcctgggcgagatttcactctcatatgagccgtctttgcagaaacactccaaggacaagctggtacaagattgtttatctgatacagacaagatccaagggttagtccgggaacttgacaagacggatggtaatgtcggggccgtttgccaagccctcgtcgaggtgctacgacaatcatgccacaacaaagagacaatgtctctgaaactgctctgtagtcagttggcagcaaagccgcagtcattggacgttatcctcctgttcgagaaattgccaaacatacttgagcctttgtgtcagctactcgacaactggcggtacgaagaagaccaaggcgaatatcagcccgtgtacgaggagtttggagcagtccttcttcttgtattcgcctttacgtatcgatacaacctaaacgcagtggatattggtattactaccccagactcatgggtagccaagataatcggccggggacatgttgggcgacaaggagacgagcttacacagcgggagaacgaccacatcaacggctgggtccatggtctctttgacacagaggccggtggccttggcgacgagttgatgtcttcctgcccaccacaggaattctatcttgtcgtggcaccccttttccagagcattgtggtcgcttacacgtatggttatctgaacgatgaaagccttaagggaggaatagagtacctcgttgataccttcttgctgccatctcttgtcccagcaatccggttcctagcagattacctatggatcgaccagaaggaacagaaatccatcatcaagatcttgcaacttatcctgcttccaagttctatttccggggaagcaagcacgatgctttcatccgtgaagaatcttatcgcaaagcctttggagcacgctctgcgaacatatcaacgtcgggatcccaagaaccaagacattgagcctcttctgagaactctcaaggagagcattcctctatcacgccgaacaggaggcacagatctcaacgagcttgagtcatggacggccacgcccccaagtggtctctccagcgctgtcaagctcaccattcaggggcttgttcactggagcattcatcctgctatgaacagtatgccaacgtcttatactcatagacaaatcctggctggactcaagcttttgggccctaaacgactgttgcatgtgatattggaggaattaagacagcacacagcggccggaagcgctaatatcatttacgacgtggctacgtcgctggtttgcgcgcccgatgccgtgaaagacgccccggtgacggatgccaatggcaacatgcttccaccaattcagcgccagcgaactctccgcgatcttctcaaggtggaagttgaaagctgcaggaggcttcagaaggaagaccccgtattggctgagcatgtagtacgtttgcaccgacgtgtcgaggcgcagatggtcattccccagccacaaggaatgcttcagccagcggacatgtcactcaaccttgcagacgatactgctgctctcggagatgccatggctgctgctgcttcaggagtccagggagataacatgtcggttgacaatctagctctcgatgtcagtatgggaggtgtaccgtctgacatgggactcgggtctgccactgatggtggaagtctggatccttcaggtgatgccgctatgtttgaagggttcgatacacaggatatggagaattttgattgggatatgaactcctttagttag

SEQ ID NO: 4109 - protein, 1058 aa, Gibberella zeae PH-1
MENPAAAGDAMRVAIDYWCQFVARCVSERLETDKFEAYVKIVHDQHPLPPTLVADFFLRPHPSDDSSLDPRIPPYLQVLTKLGYVDTPSILRALYKYSSSHAHAQTQKDHLQSNTEEGKGKEKEKATSDDKEKAEGKEDAQPKKNITRWRSSYWAEEVLFYRLTKSVVEGRAIQDSRTALEVAMIISKFMELFTTALPATAFAADMLEQQFPNGQLRDEMESSRAALVALLLRLCENNILVSAISKPLAKDVRKALSTSLASFLPALQLIPEIADKLELFRTEILASSDPADKKKQVANAAMDELLDSTVGLENFVVAPISVSNTRAGLYIYLNAALIGRPILDDHALFSYMSNKYGADIQSSAIDLVLASFDILANAVFRNEGQKDAHLLRSFLINKLPLLLYQLLPPGFSGTSAEFCITEALTHVDTSLFPTASLMFDESRNNNPYTESIREEFCAACVLHGLVQREHVERILGEISLSYEPSLQKHSKDKLVQDCLSDTDKIQGLVRELDKTDGNVGAVCQALVEVLRQSCHNKETMSLKLLCSQLAAKPQSLDVILLFEKLPNILEPLCQLLDNWRYEEDQGEYQPVYEEFGAVLLLVFAFTYRYNLNAVDIGITTPDSWVAKIIGRGHVGRQGDELTQRENDHINGWVHGLFDTEAGGLGDELMSSCPPQEFYLVVAPLFQSIVVAYTYGYLNDESLKGGIEYLVDTFLLPSLVPAIRFLADYLWIDQKEQKSIIKILQLILLPSSISGEASTMLSSVKNLIAKPLEHALRTYQRRDPKNQDIEPLLRTLKESIPLSRRTGGTDLNELESWTATPPSGLSSAVKLTIQGLVHWSIHPAMNSMPTSYTHRQILAGLKLLGPKRLLHVILEELRQHTAAGSANIIYDVATSLVCAPDAVKDAPVTDANGNMLPPIQRQRTLRDLLKVEVESCRRLQKEDPVLAEHVVRLHRRVEAQMVIPQPQGMLQPADMSLNLADDTAALGDAMAAAASGVQGDNMSVDNLALDVSMGGVPSDMGLGSATDGGSLDPSGDAAMFEGFDTQDMENFDWDMNSFS

SEQ ID NO: 4110 - DNA, 3300 bp, Candida glabrata CBS138
  CDS (1)..(3300)
atggagagcaagtccctgaatactttagcccttcgctgtgctgcaagaaagattccagcttcggagtttctaaatctttataaagaattctataatgaaacttttccagcaaactcaattgacaatgatgacgccaagacacaagaagggagtggttctcaagataaaactgatgttgaagaatccataagtaaaccagttggctcgaaaaatgatcctgtagctatactatgtgccgaatttatgaaattactcgagaatggtaaatatgttatcctagctgactatgtggtagaagtcttgtttgtcaattatcattctgagttagttcgggaatttctacccaagttgaaagacctaatgaataagggtattctaatacattttttttcgaagagttgtgcgtttttcgttaatctgacagacaatttggtgatttctcaactaataaaggacctacgagcaacgattgtgccgtgcatactagagaccaacttctgtgatatttctaatgaactggtggtagctattgccaaatttttgcaggccgttttgagattcacacctcagccaattcaaataaattccgagacttatagagataatacattcaatttgacaaaaagactttcattaattaacaaaattttatctaagaaatttgcaggaattatagataaaaaactacaattcaaagaggttctaggaccgtttaccaaagattctaccctagactttgataactcgccatcaattacttcccctcagtttataccaagccctctcccaagcatgaaggaaagaagtgttacttcctcacaatctgcaattaagtataaggatctgaaacttctacggtactataaaaacatatggctcaatagtaaactcatgaattggcagccattcgattccgagtttatttcgaattattcggcgataaaatcaagtctttatcctgatcaggtacaaaatatacaaaatgtagacctgttgtttacagaccttattgaaactgcattcacatgttttgctcaatttgttagtaacaaactatatcaccagtccaattcaacttacaatctactggaaagaaaatggattttattcttatcgaagatactacctctactggtatataaaaattcatccagaactgcgcatgttataggtaatgcgcttgatggcattgatgataaggtcatcaaagcaatcagtgcttattaccaagagaatgatgatgggcgtagtcggaatgatgacttatttgatgactatccttctactagtcttgatataaggcatgattttataaaatcattgactatgctgggtgtagtgccacctgttttcattaccaattacctacgaggcgatcaaacggtggattctaaggcattggctacaacagatgatctgactttcacaaatcaacaaggaattattgagatagtaaatgacatcccaaactttatccgatcttctttagaaggaatggaaatggaaaatgtttctgaacctactttagtttcatccaacggtctactacaagtgctatctaactttgatacagtttcaccaactaagcaattcgagttggcaaatgctattgttgacatgcttagtgaatcaagcacgacatttgaacttaatacttttgtaaagttgactgctgttttaacttttaattattcccattctttgacatctatcctgatgtatgtgacacctgaggttttaacaaaattgtatctggagtttgttgataagcattggaattcacaagtaattggaaaacaggaaactgatggtgaatctcaatttgaaaatgtaaatatatccatgtcatttagttgggcgatattaatgttaacaatactttataaacaatatcacattgattttgttagcatgcgcgcggactataccactgataatatcaaaaattcatttgctatcacgtttgtggaaaatttacccgatatatcagatttgttttttattgatgagaagaactcggatgatccagaagttcaagtgaaatcccacaaacttgtaagagattggttgaacgatttgtttgttaatggatctctgtcagattcgttgttgcaaaatattgaaccaaagcaactagcgatccttgttccatacatattcaaacaagtcactttggcaatggaaataggagctgttggtgacttgcaaaatttgataggtggattcgaatattttttacagccatttatgctagttggtttaataaaagtaatgtactggcttgagcaatacctttcgtgtttgaaaagtgacgaaactgatgaaaaattaattcaaaaagtgctgtcattgttgaacaccattatatgcccttccacgctcaacgaagactcaaaagcatttcactttgctgtcctaagactcaatgcaattccgctgctagggattttatatcagtttagatccaataagcatgctgaatctaattatggaatttactcctcagataatgagggaaaccctactctcgaattaatgatatcaaggttaatatcttcgttgtctatatcccctgtctatgatattgattccactatcttggtcacagacaataattttgtacaaaagccaccaaagtttcaaagcttttttgtaacaaatgaaatctcaatgaataagatgttgactaatcaaatgaactctttttggagcttgcatagcagcacatattataatttagactttctgaagacccttatagatactttgaccccaaaacaatttttgttagatgttttgcgaacccttgagtataaagtggaaaccctaggtgttaaagatgtaagaaataaatcctccagcaatgaatcggaccaagtcattgactatcttttctattttctggttctgtatgatatagaaaacagtgaagatgcaaaggccatggcgcagttcatggaagatactgttgatatatcaatcaatggtgattcgggtattgttaagcaagaaacacaacctaaatctgaatataatccagatgatgatatagatatgttatttggtgaaaatgacactagcatgcaagccaatgaagaagatactctagataataaggaattgaagagtgacagaaactgcgctcttggaaagaatagacacacatttggattcataatacatgaaattaaactatcctacggaactttggaaagcgattctatgtcatatgaagattataagaaaatctgcgaataccacagcagatacttaaaaatgttaaaaacctgtattttttaa

SEQ ID NO: 4111 - protein, 1099 aa, Candida glabrata CBS138
MESKSLNTLALRCAARKIPASEFLNLYKEFYNETFPANSIDNDDAKTQEGSGSQDKTDVEESISKPVGSKNDPVAILCAEFMKLLENGKYVILADYVVEVLFVNYHSELVREFLPKLKDLMNKGILIHFFSKSCAFFVNLTDNLVISQLIKDLRATIVPCILETNFCDISNELVVAIAKFLQAVLRFTPQPIQINSETYRDNTFNLTKRLSLINKILSKKFAGIIDKKLQFKEVLGPFTKDSTLDFDNSPSITSPQFIPSPLPSMKERSVTSSQSAIKYKDLKLLRYYKNIWLNSKLMNWQPFDSEFISNYSAIKSSLYPDQVQNIQNVDLLFTDLIETAFTCFAQFVSNKLYHQSNSTYNLLERKWILFLSKILPLLVYKNSSRTAHVIGNALDGIDDKVIKAISAYYQENDDGRSRNDDLFDDYPSTSLDIRHDFIKSLTMLGVVPPVFITNYLRGDQTVDSKALATTDDLTFTNQQGIIEIVNDIPNFIRSSLEGMEMENVSEPTLVSSNGLLQVLSNFDTVSPTKQFELANAIVDMLSESSTTFELNTFVKLTAVLTFNYSHSLTSILMYVTPEVLTKLYLEFVDKHWNSQVIGKQETDGESQFENVNISMSFSWAILMLTILYKQYHIDFVSMRADYTTDNIKNSFAITFVENLPDISDLFFIDEKNSDDPEVQVKSHKLVRDWLNDLFVNGSLSDSLLQNIEPKQLAILVPYIFKQVTLAMEIGAVGDLQNLIGGFEYFLQPFMLVGLIKVMYWLEQYLSCLKSDETDEKLIQKVLSLLNTIICPSTLNEDSKAFHFAVLRLNAIPLLGILYQFRSNKHAESNYGIYSSDNEGNPTLELMISRLISSLSISPVYDIDSTILVTDNNFVQKPPKFQSFFVTNEISMNKMLTNQMNSFWSLHSSTYYNLDFLKTLIDTLTPKQFLLDVLRTLEYKVETLGVKDVRNKSSSNESDQVIDYLFYFLVLYDIENSEDAKAMAQFMEDTVDISINGDSGIVKQETQPKSEYNPDDDIDMLFGENDTSMQANEEDTLDNKELKSDRNCALGKNRHTFGFIIHEIKLSYGTLESDSMSYEDYKKICEYHSRYLKMLKTCIF

SEQ ID NO: 4112 - DNA, 3204 bp, Kluyveromyces lactis NRRL Y-1140
  CDS (1)..(3204)
atggaatctgtgagtcaattggtaagtaattgtgccagtagaggtattcctgcgcaacaatttctcaacttttatcatgaacttatcaatgaaaaatacggtgctagcctaaatgccggtaacgaagagcgtgagtcggagtccagaaagcaggtgtttgaggatgtctctcgagaacttgtccaagcgtttcattctagtgaagatgctatacttttagcggagtatatggtacatttattattcataaattatgatacatatttgagttcggcgctcttaccacaggtttactcgatccaatcggagactcttttaatgcatttccatagtcttgcagcatctttcattggaaaactagaagacaagttgatcaaagaacaaatgaggcaagatttatctacattcatcttatcatcatgtcttcagtgcgacatgagtactttcaataaccagctctttatctctattgtcaagtatttgcaggcactcttgactttgatagatgatagtattgacatcgaaatggacaaagataatttaaagctagctgtaacttctttgttaacaaggactactaaattgaatagaatcttagggaagcgtattggacgagaatttgagacaaaattaaacctttcactgagtgcaaagctcgctatggtgaattcacctcaaatattctctccttcaagtggtgctacccgctttgcaggaactcctggctctaccaagccgatggatctcgccctttctgctacatcttcaacctccaataagatacaagatttgaaactgatacgattttacaaaaacttatggctcaacaataagattcatcatttcaacacttcagattctcaattgctcgagaaattcagctcaataaattctcggttgtcgtcttccctagcggaagagcacttgattcaagagcaaatcactgatctaattgaaaccacatatacgtcattcgctcagttggttaataataaattatatcatcaaaccaacacaaatttcaaccttcttgaaagaaaatacgttcatttcattacaaaaagattaccattgattatcaaagacttcttaccacaaaatccatcggtaattgtcaactcactacaaaacatcgatgaaaaggttaaaaaagctattaaatcttattattcgaataaaaatgattcccctgagagaaatgaggacttatttgatgattattccgggaacaattttgatattagacatgatttcttgaaaaatctgataatgttgaatctaaggccgcccagtgtattgaacgagttcttgcgagaagatcaaatggtggatgtcaaaacattgaaaacggatgactcgttggtcattgtgaactcacagggcgtgcaagaaaaagtgagcgacgtccaagaagctttaaagtcactaatcgcagatttggacatagaaaaccaatacgttgcaaatggcaataactaccgtttctctccagataacgcactcctgaagcttcttatgtcattcgacactatagcacccaccaagcaggttgaaatcgcaaacgcctttcttcagatactacaaaaggctacagacacctcggacttaaaaacactaggaaaagttctttggatactaacgtcaaatgtgggacattctaccacttcaatgctctgctgcatctcgccaggtccatttatcaatgcagtagttaagttcctagaaaagcaacaaaggaattccacagtatcgagctctgatgaaccagattttgattctcttcatagttatgtcacatatgggatggctctatcatttgttgtttttctgaagactacatatgactttgatattgaaccttttattcaaaatttcgaagaatcatacactttgaagttcctttcttcaattgaagacatttcggatatctttgtgttacagaatgaatcggcagaaggatccaaattatatcttcaaaactggttacgagaccttttcattaatggatcaatcagtgactctcaaatgaagaacaccaatgttaaagatctcatcaatcttattccatttatctttaaacaaagcgtaattgctgtccaggcaggtgttgtgtcaaatattctgaatttgactagcggctttgaatatttcttacaaccgttccttatgccaggattgataaaaattatgttctggttagagtactatctacattctttgaaaaataataatccgccttctcagatattgagttcctgttgggagcttatcaacatattgatatgtccgccttcattagacgatgatgcaaaaggtttgcatttcatgatcttgaaacttaattgcgtcagactgctcaacgttttgtacttattcaggaatgatgaaagtaactccagtcagtatggtgtatacgcagcacatgagtcgattgatcctaagttggaggcagtgatatccaagttggaatacattgcctcaatttctaacatttatgacgttgacactaaatgctatgaaaccacaaaagaagtatactcgcatggtactctgttctccaataaaataccagttactaatgaacaccccattgatattataatgacgaaccaacttaattcattttggaatctacacagtagtacgtactataactatgattatctgctggagttgataaaacttattacgccggagaagtttttagtggattcgataagaacattgacctataaggtggcagcatatggtattcctggtgttcaagggaaactaaacacatcagctattgaacaggtagcaaacttcctcgcttacttcatgattttgcatgatgttcaaacggaagaacaaagacttgcccttcttaattacatagaatctggtgtcattgtctcaaaggaaactgaaactaaacaagaaccagaaactaagttagatgatgactttgacatgttgttcggtgaaccgttcaacaataccttggatgaaacgtccttagtgttttcgcaaaacgagcaaccaaagtcctacagctcatcagtctttcctgtgttgcatgacacttttggtgtggtaatagcagaaatgaaaaagagatatgatactagtaaaaacaatggactcctctccgaagcagcgtatgaaaatgcaacgacatttataagaaaatatgtagagaatttgaaaaattcggttgtataa

SEQ ID NO: 4113 - protein, 1067 aa, Kluyveromyces lactis NRRL Y-1140
MESVSQLVSNCASRGIPAQQFLNFYHELINEKYGASLNAGNEERESESRKQVFEDVSRELVQAFHSSEDAILLAEYMVHLLFINYDTYLSSALLPQVYSIQSETLLMHFHSLAASFIGKLEDKLIKEQMRQDLSTFILSSCLQCDMSTFNNQLFISIVKYLQALLTLIDDSIDIEMDKDNLKLAVTSLLTRTTKLNRILGKRIGREFETKLNLSLSAKLAMVNSPQIFSPSSGATRFAGTPGSTKPMDLALSATSSTSNKIQDLKLIRFYKNLWLNNKIHHFNTSDSQLLEKFSSINSRLSSSLAEEHLIQEQITDLIETTYTSFAQLVNNKLYHQTNTNFNLLERKYVHFITKRLPLIIKDFLPQNPSVIVNSLQNIDEKVKKAIKSYYSNKNDSPERNEDLFDDYSGNNFDIRHDFLKNLIMLNLRPPSVLNEFLREDQMVDVKTLKTDDSLVIVNSQGVQEKVSDVQEALKSLIADLDIENQYVANGNNYRFSPDNALLKLLMSFDTIAPTKQVEIANAFLQILQKATDTSDLKTLGKVLWILTSNVGHSTTSMLCCISPGPFINAVVKFLEKQQRNSTVSSSDEPDFDSLHSYVTYGMALSFVVFLKTTYDFDIEPFIQNFEESYTLKFLSSIEDISDIFVLQNESAEGSKLYLQNWLRDLFINGSISDSQMKNTNVKDLINLIPFIFKQSVIAVQAGVVSNILNLTSGFEYFLQPFLMPGLIKIMFWLEYYLHSLKNNNPPSQILSSCWELINILICPPSLDDDAKGLHFMILKLNCVRLLNVLYLFRNDESNSSQYGVYAAHESIDPKLEAVISKLEYIASISNIYDVDTKCYETTKEVYSHGTLFSNKIPVTNEHPIDIIMTNQLNSFWNLHSSTYYNYDYLLELIKLITPEKFLVDSIRTLTYKVAAYGIPGVQGKLNTSAIEQVANFLAYFMILHDVQTEEQRLALLNYIESGVIVSKETETKQEPETKLDDDFDMLFGEPFNNTLDETSLVFSQNEQPKSYSSSVFPVLHDTFGVVIAEMKKRYDTSKNNGLLSEAAYENATTFIRKYVENLKNSVV

SEQ ID NO: 4114 - DNA, 2973 bp, Debaryomyces hansenii CBS767
  CDS (1)..(2973)
atggcttcactgacagcaacagtatcgcttcataacctcgtgaagctctgttgtaagcggaactcaacgagtaaagtttttgtttctttgtacaatcaattagaggaaaaatcacctattcaagataatgattatttgtcgaatctattacaaccagatataaagaataagtcgaaaagagaaagcagtttgataacagaatatatcttagcattggcgatatcttctgaaagtcaattggaaaaattctggaaatttttgcctgaaatacttttagaaaatcaaatacactacatgatcgaattaaacagtattttactatcgaagtcaaatatagaaagaccttctagtgatatattcaaagaaattgtaaataattgctttttcaaatatacttccagttatatatcaagtttatttccaggcatttcggccacccaagtttcgttgttaaatcatataatagtggtatggtgctcagtaattaggagatcaccttttcatttaaacactagttctttcaaacaattagctgtcaaaattgtatccgttttaacagaatgtgacttacgaaacctgttaaattatttcatatcaaatacttcatcgatattgaatacagatgacttgcaagttgacctggttcaggattcagacgataaaaagattgcagcaattagaagtacaaccaccatacaattagtcaataacatatcctcgataaatccaaaatctagaaaagcaactcagttgaatgttatcaaaagatatctttggttgaattctatcatgaagaactggaaatttagtaatgatgtttttttgaaacagttcgagcaaaacttcttacctaattctctgaataacttgaagaagccttatgttcttgcctttgaattaatatgcgctttcttcaaaggcattgttacttcaatttgctcgaatgaatcaaagtacgttttatttaactggaagaattttataatcactagacttccaactttattaaatgacatcaaatttactacgctgcatgttgcacctacctccaatgattcaagttttaaacaggaaactttggatgatgcaataataaatgcatttgagtcctttgaagacccggttaacaaagtgttaacacaattcagcattgataatttgtctatttgtgaccttcgccagacgtttataaagagttgtatatacaataagcttatccccgtgatgtcatatcataaaatatttactgctgacaatacagtaacagatcaattcttgaataatggtattgaacaagttggtcaaataacgtcaattagagatgagttcgaaacaaaattattgaatattaatacagagttcacaactttggaagattcggggttaatcgaatacataaattccctacctggtttactagagttcctggcaactaaacaattagaattaagtgaaacagtagatcaggtaatcgagcatttaattgatgagaaaaatattgaaaagctatatagattgctattatctgtttgcaataatcttacaactttgaatttaatctgttttaattcgaattgcggacccttttcgatattatataagttgatcaattatattgacaatgaagattttaacgttgacgatgatgataacttccaagagacttatgccttcttcggaattatcattcttgctatactcctaattatcgaaacctttaaaattgattattcacaaattacagttactaattcttatattgttgattacataaatgaattctactacagattatgtgatagtttgactaacatatcgacttccgatacagaagaagacaatacaataatttcaaattacaatgatttaattagtgattggattaatgcgttgtttgatgataataatgatgggctttctgatgacttaatcaaatcggtcaatgtcaaacaaatttataaaatgattcctattatatatcaacagtcaattattgctaccaattcgaataagatcgacattaagatattaaataatggaattgattacttgtcgcagatgtttttgattccttgtactttaaatatcattaaatggttattgaggagaatttgggctgatgatccaactttagactgtttacctgttcaagttttacatgaattaattaaatctaatatgggcgaaagtgatgagccaacgagtgaatcgaagctattttttcaaatagttttgaaaataagtggtaattcaataatatcaactttaaagaagttaaataattgggagaattctaatttaattaaagatataattgaaaaggtatccaatagtgtcgatccaatgtatttggagaatgatttgagcataaagttgaatgagagagtcaatttgtatgaacaacttaaaacgaacgtgattaatttagtcaataatatgaacatttatgactatcaatttttaaatatattctcttccattgatagggacaacgagttgattagatatatcgtggaagaaataacctcatatcaaaagacaaatggcggaaatgaagatactaagctattcattaacctatcgatatttatgatattactcgacgctattgataatgatgatgacaagcaatattggattaaacgtataaaggacacaatggttcctgttagtagcaatagctcaggtgagaatagatttgatatactgatggattatcattattctagtattttcaacaattcagatgaaacatctaataatgattatttgtttagtggtgaaaataataattcttctgtagaaattgagggtttgaaacgcaagattggaaggcatgaaagtttgttgaacagtttcaacaaaatcaaggagttttgtgatactgaagttcaatctacatttgtgaaatcattaagaacatttagggacaaattgataaatgaattagaagtttttacactcaatgtttag

SEQ ID NO: 4115 - protein, 990 aa, Debaryomyces hansenii CBS767
MASLTATVSLHNLVKLCCKRNSTSKVFVSLYNQLEEKSPIQDNDYLSNLLQPDIKNKSKRESSLITEYILALAISSESQLEKFWKFLPEILLENQIHYMIELNSILLSKSNIERPSSDIFKEIVNNCFFKYTSSYISSLFPGISATQVSLLNHIIVVWCSVIRRSPFHLNTSSFKQLAVKIVSVLTECDLRNLLNYFISNTSSILNTDDLQVDLVQDSDDKKIAAIRSTTTIQLVNNISSINPKSRKATQLNVIKRYLWLNSIMKNWKFSNDVFLKQFEQNFLPNSLNNLKKPYVLAFELICAFFKGIVTSICSNESKYVLFNWKNFIITRLPTLLNDIKFTTLHVAPTSNDSSFKQETLDDAIINAFESFEDPVNKVLTQFSIDNLSICDLRQTFIKSCIYNKLIPVMSYHKIFTADNTVTDQFLNNGIEQVGQITSIRDEFETKLLNINTEFTTLEDSGLIEYINSLPGLLEFLATKQLELSETVDQVIEHLIDEKNIEKLYRLLLSVCNNLTTLNLICFNSNCGPFSILYKLINYIDNEDFNVDDDDNFQETYAFFGIIILAILLIIETFKIDYSQITVTNSYIVDYINEFYYRLCDSLTNISTSDTEEDNTIISNYNDLISDWINALFDDNNDGLSDDLIKSVNVKQIYKMIPIIYQQSIIATNSNKIDIKILNNGIDYLSQMFLIPCTLNIIKWLLRRIWADDPTLDCLPVQVLHELIKSNMGESDEPTSESKLFFQIVLKISGNSIISTLKKLNNWENSNLIKDIIEKVSNSVDPMYLENDLSIKLNERVNLYEQLKTNVINLVNNMNIYDYQFLNIFSSIDRDNELIRYIVEEITSYQKTNGGNEDTKLFINLSIFMILLDAIDNDDDKQYWIKRIKDTMVPVSSNSSGENRFDILMDYHYSSIFNNSDETSNNDYLFSGENNNSSVEIEGLKRKIGRHESLLNSFNKIKEFCDTEVQSTFVKSLRTFRDKLINELEVFTLNV

SEQ ID NO: 4116 - DNA, 2883 bp, Yarrowia lipolytica CLIB99
  CDS (1)..(2883)
atggaaaatgagggcgcctcggaagtgaatcccaaggcgttgtttggagccaacaccttcgacttgttgttctttgcatatgtgcacaagctggcgtttgaagacagtcttttgcccccttacaagcttctggcgtacctcaaggtgtgtgcctatggccgtcttccccagctgctcatgtatctgggcaaacagcttcaggaaatggacacagacgtggatttgggtgccaatgcgggctacagctacttgattcaggttctggtttcgttcatgaaggacgcctttgcttctggaggtgggatgcgaaagagatatggaacgtctatcgccaaggggttcgggttctttgccgaggtcctgttgacccgactcggagacagaatggccggagtgactgctcccgagatcacctcgcagctcgcagaactagcaaaggtcgatgctaccattgccggaagactgggcgaagcctggatgggtctcaagggcgcagctaagaccagcaccacagctgaaacagtagcggcaaccgtggctacacccacgactctcactagactttacagagacacgctgtttgaaagcctcatgtttggagactcatcctggaaccagtatggatccctgttccagctcatcagcacggtctatgccatgcccgggtaccccactctggcctcgcagcccgtgcagtctcgtctggcaatcattggcgaggttatttgcgccatgtttgactgtcagagcatcacttttctgcgacgagattctgccaaaagaaacaactactggaaaagctgcatccgaacacgaatcccgcgcattattcgcactttgttcccgcactcgacacccgaggaaaagacgctcattcaatccgtcgtctcaaaaagtgttctgggcctggatcagcctaccgtgacccttattcgtctttccatcggttctgacgaattagacgacatgttctcctcgttcccgggtggcctggacgttgacattagacacgaactggttgctgcatgcatttccgaaggagttctgcccaaagacgccttcaacgcgattttcaaagactcaggaatcagcgtagaagccctcgattacgcagacgagctgacgatcgacggacaggctatgagcctagatacaatggcagagcagctgagctacgagaatctcgagattgggtctgtttccgactgtctcatgtccaaggtggtcgctcagatggagaagctgagtggaaacgcacaggaagcgctgaccaaacggctgctagtgtgcctggcagactttgtgcaggcaggaaacgttcgaccagtacgatacatgtgccaagctttggcactgaacacaactgctgtcgacattatggccctttgtgtcgatcccatgctattactcaaggctctggtcgactgcattgagctatggagagaggaggaggacgaggccaactaccaagaagcttacacggactttggagccattgtggtctttgccatcaccctcaagcagcgctatcacctcgatttggccctgttgaaccaatttggaacactctttgtgggtgctccttcgccctccagcaccatgccatcacacgagttgtttctgtcacagcttctcacagaaagcgactcttcacaacgcattttccatctttccgacgaacagaacgaccagctcagtggatgggctaccgctctgtatgacgctggaggcatctccgacgatctaatgcgatcgtcatccgtaaagcaattctttcttgtcacccctgccatttttcaacaaagcatgctcgcccacgagaagggcctactttctctgtcgaccttcaagggaggcctggagtattttttgcagccctttctgttgggatcaacagtgggagtgttcaagtggttgtcggaacaactatgggtgcattcgcaaaagggacacgacgagcagatgagtacagttatatctgtttgttccactctaattctcaccgataacactgacattgaggtcttgtctcctattcatcaaatggtgctggctatatgtgctgacgaaatgtacgaggctctggatatggctctgagggcaggctacatggttgaaaaccgggtgtttgagttcctcgagccttttgtttcggccatcaactacaatctcaacgtgcagcgaacagtgtcgtcttctggtttccgatcgcaaaagggaatcggtatgagtgggggtggaggaagtggtaccaaggagcagacgtggaaatacggtgcttccatgattgccaccatcaaggagcaggtgtcgtcactcatcagttggtcgcaaaaccagtacacgggtcccccgtttggatacgagcttgtgatgatcctgtcgtcggtcgacactctgggccataagtacgttctggagcagctgatcgaggagattgcgctggcggactccaacggcacaggccattataccgtggaagttgttgctacgattgctacggttgcattcatcatttccacgtctgtgaagagtccacgaccgttttccgactcacagctcattctcaagtcactcgataacatggtcaacgactccacgggcaagagcaaggacatttgcgtgctgctgcagtccaagattctgcagttgttgactacagcaggctacaaacccgacggaagtcgtctggacggcaaaccacatgctaaagaggactattcgtttgtggtgaaccgaacgggcgaggttgagaataagcccatcaacgactcgtcgcaaaactccaacactgacaaccagtttatggacactaacatgtttggaggcgacgacttcaccatggactttggcggcgacattgacatgcccgacttgttctag

SEQ ID NO: 4117 - protein, 960 aa, Yarrowia lipolytica CLIB99
MENEGASEVNPKALFGANTFDLLFFAYVHKLAFEDSLLPPYKLLAYLKVCAYGRLPQLLMYLGKQLQEMDTDVDLGANAGYSYLIQVLVSFMKDAFASGGGMRKRYGTSIAKGFGFFAEVLLTRLGDRMAGVTAPEITSQLAELAKVDATIAGRLGEAWMGLKGAAKTSTTAETVAATVATPTTLTRLYRDTLFESLMFGDSSWNQYGSLFQLISTVYAMPGYPTLASQPVQSRLAIIGEVICAMFDCQSITFLRRDSAKRNNYWKSCIRTRIPRIIRTLFPHSTPEEKTLIQSVVSKSVLGLDQPTVTLIRLSIGSDELDDMFSSFPGGLDVDIRHELVAACISEGVLPKDAFNAIFKDSGISVEALDYADELTIDGQAMSLDTMAEQLSYENLEIGSVSDCLMSKVVAQMEKLSGNAQEALTKRLLVCLADFVQAGNVRPVRYMCQALALNTTAVDIMALCVDPMLLLKALVDCIELWREEEDEANYQEAYTDFGAIVVFAITLKQRYHLDLALLNQFGTLFVGAPSPSSTMPSHELFLSQLLTESDSSQRIFHLSDEQNDQLSGWATALYDAGGISDDLMRSSSVKQFFLVTPAIFQQSMLAHEKGLLSLSTFKGGLEYFLQPFLLGSTVGVFKWLSEQLWVHSQKGHDEQMSTVISVCSTLILTDNTDIEVLSPIHQMVLAICADEMYEALDMALRAGYMVENRVFEFLEPFVSAINYNLNVQRTVSSSGFRSQKGIGMSGGGGSGTKEQTWKYGASMIATIKEQVSSLISWSQNQYTGPPFGYELVMILSSVDTLGHKYVLEQLIEEIALADSNGTGHYTVEVVATIATVAFIISTSVKSPRPFSDSQLILKSLDNMVNDSTGKSKDICVLLQSKILQLLTTAGYKPDGSRLDGKPHAKEDYSFVVNRTGEVENKPINDSSQNSNTDNQFMDTNMFGGDDFTMDFGGDIDMPDLF

SEQ ID NO: 4118 - DNA, 3075 bp, Aspergillus fumigatus Af293
  CDS (1)..(3075)
atgacctccccggtccaatggggaacattcttccatcaatgtttgttacatcgaatcgatgccaacgagttcagaaatctgtcaaaactgctgctacagaaatgtcccattgcagaaactgcactgcttgatgcactgcttcagactcgatccgagtcccggatcaagtgggatccactactcccgctctacatagactgcctgtgccgaacgggcagggtcagaacgtccactgtgttgacttctcttttgaaatactcgtctatacatgataagccgcaactgtctacgtcagagggcaaggatggctccaaatgctatactttgatgactgatattcgagtcatccaagataccatgctttccgtctcgacggggagtactcccaaaactaacgcagaagccgtcgcaattttctttgctatcattgactggatccatgcggttgcctcatggcataatagccatttcgatcccggtcaacactcgagtggcatcatgagttcgccggatgtggtgtcactgttcgaatcgttgggcattctcctcgctgctctatcaggaaccgggaagggattagaggttctttcggctgattcgcatgaaggtatttttccatcacttctgaataaatctaggttaagctcacagactgcagggttaaaagtcaagttgggccaagcgctctccgcatatctgcccctttgcgttgaggtgtcgttacctctgcggaacagattggatggccttcaaaaggaatttaatttgtacggggaacgggtgccgaagtccttggatgttccaatgatggagaacatgaatgtcaacgctctgcaatttgaggcgtctgtcatggatgggccggtcatcaactcgagagcaggtctctacgtcttcatcaatgcaatgctcgtgggtcggcccctagtggatgatggtatgctcatcaactatcttgccaatcgatacggaggacactacgaagctctcgttgaggaaattctcaccgcttcttttgatgtcctgtcaaacggcatgtatcgtaatgaatccagtcggatgatgttcgtctttcgctccttcttagtcaacaagctcccccctttctttgcagccatgctagcgtcgaccatggtctccatcccaatggaaatgtgcatcagtcatgcattgagccggcttgaccccaacacatttccatcattctcgcagatgttcgaaatgcagggcaacacggtcctgtccgacgtgcggcaggagtttttgttcgcctgtgcctcgcacaaactgatacctgaatccagcatagaacgcttgctgggtgagaatcccatgcaaactcttcctgtgggctataataaggacgaactggtgtcgcagatcaacgccaatcctgaacgtgcggagcagttgatcaacgagattgagtctatggagggaaatgcaggagcgatcattggggcaatcacagaggtcatgcataatctctgcaaccaaaaggagaccatgacactgaagaacatatgcaattcgctatccaggcggcctcaggcgctggacgtggttttaattttccgaaacccaaagcaggttttgcagccgctctgcgctttactggactcgtggcactgggacgaggaccagggcgagtaccaaccggtgtacgatgagtttggaagcattctcctgctggtgctggccttcaagtaccggtttgatctgcgaccagcggatctagggatctcaagcagtgattcctttgttctgagactgctcgagcgaggatcctgcagccagaaactcgatgctctcgatgaaaaacagaacaaaaacctgggctcctggattgcggctctgttcatcgccgaaggcatcagtgaggagaccatgtcagcgtgcagtccacaggagttctacctgcttgtggcgacgctgttcagtcagagcctagaagcatgtgagaccggaaagctcgagtttgatactttgaaagggggctttgaatatctgcttgagccgtttctgttaccatctctgatcttcgcgctgacgtggttgggggaccatatctgggagatggaactcgacccctcaattcccctaaaggtgctacattccttggtgaatccgagttcgatctccggtgaagccagagagatccaccggactgtgctgaacatcgctgctcgcacgctggaagagcagctcaaagatgtgcgcacgcgacacccgtcgcgcaccgacatcaaaccgatcctcgactccctggagccgtgcctatcgttccagctggtgggcagcagccaccgctccgaactggagggttggacgacacattccagcggcggcctgctgggcagcatccgcagcacgttccagtcgctggtgctatggagcacaaacccagaggtcagcatggcacctcctccgtacacccatcgccagctgatcgcaggcgtgcggatgttgggggcgtcgcgcgtgctacctgcgctgatcgaggagctgaagctccagaccgaggcaggcaacggccccctggcgctggacttggccgcgacgctgatctgcgcgcccatggcggagaccttttctgtggagcagaacagccaccagcccgtggacccgaacaaggaggcgctgccgcggtgcgggatcctgaccctccgcgacgtgctggcgctccagcacgagaacgtgcccaagatctcggaaaaggaccccctgcgcgcggaggtgctcgtgcggttgtaccggcgggtcaacgccctactggcgccgccgtcgcaggtccccaacctggacgtcaacaacatcatccagaacatgcagctggggggtgttggtgtgggcgcgggccagatggagctggatgccacgggggctgccgaccatggggtcgggcccgacgatgcggagaatatccatcgcatgatcgacaatgcggcggcggcagcggggctggattcgtcggggacggggctcgatacgagtatcgatgatgtactgaacgcggcagatatggcggttgggaacccggagtttttggatctggatatggaggggatgttctag

SEQ ID NO: 4119 - protein, 1024 aa, Aspergillus fumigatus Af293
MTSPVQWGTFFHQCLLHRIDANEFRNLSKLLLQKCPIAETALLDALLQTRSESRIKWDPLLPLYIDCLCRTGRVRTSTVLTSLLKYSSIHDKPQLSTSEGKDGSKCYTLMTDIRVIQDTMLSVSTGSTPKTNAEAVAIFFAIIDWIHAVASWHNSHFDPGQHSSGIMSSPDVVSLFESLGILLAALSGTGKGLEVLSADSHEGIFPSLLNKSRLSSQTAGLKVKLGQALSAYLPLCVEVSLPLRNRLDGLQKEFNLYGERVPKSLDVPMMENMNVNALQFEASVMDGPVINSRAGLYVFINAMLVGRPLVDDGMLINYLANRYGGHYEALVEEILTASFDVLSNGMYRNESSRMMFVFRSFLVNKLPPFFAAMLASTMVSIPMEMCISHALSRLDPNTFPSFSQMFEMQGNTVLSDVRQEFLFACASHKLIPESSIERLLGENPMQTLPVGYNKDELVSQINANPERAEQLINEIESMEGNAGAIIGAITEVMHNLCNQKETMTLKNICNSLSRRPQALDVVLIFRNPKQVLQPLCALLDSWHWDEDQGEYQPVYDEFGSILLLVLAFKYRFDLRPADLGISSSDSFVLRLLERGSCSQKLDALDEKQNKNLGSWIAALFIAEGISEETMSACSPQEFYLLVATLFSQSLEACETGKLEFDTLKGGFEYLLEPFLLPSLIFALTWLGDHIWEMELDPSIPLKVLHSLVNPSSISGEAREIHRTVLNIAARTLEEQLKDVRTRHPSRTDIKPILDSLEPCLSFQLVGSSHRSELEGWTTHSSGGLLGSIRSTFQSLVLWSTNPEVSMAPPPYTHRQLIAGVRMLGASRVLPALIEELKLQTEAGNGPLALDLAATLICAPMAETFSVEQNSHQPVDPNKEALPRCGILTLRDVLALQHENVPKISEKDPLRAEVLVRLYRRVNALLAPPSQVPNLDVNNIIQNMQLGGVGVGAGQMELDATGAADHGVGPDDAENIHRMIDNAAAAAGLDSSGTGLDTSIDDVLNAADMAVGNPEFLDLDMEGMF

SEQ ID NO: 4120 - DNA, 3714 bp, Ustilago maydis 521
  CDS (1)..(3714)
atgtcaacaggcgaagcgcagcagctcatacagaagcttctcctggaggcgctagctcgacgtctcgctcaacccaagtggctctcccttctccatcagttggtgcgtcgcatcgaagctgcacaggatgatgacggcacgtttgacgtcatcccgtcacttgagggctcgcatgctgccgaatgcctcgtcaaatatctattgtcacaatccttcatcgacccgttgctaatcgagtatctgcaggcgctcatatacggcagcgccaatcgatctggcgtcagtccagatcaaggccctatcaccgacgtcatgactgtcacccttcatctccttgccaatgtccaagccgcagcatccaacgttccagctatcgagataatatcttccgtcatcggccaggggcttctcatgacctttcaggcgcccgttccctttcgcgtttccagcccttcctttctcgctctgctgcaacgcttgttcgcagatcccacctacgagcaagatcagactccaagctttccagtggaccatgtcgataccggggccagcgacatcaaggtcgctcctgcatctctgggatttgtcgtagccaatctccgcctgctcgctcttgccgccgacccggccattgcttctccacagaacttactcgctccacgtgtctccatcacggtcctcatcaatgtcggtcaaggtcttctcgcatacgttacacagatcttgtccgcagcccaaacggctaagaatgacaagctcaagcccgatggtgctatactgcagcagttgaggtccatggcatcgacctcgctcaccgaaatcgaagcagtgctacgctccatgaatccagcgtggaaggacgagatcgcgctcttgcgctctctgaccagccaaattggtgtcattgaccaaattagcgagagctttgcagaggcgaacacatccaagctctccacacgtcccacaaagaggaaactcgagacattacaggatgcacagcagagagcgacgtgggatcattttctcgacgtttccacgatagctgcatctgagaagccagccgttgagcccgagacggcgttgctcatgcatttacttgtggatcatcacacttcctgggacttcaagctggacgcgatcaagacactctttcttgctcgacgaagtgcagctgctccctctttaacgctggaaaagtcgctcaccgcgttctactttgaactgcttgtcgcagccatcgatgcgtgtgctgccgttgtcgagatgcccccggcattcaaaggcgccgaagtctacgctaccatttggaggaacgcactgtgcggcatgattcccgaactcgtgctacagctcgaacagtggctcgatggaaaccaagagttgccgttgcgtggacagaggcttgaggcaccgcacgtccgtcttgaagccgcccttcgagctgctctgctcgtcatgtcggatcgtctcaacgtgtgcgagagtgccacgaaccaatcacatgcacacggcaatgtcgctgctaccaacggtgaagaagcagcaggtgctcatgcgaacatgatgtccgacgtactaggcttgggcacaccgccgtcgcagcccatcagggcgtggctgttgcgagcttgcatcgagcattcgctagcacggccggaagcgatcgcggacgaatttgccaacgggcacaagctcgcttccgaggtacagagtttgacgcagtcgctccgcatggatgcacagctcgaaggactcgcgctgaacactctcttcgagacacgaatccctacagaccacccagtggagctgttgcaacgcgtggcatccgatccgggaactcacttcatctttgcacgccagcttgttttgcaggtgcagggctggttggaacagcacgaccttgagagtatcgcgagatggtgcaaagcgttgaccgagaatgcttgtgagggcggcgctatgctggacacaatcatgatctatattgatccggcccaaatgctcgatccattggcaagcatcttggatcaccaagatctcggtcagacgagcgacgagccttcgacgctgtccgacatcttgctgtttgttcaactactttgttatcgatactcgactccaattacgcgcatctcgcgctatacggtttcgaatcacgacatggacacggtcgactcttctgctcctctgcacagatctatgccacccttcctagcaacacaccttgccacctcgtcggtcagctatccgctttcggtactgtccgaagaagaccgtggcctagtttcacgttggattcacgccctctttggcaacgaaggcatctcggacgacctcatctccgcatccccgcccacaacgctacttcgtctctctcctctgcttttctcgcaaagcatttcggcgtgccaacacggcatcattgacctagaaacgctgcgaggaggactgagctacttcctccaagatctgctctcgttcgctcttccaggtgcactcgtctggctactctccgagatctctcgaacaccactgcagccgatcctggatttcttgtctgagtccggattgcaagcgtcggtggtggatgtaccgagcagcgatggaacgttggccaatgggctaccgaggaatgctacatccaaaagcgtgtgtttggaagtgttggcactgctggtagatactgatgcgtgtccatccagtgtcaggcagctgattgccaaagctttcgatgcattcgtaagcacgatcgaggcggatgttacagcagcgccacagttggctgtgggatgcgagactttcaacctagcttctttgaaggcgaggatggaaggagcgggtgtaacagcgcgtttgctcagcgaaactggggcgtcttggttgcaaagtgtggctgcgggtcaccaagattcgagatccaagttgttttcgatgctgacgacactgcaaccgtctgtgcacgcaatggatagactcattggtgcattgaagagcggccaagttggacgaaacggtcgagatcaaaagggcttagctgcgtggctgtgtttcattgcacctgctagcgagcctacttcggcgttgaggtttgttcagaggttggagctaggcgatattgaggagagtgcgatcgagggcgtggttcgaattgttgggttggtggttgggttgatcatggcggctgaggcgcagcgtgcgacgacggacgctgttgccgacgaccttctggcgcttgctagagctgcggataccaacgcacgaggtaccaaagctacggtcgccgatacgacagctgctgcacgtccagccgaagcagacttgttcgacgatgaaccctgctcacctcaacctcctcacgccgcggccaacgcgacgtcgcacactagcaacgcagcaccgactgtcacatcagcagcctcgctcctcgcaagtggcgagcttcgcaccacgtcaaagcaggtcttggacatgatggcgttgaaactggtccgattccgatcgcacatgcttggcgagaagaacgccaaatccacgaccatcagtgccaagtgggccactttacaaagcgcgatcgccgaccacttggctgggggtgaagcatggcatggtgcacaacaatgcagagagcgtacgcagaacgatgcgccagtgaacggtggcaaagatgctgatagtggcagtggcttgagtgcgtggctctcggcgatgtcgtga

SEQ ID NO: 4121 - protein, 1237 aa, Ustilago maydis 521
MSTGEAQQLIQKLLLEALARRLAQPKWLSLLHQLVRRIEAAQDDDGTFDVIPSLEGSHAAECLVKYLLSQSFIDPLLIEYLQALIYGSANRSGVSPDQGPITDVMTVTLHLLANVQAAASNVPAIEIISSVIGQGLLMTFQAPVPFRVSSPSFLALLQRLFADPTYEQDQTPSFPVDHVDTGASDIKVAPASLGFVVANLRLLALAADPAIASPQNLLAPRVSITVLINVGQGLLAYVTQILSAAQTAKNDKLKPDGAILQQLRSMASTSLTEIEAVLRSMNPAWKDEIALLRSLTSQIGVIDQISESFAEANTSKLSTRPTKRKLETLQDAQQRATWDHFLDVSTIAASEKPAVEPETALLMHLLVDHHTSWDFKLDAIKTLFLARRSAAAPSLTLEKSLTAFYFELLVAAIDACAAVVEMPPAFKGAEVYATIWRNALCGMIPELVLQLEQWLDGNQELPLRGQRLEAPHVRLEAALRAALLVMSDRLNVCESATNQSHAHGNVAATNGEEAAGAHANMMSDVLGLGTPPSQPIRAWLLRACIEHSLARPEAIADEFANGHKLASEVQSLTQSLRMDAQLEGLALNTLFETRIPTDHPVELLQRVASDPGTHFIFARQLVLQVQGWLEQHDLESIARWCKALTENACEGGAMLDTIMIYIDPAQMLDPLASILDHQDLGQTSDEPSTLSDILLFVQLLCYRYSTPITRISRYTVSNHDMDTVDSSAPLHRSMPPFLATHLATSSVSYPLSVLSEEDRGLVSRWIHALFGNEGISDDLISASPPTTLLRLSPLLFSQSISACQHGIIDLETLRGGLSYFLQDLLSFALPGALVWLLSEISRTPLQPILDFLSESGLQASVVDVPSSDGTLANGLPRNATSKSVCLEVLALLVDTDACPSSVRQLIAKAFDAFVSTIEADVTAAPQLAVGCETFNLASLKARMEGAGVTARLLSETGASWLQSVAAGHQDSRSKLFSMLTTLQPSVHAMDRLIGALKSGQVGRNGRDQKGLAAWLCFIAPASEPTSALRFVQRLELGDIEESAIEGVVRIVGLVVGLIMAAEAQRATTDAVADDLLALARAADTNARGTKATVADTTAAARPAEADLFDDEPCSPQPPHAAANATSHTSNAAPTVTSAASLLASGELRTTSKQVLDMMALKLVRFRSHMLGEKNAKSTTISAKWATLQSAIADHLAGGEAWHGAQQCRERTQNDAPVNGGKDADSGSGLSAWLSAMS

SEQ ID NO: 4122 - DNA, 27 bp, Artificial sequence
  primer
atggaaaaagaatcagtatacaactta

SEQ ID NO: 4123 - DNA, 25 bp, Artificial sequence
  primer
tcagaatacgcatgttttcagcata

SEQ ID NO: 4124 - protein, 1085 aa, Artificial sequence
  consensus sequence
  Variant (2)..(423): Xaa in position 2 to 423 is any amino acid
  Variant (424)..(564): Xaa in position 424 to 564 is any or no amino acid
  Variant (566)..(667): Xaa in position 566 to 667 is any amino acid
  Variant (668)..(693): Xaa in position 668 to 693 is any or no amino acid
  Variant (695)..(697): Xaa in position 695 to 697 is any amino acid
  Variant (700)..(705): Xaa in position 700 to 705 is any amino acid
  Variant (706)..(707): Xaa in position 706 to 707 is any or no amino acid
  Variant (709)..(728): Xaa in position 709 to 728 is any amino acid
  Variant (730)..(736): Xaa in position 730 to 736 is any amino acid
  Variant (738)..(746): Xaa in position 738 to 746 is any amino acid
  Variant (747)..(747): Xaa in position 747 is any or no amino acid
  Variant (749)..(750): Xaa in position 749 to 750 is any amino acid
  Variant (752)..(756): Xaa in position 752 to 756 is any amino acid
  Variant (758)..(766): Xaa in position 758 to 766 is any amino acid
  Variant (769)..(806): Xaa in position 769 to 806 is any amino acid
  Variant (807)..(822): Xaa in position 807 to 822 is any or no amino acid
  Variant (824)..(833): Xaa in position 824 to 833 is any amino acid
  Variant (835)..(901): Xaa in position 835 to 901 is any amino acid
  Variant (902)..(965): Xaa in position 902 to 965 is any or no amino acid
  Variant (967)..(982): Xaa in position 967 to 982 is any amino acid
  Variant (983)..(984): Xaa in position 983 to 984 is any or no amino acid
  Variant (986)..(1046): Xaa in position 986 to 1046 is any amino acid
  Variant (1047)..(1084): Xaa in position 1047 to 1084 is any or no amino acid
YXXXXXXXXXXXXXXXXXXXXXXXXXXXXXXXXXXXXXXXXXXXXXXXXXXXXXXXXXXXXXXXXXXXXXXXXXXXXXXXXXXXXXXXXXXXXXXXXXXXXXXXXXXXXXXXXXXXXXXXXXXXXXXXXXXXXXXXXXXXXXXXXXXXXXXXXXXXXXXXXXXXXXXXXXXXXXXXXXXXXXXXXXXXXXXXXXXXXXXXXXXXXXXXXXXXXXXXXXXXXXXXXXXXXXXXXXXXXXXXXXXXXXXXXXXXXXXXXXXXXXXXXXXXXXXXXXXXXXXXXXXXXXXXXXXXXXXXXXXXXXXXXXXXXXXXXXXXXXXXXXXXXXXXXXXXXXXXXXXXXXXXXXXXXXXXXXXXXXXXXXXXXXXXXXXXXXXXXXXXXXXXXXXXXXXXXXXXXXXXXXXXXXXXXXXXXXXXXXXXXXXXXXXXXXXXXXXXXXXXXXXXXXXXXXXXXXXXXXXXXXXXXXXXXXXXXXXXXXXXXXXXXXXXXXXXXXXXXXXXXXXXXXXXXXXXXXXXXXXXXXXXXXXXXXXXXXXXXXXXXXXXXXXXXXXXXXXXXXXXXXXXLXXXXXXXXXXXXXXXXXXXXXXXXXXXXXXXXXXXXXXXXXXXXXXXXXXXXXXXXXXXXXXXXXXXXXXXXXXXXXXXXXXXXXXXXXXXXXXXXXXXXXXXXXXXXXXXXXXXXXXXXXXXXXXXXWXXXLFXXXXXXXXDXXXXXXXXXXXXXXXXXXXXQXXXXXXXGXXXXXXXXXXGXXYXXXXXLXXXXXXXXXWLXXXXXXXXXXXXXXXXXXXXXXXXXXXXXXXXXXXXXXXXXXXXXXXXXXXXXXLXXXXXXXXXXLXXXXXXXXXXXXXXXXXXXXXXXXXXXXXXXXXXXXXXXXXXXXXXXXXXXXXXXXXXXXXXXXXXXXXXXXXXXXXXXXXXXXXXXXXXXXXXXXXXXXXXXXXXXXXXXXXXXXXXXXXXXXXXXXXXXLXXXXXXXXXXXXXXXXXXLXXXXXXXXXXXXXXXXXXXXXXXXXXXXXXXXXXXXXXXXXXXXXXXXXXXXXXXXXXXXXXXXXXXXXXXXXXXXXXXXXXXXXXXXXXXXXXXXXXXL

SEQ ID NO: 4125 - DNA, 2095 bp, Saccharomyces cerevisiae
  CDS (599)..(1756)
ctcactccggcggccattttacgtgacgaagcatcccttacaacagaaagaagaaaaaagatatgccgctttgcggtttctttctggcaatgtatgcactcataatgctactcgtttacccactatccctgtccaaactaaagagggaggaaagcactttttgcatttacacatcgtagattataaaatgatcgttaacaggcgcttgtgattttgaatttaagaaatgtggactagagaagtcttaaatcgccaatgctgtaccagactctctatagcatctaaacacgaaattcaactgttatcttagtttttcacttaccagtagcgcgcttgttattcccacgttattatttgcccccacatcataggtcaagtgaccttctcttacccgacatgaataaagaaaagaaaagaaatcatacccttcagcctgtttagccataaatagtaaagagtagatgtttcgacggactaaataatgtgaaaaaggttctaaaaccttcaaaacaattaaacttgagaaacgttgctataggattgagctaataatttgaattaataggagctgctttttactttgatatatcctgaagttatgttacgagtttctgaaaatggtctacggtttctgctgaaatgccattcaacgaacgtaagcatgtttaataggcttctgagtactcaaataaaggaggggagaagttccatagatgatgctggcattatccccgatggaactattaacgaaaggccgaatcactacatcgagggaattactaaaggcagtgatctggacctcttggaaaaaggtataagaaaaactgacgaaatgacttccaattttacaaattatatgtacaagtttcacagattgccccccaactatggaagtaaccagctcattactatcgataaggaacttcaaaaggaactggatggggtaatgtcatccttcaaagctccgtgccggtttgtatttggttacggctcaggagttttcgaacaagcgggatattccaaaagtcatagcaaacctcaaatcgatataatcttgggcgtcacatatccatcacattttcactctattaatatgaggcagaatccgcaacattattcaagtttgaaatacttcggttccgagttcgtgtctaaatttcaacagatcggcgcaggcgtatattttaatccatttgcaaatataaatggacacgacgtaaaatatggggtggtttctatggaaacacttttaaaggacatagctacttggaatacattctatttagcaggacgactacaaaagcctgtaaaaatattgaagaatgatttgagagtgcaatattggaaccaattaaacttaaaagctgcagctactttggccaaacattacaccttagagaaaaataacaataagtttgacgaattccaattttacaaggagatcactgccttaagttatgcaggtgatattagatacaaactgggtggagaaaatcccgacaaagttaacaacattgttaccaaaaactttgaaagatttcaagagtattacaagccgatttacaaagaagtggtcctaaatgattcattttatcttccaaaagggttcacattaaagaatactcagagacttttgctcagccgtattagtaaatcaagtgcattacaaactattaaaggtgttttcacagctggaatcacaaagtcaattaagtatgcttgggccaaaaaactaaaatcgatgaggagaagctagtgtatccaatgttatctacacattatcttttatcaaaaatgttttatcgtcctttcatctctttcgaagaatcgctctattcacattccaaatctctggcgtcggtcaatatttattcatctttatttttaccttcttctagataatatacattatcccatattggcattcaaactgacttacttgcattatggaagggggatcatacgttccagtatatgcaatggatgtcgtacttacgaacacattgtagcatttgaaggggtatttctatatatttctattattaagggttatattacaattatactttatagtttaaaatatttaaacaagttc

SEQ ID NO: 4126 - protein, 385 aa, Saccharomyces cerevisiae
MLRVSENGLRFLLKCHSTNVSMFNRLLSTQIKEGRSSIDDAGIIPDGTINERPNHYIEGITKGSDLDLLEKGIRKTDEMTSNFTNYMYKFHRLPPNYGSNQLITIDKELQKELDGVMSSFKAPCRFVFGYGSGVFEQAGYSKSHSKPQIDIILGVTYPSHFHSINMRQNPQHYSSLKYFGSEFVSKFQQIGAGVYFNPFANINGHDVKYGVVSMETLLKDIATWNTFYLAGRLQKPVKILKNDLRVQYWNQLNLKAAATLAKHYTLEKNNNKFDEFQFYKEITALSYAGDIRYKLGGENPDKVNNIVTKNFERFQEYYKPIYKEVVLNDSFYLPKGFTLKNTQRLLLSRISKSSALQTIKGVFTAGITKSIKYAWAKKLKSMRRS

SEQ ID NO: 4127 - DNA, 963 bp, Arabidopsis thaliana
  CDS (1)..(963)
atgaaaactctctgtgatgatctttcctgtttgctaattgactgtaaaaatgtgacctttgcttttgtgcagtctaagatggtggactatatccttggagtctctgatcctataaaatggcattctgcgaatctgaaaatgaattcagatcactatgcttcatggatggttcaccttggtggagctaggctgattacaaatgttgccgataaagtaggagttggagttcacttcaatccgtttgtcaactggaacgacaggaagctcaagtatggagttgttcggatgcatgacctagtacaggacatactggactggaagaggttctacttgagtggccgtttacaaaaacctgttcatatgcttgttgataatctggacatagaggatgtgaattctgttaataagagagctgcaatatctgcagctcttcttctcttgccatcgaaattcaccgaggaagatctatacgccaaaatatgcagcctttcttacatgggagacttgcgcatgttttttgcagaggacactaataaggtgaacaagattgtgaagggacaatttgatcttttccagtcgatgtataagccttttcttgaagagtgcgagaccaaaaacttattgagattctcatcggctgaagctagtcacactaaattagttcaggattctagcctttcagcaacacgttctctggtctcttctcttcctgcatcagtgagaagccaaatggggaagtcactcggggagaagaaattcgtgagcgagaccggtagagttatgggagaagtttgtataagttcgagagaagaagcagcgaaatgtatggagaaagtcatgaggagaagggtaatggtttcaagcggaagacaagctgtgtctggtttcttggctgcaggagctattaatgcaacaatgtatctttcccaaaaaatgcgcaaagcttggaactctcgtgcatga

SEQ ID NO: 4128 - protein, 320 aa, Arabidopsis thaliana
MKTLCDDLSCLLIDCKNVTFAFVQSKMVDYILGVSDPIKWHSANLKMNSDHYASWMVHLGGARLITNVADKVGVGVHFNPFVNWNDRKLKYGVVRMHDLVQDILDWKRFYLSGRLQKPVHMLVDNLDIEDVNSVNKRAAISAALLLLPSKFTEEDLYAKICSLSYMGDLRMFFAEDTNKVNKIVKGQFDLFQSMYKPFLEECETKNLLRFSSAEASHTKLVQDSSLSATRSLVSSLPASVRSQMGKSLGEKKFVSETGRVMGEVCISSREEAAKCMEKVMRRRVMVSSGRQAVSGFLAAGAINATMYLSQKMRKAWNSRA

SEQ ID NO: 4129 - DNA, 966 bp, Caenorhabditis elegans
  CDS (1)..(966)
atggacgaatatcgagagctgattagtgtgcttccactggaaactgtagaatatgcatttgcatatggatcaggtgcaatccagcaacaaaatgaggataaatcggaaaaaatggtggattttgtgattgtcactaaaaatgctcaagaattccaccgcgacaacattctcaaaaatccccaacactacagcctactccggcttatgggcccgaaaatgatcgagaaaattcagtgtaattttgcggctcgtgtctattacaatactcatgtaaaagtcgggaagcggaagatcaagtacggagtgatttcgtacgagaatgtgaagcaggatcttctggattggaggtggatttatatttctgggcggctacacaagccggtactggaggtgatcaagccgcggcaggatatgtgtgatctggtgactgagaatcgtagatcagcgcttcattcatcgcttcttctacttccagaatcttttacacttaagcaattatttcataaaatcgtcgggctctcttatactggagattttcgaatggtcgttggagaggataagaataaaatcaataaaatcgtcgagggaaattacgaggagcttctcagagtctacgagccacttatgaacgatgatgctcgactgtcggtgatgtcgccggcgaaactgattcaggatggatcgacgacggcgatctatcatcgattgaatcttttgccatcggaagtgttgaatcggattcagaagaatatgaatagagtgcagaaaaggcagcgggatgctgaagaggtaatcttttcgcttgctcaccgacatgatgtggctgcgaccgttgaaaccgcaatcggcggaatcatccgaccagtctccctgtctcaaaccgcgaagaacgccttctcggccggagtcacccgttcaatcatctacagtatggcaaagatgagcaagttcttgaagagcaagtga

SEQ ID NO: 4130 - protein, 321 aa, Caenorhabditis elegans
MDEYRELISVLPLETVEYAFAYGSGAIQQQNEDKSEKMVDFVIVTKNAQEFHRDNILKNPQHYSLLRLMGPKMIEKIQCNFAARVYYNTHVKVGKRKIKYGVISYENVKQDLLDWRWIYISGRLHKPVLEVIKPRQDMCDLVTENRRSALHSSLLLLPESFTLKQLFHKIVGLSYTGDFRMVVGEDKNKINKIVEGNYEELLRVYEPLMNDDARLSVMSPAKLIQDGSTTAIYHRLNLLPSEVLNRIQKNMNRVQKRQRDAEEVIFSLAHRHDVAATVETAIGGIIRPVSLSQTAKNAFSAGVTRSIIYSMAKMSKFLKSK

SEQ ID NO: 4131 - DNA, 1152 bp, Schizosaccharomyces pombe 972h-
  CDS (1)..(1152)
atgatctttggtaaaacccactttctttcttataatatccttcgatattcaacaaaacgatggatgaaccgtcatagttatagtcatcatgcgaaatgtacagtggcacaattattgaagcaaaatttacttacgtttgaaaaccaaagaattcaacctgaagaagaattgaaagaaaatctcacaaaggttgttaattactttcaagctcccattgatgtcgccgtaggttatggcagcggggtctttaggcaagctggatattctcaaaaggagaatcccatgattgattttatatttcaggtagaagacccagtcaagtggcacaaaataaatttgcagcaaaacccttctcattattcatttgttaaaaattttggacctggtttcgtgtcaacacttcaagaatcttttggcaccggtgtatactacaatacacatgtggaagtagagggaaatataatcaaatatggtgttactagcaaaaaagatgtttatgaagatcttaaaaattggaatactatgtatctagcggggcgctttcaaaaacccgttgtcatacttaaaggggaagatgaattttacaaagaaaactcttataatttaagtagtgccttacacgttggcctgttaatgttagcagaccgattcacagagttcgatctttacaaaacgattgtaagtttatcctaccttggcgatattcgaatgtcctttttcgccgaaaatcctcgaaaagttgaaaatattgtttctaagcaaatagctttctttcgtaagctatatttgccactattgtatgcagaacctggagttcatttcattgaatcatcagaagttttaaaatctatggatccgagtgataattcgcgatacctctctttccatcagaacatcacgaaggattccatatcacgtcttttgaatggactcccattaaacttggtgaaaattttaggcttaaaacctgacacttcatcgtttgaaaagtgcgctgaactgatgttaacgaaccaaatttcgacaaggagtctactaattagcaaatcaataaaaaaattaacaagctttagtattcttacacaaagtataaagggaattttcactgccaggtgtcattcgttccgttggtatatgtctatgcgaagctaa

SEQ ID NO: 4132 - protein, 383 aa, Schizosaccharomyces pombe 972h-
MIFGKTHFLSYNILRYSTKRWMNRHSYSHHAKCTVAQLLKQNLLTFENQRIQPEEELKENLTKVVNYFQAPIDVAVGYGSGVFRQAGYSQKENPMIDFIFQVEDPVKWHKINLQQNPSHYSFVKNFGPGFVSTLQESFGTGVYYNTHVEVEGNIIKYGVTSKKDVYEDLKNWNTMYLAGRFQKPVVILKGEDEFYKENSYNLSSALHVGLLMLADRFTEFDLYKTIVSLSYLGDIRMSFFAENPRKVENIVSKQIAFFRKLYLPLLYAEPGVHFIESSEVLKSMDPSDNSRYLSFHQNITKDSISRLLNGLPLNLVKILGLKPDTSSFEKCAELMLTNQISTRSLLISKSIKKLTSFSILTQSIKGIFTARCHSFRWYMSMRS

SEQ ID NO: 4133 - DNA, 951 bp, Homo sapiens
  CDS (1)..(951)
atggcgctgcagacgctgcagagctcgtgggtgaccttccgcaagatcctgtctcacttccccgaggagctgagtctggctttcgtctacggctccggggtgtaccgccaggcagggccgagttcagaccagaagaatgctatgctggactttgtgttcacagtagatgaccctgtcgcatggcattcaaagaacctgaagaaaaattggagtcactactctttcctaaaagttttagggcccaagattatcacgtccatccagaataactatggcgctggagtttactacaattcattgatcatgtgtaatggtaggcttatcaaatatggagttattagcactaacgttctgattgaagatctcctcaactggaataacttatacattgctggacgactccaaaaaccggtgaaaattatctcagtgaacgaggatgtcactcttagatcagccctcgatagaaatctgaagagtgctgtgaccgctgctttcctcatgctccccgaaagcttttctgaagaagacctcttcatagagattgccggtctctcctattcaggtgactttcggatggtggttggagaagataaaacaaaagtgttgaatattgtgaagcccaatatagcccactttcgagagctctatggcagcatactacaggaaaatcctcaagtggtgtataaaagccagcaaggctggctggagatagataaaagcccagaaggacagttcactcagctgatgacattgcccaaaaccttacagcaacagataaatcatattatggaccctcctggaaaaaacagagatgtggaagaaactttattccaagtggctcatgatcccgactgtggagatgtggtgcgactaggcctgaagaagtcagtgatttatagttcactaaaactgcacaaaatgtggaaagggtggctgaggaaaacatcctga

SEQ ID NO: 4134 - protein, 316 aa, Homo sapiens
MALQTLQSSWVTFRKILSHFPEELSLAFVYGSGVYRQAGPSSDQKNAMLDFVFTVDDPVAWHSKNLKKNWSHYSFLKVLGPKIITSIQNNYGAGVYYNSLIMCNGRLIKYGVISTNVLIEDLLNWNNLYIAGRLQKPVKIISVNEDVTLRSALDRNLKSAVTAAFLMLPESFSEEDLFIEIAGLSYSGDFRMVVGEDKTKVLNIVKPNIAHFRELYGSILQENPQVVYKSQQGWLEIDKSPEGQFTQLMTLPKTLQQQINHIMDPPGKNRDVEETLFQVAHDPDCGDVVRLGLKKSVIYSSLKLHKMWKGWLRKTS

SEQ ID NO: 4135 - DNA, 1131 bp, Eremothecium gossypii
  CDS (1)..(1131)
atgctaaggggaagtaagctccagtcaacacagtgtatcaggacgtggatagctatcaggcagcagtcgcagcttgcgagccgtagcagcacagaagtgccagggcgcttacgaccgtcgttgttaccacgggagagtgttgtcaaagcgagcgcagaggtgaaggagttttcccttctggagcagggcatccggaagacggaccaagctctctcggaatatgcaaattaccggtataagttcaagaggttaccggcgaattatggctcgaaccagttgctgaagataggccgcgagatcgatgcagagctgcgggggataatggggcacttccaagcacctgttcgctatgcatttggctacggctcaggggtcttcgaacaagcaggcgcacacaagtcggatgggcggccgcagatggatttaattttaggtgtaacacaccctgagcatttccactcgttgaatatgcgccagaatgcccaccactactcgaccatgcgctatttcggctctgacgcaatatcaaagcttcaagcggtgggtgctggtgtatactttaacccttttgtcgacattaacgggcatcaagtaaagtacggagttgtgtctatggagaacctgcttaaggatctagcaacttgggacacattttatctcgctggtcgactacaaaagccggtgaaggtattaaaaaatgacttgcgtgtgcaattttggaaccaactcaacctgaaatccgcagcaaccttggcgaagcacatgctattggccaagtcacccgggaaaatcgacgagtttgaattctataaacaggtaactgcccttagctacatcggcgatgtgcgttacaagctcgggggtgaaaaccccagcaaagtaacgaatatcgtggagaagaactatgaaaactttcaacggtactacgaaccaatttacagagatgttattataaatgaccacggctatctaccccgcggttttaccgtagataacgcagttaaattgctggaagatagaattagctggaacagtactgtacagacagttaagggagtcgttacagcgggcgttgcaaaatcagtgaagtatgcgtgggcaaagaagctcaaagctattcggtctaaatga

SEQ ID NO: 4136 - protein, 376 aa, Eremothecium gossypii
MLRGSKLQSTQCIRTWIAIRQQSQLASRSSTEVPGRLRPSLLPRESVVKASAEVKEFSLLEQGIRKTDQALSEYANYRYKFKRLPANYGSNQLLKIGREIDAELRGIMGHFQAPVRYAFGYGSGVFEQAGAHKSDGRPQMDLILGVTHPEHFHSLNMRQNAHHYSTMRYFGSDAISKLQAVGAGVYFNPFVDINGHQVKYGVVSMENLLKDLATWDTFYLAGRLQKPVKVLKNDLRVQFWNQLNLKSAATLAKHMLLAKSPGKIDEFEFYKQVTALSYIGDVRYKLGGENPSKVTNIVEKNYENFQRYYEPIYRDVIINDHGYLPRGFTVDNAVKLLEDRISWNSTVQTVKGVVTAGVAKSVKYAWAKKLKAIRSK

SEQ ID NO: 4137 - DNA, 1029 bp, Drosophila melanogaster
  CDS (1)..(1029)
atgctggacctatacagacgcacggtggcgcggtttcctctgggcagtgtcagctatatgttcgcctacggatccggcgtcaaacagcaggaaggctatggaaaagtcggcaatggaaacaacctgcgtcctccgccgggaaccgttgtggatctggtcttttgcgttcgtgatgctaggggcttccatgcggagaacctgcaccgtcatccggaccactattccgcccttaggcacctgggaccgaactttgtggccaagtatcaggagcgtttgggtgcgggtgtctattgcaacacgttggtgcctctgccagatgtgggcattaccataaagtacggcgtggtgtcgcaggaggagctgctggaggatctgcttgactggcggcatctttacttggcaggaaggctgcacaaaccagtgacgaatctggtcaatccttctgataatcctcccctcaaggctgcgctggagaggaatcttgtatccgcgctgcaagtggctctgctacttttaccagagaagttcactgcctacggacttttccacaccatcgccggactgagttacaagggcgatttccgtatgattttcggggaaaacaaacagaaagtgcacaacatagttagtccgcaaatcaatgacttcttcgccctataccaaccctccctgggacaactttccgactatgtggcggtaaacatgaagggccaggaaccagggagccggaaaccagccataatcttcgagcaggacaaatcctcatcggctacatgccaacacctgcgacagttgccccgagagcttcagaagcgattgcagcgaaatgccgcctgtcgtggcgactacacccaggtggtgaatcacctatccatggcctcccagcttccggaggtgctgcaggcatccgtcaacgacattgtgtggcgcagcagtgtcacgcaatcgatcaaaaatattcccagtgctggcattctcaagtcattggcgtatagctatcgcaaggctcaaaagacattcgctgtttag

SEQ ID NO: 4138 - protein, 342 aa, Drosophila melanogaster
MLDLYRRTVARFPLGSVSYMFAYGSGVKQQEGYGKVGNGNNLRPPPGTVVDLVFCVRDARGFHAENLHRHPDHYSALRHLGPNFVAKYQERLGAGVYCNTLVPLPDVGITIKYGVVSQEELLEDLLDWRHLYLAGRLHKPVTNLVNPSDNPPLKAALERNLVSALQVALLLLPEKFTAYGLFHTIAGLSYKGDFRMIFGENKQKVHNIVSPQINDFFALYQPSLGQLSDYVAVNMKGQEPGSRKPAIIFEQDKSSSATCQHLRQLPRELQKRLQRNAACRGDYTQVVNHLSMASQLPEVLQASVNDIVWRSSVTQSIKNIPSAGILKSLAYSYRKAQKTFAV

SEQ ID NO: 4139 - DNA, 1209 bp, Mus musculus
  CDS (1)..(1209)
atgcccttgatatgtgaagtggtgaaaaggagggcgctacggagcctcggcctccccgcaggttgccagctgcccgctctgaagcgcgcgtgcgtggaggggcgggaccgggcggaagcgcggtccgcacgaccgggaattgcgagcacagggtcggcacagcaccgtctgtcccaccggcgggccagcccgcccatggcgctgcaggcgctgcacagctcgggcgtgggcctgcgcaggatcctggctcacttcccggaggacctgagtttggccttcgcctacggctccgcggtgtatcgccaggcaggacccagtgcccaccaggagaatcccatgttagacttagtgttcacagtagacgaccctgttgcctggcacgcgatgaacctgaagaagaattggagccactactccttcctcaaactcttggggcccaggatcatctcctccatccagaataattacggtgccggagtctacttcaaccccctgatcaggtgtgacgggaagcttatcaagtacggggttattagcactggcacactgattgaggacctcctgaactggaataacctatatatcgccggacgcctccaaaagccggtgaagatcgtatcgatgaatgagaacatggctcttagagccgccctggataagaacctgaggagtgccgtgaccaccgcctgcctcatgctacctgaaagcttctccgaggaagacctgttcatagagatagctgggctctcctactcaggtgacttccgcatggtgattggcgaggaaaaatcaaaagtgttgaacatcgtgaagcccaacgtaggccatttccgagagctctatgagagtatattacagaaggacccccaggtggtgtataagatgcatcaaggccaactggagatagataaaagcccagaaggacagttcactcagctaatgacactgcccagaaccctacagcagcaaatcaatcacatcatggaccctcctgggagaaacagagacgtggaagagactctgctgcaggtggctcaggaccccgactgtggagatgtggtgcgactagcgatctcatcaatcgtcagaccttccagcatcaggcagagcactaaaggcctttttactgctggtatgaagaagtctgtgatttatagttcacggaaactgaacaaaatgtggaaagggtggatgagaaaagcgtcctga

SEQ ID NO: 4140 - protein, 402 aa, Mus musculus
MPLICEVVKRRALRSLGLPAGCQLPALKRACVEGRDRAEARSARPGIASTGSAQHRLSHRRASPPMALQALHSSGVGLRRILAHFPEDLSLAFAYGSAVYRQAGPSAHQENPMLDLVFTVDDPVAWHAMNLKKNWSHYSFLKLLGPRIISSIQNNYGAGVYFNPLIRCDGKLIKYGVISTGTLIEDLLNWNNLYIAGRLQKPVKIVSMNENMALRAALDKNLRSAVTTACLMLPESFSEEDLFIEIAGLSYSGDFRMVIGEEKSKVLNIVKPNVGHFRELYESILQKDPQVVYKMHQGQLEIDKSPEGQFTQLMTLPRTLQQQINHIMDPPGRNRDVEETLLQVAQDPDCGDVVRLAISSIVRPSSIRQSTKGLFTAGMKKSVIYSSRKLNKMWKGWMRKAS

SEQ ID NO: 4141 - DNA, 990 bp, Anopheles gambiae str. PEST
  CDS (1)..(990)
atggcaccgatgttcttccggttgctgtccaagtttccgcaaggcttttccttctgctttgcgtacggatccggcgtaaagcagcagctgggctacgaatccgttcgctcgaagcgcaacatgatcgatctcatatacgtggtagacaatgcacaccgctggcacacggcaaatctggaccaaaactttgagcactattccagcatgcgcctgctcggcggagggctgatcgccaagtaccaggaatcgttcggtgctcgggtgtacttcaacacgctcgtgcaaattcccgaggaagacgtgatcatcaagtacggcgtcgtgtctacgaaggatctgctcgaagacctgacggattggcgctgtttgtatctggccggacggctgcacaagccggtcgagatcatacggaacgcatccagctcaaaaattcagaacgcaatggagcaaaaccttcgctcggcggtgcatgctgcgttgctgctgcttccggagaagtttaccgagtttgagctgtatcgggcaatttcaaacctcagctacagtggcgactttcggatgatttttggcgagaacaaggacaaggtcaataatattgtgcggcctcagctggagaactttcgcaacctgtattcagccacgttcgaggagttccgtggctgcctggagctaccgatcgctgggagcgacaatcaaatctgcacacaggaccttgcggaacccacgattctggctcacctgaacgggctgcccaagtggcccatacgtttgatcgtcgagcggcagacaagcgggcgctacagacaggacacggaagacatactaataggcgtgtcgcgtgccacaaactaccagtccattgtggcttcgtgtctccgttcgattgtttggtcgagtagcgtttggcaatcgattaaaaatatacccacggccgggtttgtcaaatccgtacgctacagttgggccaaggcgttgaaaacatttagctag

SEQ ID NO: 4142 - protein, 329 aa, Anopheles gambiae str. PEST
MAPMFFRLLSKFPQGFSFCFAYGSGVKQQLGYESVRSKRNMIDLIYVVDNAHRWHTANLDQNFEHYSSMRLLGGGLIAKYQESFGARVYFNTLVQIPEEDVIIKYGVVSTKDLLEDLTDWRCLYLAGRLHKPVEIIRNASSSKIQNAMEQNLRSAVHAALLLLPEKFTEFELYRAISNLSYSGDFRMIFGENKDKVNNIVRPQLENFRNLYSATFEEFRGCLELPIAGSDNQICTQDLAEPTILAHLNGLPKWPIRLIVERQTSGRYRQDTEDILIGVSRATNYQSIVASCLRSIVWSSSVWQSIKNIPTAGFVKSVRYSWAKALKTFS

SEQ ID NO: 4143 - DNA, 1674 bp, Neurospora crassa
  CDS (1)..(1674)
atggctagcagaggggtcctcccccaaatcctcacgggtcggctcaacccgcgcgccccatccttgctcgctcgcgccagccctttccgctcccaatcggccttgcccccaagttcgctatactatcagagacacactcccctattacggcgcagatacgccacggcacgcgagaacaacggcgcggccgttcaggcgaaggacgccaaggagaatgtggagcacgaagacgccgcaaacgccgccgcggatgcggcatccaaggacacaaagtccaagcaggccgttttaaacgaggcttccagctcttctgcgtcctccagcaccacaactctccacgagacgaatgattgggagacgaacgtgaacttgaacatcgactcgttcaagcaactaccccacgcgaattttggcgtcaaccagttcattcccttcgatcccgagttcagggaggtccttaagcaaataccttgggagttccgggccccaatccgctacgcgttcgcctacggctctggcgtcttcccgcaatccaagtctagtggcaaagtgattacggacgaagagctgcgcaagattcaccccaaggcgcccgaaggcgtcaagagagctcaggatggaacgcccaagatgatcgactttatttttggcgtcacccatacgcaacattggcattccctcaacatgaagcagcaccgagagcactactcggcattggcgagcctgggctcgggtgcggtctcctacgttcaggacaagatgggcgctggagtatactttaacccctacgtcgttgtcaatggcattttgatcaagtatggcgttgtacaactggatacgctagagcgggatctgacccagtgggatactctttatcttgctggacgactgcacaagcctgtcaagattctgcgcgacgatcccaagattcgcttggcaaaccagatcaaccttctgtccgctcttcggacagccctgctgttgctgccacccaagttcaccgaagacgagctctttgctactattgctggcatcagctacctcggcgaccctcgcatgtctcttcccactgagaacccaagcaaggtgaagaacattgtcggcaacaacatgaccaacttccgccgcctgtatcttcctctgattgagacgctaccaaacttggagtacaatgatgccggcgccaccgagagggattggatctggaatgacaagagcctcaatctcgtgcaagacatggatcctgtcaagcgcggaaacatggttcgccggttgcccaaggctttccgatcgaagctctacttcgagtaccagaagaagtttgccatcccccaactcgactttaacaagatgatggaggaaagtcaaaacgaggacgccatttcgttcaagcgtcgccagggtggaggcttcgagcagcgcattgccagcgacgaccctgcggagcttcgcaaacaggtccggagcgtcatcaagaagaccatcaactggccagccaccacacagtctctcaagggccctcttaccagcggtttcaagcgcacgatacgttacctctcggaaaagatggataagtaccgtcaaggacgtgacgccgaaaaggccaagaccgcgactgctgaggataagcccagcgaaaggtcggaggtcgacagcaaggcagagaagaagtag

SEQ ID NO: 4144 - protein, 557 aa, Neurospora crassa
MASRGVLPQILTGRLNPRAPSLLARASPFRSQSALPPSSLYYQRHTPLLRRRYATARENNGAAVQAKDAKENVEHEDAANAAADAASKDTKSKQAVLNEASSSSASSSTTTLHETNDWETNVNLNIDSFKQLPHANFGVNQFIPFDPEFREVLKQIPWEFRAPIRYAFAYGSGVFPQSKSSGKVITDEELRKIHPKAPEGVKRAQDGTPKMIDFIFGVTHTQHWHSLNMKQHREHYSALASLGSGAVSYVQDKMGAGVYFNPYVVVNGILIKYGVVQLDTLERDLTQWDTLYLAGRLHKPVKILRDDPKIRLANQINLLSALRTALLLLPPKFTEDELFATIAGISYLGDPRMSLPTENPSKVKNIVGNNMTNFRRLYLPLIETLPNLEYNDAGATERDWIWNDKSLNLVQDMDPVKRGNMVRRLPKAFRSKLYFEYQKKFAIPQLDFNKMMEESQNEDAISFKRRQGGGFEQRIASDDPAELRKQVRSVIKKTINWPATTQSLKGPLTSGFKRTIRYLSEKMDKYRQGRDAEKAKTATAEDKPSERSEVDSKAEKK

SEQ ID NO: 4145 - DNA, 1614 bp, Magnaporthe grisea 70-15
  CDS (1)..(1614)
atgctacaggccttgcgctggaggggcgcaagccttacacgtaccctcatcgtcaatcagagactgccgactgcgtctacgtccaggccgacatacttcgcataccgactccttaccccaactcagggcggcacatcgacgcgcgccttctcgagttccacgagcgatgcttcgtccacctcaaaaccagaatcgaaaaatgcaagtcgaacaaccggttcgcagaggtcactcgcgcaagagcagaccctggagtgggaggataaggtcaactataatgtggtagacaagttcagcgacctgccctaccggcacttggggtacaaccagcacatgatcatcaacgaggagttcaaaaaggccctaggcgacatcgtcaagtccttccaagcgcccattatatacgccttcgcatatggctctggagttttcccacagtcaaagctcctcgggaaggcacctagtgacgagctcctccgatcagtacacacaaagccggatccggcaatcgtgcgcgcccagggagagagccccaagatgatcgacttcatctttggtgtttcccacacccagcactggcactctctcaacatgaggcagaaccgtcaccactacagcgcagtggcaagcctcggctctgggtttgttagccgtgttcaggatcgctacggcgctggcgtctacttcaatccatatgtgaacgtgaacgggacgctgattaagtacggcgttgtaaacgtcgacacgctctgccgggatctgaccgagtgggatacgctgtatctctctgggaggctgcacaagcccgtcaagatcatccgcgacaacgcgcgggtccggctggcaaaccagacaaacctggtcgcggccatccggaccgccctgctcatgctccccgaagagttcacagagcaggagctctactcgctgattgcaggtctcagttacctgggtgacccacgaatgcgcttccccaccgagaacccgcgcaaggtcggcaatattgtcaacaacaacaagatacacttccgcaacctctacgcacctctcatccgcgtgcttcccaacgtgaggtttttggttgacgatcccgagacggccgacccagctcaggatctgcgcatgaggcaggcaatgtcggacgagacacgtggcaatatggtgcgcagactacctaagcagttccggtcaagggtctacttccagtatcaaaagaagtggcagatctcgcgggcggacttcaatgcagccaccgagaacctacacacggaggaaggtggcatcacctttgggacccggcttggtggcgagttcgaccagcgcatcgccaaggacgacgaggccgagcgtcgggagatcttgagggccgtcatcaagcagaccaccagctggcccagcactgcgcagtcactgaagggcatcgtcatgtccgggttcggcaggtcttggcggtacttaggcgagaagatgtccaagtaccgcgagggcaagaagcctctgccggcaccggagactgatggcgggaaatccgatcccaaaagcatttcgagctcaagtagcgagtccctttcggaagaaaagacccaagacgcgcacaagcccaaatcccagtga

SEQ ID NO: 4146 - protein, 537 aa, Magnaporthe grisea 70-15
MLQALRWRGASLTRTLIVNQRLPTASTSRPTYFAYRLLTPTQGGTSTRAFSSSTSDASSTSKPESKNASRTTGSQRSLAQEQTLEWEDKVNYNVVDKFSDLPYRHLGYNQHMIINEEFKKALGDIVKSFQAPIIYAFAYGSGVFPQSKLLGKAPSDELLRSVHTKPDPAIVRAQGESPKMIDFIFGVSHTQHWHSLNMRQNRHHYSAVASLGSGFVSRVQDRYGAGVYFNPYVNVNGTLIKYGVVNVDTLCRDLTEWDTLYLSGRLHKPVKIIRDNARVRLANQTNLVAAIRTALLMLPEEFTEQELYSLIAGLSYLGDPRMRFPTENPRKVGNIVNNNKIHFRNLYAPLIRVLPNVRFLVDDPETADPAQDLRMRQAMSDETRGNMVRRLPKQFRSRVYFQYQKKWQISRADFNAATENLHTEEGGITFGTRLGGEFDQRIAKDDEAERREILRAVIKQTTSWPSTAQSLKGIVMSGFGRSWRYLGEKMSKYREGKKPLPAPETDGGKSDPKSISSSSSESLSEEKTQDAHKPKSQ

SEQ ID NO: 4147 - DNA, 1527 bp, Gibberella zeae PH-1
  CDS (1)..(1527)
atggcctcaattggcctcaggtcctccgcgaccactcgagccataacccttcgatcctctcactcccgcctcctcccactctaccagcgcaaactaccacaacgacaattttcctcctcaacaccacgatgggactcgtcaaaaccctctaccaacagctcggcaagctcggaagagtccatcgccagcagcgcatcctccgaaccaaaagccagcaagctcaacatttttagcacggaatgggaagacctcgacacaaagatcagcagcttttcggatcttccgcaccggctgtttggcgcaaaccagcacatggtcattaactacgaactcaaggaagctttgcgcctcatgctgcgccagttcaacgcgcccatcgtttactctttcgcttacggctctggtgtctttcctcagtctgcttccaaggccagcatatccgaggccgactttcgagctgttcacccaagtcccccagaggcgctgatcaagtcgcaaaagggttcgccaaaggttctcgattttatctttggtgtatcacacgttgagcattggcattcgatcaatatgaagcaaaaccgtcatcactactctggtcttgcgtcactgggatcaggcgttgtgtcgcgcgtggggaattggggtgctggcgtctacttcaaccccttcgtagaagtcaacggtatgcttatcaagtacggcgtaacgagtatcgacaacctcgtccacgatctttcttcctgggacagcttgtatcttgctggtcgtcttcaaaagcccgtcaagattcttcgcgaccatccccgtgtccgactcgccaaccagcacaacctcatcgccgccctccgaaccgctctgctcctcctacctcccaactttacagaagtcgagctatacagcaccattgcagggctcagctacctcggtgatcctcgcatggctctccccacagagaacaagagcaaggtgacaaacattgtcgacaacaacattgttcacttccgccgcttgtacgcgccactcgtcaagacgctccctaacgtcgactttactggaccctgccgcatcgacgacactgattggatcatgaatccggatcccgacaagggacttcagcaggacatggaccccaagcgtcgcggcaacatggttagacgcctaccccagactttccgatcacgtctctatttccagtaccagaagcgattcggtattcctcgcggggagttcaacgagctcatgaaggcctcaacggataatgatggcactgccgtgaagaagatgcagggtggtgactttgagcgccgcattgccaccgacgacccccagaagcttcaagagacagtgcgtgtagccatcaagcagacagtgaactggcccagcacagtacagagtgtcaagggtcttttgatgggtggtgtatcaagaacaatgcgatacttaggcgaaaagtactccaagtataaaaaagacaaagtggacaaaaaggtgaaacaactagccgacaagtcagaaaagtcagaatga

SEQ ID NO: 4148 - protein, 508 aa, Gibberella zeae PH-1
MASIGLRSSATTRAITLRSSHSRLLPLYQRKLPQRQFSSSTPRWDSSKPSTNSSASSEESIASSASSEPKASKLNIFSTEWEDLDTKISSFSDLPHRLFGANQHMVINYELKEALRLMLRQFNAPIVYSFAYGSGVFPQSASKASISEADFRAVHPSPPEALIKSQKGSPKVLDFIFGVSHVEHWHSINMKQNRHHYSGLASLGSGVVSRVGNWGAGVYFNPFVEVNGMLIKYGVTSIDNLVHDLSSWDSLYLAGRLQKPVKILRDHPRVRLANQHNLIAALRTALLLLPPNFTEVELYSTIAGLSYLGDPRMALPTENKSKVTNIVDNNIVHFRRLYAPLVKTLPNVDFTGPCRIDDTDWIMNPDPDKGLQQDMDPKRRGNMVRRLPQTFRSRLYFQYQKRFGIPRGEFNELMKASTDNDGTAVKKMQGGDFERRIATDDPQKLQETVRVAIKQTVNWPSTVQSVKGLLMGGVSRTMRYLGEKYSKYKKDKVDKKVKQLADKSEKSE

SEQ ID NO: 4149 - DNA, 1113 bp, Apis mellifera
  CDS (1)..(1113)
atggaaaaattgataggaattcatcaattaaaagatatacttaaaaattttccaagaaatataaagttttgttttgcatatggatctgcagcatttaaacaattaaacaatgaatctaacaatatggtggatcttatatttgttgttcgtaatgtaaatcaatggcatgctgaaaatttaaaacttaatcctaaacattatgctcaaccattaagatttcttggacataaagcaattactaatgtacaagaaaaatggggtgctaaagtatattataatacattagttaaaatgaaagaaggatatactatcaaatatggtgttgtttctgaagtatcattagtagaagatttattagattggactgatatatatttagctggaagattacataaaccagttaaaatacttatggaaccaaacgaatattctcaattaactacagctttagtacaaaatttacattcagctgtacatgcagctttattattacttccacagcattttacagaaattgatttttataaaactatcactggcttatcttataatggtgatttccgaatgacttttggtgaaaataaagaaaaaattaataacattgttctgccccagttgacatactttaaacaattatatagtccaattttacaacattttgaaaattatgttgatattccaaaatctgacaaaatggctgtcatatgccatcaagatataagtcctgcaacaaaaatacatcacttaaatcaattaccaagaataccacaagttaatcttgttagagcatggtctcaaggtccaagatcaaaagatactgaagattgtttacgtgcaatagcttatgatcctgattgtggagaaatattggaagaatgtttaaaagaaattatatggagatctagtatttctcaaagtttaaaaggaattgcaactgctggatttgtgaaatctattcaatacagtacaacaaaaataatgaaaatgttacaaacaagtccacagataacttctcttccaaaactagaatcaagtcaaagtaaagttgaaagaatcatggaaagtgtgaagaatgaaactcaatcaaaggaaacagacaaacgcgtagaatag

SEQ ID NO: 4150 - protein, 370 aa, Apis mellifera
MEKLIGIHQLKDILKNFPRNIKFCFAYGSAAFKQLNNESNNMVDLIFVVRNVNQWHAENLKLNPKHYAQPLRFLGHKAITNVQEKWGAKVYYNTLVKMKEGYTIKYGVVSEVSLVEDLLDWTDIYLAGRLHKPVKILMEPNEYSQLTTALVQNLHSAVHAALLLLPQHFTEIDFYKTITGLSYNGDFRMTFGENKEKINNIVLPQLTYFKQLYSPILQHFENYVDIPKSDKMAVICHQDISPATKIHHLNQLPRIPQVNLVRAWSQGPRSKDTEDCLRAIAYDPDCGEILEECLKEIIWRSSISQSLKGIATAGFVKSIQYSTTKIMKMLQTSPQITSLPKLESSQSKVERIMESVKNETQSKETDKRVE

SEQ ID NO: 4151 - DNA, 1659 bp, Ustilago maydis 521
  CDS (1)..(1659)
atgttgtccgtcgtacagaggagctgttgcacgcgaagtaccgtggcgcactcatcacggtggctcccctccaccaagcgccgaccagcttacacatccttgcttgaccttgactactcgtaccctgtgcataaaacaaccgacgtcagcttccgtatcaagagcgccttttcctcatcatcatcgggcagggtggcgaccacatcacgatcatccccagccaacgcagcccaacgtctcgtcccaacaagccctttctctcagactaaattcccaccgccctcttttccaccctcctttggctcaaatcagctcgttccagtctcggacgagacccatcaccgtctccatagcatccttgcatgctttgatgcgcccgttcgattcgcgtttgcatatggctcgggcgtcttttcccagaccgtggccggcccggagcattccaaaaggccgcaaactagagacggcaaaaagatgatcgactttgtcatggccgttacacatccacatcactggcactcgctcaatatgacgcaacatccgagccactattccatgcccagtcggctgctagggagtattggcatcggactggtgcagcaaaggggggcaaagatatggtacaatccctacatcaagctggaggatgagctcatcaagtacggtgtcatcagtgtcgacgacctttgcgccgatctgcttgactgggaaacgctctacgtgagtggacgcatgcataagccggttgccttgatcacatcagatgccagggtgcggttggcacagcaagtcaacctcgcctcagcgctgcgcactgcacttctattgctgccaaacgagttcaccgaggtggaactctacacacgcatcgcctcgctcagctacacgggtgacttcagaatgtcggtgcccggaggcgagaatttgaacaaggtgcgcaacattgtgctcaaccagcgcgacgaattccgacgcctctatgctggcctgatgcgcaacttgggtacgctttcgatcgaacaagtcagggaaaaccgcttcaagattgtgcaggacaactcggtctctacgcgtgcctcatacgctgctcggttgcccaaatgtctccgccaaagggtgcaagaccactacactttgcagccgcatttggatccagcatttctgaagctttcgctctccaagacgctcaacacggtgccacgaacaccttcgcatatcgaaagggaaaagacgctcaacgacttctggcgcgcagcagtgcagagagacgatttcggcgaggtgctgctaaaaaacattgcgcaaacggtcaaaggtccttcatggtcacagtcgatcaagggcatctatactgccggcttcacgagaacaatccgatatgtcggtgcaaaaattggcaaggtaagtagtcttgaacttatgaaagcagagcgatccggcgctggcatactgatactgtcactgggctttccgcgcgaatctctctgcgctgccttgcacgggctgcacagtactttgaaggcaaaagccagagcgacaaggcttcgtaatactactacaacaggcccacccacactcatcgcgcaaggttcaacagacaaacatgcaattgaacaatttgtgtcaagtcacaagggcagtgtcatgagtcacgagtag

SEQ ID NO: 4152 - protein, 552 aa, Ustilago maydis 521
MLSVVQRSCCTRSTVAHSSRWLPSTKRRPAYTSLLDLDYSYPVHKTTDVSFRIKSAFSSSSSGRVATTSRSSPANAAQRLVPTSPFSQTKFPPPSFPPSFGSNQLVPVSDETHHRLHSILACFDAPVRFAFAYGSGVFSQTVAGPEHSKRPQTRDGKKMIDFVMAVTHPHHWHSLNMTQHPSHYSMPSRLLGSIGIGLVQQRGAKIWYNPYIKLEDELIKYGVISVDDLCADLLDWETLYVSGRMHKPVALITSDARVRLAQQVNLASALRTALLLLPNEFTEVELYTRIASLSYTGDFRMSVPGGENLNKVRNIVLNQRDEFRRLYAGLMRNLGTLSIEQVRENRFKIVQDNSVSTRASYAARLPKCLRQRVQDHYTLQPHLDPAFLKLSLSKTLNTVPRTPSHIEREKTLNDFWRAAVQRDDFGEVLLKNIAQTVKGPSWSQSIKGIYTAGFTRTIRYVGAKIGKVSSLELMKAERSGAGILILSLGFPRESLCAALHGLHSTLKAKARATRLRNTTTTGPPTLIAQGSTDKHAIEQFVSSHKGSVMSHE

SEQ ID NO: 4153 - DNA, 1092 bp, Gallus gallus
  CDS (1)..(1092)
atggcgctgccggtgctgtcgagctcgggggtgaagttccggcgggtcctggctcatttccctcaggagctcagcctggcgttcgcctatggctccggcgtcttccggcaggagggggcctcggccgggcacagcgaggtgagcgcggcgggcggctgggcgggcgcaggccgctgtggtcgcggggtcgtgtgttgtgtgctgccgaacaatatgctggacttcgtgtttgcagttgatgactcggtgacctggcacatgatgaacttgttaaagaacaagagtcattactctttcctaaaagtgtttgggccaaaacagataagtaatatacagagctatggagcaggaatttactacaatactttagtgccgtgcaatggtaggatgataaagtatggtgtaattagcactgataccctgattgatgatttacttcactggaagaccctctatgttgctggacgcctacaaaaaccggtgaaaatcctgacacagaatgagaatggcaagctgcaagctgcccttgttagcaatctgaagagtgcagtcacagcagcctttctcatgttaccagaaagtttctctgaagaagacctctatatgcagattgcaggactctcctattctggtgatttcagaatgataataggagaagacagatcgaaggtgcagaacatagtgaaacctaatgttccctattttcagaagctgtacagtaacatattacaggactgccctcaagtgatcgataaaagtccagaaggtcaattcacacaactaatggctttgccaaggagtctgcagcaaaagataacttctctggtagaccctcctgggaaaaacagagatgtggaagaaattttactgcaagttgcccatgaccctgattgtggattagtggtgcatcaaggttgtcagaacggggggaatgaccctgtgccttttcagagagaaatgaccacaagatctgatgcaggacctgggcatgcccccagtaggtcctccatcatcaacatcaactgggcagagttgagcaacctggaggtcaagtacaactacatggaggactccaccattcaaaaagattga

SEQ ID NO: 4154 - protein, 363 aa, Gallus gallus
MALPVLSSSGVKFRRVLAHFPQELSLAFAYGSGVFRQEGASAGHSEVSAAGGWAGAGRCGRGVVCCVLPNNMLDFVFAVDDSVTWHMMNLLKNKSHYSFLKVFGPKQISNIQSYGAGIYYNTLVPCNGRMIKYGVISTDTLIDDLLHWKTLYVAGRLQKPVKILTQNENGKLQAALVSNLKSAVTAAFLMLPESFSEEDLYMQIAGLSYSGDFRMIIGEDRSKVQNIVKPNVPYFQKLYSNILQDCPQVIDKSPEGQFTQLMALPRSLQQKITSLVDPPGKNRDVEEILLQVAHDPDCGLVVHQGCQNGGNDPVPFQREMTTRSDAGPGHAPSRSSIININWAELSNLEVKYNYMEDSTIQKD

SEQ ID NO: 4155 - DNA, 933 bp, Candida glabrata CBS138
  CDS (1)..(933)
atgtcccagtttcttttgagagacgcccgcaggtcgctgctaagaccacttcgaaggtgctactcatcgaatttctcaaatcaggccatagagatagaatctgggttgcaaagggaattggatggcattctaaattcgtttgatgctcccattacatatgcctttggctacggttctggagttttcaaacaggtgggatatgattctactgacaaaccacagattgatctcatattggcagtagaagatccagtggagttccattccagaaacataaaacagaattctcatcattactcaagcctgaaatactttgggccaaaagtaattagtcgatttcaggatgttggagctggtatatacttcaatccctacgctaatattaatggaaatgaggttaaatatggaatagtgtcgatgaaaagaatattgaacgacttaaagaactgggagagtttttatattgctggtagactgcaaaagcccgtaaaagtactgaaaacaaaccccacaattgaacattataatcatcttaacttgaaggcagccgcaactctagccaaacatctcatatcagtcaagtatccagagaagtttgatgaatttcaattctacaaggagataacaggcttaagttacctaggtgacataagataccatttaggtgctgaaaaccctaagaaggtggagaacattgtaaccaaaaacttcgacaagtttagaatgtactataaacctatttatgaggatgttgtagttaataatggttactacttaccacctgggtttaccttaaagaattcgctgaaaaagatacagtatcgaattcagagaacaagcctaactcaaatgttgaaaggtgttgcaacagctggtattacaaaatctgtcaaatacgcatgggctaaaagaatgaagagtcgctcaaaatag

SEQ ID NO: 4156 - protein, 310 aa, Candida glabrata CBS138
MSQFLLRDARRSLLRPLRRCYSSNFSNQAIEIESGLQRELDGILNSFDAPITYAFGYGSGVFKQVGYDSTDKPQIDLILAVEDPVEFHSRNIKQNSHHYSSLKYFGPKVISRFQDVGAGIYFNPYANINGNEVKYGIVSMKRILNDLKNWESFYIAGRLQKPVKVLKTNPTIEHYNHLNLKAAATLAKHLISVKYPEKFDEFQFYKEITGLSYLGDIRYHLGAENPKKVENIVTKNFDKFRMYYKPIYEDVVVNNGYYLPPGFTLKNSLKKIQYRIQRTSLTQMLKGVATAGITKSVKYAWAKRMKSRSK

SEQ ID NO: 4157 - DNA, 1182 bp, Kluyveromyces lactis NRRL Y-1140
  CDS (1)..(1182)
atgttgaggggtaaagttgcaaacagtgttaagaatgtaccaggagtgaagtcggtgaacaggcttgtgcgtttccaatcaggaaacaatctgctgcttaaaaccgagacttcaagcacacaggaggttattcatcctaaccccaataagttcagacgtagggcgatcgctaagctgaacgaggacatcgttgctgagaaaacaggcgatgctgatttatacctgcttgaaaaagggctcaaaaagatcgatgaacgaacctcacgattcaccaactatttattcaagatcaataggttaccaccaaattatggtgataaccaactaataactgtagataagtcattagaacgtgatcttcaatcaattttgggccatttcaagtcaccgataaaatatgcattcggctatggtagtggagtctttcaacaagcgggatattccaaatcttctgagaaacctcagatcgatatgatcttcggtgtcacccatccagaacatttccactcgttaaatatgaggcagaatccaggccattattcttctcttcgctactttggttcggagtttgtgtcgaaatttcaagaagtcggtgccggagtctacttcaatccatttattaacatcaacggccatgatgtaaaatatggggtcgtgtccatgtctagactcttgaaagatttagccacctgggacacattttaccttgcaggtaggttgcaaaaaccagtcaaagtgttgaaaaacgatctgcgggtacaatactggaatcaattaaacttgaaggctgctgcaacacttgcgaaacataaactttcaaaaaaattcaacggcgattcattcactgaatttgacttttacaaggaaattacggcattaagttatcttggtgatataagatataaactgggtggtgagaatccaaagaaaattgacaatatcgtggagaaaaaccttgataacttcaaattctactacaaaccaatttataaggatgttttcttgaacaattcgacgtatctaccccagaacttcaccttggataacgctactgatcagttaacagaaagaatcagccgaggatcgactattcaaactgcaaaaggcgttttatctgctggattgatgaaatcaataaaatacgcttgggcaaaaaagttaaaggcaattaaatcgcactga

SEQ ID NO: 4158 - protein, 393 aa, Kluyveromyces lactis NRRL Y-1140
MLRGKVANSVKNVPGVKSVNRLVRFQSGNNLLLKTETSSTQEVIHPNPNKFRRRAIAKLNEDIVAEKTGDADLYLLEKGLKKIDERTSRFTNYLFKINRLPPNYGDNQLITVDKSLERDLQSILGHFKSPIKYAFGYGSGVFQQAGYSKSSEKPQIDMIFGVTHPEHFHSLNMRQNPGHYSSLRYFGSEFVSKFQEVGAGVYFNPFININGHDVKYGVVSMSRLLKDLATWDTFYLAGRLQKPVKVLKNDLRVQYWNQLNLKAAATLAKHKLSKKFNGDSFTEFDFYKEITALSYLGDIRYKLGGENPKKIDNIVEKNLDNFKFYYKPIYKDVFLNNSTYLPQNFTLDNATDQLTERISRGSTIQTAKGVLSAGLMKSIKYAWAKKLKAIKSH

SEQ ID NO: 4159 - DNA, 1248 bp, Debaryomyces hansenii CBS767
  CDS (1)..(1248)
atgattcagaccgaaattcgagtattaagatgcttatatattaatggcaagtcaagatactctacttcttctgctaatgtatattcggataaaatttataagctggtaattgatcagggttacaaagggcttgcgagacacactattcctgaaaattacggatcaaatcaaataatggccagcaagaatgacgaacaattgagtcaattgatagccaatttcaagagcccgataaaattttcgattgggtatgggtctggtgtgtttgaacaaacgggttataaaaaatccaagaaaccgcagattgatatgatccacatggtggataaaccggcagattttcacgagcagaatttggaacagttttcgggccactattcaggaatacgaatgtttggacctgccattatactgaagattcaagaatacggagcaggggtttactttaatccgtatataacgatgaataccgagtcaaagaagaataatataatcaagtatgggataatatctgttgaaaaaagtttgattgatttgagcgaatggtcctcactatacatagcaggaagactacagaagcctgtcaaatatttgaaggatgctgacccagcaataaaattcatcaatcagtacaatttgaaaaacgccatgtcggtaggattatttttacttaaaccgtctgagtttaccgaaatacagttatacgaaacgatagccaaaatatcgtacatgggagacccccggatgctaattggcggtgaaaacccaaataaggctagaaacattgttggtaaacaatttgagaattttcagaagctttacaacccattattgaactttttcattgaaaataatattttggtcgaacttcaacctgatggttccaaaagacggtttaagaagaacttagacaacgacaaaacttccaaaataatcggaagcttgccgttgcagtttagacgaaaattatataagcgttatacgtcaaaatttgccgaagaattatcgcaggatctgcaagctgaagccgtcatcaacggactccacataaacacaaatggcgaaataggtccctttacaaaagccattgccatggacccccaattacggaagaatctcgtgaacagcatcaagctcacagttacattcccggctctcatacaaacgatcaaaggcatatttagtgctgggattattaagtcaattaactatgcgtgggaaaagcgcacaaagtaccgtcatggttag

SEQ ID NO: 4160 - protein, 415 aa, Debaryomyces hansenii CBS767
MIQTEIRVLRCLYINGKSRYSTSSANVYSDKIYKLVIDQGYKGLARHTIPENYGSNQIMASKNDEQLSQLIANFKSPIKFSIGYGSGVFEQTGYKKSKKPQIDMIHMVDKPADFHEQNLEQFSGHYSGIRMFGPAIILKIQEYGAGVYFNPYITMNTESKKNNIIKYGIISVEKSLIDLSEWSSLYIAGRLQKPVKYLKDADPAIKFINQYNLKNAMSVGLFLLKPSEFTEIQLYETIAKISYMGDPRMLIGGENPNKARNIVGKQFENFQKLYNPLLNFFIENNILVELQPDGSKRRFKKNLDNDKTSKIIGSLPLQFRRKLYKRYTSKFAEELSQDLQAEAVINGLHINTNGEIGPFTKAIAMDPQLRKNLVNSIKLTVTFPALIQTIKGIFSAGIIKSINYAWEKRTKYRHG

SEQ ID NO: 4161 - DNA, 1527 bp, Yarrowia lipolytica CLIB99
  CDS (1)..(1527)
atgctccgagtggttcgacacagcggcgctctgcgactcggccgagcaggcctccacaactattcgcccctgctcaactcgcaacaaccgcacagcaccgacaagcagcagaatgtgcctgaatcgtttctcaagggccagaaacagcgagagaaccacacaaccaaagagggacggtcgcccgggccccattccgatctcgagcccctggaagacacaaagtactcggcggcagcccgacactacatcagagagaagagagccgaggaacatctcaagaacagccccgaggccgaagaaccactaaacgacgcccggctgcagtttgccaaggacccctccatcaagcgatacctggacgccaacctgggctccatttctgcgctcaccaacttttcggacctacctcagaactttggaagcaaccagcagattcctctggacgcagacctccgaaccaccctgcgccaagtgctgtggaccttcaaggcgcccatccggtactcgtttgcgtacggcagcggagtgttcagccagggcaaagagtccaatgcctccaaaccccaggtcgatctcatctttggagtcaagtaccccaaccactggcactccctcaacctgaagcagaacccccaccactactcgggtctcaagtatcttggatctgacgcaatcgcagccatccaggagaccgctgctggctgttatttcaacccctacgttgagatcaacggcctgaagatcaagtacggtgtggtgtccatggaaactctctcgcgtgatctctctgactggaacaagctttacatggcgggccgaatgcacaagccagtgcggatcctgcgagatgacccccagatgcggtttgttaaccaggccaacctcatcagtgcgctccgaaccgcgctgcttctgctgcccagacacttttccgaactggatctttacaaaaccattgccggtatttcctacatgggcgacccccgaatgacttttggtgagaacccccacaagatcagaaacattgtcgagaaccagtttgccaacttccgacggctctactcgcccatcatggacaccctccccaacctcagtctacagagcgtggttggaaagaagctggacgacaactcgaaccttgagattggagagctggaacaggacatggacgctacccgacgaggtaacatggttgttcgtcttcccgcagagttcaagagcaagctctacactcgatatgcacacaaggtcgaccgatcgacgcttcccgacgacccccacttcatggaggctctctctcgaggagatgcctctggctccggctccatcgccaacaaccgatgttcggagtttgatcgaatcattgcatccgatccgcatcttgaaagagaggctgcacgtatcattcgacacacggttggatggacatcggccatgcagactttcaagggcattttcacggcgggtctcgccagaagcgcaaagtacagtctcgagaagatccgcaaggccaacaaggctaaatag

SEQ ID NO: 4162 - protein, 508 aa, Yarrowia lipolytica CLIB99
MLRVVRHSGALRLGRAGLHNYSPLLNSQQPHSTDKQQNVPESFLKGQKQRENHTTKEGRSPGPHSDLEPLEDTKYSAAARHYIREKRAEEHLKNSPEAEEPLNDARLQFAKDPSIKRYLDANLGSISALTNFSDLPQNFGSNQQIPLDADLRTTLRQVLWTFKAPIRYSFAYGSGVFSQGKESNASKPQVDLIFGVKYPNHWHSLNLKQNPHHYSGLKYLGSDAIAAIQETAAGCYFNPYVEINGLKIKYGVVSMETLSRDLSDWNKLYMAGRMHKPVRILRDDPQMRFVNQANLISALRTALLLLPRHFSELDLYKTIAGISYMGDPRMTFGENPHKIRNIVENQFANFRRLYSPIMDTLPNLSLQSVVGKKLDDNSNLEIGELEQDMDATRRGNMVVRLPAEFKSKLYTRYAHKVDRSTLPDDPHFMEALSRGDASGSGSIANNRCSEFDRIIASDPHLEREAARIIRHTVGWTSAMQTFKGIFTAGLARSAKYSLEKIRKANKAK

SEQ ID NO: 4163 - DNA, 1014 bp, Canis familiaris
  CDS (1)..(1014)
atggcgctgcaggcgctgcagagctcgggggtggccttccgcaggatcctgtctcacttccccgaggagctgagcctggctttcgcctacggctccggggtgtaccgccaggtggggcccagtgcagaccagaagaatgccatgctggactttgttttcacagtagatgaccctgttgcatggcattcaaagaacctgaaaaaaaattggaaccattactctttcctgaaagttttggggcccaagattatcaccactgtccagaatgactatggtgctggagtctactataacccattcatcatgtgtgatggtaggcttatcaaatacggagtcattagcactaacattttgattgatgatctcctcaactggaataacttatatattgctggacgactgcaaaaaccggtgaaaatcatagcaatgaatgaaaatattgctcttaggtcagccctcgataaaaatctgaggagtgctgtgaccacggctttcctcatgctccccgaaagcttttctgaagaagacctctttatagagattgccggactctcttattcaggcgactttcggatggtgtttggagaggataagacaaaagtgttgaatattgtgaagcccaacatagcccactttcgtgagctgtatggcaacatactgcaggacaatccccaagtggtgtataaaatccagcaaggcagactggagatagataaaagcccagaaggacaattcactcagctaatgacattgcccaaaaccttacagcgacaaataaatcatattatggaccctcctggaaaaaacagagatgtggaagaaactttattacaagttgctcatgatcccgactgtggagaagtggtgagactagggctttcagcaattgtgagaccttctagtatgaaacagagcaccaaaggcattttcactgctggcatgaagaaatcagtggtttatagttcactaaaactacacaaaatgtggaaaggatggctgaggaaaacatcctga

SEQ ID NO: 4164 - protein, 337 aa, Canis familiaris
MALQALQSSGVAFRRILSHFPEELSLAFAYGSGVYRQVGPSADQKNAMLDFVFTVDDPVAWHSKNLKKNWNHYSFLKVLGPKIITTVQNDYGAGVYYNPFIMCDGRLIKYGVISTNILIDDLLNWNNLYIAGRLQKPVKIIAMNENIALRSALDKNLRSAVTTAFLMLPESFSEEDLFIEIAGLSYSGDFRMVFGEDKTKVLNIVKPNIAHFRELYGNILQDNPQVVYKIQQGRLEIDKSPEGQFTQLMTLPKTLQRQINHIMDPPGKNRDVEETLLQVAHDPDCGEVVRLGLSAIVRPSSMKQSTKGIFTAGMKKSVVYSSLKLHKMWKGWLRKTS

SEQ ID NO: 4165 - DNA, 1182 bp, Cryptococcus neoformans var. neoformans JEC21
  CDS (1)..(1182)
atggcgagacgtataacatcaatttctggaaacacattgtatggaactgggtctcgtactgcagttcttacatacgccctcttcgtccgttcatattccgctccagcgcgcgaaacagtcaccaaaccgactgcttacgacagactccggcctgttatatcgacattccaagcgccgatagattgggcagcggcttatggctcgggtgtcctcccccaggcatcgtacaagcccccagcgccgggagatgcgggaccgctgacagacttgttgatctccacacccgacgcagaggctttccacaagatcaatcttgagcagaacccgagacactatcctgtgtatgctaggtggatgggtgggaagggggtaggctgggtgcaggagaagtggggagccggggtgtggtatgtgaccatggtggacattaacggcgtgaatgtcaagtacggtgttatatccactcctactttggagaaagacctgaaagaatggaccacattctacctctctggacgcttacacaagcccgtgctaaccctactcccaccaccaccatccctctattcagctctcagtaccaactctcattctgccctctctctcgctctcctcctcttaccgccctctttcacagaagatgcgctatgggaacagattgctgggctaagttactcgggtgacccgaggatgagcgtgccaggagctgaaaacccggaaaaggtgaggaatatcgtaagaggtgagggggcgagaaacgggttccgggaggtttatggtgggctgttgaaaggattaggaatcagatgggaaggcggagaaaagggcggcgaagaaacgtgggaatggaaggggaatggagaagaggtgatggttagacctgatggatcagaatacctcgtctccctcgctctgtccttgccacttccgcttcgtcaatctcttaccattcattatcctaccctctcatccgcctccgcctccagggagctctccagttgggcacctgtagttcaggactccaaattccgagccaatctctcggaagcattgcgcaaaatcatccacggtcccgctttgcgccaaagtatcaaggggctgttcactgccggcccagtgaagagtttctggtacagcttggccaaggtcgggaaatggttcaaggggagaaaaacaaagtga

SEQ ID NO: 4166 - protein, 393 aa, Cryptococcus neoformans var. neoformans JEC21
MARRITSISGNTLYGTGSRTAVLTYALFVRSYSAPARETVTKPTAYDRLRPVISTFQAPIDWAAAYGSGVLPQASYKPPAPGDAGPLTDLLISTPDAEAFHKINLEQNPRHYPVYARWMGGKGVGWVQEKWGAGVWYVTMVDINGVNVKYGVISTPTLEKDLKEWTTFYLSGRLHKPVLTLLPPPPSLYSALSTNSHSALSLALLLLPPSFTEDALWEQIAGLSYSGDPRMSVPGAENPEKVRNIVRGEGARNGFREVYGGLLKGLGIRWEGGEKGGEETWEWKGNGEEVMVRPDGSEYLVSLALSLPLPLRQSLTIHYPTLSSASASRELSSWAPVVQDSKFRANLSEALRKIIHGPALRQSIKGLFTAGPVKSFWYSLAKVGKWFKGRKTK

SEQ ID NO: 4167 - DNA, 1284 bp, Dictyostelium discoideum
  CDS (1)..(1284)
atgataaggaatttaactttattatcaaaaagttcattagatccaaaatgtttaatcttaaaacattcaaacaaaaacctcaataattatttcaaacaaataacatttcgttattatagtaaaaccaacccaatcattaaacaacaaaatcataataatattaataactataataatacaacaccagaaactcaagaaagaattaatgaattattaaaattattccctccaataaagtatggatttgcatatggttcaggtgtaatttcacaaaaaggttacaatagaaatggtgatggatcaacctcaactgaaaatccatcaaaaaaagaagaacaatcaccaatgattgatttaatatttgctgttgaaaactcaactaaatggcattctctcaatcttgtaaataatcaatcacattattcttttcttggtttgatgggtgctcatatagttgcaaaagttcaatatatgaatgctaaaatttattttaatacattattagaacataatggaattaaatttaaatatggtgttattgaatataaagatttaatagatgatttaaagaattggaaaacattatatttatcaggtagaatgcaaaaaccaattttcaatttaccaacatcaagtacagaaggattgaaagagattcaagagattaatagtgaatataatttaaaaaatgctgtaatcacatcattattaatgttacctgaaacatttacagagtatgatctttatcatacaatctcaaaactatcctatagtggtgatataagaatgaaaggtgctgaaaatccaatgaaaactcataatatcgtaattaataatattgatggttttagatcattatatttcccaatcattaatgatcatttaactcaatatttaaatgtaatcttagaaaatggtgatgaagttaattcaagtttaattttatcacaaaataataataataaaaataataataaaaatgagacaacaacaacagcagcaccaaaaatggttacattcaaatcaaaacaagatccaatgaattatttaaatttattaatgatgctaccaggaagtattaaatcaacaatgttaaaagaagttagaaataatatgaaattgatgaaatctgatgaaaaaattgatccaacaatacttcacaatttaatatttatgattgtttcaaaaagtagtttcgctcaaacagtaaaaggtgtttttactgctggtatttcaaaatccttaaattatatgaaattaaaattaaaaaaaaataaaaaataa

SEQ ID NO: 4168 - protein, 427 aa, Dictyostelium discoideum
MIRNLTLLSKSSLDPKCLILKHSNKNLNNYFKQITFRYYSKTNPIIKQQNHNNINNYNNTTPETQERINELLKLFPPIKYGFAYGSGVISQKGYNRNGDGSTSTENPSKKEEQSPMIDLIFAVENSTKWHSLNLVNNQSHYSFLGLMGAHIVAKVQYMNAKIYFNTLLEHNGIKFKYGVIEYKDLIDDLKNWKTLYLSGRMQKPIFNLPTSSTEGLKEIQEINSEYNLKNAVITSLLMLPETFTEYDLYHTISKLSYSGDIRMKGAENPMKTHNIVINNIDGFRSLYFPIINDHLTQYLNVILENGDEVNSSLILSQNNNNKNNNKNETTTTAAPKMVTFKSKQDPMNYLNLLMMLPGSIKSTMLKEVRNNMKLMKSDEKIDPTILHNLIFMIVSKSSFAQTVKGVFTAGISKSLNYMKLKLKKNKK

SEQ ID NO: 4169 - DNA, 1608 bp, Aspergillus nidulans FGSC A4
  CDS (1)..(1608)
atgaccacctacccaagagttccccctttgtccgctcagctcaatgctaacccgggtttctctgacaagctcctcttttcaagcacttcttcggggccttacgtgcggcttcgctcggcctacccgtctctcgcacggtactcacgaaggtcgggttcgttgcggtacttgtcgagcggcccaaactttcaagatgctggcctgaaactccccaaaaatcgacccatatcccacattgaccccagcgcgcattacccttatacggacactggtttattgtcatcatcgtcagcttcattttccacttcctccaagggatcagatcatggagactgggacgcaaatgcagatctgtcgtcgatatcggcgttctcggagcttccttcgaaagacttcggtatcaatcagcacatgattatcaaccaggagttcaaggaggctttgcgccaaattctttggcagttccgagccccgattaggtacgctttcgcatacggttccggtgttttcccgcagaatggcagcgcaccgggctccgatcaatgtcatccgtcagccccggcggcaatccagaacatgcaacaaggcaaagggaagatgattgacttcatctttggtgtttcttactcacaacactggcatgacttaaatcttgcacagcaccgagatcattactcgggcctaggctctctcggctcatacactgtctcccaggtgcaggacagattcggggcaggtgtctatttcaacccatatataaccgtcaatggcacattgatcaagtatggcgttgttaatatcgacacgttatgtaatgatctcagtcggtgggacactttatatcttgcgggtcgattgcaaaagcctgttaaaatcttacgggaccatccaaaggtacggcttgcgaaccagatgaatctgctgtctgcagtcagggtggctttgctactgcttccggaagaatttacagagttccaactatacaacaccatagcttcaatgagttacatgggcgacctccgcatggctttgcctgtcgaggacccgcggaaagtcaacaatatcgtttcttcgcagatggctaacttccgacggctgtatgcaccgctcatcgagaacctacccaacgttgtcttcaacgacaagcgttgctccgatctcgactggatagatgatcctgaggccaatgtgcggctctcacaagatatggatcccgtaaagcgcggaaatatggtccgccgcctaccggagtccttccgagagaggctatacttccagtaccaggcgcgcttcggcattcctcgtggtgaattcaacaagatgatgaaggaaagtaatgacaatgatccagagattgtccgccgcaggcaaggtggacagtttgaacagcgcattgctagcgatgaaggtctcaccaaagaaatccaggctgcaattacaaagacaatccgatggccaagctctgtggagacggtaaaaggcttgttcaccgcggggatatcccgaacctggcgttatatcagagcaaagcaggacaagtggaagaactctggcaagaaagcccaggaaccaagcaaagagcctacaaagttctctaagcaagaataa

SEQ ID NO: 4170 - protein, 535 aa, Aspergillus nidulans FGSC A4
MTTYPRVPPLSAQLNANPGFSDKLLFSSTSSGPYVRLRSAYPSLARYSRRSGSLRYLSSGPNFQDAGLKLPKNRPISHIDPSAHYPYTDTGLLSSSSASFSTSSKGSDHGDWDANADLSSISAFSELPSKDFGINQHMIINQEFKEALRQILWQFRAPIRYAFAYGSGVFPQNGSAPGSDQCHPSAPAAIQNMQQGKGKMIDFIFGVSYSQHWHDLNLAQHRDHYSGLGSLGSYTVSQVQDRFGAGVYFNPYITVNGTLIKYGVVNIDTLCNDLSRWDTLYLAGRLQKPVKILRDHPKVRLANQMNLLSAVRVALLLLPEEFTEFQLYNTIASMSYMGDLRMALPVEDPRKVNNIVSSQMANFRRLYAPLIENLPNVVFNDKRCSDLDWIDDPEANVRLSQDMDPVKRGNMVRRLPESFRERLYFQYQARFGIPRGEFNKMMKESNDNDPEIVRRRQGGQFEQRIASDEGLTKEIQAAITKTIRWPSSVETVKGLFTAGISRTWRYIRAKQDKWKNSGKKAQEPSKEPTKFSKQE

SEQ ID NO: 4171 - DNA, 1410 bp, Candida albicans SC5314
  CDS (1)..(1410): transl_table=12
atgattacaaaatgttatgtccaagtgttccgatatagaagagtttgtcataacaccaaatattcattcaattcggtggtgctgatcaaatggttacactcagctggctcatcattatcccaagcaaattcatcgaagacatcacagtcgtcattaacatcatcggggtttctttattatgaagatccccataggtacaacgggtcagatgttagtgctaatgcatccgaaacgacaagtactagcacagccaaaccagttattcatctggctacaccttattccgataaatattatcaaccaatcatcagtcaaggtgccaaggggtttgataagttgattatccctgttgggttttgtgctgataatcagacagtttcactagaagaagataaagagtcacccatacaacaagaccaactacaagagattgtcaattcttttgatgcgcctattgatgtatctattggatatgggtcaggaattctacctcaagatggatatgataaagataaatcaacgtcaaataatactgctaatgattcaaagcaattggattttatgtttttagtaaaagactgtgggaaatttcatcaggaaaacttgaaacaaaaccgagatcattattcgattaaatcattacgattaattaagaaggttcaaggcactaatgggatgtatttcaatccctttattaagatcaatgagaaattggtcaaatatggggttatttctagtaaatcagcattaatggatcttagtgagtggcattcgttatactttgctggtcgattacaaaagccagttaatttcattacaaccaatgatcctcgagtcaaatttttgaaccaatataacttgaagaatgccatgaccatagcgatatttttgattgatggtgaaggtaattctcgccaagcaacgtttaatgaacgacaattgtatgaacaaatcactaaattgtcgtatttaggggatttcagaatgtatattggaggagaaaatcctaataaactgaaaaatattgttgccaaacaattccatcattttaaaaagttgtatgaaccaatattacaatattttattcataaaaattttctaatcattgttgataatgatccggtcaatcgaacatttaaaccaaacttgaatgtaaataatagaattaagttgatcacggggttgcctttgaaattccgtcaacaattgtatggaaggtactatgaaaaatcaatcaaggaaattgttattgatgaccacttgctgcaaaatttaaccaaaataattagtcgtacaataattattagttcaataacgcaagcaattagaggattattatcagcaggattatttaattccatcaagtacgccgttgccaaacaaatcaaattttggacgtctaagaaataa

SEQ ID NO: 4172 - protein, 469 aa, Candida albicans SC5314
MITKCYVQVFRYRRVCHNTKYSFNSVVSIKWLHSAGSSLSQANSSKTSQSSLTSSGFLYYEDPHRYNGSDVSANASETTSTSTAKPVIHSATPYSDKYYQPIISQGAKGFDKLIIPVGFCADNQTVSLEEDKESPIQQDQLQEIVNSFDAPIDVSIGYGSGILPQDGYDKDKSTSNNTANDSKQLDFMFLVKDCGKFHQENLKQNRDHYSIKSLRLIKKVQGTNGMYFNPFIKINEKLVKYGVISSKSALMDLSEWHSLYFAGRLQKPVNFITTNDPRVKFLNQYNLKNAMTIAIFLIDGEGNSRQATFNERQLYEQITKLSYLGDFRMYIGGENPNKSKNIVAKQFHHFKKLYEPILQYFIHKNFLIIVDNDPVNRTFKPNLNVNNRIKLITGLPLKFRQQLYGRYYEKSIKEIVIDDHLSQNLTKIISRTIIISSITQAIRGLLSAGLFNSIKYAVAKQIKFWTSKK

SEQ ID NO: 4173 - DNA, 1545 bp, Aspergillus fumigatus Af293
  CDS (1)..(1545)
atgatccgccaggctctttttgcaaagactcagtcgggttcttacatgcgtttacggtctctttacccgtcaatcccgcgatggtcccaagcccggcattctttacgctctttttccaatgagtctcgttcgcgttcatcaatcgataccttcttaccctccggtaaccaagattccttaacaagaagctccaatcatcccggccatggtccctggacgccgtcgcaatctacagcgtcgttctctacctcctcctcgctctctgagccagcggattgggacgagaatccaaatctttcaatctctaccttttcagaattaccgtctaaagactttggcgtcaaccagcatatgatcattaatcaagagttcaaagaggccttgcgtcagattctgtggcagttccgcgctccgatccgatatgctttcgcctatggttccggtgtcttccctcagtccggcagtgcagccgggtccagtcaatgtcacccatcggccccggcagcgattcagaatatgcagcagggcaagggcaagatgattgattttatctttggagtatcatatactcagcattggcacgcactgaacctgagtcaacaccgtgaccattactctgcattggggtctaccgggtcttatatggtttcccaggtacaagacagatttggggcaggcgtatacttcaatccttacgtgacggttaatggtacgctgatcaaatacggagtcgtgaacctcgataccctgtgtagggatcttagtcaatgggacacattgtatctcgccggacggttacagaaaccagtgaagatcctgcgcgaccaccccagggtgcgcttagccaaccagattaacctcctgtctgcggtccgggtagcgctgctgctattgccagccgagttcagcgaattcgagctctacaccactatcgcggggatcagctatatgggagaccttcgtatgtcactaccggcggaggacccccggaaagtgcggaatatcgtctcgggccaaatggcgcacttccggcggctatatgcacctctcattgagaatcttcccaacgtcacattcaacgacaggcgctgcacggaagaagattggatcgacgaccccaatgcgaatgtccgtcttacacaggacatggacccagtgaagcggggcaatatggtacgccggttacccgaatcattcaagcagaagttgtacttccagtatcagtctcgatttgaaataccccaagtcgagttcaacaaaatgatgaaggagagcagcgacagcgactcggaagtagtgcgacggaggcagggcggtccattcgaacaacggatcgcggctgatgagaacctcaaaaaggaaatacaggcgtcaataacgaaaacgatacgttggccaagtaccgttcagaccatcaagggtttgtttacttcagggatcagcagaacctggcgctatttgagcgaaaagcaaagcaagtacagaacctcaggccggaaagctaaagcttcatccgaggagtctccttcttcgaagcacgaatag

SEQ ID NO: 4174 - protein, 514 aa, Aspergillus fumigatus Af293
MIRQALFAKTQSGSYMRLRSLYPSIPRWSQARHSLRSFSNESRSRSSIDTFLPSGNQDSLTRSSNHPGHGPWTPSQSTASFSTSSSLSEPADWDENPNLSISTFSELPSKDFGVNQHMIINQEFKEALRQILWQFRAPIRYAFAYGSGVFPQSGSAAGSSQCHPSAPAAIQNMQQGKGKMIDFIFGVSYTQHWHALNLSQHRDHYSALGSTGSYMVSQVQDRFGAGVYFNPYVTVNGTLIKYGVVNLDTLCRDLSQWDTLYLAGRLQKPVKILRDHPRVRLANQINLLSAVRVALLLLPAEFSEFELYTTIAGISYMGDLRMSLPAEDPRKVRNIVSGQMAHFRRLYAPLIENLPNVTFNDRRCTEEDWIDDPNANVRLTQDMDPVKRGNMVRRLPESFKQKLYFQYQSRFEIPQVEFNKMMKESSDSDSEVVRRRQGGPFEQRIAADENLKKEIQASITKTIRWPSTVQTIKGLFTSGISRTWRYLSEKQSKYRTSGRKAKASSEESPSSKHE

SEQ ID NO: 4175 - DNA, 978 bp, Strongylocentrotus purpuratus
  CDS (1)..(978)
atggcttcagcagttcgcatcaccaagctctacaatcgcatcctcggccacttcccccgtgagatttcgttagcgttcgcctacggttctggggctttcaagcagcttggaaatgataaaaaggataacatgcttgatttcatctttgtggtggacaaccctgaggaatggcatcggaaaaacatccaggagaatagaaagcactattcttcactagcagccctgggaccacacaggattgcatccatccaggatagactaggcgctggtgtctacttcaacactcttgttgaatgtgaaaagaggctcatcaagtatggtgtggtgaagactgatacccttgtacaagagctgatcaactggaataatctctatctgagtggaaggcttcataaaccagttcatgtaataaagagaatgcaaaatggtgccctctacaatgctatgcgtagaaatcaacagagtgctgtttacacgagtctgctactcttaccagaacgctttacagaagaagaacttttcatctccattgctggattgtcatactctggagacttcagaatggttgttggtgaaaacaagaacaaggtggcgaacatcgtgaggcccaatctaaaaacattcaggaattattatcacgatatgatggatacaactgagaacacccactggaacaagcaaagtggcataattgaacaagattgcagtccagcatccctgttctcccacatgtgtgctttaccaaagaacctacagcatcagatctgtgggttggtaggatcaaagactgaagatcatgtagatgtactaaggaggttagccagagataaggcatgcaaggagtatgtccacaaagatattggagggcatttcttgatgagactacaggtttgctgtttgcgagacttgtacaaccccggtaatggtatttcccccaagtctggtgatggcttggaaactgatgacgatctcccttaa

SEQ ID NO: 4176 - protein, 325 aa, Strongylocentrotus purpuratus
MASAVRITKLYNRILGHFPREISLAFAYGSGAFKQLGNDKKDNMLDFIFVVDNPEEWHRKNIQENRKHYSSLAALGPHRIASIQDRLGAGVYFNTLVECEKRLIKYGVVKTDTLVQELINWNNLYLSGRLHKPVHVIKRMQNGALYNAMRRNQQSAVYTSLLLLPERFTEEELFISIAGLSYSGDFRMVVGENKNKVANIVRPNLKTFRNYYHDMMDTTENTHWNKQSGIIEQDCSPASLFSHMCALPKNLQHQICGLVGSKTEDHVDVLRRLARDKACKEYVHKDIGGHFLMRLQVCCLRDLYNPGNGISPKSGDGLETDDDLP

SEQ ID NO: 4177 - DNA, 951 bp, Canis familiaris
  CDS (1)..(951)
atggcgctgcaggcgctgcagagctcgggggtggccttccgcaggatcctgtctcacttccccgaggagctgagcctggctttcgcctacggctccggggtgtaccgccaggtggggcccagtgcagaccagaagaatgccatgctggactttgttttcacagtagatgaccctgttgcatggcattcaaagaacctgaaaaaaaattggaaccattactctttcctgaaagttttggggcccaagattatcaccactgtccagaatgactatggtgctggagtctactataacccattcatcatgtgtgatggtaggcttatcaaatacggagtcattagcactaacattttgattgatgatctcctcaactggaataacttatatattgctggacgactgcaaaaaccggtgaaaatcatagcaatgaatgaaaatattgctcttaggtcagccctcgataaaaatctgaggagtgctgtgaccacggctttcctcatgctccccgaaagcttttctgaagaagacctctttatagagattgccggactctcttattcaggcgactttcggatggtgtttggagaggataagacaaaagtgttgaatattgtgaagcccaacatagcccactttcgtgagctgtatggcaacatactgcaggacaatccccaagtggtgtataaaatccagcaaggcagactggagatagataaaagcccagaaggacaattcactcagctaatgacattgcccaaaaccttacagcgacaaataaatcatattatggaccctcctggaaaaaacagagatgtggaagaaactttattacaagttgctcatgatcccgactgtggagaagtggtgagactaggcatgaagaaatcagtggtttatagttcactaaaactacacaaaatgtggaaaggatggctgaggaaaacatcctga

SEQ ID NO: 4178 - protein, 316 aa, Canis familiaris
MALQALQSSGVAFRRILSHFPEELSLAFAYGSGVYRQVGPSADQKNAMLDFVFTVDDPVAWHSKNLKKNWNHYSFLKVLGPKIITTVQNDYGAGVYYNPFIMCDGRLIKYGVISTNILIDDLLNWNNLYIAGRLQKPVKIIAMNENIALRSALDKNLRSAVTTAFLMLPESFSEEDLFIEIAGLSYSGDFRMVFGEDKTKVLNIVKPNIAHFRELYGNILQDNPQVVYKIQQGRLEIDKSPEGQFTQLMTLPKTLQRQINHIMDPPGKNRDVEETLLQVAHDPDCGEVVRLGMKKSVVYSSLKLHKMWKGWLRKTS

SEQ ID NO: 4179 - DNA, 1196 bp, Mus musculus
  CDS (82)..(801)
gaagcgcggtccgcacgaccgggaattgcgagcacagggtcggcacagcaccgtctgtcccaccggcgggccagcccgcccatggcgctgcaggcgctgcacagctcgggcgtgggcctgcgcaggatcctggctcacttcccggaggacctgagtttggccttcgcctacggctccgcggtgtatcgccaggcaggacccagtgcccaccaggagaatcccatgttagacttagtgttcacagtagacgaccctgttgcctggcacgcgatgaacctgaagaagaattggagccactactccttcctcaaactcttggggcccaggatcatctcctccatccagaataattacggtgccggagtctacttcaaccccctgatcaggtgtgacgggaagcttatcaagtacggggttattagcactggcacactgattgaggacctcctgaactggaataacctatatatcgccggacgcctccaaaagccggtgaagatcgtatcgatgaatgagaacatggctcttagagccgccctggataagaacctgaggagtgccgtgaccaccgcctgcctcatgctacctgaaagcttctccgaggaagacctgttcatagagatagctgggctctcctactcaggtttgtacagcgcctggtgggtcctccatccatcacttgcagggagttcatggcaccaacctcatgccggacagctgtttgttaggaaacttggggcgtggccacagctgttaggacatttggggtgtggtccagcacaggtatttccaaccagttaatggatgactgctgctcctccagggatcccagatggagaactaagacccaccagtgttctctacaggtaacatagtgccctgcccagggctgtttaaaaatgtgttgcaccaccatatccttagtaggccacacttagtaggtccagttttgtttcctgtgagtgagtaataggttctcttcgtgccagcagcagcagcgttctctgcctcatgtgacgtctgcatgtgtgaagcttgtgtgcatagcctgctgctcctcacaccatcctcatcctcagcttagccaccaccatggactctcgcagtgcaagggcacttcactgtaccagtgacagggtggcaggtcttcaactctgctgcttcccacacttaaacttaaaggctcttctttcccc

SEQ ID NO: 4180 - protein, 239 aa, Mus musculus
MALQALHSSGVGLRRILAHFPEDLSLAFAYGSAVYRQAGPSAHQENPMLDLVFTVDDPVAWHAMNLKKNWSHYSFLKLLGPRIISSIQNNYGAGVYFNPLIRCDGKLIKYGVISTGTLIEDLLNWNNLYIAGRLQKPVKIVSMNENMALRAALDKNLRSAVTTACLMLPESFSEEDLFIEIAGLSYSGLYSAWWVLHPSLAGSSWHQPHAGQLFVRKLGAWPQLLGHLGCGPAQVFPTS

SEQ ID NO: 4181 - DNA, 1666 bp, Schistosoma japonicum
  CDS (328)..(1440)
acttatcacatgtaaacttttgttttatgagttctggacgtagtaaacttcaacttgaagttattcgtttgtatcgaaactatttaagaactgtcgatttattacaaatcaagtcagtgaataatagcagtgatgtaaacaatagttccaattttaaccaactcagagaattcattcgttctgagttccgacgtcaagcgagtgcctataaatcaactgatatttttggtattgaggctgcactgcgtagaggccaaaggcgcctagaagatattaagtccggaactgtagtaaccattaaaaatatatttgttactacggcggaaaatgacaaacagtagactgaccgggaaaatcaaacgtcttgtcgatgcactcaacatagatcgaacaaactatgttgcttcttttgcttatggatctgtcgtcttcccacagaaggataaaacatcgaataattctcttattgatctaatcttaattgttcgtaatcctgtggaatggcatcggaaaaatatttctgataatcctaatcactataacttcctatttcggaattatgccaagcaccagtcatcatacttagacatgtttctttcccgtagttcaggtcccaaagtttattacaacccatttattgaatggaatgatccctttgacaatactaggctatcatttaaatacggtgtcgttgcattagatagtctgctaactgatttactcaactggtcacatctttacttagctggacgcctacagaaacctgtattgtggatcccctactactctgatattttttcgtttcaaagttataatgagcagttgtatgcagctcaaaacaaaaatctacttgcttccatgtcttacgcaattttacaaaattatccggaaaattttccattgagtgaatatgacttattctgtgcaatttcatctatctcctatattggagattggcgaatgattattggtgaagatcgacaaaaaatacagcgtctagtgtccggtaaaagtcgattgtctgaatttcgttcgctttataatgactctttcaaatcacttcaatcatatggtttttctcttaaatcgtcctcaaaatccaatctctgtgacaatgaattgtactgtttacaatcgtttaacaaagaatccgaaagtgttttccaacttcttaaaaatattcccaaccatatatgtttactttctgttaaggatacctatatttataatcctgatgatgctcgaacatttctatcaaatttatcatatacagatagaaatcaacgactacggggtactgtgtttaatatagttagaaaatctagtctgtaccaaactggcttaggcctgttttctgccggacccagacgatctttacgatacgcactagcaaaacttagtaagatgtttgcgagtttaggatttactaaatggagctgatcgctatattctacttagtttcctacttcatattttgtgttacatactaaccaccattgcgtgttataaatggttttttgaatgagtttttgttctttaggatttcgcactctggtaatttctgttatctgtaagaacttagcgaaatagatttatgttattttcaaacctttaagggtttcatgaatataaatgcataaaatgaaaaaaaaaaaaaaaaaaaaaa

SEQ ID NO: 4182 - protein, 370 aa, Schistosoma japonicum
MTNSRLTGKIKRLVDALNIDRTNYVASFAYGSVVFPQKDKTSNNSLIDLILIVRNPVEWHRKNISDNPNHYNFLFRNYAKHQSSYLDMFLSRSSGPKVYYNPFIEWNDPFDNTRLSFKYGVVALDSLLTDLLNWSHLYLAGRLQKPVLWIPYYSDIFSFQSYNEQLYAAQNKNLLASMSYAILQNYPENFPLSEYDLFCAISSISYIGDWRMIIGEDRQKIQRLVSGKSRLSEFRSLYNDSFKSLQSYGFSLKSSSKSNLCDNELYCLQSFNKESESVFQLLKNIPNHICLLSVKDTYIYNPDDARTFLSNLSYTDRNQRLRGTVFNIVRKSSLYQTGLGLFSAGPRRSLRYALAKLSKMFASLGFTKWS

SEQ ID NO: 4183 - DNA, 966 bp, Caenorhabditis briggsae
  CDS (1)..(966)
atggacgaatatcgagaattgataagcgtcctaccgctggatacagtggaatatgcatttgcgtatggatcaggggcaattcaacaaaaagatgagaacaaggcagaaaagatggtggatttcgttgttgttacaaaagatgcacaagaattccacaaagctaatatcgcaaagaatcctcaacactacagtcttctacgccttctcggaccaaaaatgcttgaaaagattcaatgtaactttgcagctcgtgtttattacaacactcatgtgaatgtaggaaaaaggaaaattaagtatggtatcatctcgtatgaaaatgtcaagcaagatctactggattggcgatggatctacatctccggtcgtcttcataagcccgttctcgacgttatcaagccgaaagatgacatgtgtgatttggttacggagaatcgaagatctgcgcttcattctgcacttttgttacttccagagtcatttactctaaaacaacttttccatcaaatagtaggactttcctatactggagattttcgtatgattgttggagaggacaagaacaaaatcatgaaaatagtggagggtaactatgaagaacttatgcgagtttacgaaccactgatgaatgatgatgctcgtctttctgtgatgtcacctgccaaagttattcaagatggatccacgacggcaatttaccacaggctgaatctgttaccgtcagaagttttgaatcagattcaaaaaaatatgaacaaagcgcagaagaggcaaagggacgctgaggaggtcatcttctccctcgcacatcgacatgacgtagcagcaacagtcgagactgcaattggaggaatcatccgccctatctcattctctcaaacggccaaaaatgcattctcagctggaatgacgcgttctgtgatttacagtctcgccaaaatgagcaagttcttgaaaagcaagtaa

SEQ ID NO: 4184 - protein, 321 aa, Caenorhabditis briggsae
MDEYRELISVLPLDTVEYAFAYGSGAIQQKDENKAEKMVDFVVVTKDAQEFHKANIAKNPQHYSLLRLLGPKMLEKIQCNFAARVYYNTHVNVGKRKIKYGIISYENVKQDLLDWRWIYISGRLHKPVLDVIKPKDDMCDLVTENRRSALHSALLLLPESFTLKQLFHQIVGLSYTGDFRMIVGEDKNKIMKIVEGNYEELMRVYEPLMNDDARLSVMSPAKVIQDGSTTAIYHRLNLLPSEVLNQIQKNMNKAQKRQRDAEEVIFSLAHRHDVAATVETAIGGIIRPISFSQTAKNAFSAGMTRSVIYSLAKMSKFLKSK

SEQ ID NO: 4185 - DNA, 1017 bp, Xenopus laevis
  CDS (1)..(1017)
atgagtctgccagtcttacagggcacgggattccagttcaggaggatcctcagcttcttcccccaggacatcagcttggcctttacttatggatccggggtgttcagacaggcgggctcctcccacaatgatgtcaggaacaagatgctggactttgtatttgcagttgatgaccccgtgacctggcacacaatgaatattattcagaaccggagtcattactctttcctgaagttcctgggacccaaacacatcactgctgtgcagaacaactatggtgccggagtctattataataccctggtgccctgtgatggccgactgataaaatacggagttgtgagcacagagacgctgctgcaggatttgctgcactggaggacgctgtacatcgcaggacgtctccataaaccggtgaagatcctgactcagcgggacgacgggcgcctcaaatcggcattaacctccaatctgaagagtgcgctcaacgcggctttcctcatgctccccgaaagcttctccgaggaggaactctacctgcagattgcggggctctcctatgcaggagatttccgcatgattattggggaggacaaggacaaagtgttgaacatagtgaagccgaatgttccccatttccagaagctttacgctgccatactgctcgactgccccctggctgtgtataaagctcaacagggccgagtggaggtggataagagccccgaggggcagtaccagcagctcatggctttgcctaaaaaactgcagcagaacatcacggcgcttgtcgaccccccggggaagaatcgtgacgtggaggagattttactgcaggtggcgcaggaccctgattgcagcagtgtaatacagcaagctctctatggtattgtcagatcctccagtctgtctcagagcgccaaagggatcgtcactgcaggagtgaagaagtcggtgcaatacagctccaagaaactctacaaaatgctgcgcagcctccggaggggcaaatcctga

SEQ ID NO: 4186 - protein, 338 aa, Xenopus laevis
MSLPVLQGTGFQFRRILSFFPQDISLAFTYGSGVFRQAGSSHNDVRNKMLDFVFAVDDPVTWHTMNIIQNRSHYSFLKFLGPKHITAVQNNYGAGVYYNTLVPCDGRLIKYGVVSTETLLQDLLHWRTLYIAGRLHKPVKILTQRDDGRLKSALTSNLKSALNAAFLMLPESFSEEELYLQIAGLSYAGDFRMIIGEDKDKVLNIVKPNVPHFQKLYAAILLDCPLAVYKAQQGRVEVDKSPEGQYQQLMALPKKLQQNITALVDPPGKNRDVEEILLQVAQDPDCSSVIQQALYGIVRSSSLSQSAKGIVTAGVKKSVQYSSKKLYKMLRSLRRGKS

SEQ ID NO: 4187 - DNA, 1029 bp, Drosophila melanogaster
  CDS (1)..(1029)
atgctggacctatacagacgcacggtggcgcggtttcctctgggcagtgtcagctatatgttcgcctacggatccggcgtcaaacagcaggaaggctatggaaaagtcggcaatggaaacaacctgcgtcctccgccgggaaccgttgtggatctggtcttttgcgttcgtgatgctaggggcttccatgcggagaacctgcaccgtcatccggaccactattccgcccttaggcacctgggaccgaactttgtggccaagtatcaggagcgtttgggtgcgggtgtctattgcaacacgttggtgcctctgccagatgtgggcattaccataaagtacggcgtggtgtcgcaggaggagctgctggaggatctgcttgactggcggcatctttacttggcaggaaggctgcacaaaccagtgacgaatctggtcaatccttctgataatcctcccctcaaggctgcgctggagaggaatcttgtatccgcgctgcaagtggctctgctacttttaccagagaagttcactgcctacggacttttacacaccatcgccggactgagttacaagggcgatttccgtatgattttcggggaaaacaaacagaaagtgcacaacatagttagtccgcaaatcaatgacttcttcgccctataccaaccctccctgggacaactttccgactatgtggcggtaaacatgaagggccaggaaccagggagccggaaaccagccataatcttcgagcaggacaaatcctcatcggctacatgccaacacctgcgacagttgccccgagagcttcagaagcgattgcagcgaaatgccgcctgtcgtggcgactacacccaggtggtgaatcacctatccatggcctcccagcttccggaggtgctgcaggcatccgtcaacgacattgtgtggcgcagcagtgtcacgcaatcgatcaaaaatattcccagtgctggcattctcaagtcattgtcgtatagctatcgcaaggctcaaaagacattcgctgtttag

SEQ ID NO: 4188 - protein, 342 aa, Drosophila melanogaster
MLDLYRRTVARFPLGSVSYMFAYGSGVKQQEGYGKVGNGNNLRPPPGTVVDLVFCVRDARGFHAENLHRHPDHYSALRHLGPNFVAKYQERLGAGVYCNTLVPLPDVGITIKYGVVSQEELLEDLLDWRHLYLAGRLHKPVTNLVNPSDNPPLKAALERNLVSALQVALLLLPEKFTAYGLLHTIAGLSYKGDFRMIFGENKQKVHNIVSPQINDFFALYQPSLGQLSDYVAVNMKGQEPGSRKPAIIFEQDKSSSATCQHLRQLPRELQKRLQRNAACRGDYTQVVNHLSMASQLPEVLQASVNDIVWRSSVTQSIKNIPSAGILKSLSYSYRKAQKTFAV

SEQ ID NO: 4189 - DNA, 999 bp, Arabidopsis thaliana
  CDS (1)..(999)
atggaaactactcaaaaagatgagctttcgagcttcttaagtgttcttcctcctgtggatttctgttgtgtttatggttcaacattgcacccaaataaccaagataagtctaagatggtggactatatccttggagtctctgatcctataaaatggcattctgcgaatctgaaaatgaattcagatcactatgcttcatggatggttcaccttggtggagctaggctgattacaaatgttgccgataaagtaggagttggagttcacttcaatccgtttgtcaactggaacgacaggaagctcaagtatggagttgttcggatgcatgacctagtacaggacatactggactggaagaggttctacttgagtggccgtttacaaaaacctgttcatatgcttgttgataatctggacatagaggatgtgaattctgttaataagagagctgcaatatctgcagctcttcttctcttgccatcgaaattcaccgaggaagatctatacgccaaaatatgcagcctttcttacatgggagacttgcgcatgttttttgcagaggacactaataaggtgaacaagattgtgaagggacaatttgatcttttccagtcgatgtataagccttttcttgaagagtgcgagaccaaaaacttattgagattctcatcggctgaagctagtcacactaaattagttcaggattctagcctttcagcaacacgttctctggtctcttctcttcctgcatcagtgagaagccaaatggggaagtcactcggggagaagaaattcgtgagcgagaccggtagagttatgggagaagtttgtataagttcgagagaagaagcagcgaaatgtatggagaaagtcatgaggagaagggtaatggtttcaagcggaagacaagctgtgtctggtttcttggctgcaggagctattaatgcaacaatgtatctttcccaaaaaatgcgcaaagcttggaactctcgtgcatga

SEQ ID NO: 4190 - protein, 332 aa, Arabidopsis thaliana
METTQKDELSSFLSVLPPVDFCCVYGSTLHPNNQDKSKMVDYILGVSDPIKWHSANLKMNSDHYASWMVHLGGARLITNVADKVGVGVHFNPFVNWNDRKLKYGVVRMHDLVQDILDWKRFYLSGRLQKPVHMLVDNLDIEDVNSVNKRAAISAALLLLPSKFTEEDLYAKICSLSYMGDLRMFFAEDTNKVNKIVKGQFDLFQSMYKPFLEECETKNLLRFSSAEASHTKLVQDSSLSATRSLVSSLPASVRSQMGKSLGEKKFVSETGRVMGEVCISSREEAAKCMEKVMRRRVMVSSGRQAVSGFLAAGAINATMYLSQKMRKAWNSRA

SEQ ID NO: 4191 - DNA, 1134 bp, Candida albicans
  CDS (1)..(1134): transl_table=12
atgtccaagtgttccgatatagaagagtttgtcataacaccaaatattcattcaattccggttggtgctgatcaaatggttacactcagctggctccatcattatcccaagcaaattccatcgaagacatcacagtcgtcattaacatcatcggggtttctttattatgaagatccccataggtacaacgggtcagatgttagtgctaatgcatccgaaacgacaactactagcacagccaaaccagttattcatctggctacaccttattccgataaatattatcaaccaatcatcagtcaaggagccaaggggtttgataagttgattatccctgttgggttccgtgctgataatcagacagtttcactagaagaagataaagagtcgcccatacaacaagaccaactacaagagattgtcaattcttttgatgcgcctattgatgtatctattggatatgggtcaggaattctacctcaagatggatatgataaagataaatcaacgccaaataatactgctaatgattcaaagcaattggattttatgtttttagtaaaagactgtgggaaatttcatcaggaaaacttgaaacaaaaccgagatcattattcgattaaatcattacgattaattaagaaggttcaaggtactaatgggatgtatttcaatccctttattaagatcaatgagaaattggtcaaatatggggttatttctagtaaatcagcattaatggatcttagtgagtggcattcgttatactttgctggtcgattacaaaagccagttaatttcattacaaccaatgatcctcgagtcaaatttttgaaccaatatcacttgaagaatgccatgaccatagcgatatttttgattgatggagaaggtaattctcgccaagcaacgtttaatgaacgacaattgtatgaacaaatcactaaattgtcatatttaggggatttcagaatgtatattggaggagaaaatcctaataaactgaaaaatattgttgccaaacaattccatcattttaaaaagttgtatgaaccaatattacaatattttattcataaaaattttctaatcattgttgataatgacatacttggttataatgttataaaataa

SEQ ID NO: 4192 - protein, 377 aa, Candida albicans
MSKCSDIEEFVITPNIHSIPVGADQMVTLSWLHHYPKQIPSKTSQSSLTSSGFLYYEDPHRYNGSDVSANASETTTTSTAKPVIHSATPYSDKYYQPIISQGAKGFDKLIIPVGFRADNQTVSLEEDKESPIQQDQLQEIVNSFDAPIDVSIGYGSGILPQDGYDKDKSTPNNTANDSKQLDFMFLVKDCGKFHQENLKQNRDHYSIKSLRLIKKVQGTNGMYFNPFIKINEKLVKYGVISSKSALMDLSEWHSLYFAGRLQKPVNFITTNDPRVKFLNQYHLKNAMTIAIFLIDGEGNSRQATFNERQLYEQITKLSYLGDFRMYIGGENPNKSKNIVAKQFHHFKKLYEPILQYFIHKNFLIIVDNDILGYNVIK

SEQ ID NO: 4193 - DNA, 25 bp, Artificial sequence
  primer
atgttacgagtttctgaaaatggtc

SEQ ID NO: 4194 - DNA, 25 bp, Artificial sequence
  primer
ctagcttctcctcatcgattttagt

SEQ ID NO: 4195 - protein, 392 aa, Artificial sequence
  consensus sequence
  Variant (2)..(2): Xaa in position 2 is any amino acid
  Variant (7)..(9): Xaa in position 7 to 9 is any amino acid
  Variant (11)..(14): Xaa in position 11 to 14 is any amino acid
  Variant (15)..(46): Xaa in position 15 to 46 is any or no amino acid
  Variant (48)..(51): Xaa in position 48 to 51 is any amino acid
  Variant (53)..(58): Xaa in position 53 to 58 is any amino acid
  Variant (60)..(61): Xaa in position 60 to 61 is any amino acid
  Variant (63)..(68): Xaa in position 63 to 68 is any amino acid
  Variant (72)..(75): Xaa in position 72 to 75 is any amino acid
  Variant (76)..(77): Xaa in position 76 to 77 is any or no amino acid
  Variant (79)..(86): Xaa in position 79 to 86 is any amino acid
  Variant (87)..(93): Xaa in position 87 to 93 is any or no amino acid
  Variant (96)..(97): Xaa in position 96 to 97 is any amino acid
  Variant (99)..(99): Xaa in position 99 is any amino acid
  Variant (101)..(110): Xaa in position 101 to 110 is any amino acid
  Variant (111)..(116): Xaa in position 111 to 116 is any or no amino acid
  Variant (121)..(128): Xaa in position 121 to 128 is any amino acid
  Variant (131)..(132): Xaa in position 131 to 132 is any amino acid
  Variant (134)..(136): Xaa in position 134 to 136 is any amino acid
  Variant (138)..(139): Xaa in position 138 to 139 is any amino acid
  Variant (143)..(143): Xaa in position 143 is any amino acid
  Variant (147)..(161): Xaa in position 147 to 161 is any amino acid
  Variant (162)..(171): Xaa in position 162 to 171 is any or no amino acid
  Variant (174)..(175): Xaa in position 174 to 175 is any amino acid
  Variant (177)..(179): Xaa in position 177 to 179 is any amino acid
  Variant (181)..(183): Xaa in position 181 to 183 is any amino acid
  Variant (185)..(187): Xaa in position 185 to 187 is any amino acid
  Variant (188)..(194): Xaa in position 188 to 194 is any or no amino acid
  Variant (196)..(196): Xaa in position 196 is any amino acid
  Variant (198)..(199): Xaa in position 198 to 199 is any amino acid
  Variant (201)..(203): Xaa in position 201 to 203 is any amino acid
  Variant (205)..(206): Xaa in position 205 to 206 is any amino acid
  Variant (210)..(210): Xaa in position 210 is any amino acid
  Variant (213)..(213): Xaa in position 213 is any amino acid
  Variant (216)..(218): Xaa in position 216 to 218 is any amino acid
  Variant (219)..(220): Xaa in position 219 to 220 is any or no amino acid
  Variant (222)..(224): Xaa in position 222 to 224 is any amino acid
  Variant (226)..(227): Xaa in position 226 to 227 is any amino acid
  Variant (231)..(232): Xaa in position 231 to 232 is any amino acid
  Variant (233)..(238): Xaa in position 233 to 238 is any or no amino acid
  Variant (240)..(242): Xaa in position 240 to 242 is any amino acid
  Variant (244)..(270): Xaa in position 244 to 270 is any amino acid
  Variant (271)..(384): Xaa in position 271 to 384 is any or no amino acid
  Variant (386)..(387): Xaa in position 386 to 387 is any amino acid
  Variant (388)..(388): Xaa in position 388 is any or no amino acid
  Variant (390)..(391): Xaa in position 390 to 391 is any amino acid
FXYGSGXXXQXXXXXXXXXXXXXXXXXXXXXXXXXXXXXXXXXXXXDXXXXVXXXXXXHXXNXXXXXXHYSXXXXXXGXXXXXXXXXXXXXXXGAXXYXNXXXXXXXXXXXXXXXXKYGVXXXXXXXXDLXXWXXXYXXGRLXKPVXXXXXXXXXXXXXXXXXXXXXXXXXNLXXAXXXAXXXLXXXXXXXXXXFXEXXLXXXIXXLSYXGDXRMXXXXXEXXXKXXNIVXXXXXXXXFXXXYXXXXXXXXXXXXXXXXXXXXXXXXXXXXXXXXXXXXXXXXXXXXXXXXXXXXXXXXXXXXXXXXXXXXXXXXXXXXXXXXXXXXXXXXXXXXXXXXXXXXXXXXXXXXXXXXXXXXXXXXXXXXXXXXXXXXXXXXXXXXXYXXXKXXK

SEQ ID NO: 4196 - DNA, 930 bp, Saccharomyces cerevisiae
  CDS (1)..(930)
atgtctgccgttttcaacaacgctaccctttcaggtctagtccaagcaagcacctactcacaaactttgcaaaatgtcgcccattaccaacctcaattgaatttcatggagaaatactgggccgcatggtacagttacatgaacaatgatgttttggccaccggtctaatgttctttttattgcatgaatttatgtatttctttagatgtttgccatggttcatcatcgaccaaattccatactttagaagatggaagttacaaccaactaagattccaagtgctaaggaacaactatactgtttgaaatccgttcttctatctcatttcttggtcgaggccatccctatctggaccttccacccaatgtgtgaaaaattaggtattactgtcgaagttccattcccatctttgaaaacaatggctctagaaattggtctattcttcgtcttggaagatacatggcattactgggctcaccgtctattccactacggtgtcttctacaagtacattcacaagcaacatcacagatacgctgctccattcggtctttctgctgaatatgctcatcctgctgaaactttgtctttgggttttggtaccgttggtatgccaattctttacgtcatgtacactggtaaattacacttgttcactctatgtgtatggatcaccctaagattattccaagctgttgactctcattctggttatgacttcccatggtctttgaacaagatcatgccattctgggctggcgctgaacaccacgatttgcatcatcactactttattggtaactacgcttcctctttcagatggtgggattactgtctagacactgaatctggtccagaagctaaggcctccagagaagaaagaatgaagaagagagctgaaaacaatgctcaaaagaagactaactaa

SEQ ID NO: 4197 - protein, 309 aa, Saccharomyces cerevisiae
MSAVFNNATLSGLVQASTYSQTLQNVAHYQPQLNFMEKYWAAWYSYMNNDVLATGLMFFLLHEFMYFFRCLPWFIIDQIPYFRRWKLQPTKIPSAKEQLYCLKSVLLSHFLVEAIPIWTFHPMCEKLGITVEVPFPSLKTMALEIGLFFVLEDTWHYWAHRLFHYGVFYKYIHKQHHRYAAPFGLSAEYAHPAETLSLGFGTVGMPILYVMYTGKLHLFTLCVWITLRLFQAVDSHSGYDFPWSLNKIMPFWAGAEHHDLHHHYFIGNYASSFRWWDYCLDTESGPEAKASREERMKKRAENNAQKKTN

SEQ ID NO: 4198 - DNA, 891 bp, Gallus gallus
  CDS (1)..(891)
atggcagtgaacgacagcgttaatatcttgaactctgcttatctggcagtggaatacatagactctttcctgcctgacaatcctctgcagcagccatttaaaaatgcttggaattacatgctggacaactacaccaagttccagatagcgacgtgggggtcgcttttagttcatgaagcttcgtacttcttgctctgcgtacctggattcatctttcagtttataccctacatgcaaaagtataagattcaaccggataaaccagaaacatgggaaaaacagtggaagtgtttcaaaacacttatcttcaatcactttttcattcaacttcctctaatttgtggcacgtactacttcacagaatattttaacattccatatgagtgggaagagatgcctaggtggtatgttttgcttgcccagtgttttggatgtgcagtgattgaggatgcctggcactatttcctgcatcgactgctgcatcacaaaagaatatacaagtacatccataaggttcaccacgagtttgtatctccatttggaatgcaagcagaatacgcacatcctctggaaacgctcatccttggagctggcttctttattggaattgttgtcttctgtaaccatgtggttcttctgtgggcatgggtaatatgtcgcctgatggaaaccattgatgtgcacagtggctatgatattccactgaaccctcttcatttggtgcctttctatgctggagcccgttttcatgatttccatcacatgaactttattggcaattatgcatcgaccttcacgtggtgggacagaatctttggcacagactctcaattcattgcctataaagaaaaagagaaaaagcagcaactcaggatgaagaagactaactaa

SEQ ID NO: 4199 - protein, 296 aa, Gallus gallus
MAVNDSVNILNSAYLAVEYIDSFLPDNPLQQPFKNAWNYMLDNYTKFQIATWGSLLVHEASYFLLCVPGFIFQFIPYMQKYKIQPDKPETWEKQWKCFKTLIFNHFFIQLPLICGTYYFTEYFNIPYEWEEMPRWYVLLAQCFGCAVIEDAWHYFLHRLLHHKRIYKYIHKVHHEFVSPFGMQAEYAHPLETLILGAGFFIGIVVFCNHVVLLWAWVICRLMETIDVHSGYDIPLNPLHLVPFYAGARFHDFHHMNFIGNYASTFTWWDRIFGTDSQFIAYKEKEKKQQLRMKKTN

SEQ ID NO: 4200 - DNA, 756 bp, Danio rerio
  CDS (1)..(756)
atgtttggactacagcacatctgggactgcattctgcagtacgaagcacagctaaggtctccatttttcccagtcctcttctcaattacagtctacctaagcttctgcctgccttttgtccttctggatgccctgtctccaaaggtagaactgataaggagatacaagatccaacagaaagccagcgtgtcttggactatgatgtggagctgcctcgcactctccctctacaaccacgtggtgtacatcttcccgctgagtgtcctgcactggtactggagacctgtcagctacctagcggaggcacctggggtcttgcgggtcgtctgggatcttgctgcctgcctgcttctgtttgacttccagtactttgtgtggcatcttctacatcacaaagtgccttggctttaccggactttccataaggtgcaccacaaatacacatccaccttcgctctggccactgagtactctggggcttgggagaccctgtctttggggttcttcgctgcggtgaatcccatgttgcttggggttcatcctatgacagagatgctcttccacatgctgaacatgtggctgtcagttgaggaccattgtggctatgacctgccatgggccacgcacagactgatgccttttggactttacggaggagctccacaccatgatgtccaccatcagaagttcaagtccaactacgctccatacttcactcactgggacaagctctttgggacactgcactttgaatga

SEQ ID NO: 4201 - protein, 251 aa, Danio rerio
MFGLQHIWDCILQYEAQLRSPFFPVLFSITVYLSFCLPFVLLDALSPKVELIRRYKIQQKASVSWTMMWSCLALSLYNHVVYIFPLSVLHWYWRPVSYLAEAPGVLRVVWDLAACLLLFDFQYFVWHLLHHKVPWLYRTFHKVHHKYTSTFALATEYSGAWETLSLGFFAAVNPMLLGVHPMTEMLFHMLNMWLSVEDHCGYDLPWATHRLMPFGLYGGAPHHDVHHQKFKSNYAPYFTHWDKLFGTLHFE

SEQ ID NO: 4202 - DNA, 897 bp, Rattus norvegicus
  CDS (1)..(897)
atggcctgccacaacgtttcggagctccaagaccttggttgttccaaccagctgctcctgcagcctctctgggacagcataaggacgggagaggcgtccgcgcgctcacccttcttcccagtcatcttttctatcttcacttacctgggcttctgcctaccgttcgtggtgctagatgtcctctgtccctgggtgcccatcttgagacgctacaagatccacccggacttctcgccgtccgtaaggcagcttctgccctgcctggggctgacactctaccagcacctggtgttcgtgttcccagtgacgctgatgcactgggcgcgcagccccgcgctgctgccgcgggaggcccccgagctctcccagctcctgagtcacgtcctgatctgcctgctgctcttcgacaccgagatcttcgcgtggcatctgctgcaccataaggtgccctggctgtaccgcaccttccacaaggtgcatcaccagaactcgtcctccttcgcgttggctacccaatacatgagcgtctgggagctgctttctctgaccttcttcgatgtgctgaacgtcgcgatgcttcagtgtcacccactcaccatcctcgtctttcacgtggttaacatctggctgtcggtggaggaccactcaggttacgactttccgtggtccactcacagacttgtgccgtttggctggtacgggggcgtggctcaccacgacctgcatcactctcagtttaactgcaactttgctccgtacttcacacactgggacaaaatgctggggaccctgcgttgcgcaccccactcgaagcgcctgtgtgccggcagtgagagctgcttggactccggagagcaatgtactgtacacttgaaccagaagaagaaacagacttga

SEQ ID NO: 4203 - protein, 298 aa, Rattus norvegicus
MACHNVSELQDLGCSNQLLLQPLWDSIRTGEASARSPFFPVIFSIFTYLGFCLPFVVLDVLCPWVPILRRYKIHPDFSPSVRQLLPCLGLTLYQHLVFVFPVTLMHWARSPALLPREAPELSQLLSHVLICLLLFDTEIFAWHLLHHKVPWLYRTFHKVHHQNSSSFALATQYMSVWELLSLTFFDVLNVAMLQCHPLTILVFHVVNIWLSVEDHSGYDFPWSTHRLVPFGWYGGVAHHDLHHSQFNCNFAPYFTHWDKMLGTLRCAPHSKRLCAGSESCLDSGEQCTVHLNQKKKQT

SEQ ID NO: 4204 - DNA, 819 bp, Homo sapiens
  CDS (1)..(819)
atgagctgccacaactgctccgacccccaggtcctttgcagctccgggcagctgttcctgcagcccctctgggaccacctgaggagctgggaggccctcctacagtcgcccttcttcccggtcatcttctccatcaccacatacgtgggcttttgcctgcccttcgtggtcctggatatcctgtgctcctgggtgcccgccctgcggcgctacaagatccaccctgacttctcgccatccgcgcagcagctgctaccttgcctggggcagaccctctaccagcatgtgatgtttgtgttccccgtgacgctgctgcattgggcccgcagcccggccctcctgccccacgaagctcccgagctgctcctgctgctgcaccacatcctgttctgcctgctactcttcgacatggagttcttcgtgtggcacctgctgcaccacaaggtgccctggctgtaccgcaccttccacaaggtgcaccaccagaactcgtcctcgttcgcgctggcaacgcagtatatgagcgtctgggaactgttttctttgggcttcttcgacatgatgaacgtcacactgctcgggtgccacccgctcaccaccctgaccttccacgtggtcaacatctggctttccgtggaggaccactccggctacaacttcccttggtccactcacagactggtgcccttcgggtggtacgggggtgtggtgcaccacgacctgcatcactctcactttaactgcaacttcgctccgtactttacacactgggacaaaatactgggaacgctgcggactgcatctgtcccagcgcggtga

SEQ ID NO: 4205 - protein, 272 aa, Homo sapiens
MSCHNCSDPQVLCSSGQLFLQPLWDHLRSWEALLQSPFFPVIFSITTYVGFCLPFVVLDILCSWVPALRRYKIHPDFSPSAQQLLPCLGQTLYQHVMFVFPVTLLHWARSPALLPHEAPELLLLLHHILFCLLLFDMEFFVWHLLHHKVPWLYRTFHKVHHQNSSSFALATQYMSVWELFSLGFFDMMNVTLLGCHPLTTLTFHVVNIWLSVEDHSGYNFPWSTHRLVPFGWYGGVVHHDLHHSHFNCNFAPYFTHWDKILGTLRTASVPAR

SEQ ID NO: 4206 - DNA, 897 bp, Mus musculus
  CDS (1)..(897)
atgggctgctacaacggttcggagctccaagacctgggctgttccagccagctgctcctgcagcccctctgggacaccataaggacaagggaggcgttcacgcgctcacccatcttcccagtcaccttttctatcatcacttacgtgggcttctgcctaccgttcgtggtgctggacgtcctgtatccctgggtccccatcctgcgacgctacaagatccacccggacttctcgccttccgtaaagcagcttctgccttgcctggggctgacactctaccagcacctggtgttcgtgttcccggtgacgctgctgcactgggtgcgcagcccggcgctcctcccccaggaggcccctgagctcgtccagctcctaagtcacgtcctgatctgcctgctgctcttcgacaccgagatcttcgcgtggcacctgctgcaccataaggtgccctggctgtaccgcaccttccacaaggtgcatcaccagaactcgtcctccttcgcgctggcgacccaatacatgagcttctgggagctgctttcgctgaccttcttcgacgtgctgaacgtcgcggtgcttcggtgtcacccactcaccatctttacctttcacgtgattaacatctggctgtcggtggaggaccactcgggctatgacttcccgtggtccactcacagacttgtgccctttggctggtacgggggcgtggctcaccacgacatgcatcactctcagtttaactgcaattttgctccttacttcacacactgggacaaaatgctgggcactctgcggtccgcgcccctgccagagagcctttgcgcctgcggtgagcgctgcgtgaactccagagagcgatgcgctgtacacttgatccagaagaagaaacagacttga

SEQ ID NO: 4207 - protein, 298 aa, Mus musculus
MGCYNGSELQDLGCSSQLLLQPLWDTIRTREAFTRSPIFPVTFSIITYVGFCLPFVVLDVLYPWVPILRRYKIHPDFSPSVKQLLPCLGLTLYQHLVFVFPVTLLHWVRSPALLPQEAPELVQLLSHVLICLLLFDTEIFAWHLLHHKVPWLYRTFHKVHHQNSSSFALATQYMSFWELLSLTFFDVLNVAVLRCHPLTIFTFHVINIWLSVEDHSGYDFPWSTHRLVPFGWYGGVAHHDMHHSQFNCNFAPYFTHWDKMLGTLRSAPLPESLCACGERCVNSRERCAVHLIQKKKQT

SEQ ID NO: 4208 - DNA, 897 bp, Arabidopsis thaliana
  CDS (1)..(897)
atgattccttacgctacagtcgaagaagcttcaatcgcactgggacgaaacctcacacgtctcgaaactctatggttcgattactccgccacgaagtccgattactatctctactgtcacaacattttgttcttgttcctcgtcttctctctcgttcctctccctctcgttttcgtcgaattggctcgatctgcttctggtttgtttaatcggtataagatccagcctaaggttaattactctttatctgatatgttcaaatgttacaaagacgtcatgacgatgtttatcctcgtcgttggtccattgcaactcgtttcttatccttcgattcagatgattgagatacgatctggattaccattaccaacaattacagagatgctgtcacagttagtagtctacttcttgatagaagactacactaactactgggtacatagattctttcatagtaaatggggatacgataagattcatcgagttcatcacgagtacacagctcctataggatatgctgctccttatgcacattgggctgaagttttgcttctcggaatcccgacgtttatgggaccagctattgctcctggtcatatgataaccttttggttgtggattgctttaaggcaaatggaagctattgagactcacagtggatatgattttccatggagtccaacaaaatacatccctttctacggtggtgctgagtaccatgactatcatcactacgttggaggacaaagtcaaagcaacttcgcttcagtgttcacgtactgtgattacatttatggaactgacaagggttacagattccaaaagaagcttcttgagcagatcaaggagtcgtcgaagaagagcaacaagcataacggaggaataaaatccgattag

SEQ ID NO: 4209 - protein, 298 aa, Arabidopsis thaliana
MIPYATVEEASIALGRNLTRLETLWFDYSATKSDYYLYCHNILFLFLVFSLVPLPLVFVELARSASGLFNRYKIQPKVNYSLSDMFKCYKDVMTMFILVVGPLQLVSYPSIQMIEIRSGLPLPTITEMLSQLVVYFLIEDYTNYWVHRFFHSKWGYDKIHRVHHEYTAPIGYAAPYAHWAEVLLLGIPTFMGPAIAPGHMITFWLWIALRQMEAIETHSGYDFPWSPTKYIPFYGGAEYHDYHHYVGGQSQSNFASVFTYCDYIYGTDKGYRFQKKLLEQIKESSKKSNKHNGGIKSD

SEQ ID NO: 4210 - DNA, 810 bp, Caenorhabditis elegans
  CDS (1)..(810)
atggaagcagcctatcttaaaatctacgactatttcgatggtgacccactgcttatctatgtgataggaggtaccgtaatcgtgaatataaatttttggcttttcaatcttttcttcatcactattgatatgattgatccgaaatgggttcaaccatataaaattcaagatgaaaagaagccaccattatcaaaatatttgggtgcttttaaagtcattttggctaaccaatttatcgcaggacctttgatcacattattttggtactttccagcagtttggtttggaactagcttcactggtccactcccatctggatggcagatattccgtgatatagttatttcgattctttgcgaagaaattggattctactattctcatagattattccatcacccaaaaatctacaaatacattcacaagaaacatcacgaatggacggcgccagtttccatcactagcatttattgtcatccactggaacatgccatttctaacttgagtccggttcttttaggtccaactatttgcggaagtcatgtgattactctctggatttgggcttctattgcaattctatcaactacttgctcacattcagggtatcacttcccgtttatgctgtctccagaaccacatgactaccatcataaagtattcaatgagtgtttcggcacaggacttcttgattggattcacggaacagattccacattcagaaagtcaattgaaggaaaacgaaattatatgagctggagcatgaaaccaattaaacaaattcacccagaacaacagaaagaagaataa

SEQ ID NO: 4211 - protein, 269 aa, Caenorhabditis elegans
MEAAYLKIYDYFDGDPLLIYVIGGTVIVNINFWLFNLFFITIDMIDPKWVQPYKIQDEKKPPLSKYLGAFKVILANQFIAGPLITLFWYFPAVWFGTSFTGPLPSGWQIFRDIVISILCEEIGFYYSHRLFHHPKIYKYIHKKHHEWTAPVSITSIYCHPLEHAISNLSPVLLGPTICGSHVITLWIWASIAILSTTCSHSGYHFPFMLSPEPHDYHHKVFNECFGTGLLDWIHGTDSTFRKSIEGKRNYMSWSMKPIKQIHPEQQKEE

SEQ ID NO: 4212 - DNA, 801 bp, Arabidopsis thaliana
  CDS (1)..(801)
atggcttccttcgtggaatctggttggcagtaccttgtgacacattttagcgactttcaactggcatgtattgggagttttctcctccatgaaagcgtgtttttcttatctggactccctttcatttttcttgaaaggcaaggctttctcagcaagtacaaaattcagacaaaaaataacacacctgcagcccaaggaaaatgtattactcgcctgttgctttatcatttctccgtaaacttgcccctgatgttggcctcctaccctgtcttccgagccatgggaatgcgaagcagttttcctctgccgtcctggaaagaagtgtctgcccagatattattctactttatcattgaggattttgtcttctattggggtcatcggatcttgcattcaaaatggctgtacaagaacgtgcatagtgtgcatcatgaatatgccacaccatttggtttgacatcagaatatgctcaccccgctgagattctatttctgggttttgctaccatagtcggtccagctcttactggccctcacctaattactctctggttatggatggtgttgagagtgctggagacagttgaggcacattgtggttatcatttcccatggagcctctcaaattttcttcctctgtatggaggtgctgacttccatgactaccatcaccgactgctatacacaaagtccggaaactactcttcaacttttgtgtatatggactggatctttggtactgacaaggggtacagaagactgaagacccttaaagaaaacggtgacatgaaacaaacgtga

SEQ ID NO: 4213 - protein, 266 aa, Arabidopsis thaliana
MASFVESGWQYLVTHFSDFQLACIGSFLLHESVFFLSGLPFIFLERQGFLSKYKIQTKNNTPAAQGKCITRLLLYHFSVNLPLMLASYPVFRAMGMRSSFPLPSWKEVSAQILFYFIIEDFVFYWGHRILHSKWLYKNVHSVHHEYATPFGLTSEYAHPAEILFLGFATIVGPALTGPHLITLWLWMVLRVLETVEAHCGYHFPWSLSNFLPLYGGADFHDYHHRLLYTKSGNYSSTFVYMDWIFGTDKGYRRLKTLKENGDMKQT

SEQ ID NO: 4214 - DNA, 819 bp, Arabidopsis thaliana
  CDS (1)..(819)
atggattctctcgttgaatccggttggaagtaccttgttacgcatttcagtgactttcaactggcgtgtattgggagttttatacttcatgaaagcgtgtttttcttgtctggactcccttacattttcctagaaaggactggttttctgagcaactacaaaattcagaccaaaagtaatactcctgaagcccagggaaaatgcattgctcgactattactttaccattgctgcgtaaacttgcccctcatgatggcgtcgtatcctgtattcagattcatgggcatggaaagcagttttcctctgccgtcctggaaagtggtgtctgcccagatcttattctacttcatcattgaggattttgtattctattggggtcacaggatcttgcatactaaatggctctacaagaacgtgcacagtgtgcatcatgagtacgcgacaccgtttggtttgacatcagaatatgctcatcccgctgaaattctgttccttggttttgctaccattgttggtccggctctcaccgggcctcacctgatcaccctttggttatggatgatgctcagagttattgagacagttgaggcacattgtggttatcatttcccatggagcccctcgaattttcttcctctatacggcggatctttaatattaatgtgggaatcatttgcttacagtgctgacttccatgactaccatcatcgattactctacacaaagtctggcaactactcatcaacgtttgtttacatggactggatctttggcaccgataaaggttacagaaaacttaaggccctaaaagaaacctga

SEQ ID NO: 4215 - protein, 272 aa, Arabidopsis thaliana
MDSLVESGWKYLVTHFSDFQLACIGSFILHESVFFLSGLPYIFLERTGFLSNYKIQTKSNTPEAQGKCIARLLLYHCCVNLPLMMASYPVFRFMGMESSFPLPSWKVVSAQILFYFIIEDFVFYWGHRILHTKWLYKNVHSVHHEYATPFGLTSEYAHPAEILFLGFATIVGPALTGPHLITLWLWMMLRVIETVEAHCGYHFPWSPSNFLPLYGGSLILMWESFAYSADFHDYHHRLLYTKSGNYSSTFVYMDWIFGTDKGYRKLKALKET

SEQ ID NO: 4216 - DNA, 876 bp, Arabidopsis thaliana
  CDS (1)..(876)
atgatcccttatccaaccgtagaagatgcgtccgtggcgttaggacgaaaccttacttggttcgagacggtttggttcgattactcagccaccaaatccaatttccatgtatattgccacaccattctggttctcttccttgtcttttcactagctccttttcctcttgtgattgtcgaatggaccggttggttcgatcagtttaagattcagaagaaggttaagtattcgttgtctgatatgttccaatgttataaagaagtcatgaagttgttccttctcgtcgtcggcacattgcaaatcgtttcttatccttccatccagatggttgggattcgaagtggtttgccattaccatcgttaatggagatagtagcacaattagtggtttacttcttgatagaagattacactaactactggatccatagatggatgcattgcaaatggggttacgagaagattcatcgaatccatcatgagtacacatcacctatcggatacgcatcgccgtatgcgcattgggccgagattttgattcttgggattccgacgtttcttggaccggcaattgctcctggccatataatgacgttttggttatggatatctttacgacaattcgaggcgattgagacccacagcggatatgattttccatggagtgtgacaaaattaattccattttacggtggacctgagtatcatgactaccatcactacgttggaggacaaagccagagcaactttgcttcggttttcacttactgcgattacatttatggaactgataaaggctatcgaatccataagaagcttcttcatcatcagattaaagaggaagctgaagagaagagagtaaggaaacacgattag

SEQ ID NO: 4217 - protein, 291 aa, Arabidopsis thaliana
MIPYPTVEDASVALGRNLTWFETVWFDYSATKSNFHVYCHTILVLFLVFSLAPFPLVIVEWTGWFDQFKIQKKVKYSLSDMFQCYKEVMKLFLLVVGTLQIVSYPSIQMVGIRSGLPLPSLMEIVAQLVVYFLIEDYTNYWIHRWMHCKWGYEKIHRIHHEYTSPIGYASPYAHWAEILILGIPTFLGPAIAPGHIMTFWLWISLRQFEAIETHSGYDFPWSVTKLIPFYGGPEYHDYHHYVGGQSQSNFASVFTYCDYIYGTDKGYRIHKKLLHHQIKEEAEEKRVRKHD

SEQ ID NO: 4218 - DNA, 900 bp, Arabidopsis thaliana
  CDS (1)..(900)
atgatcccatacgcaacaatcgaagaagcgtcgatcgcattatctcgaaacctcacatggctagagactctctggttcgattactccgccaccaaatccgattactacctctactgccacaacattctcttcctcttcctcatcttctctctcgttcctctccctctcgttttcatcgaatcatctcaatccacctcagatttgttcaatcgctacaaaatccaaccaaaagtgaaaaactcattctcatcgatgttcaaatgttacaaagacgtcatgaagatgttcatcctcgtcgttggtccattacaactcgtttcttatccttcgattcagatgattgagatacgaagtggattaccattaccatcatgtatggagattgtagcacagttagtggtttacttcttggtagaggattatactaattactgggttcatagattctttcattgtaaatggggttatgagaagtttcatcatattcatcatgagtatacagctcctattggttatgctgctccttatgctcattgggctgaggttttgcttcttggcattcccacgtttcttggacctgctattgctcctggtcatatgattaccttttggttgtggattgctttacgacagattgaggctatcgaaactcatagcggatatgatttcccatggtctctgacaaagtacattccattttatggtggagctgagtatcatgattaccatcactacgttggaggacaaagccagagtaactttgcttcagtttttacttactgcgattacatctatggaactgataaaggttaccgattccagaagaagcttcttcagcagatgaaggagaagtccaagaagagcaacaagctggttaatggaggagagaaattcgattag

SEQ ID NO: 4219 - protein, 299 aa, Arabidopsis thaliana
MIPYATIEEASIALSRNLTWLETLWFDYSATKSDYYLYCHNILFLFLIFSLVPLPLVFIESSQSTSDLFNRYKIQPKVKNSFSSMFKCYKDVMKMFILVVGPLQLVSYPSIQMIEIRSGLPLPSCMEIVAQLVVYFLVEDYTNYWVHRFFHCKWGYEKFHHIHHEYTAPIGYAAPYAHWAEVLLLGIPTFLGPAIAPGHMITFWLWIALRQIEAIETHSGYDFPWSLTKYIPFYGGAEYHDYHHYVGGQSQSNFASVFTYCDYIYGTDKGYRFQKKLLQQMKEKSKKSNKLVNGGEKFD

SEQ ID NO: 4220 - DNA, 837 bp, Drosophila melanogaster
  CDS (1)..(837)
atggacaccttgctggctggctggacgcagtccggggattatctgcaggataaatggacattgctgctggacaccgttggtgaggagtcgtggcgcctgtgggtggtgggcagcacagtggtcattttcatcgtatactggctctatgcgggcatcttcaccctgatggacattacgaatcgtccgcgtttcctgcgcaaatacaagatccagccgggtcagaatgagccagtgaatctggccaagttgtggcatgccgtcaaggtggtgctgttcaatctgacggtggttaactttctggtcagctgggtggtgtacgagttcgtttacaaatcggagaatagccaggatatccgggtgctgcccacatttaagcgatccctgcgcgatttggtcgtgtttgtggtgctggaggagatcatgttctactatgcccaccgactgctgcatcacagatcggtgtataagtatgttcacaagaagcatcacgagtggacggctcccattgcggccattacactgtatgcccatccggtggagcatgtgttggccaatctgttgccggtggccacgtccattgccatcctgggcacccatgtcgccctggcctacgtgatctttgccctggccatcatcaattcgatgagcgatcatacgggctacagtttcccatggtcggcgggttcggtgcggttccacgactatcaccatgccaagttcaactacaattacggtgtgctcggttttctggacaagctgcatggcacatatcgcgctcccgcagaacaaaaggctccttcgcaaaggattaagaagatcaaaaagaagtccaagtag

SEQ ID NO: 4221 - protein, 278 aa, Drosophila melanogaster
MDTLLAGWTQSGDYLQDKWTLLLDTVGEESWRLWVVGSTVVIFIVYWLYAGIFTLMDITNRPRFLRKYKIQPGQNEPVNLAKLWHAVKVVLFNLTVVNFLVSWVVYEFVYKSENSQDIRVLPTFKRSLRDLVVFVVLEEIMFYYAHRLLHHRSVYKYVHKKHHEWTAPIAAITLYAHPVEHVLANLLPVATSIAILGTHVALAYVIFALAIINSMSDHTGYSFPWSAGSVRFHDYHHAKFNYNYGVLGFLDKLHGTYRAPAEQKAPSQRIKKIKKKSK

SEQ ID NO: 4222 - DNA, 783 bp, Arabidopsis thaliana
  CDS (1)..(783)
atggattctctcgttgaatccggttggaagtaccttgttacgcatttcagtgactttcaactggcgtgtattgggagttttatacttcatgaaagcgtgtttttcttgtctggactcccttacattttcctagaaaggactggttttctgagcaactacaaaattcagaccaaaagtaatactcctgaagcccagggaaaatgcattgctcgactattactttaccattgctgcgtaaacttgcccctcatgatggcgtcgtatcctgtattcagattcatgggcatggaaagcagttttcctctgccgtcctggaaagtggtgtctgcccagatcttattctacttcatcattgaggattttgtattctattggggtcacaggatcttgcatactaaatggctctacaagaacgtgcacagtgtgcatcatgagtacgcgacaccgtttggtttgacatcagaatatgctcatcccgctgaaattctgttccttggttttgctaccattgttggtccggctctcaccgggcctcacctgatcaccctttggttatggatgatgctcagagttattgagacagttgaggcacattgtggttatcatttcccatggagcccctcgaattttcttcctctatacggcggtgctgacttccatgactaccatcatcgattactctacacaaagtctggcaactactcatcaacgtttgtttacatggactggatctttggcaccgataaaggttacagaaaacttaaggccctaaaagaaacctga

SEQ ID NO: 4223 - protein, 260 aa, Arabidopsis thaliana
MDSLVESGWKYLVTHFSDFQLACIGSFILHESVFFLSGLPYIFLERTGFLSNYKIQTKSNTPEAQGKCIARLLLYHCCVNLPLMMASYPVFRFMGMESSFPLPSWKVVSAQILFYFIIEDFVFYWGHRILHTKWLYKNVHSVHHEYATPFGLTSEYAHPAEILFLGFATIVGPALTGPHLITLWLWMMLRVIETVEAHCGYHFPWSPSNFLPLYGGADFHDYHHRLLYTKSGNYSSTFVYMDWIFGTDKGYRKLKALKET

SEQ ID NO: 4224 - DNA, 855 bp, Oryza sativa (japonica cultivar-group)
  CDS (1)..(855)
atgctcccgtacgcgacggcggcggaggcggaggcggcggtggggcggggcctgacgtgggcggaggcggcctggttccgctactcggcggccatcccggactactgcctctactgccacaacgtccccatcctcctcctcgtctacaccctcgcgccgctccccctcgcgctgctcgagctccgccgccacctgccgctgccgcacaagctgcagcccggcgtgcgccacccgccggccgccttcctccggtgctacgctgccaccgcgcgcgtgctgctcctcgccgtcgggccggtccagctggcgtcgttccctgcggtgagggcggtggggatacggacggggctgccgctgccgtcggcgggggagacggcggcgcaggtggcggtgtacctgctggtggaggactacctgggctactggatccaccgcctgctgcacacgccgtgggcctaccaccacatccaccgagtccaccacgagttcaccgcgcccatgggctacgccgccccgtacgcccactgggccgagatcctcatcctcggcttcccggccttcgccggcccagccatcgtgccgtgccacatgaccaccttctggctctggttcgtgcttcgccacctcgaggccatccacatccacagcgggttcaagttgccgttcgatccgaccaagtatatcccgttgtatggaggagtggagtaccatgactaccaccatttcgtgggaggacacagccagagcaacttctcttctgtcttcactttctgtgattacatctacgggactgacagaggctacagataccataaggcaagcttgtcaaagatgagaatatttgttagagcttag

SEQ ID NO: 4225 - protein, 284 aa, Oryza sativa (japonica cultivar-group)
MLPYATAAEAEAAVGRGLTWAEAAWFRYSAAIPDYCLYCHNVPILLLVYTLAPLPLALLELRRHLPLPHKLQPGVRHPPAAFLRCYAATARVLLLAVGPVQLASFPAVRAVGIRTGLPLPSAGETAAQVAVYLLVEDYLGYWIHRLLHTPWAYHHIHRVHHEFTAPMGYAAPYAHWAEILILGFPAFAGPAIVPCHMTTFWLWFVLRHLEAIHIHSGFKLPFDPTKYIPLYGGVEYHDYHHFVGGHSQSNFSSVFTFCDYIYGTDRGYRYHKASLSKMRIFVRA

SEQ ID NO: 4226 - DNA, 906 bp, Oryza sativa (japonica cultivar-group)
  CDS (1)..(906)
atgctgccctacgcgacggcggcggaggcggaggcggcgctggggagggcgatgacggcggcggagtcgctgtggttcaggtactcggcggggatcccggactacgtcctcttctggcacaacatcctcttcctcttcgtcgtcttcacgctcgcgccgctccccgtcgcgctcctcgagctccgcgcgccggccgccgtggggccgttcaagctgcagcccaaggtgcggctctcccgggaggagttcttccgctgctacagggacgtcatgcgcctcttcttcctcgtcatcggcccgctccagctcgtgtcctaccctaccgtcaagatggtgggaatccacacagggctgccactgccgtcgctgggggagatggcggcgcagctgctggtgtacttcctggttgaggactacctcaactactggatccatcggttgctacatggggagtggggctatgagaagatccaccgtgtccaccatgagttcacggcacccattggattcgccgcgccatatgcacactgggctgaggtgctcatcctcggcatcccctcctttgtcgggccagcgcttgcacctggtcacatgatcaccttctggctctggattgtactccgccagatggaggccatagagacacacagcggctttgatttcccgttcaacctgacaaagtatattccattctatggaggcgcagaataccatgattatcatcactatgttggacgccagagtcagagcaatttcgcttctgttttcacgtattgtgattatctatatggaaccgacaaaggttacagataccataaggcgtaccaagcaaagatgaaggctctggggcaaacggaaggcgagaaagcagatagcaatggattgagctacgcgaagttggattaa

SEQ ID NO: 4227 - protein, 301 aa, Oryza sativa (japonica cultivar-group)
MLPYATAAEAEAALGRAMTAAESLWFRYSAGIPDYVLFWHNILFLFVVFTLAPLPVALLELRAPAAVGPFKLQPKVRLSREEFFRCYRDVMRLFFLVIGPLQLVSYPTVKMVGIHTGLPLPSLGEMAAQLLVYFLVEDYLNYWIHRLLHGEWGYEKIHRVHHEFTAPIGFAAPYAHWAEVLILGIPSFVGPALAPGHMITFWLWIVLRQMEAIETHSGFDFPFNLTKYIPFYGGAEYHDYHHYVGRQSQSNFASVFTYCDYLYGTDKGYRYHKAYQAKMKALGQTEGEKADSNGLSYAKLD

SEQ ID NO: 4228 - DNA, 762 bp, Arabidopsis thaliana
  CDS (1)..(762)
atgatgcagtaccttgttacgcatttcagtgactttcaactggcgtgtattgggagttttatacttcatgaaagcgtgtttttcttgtctggactcccttacattttcctagaaaggactggttttctgagcaactacaaaattcagaccaaaagtaatactcctgaagcccagggaaaatgcattgctcgactattactttaccattgctgcgtaaacttgcccctcatgatggcgtcgtatcctgtattcagattcatgggcatggaaagcagttttcctctgccgtcctggaaagtggtgtctgcccagatcttattctacttcatcattgaggattttgtattctattggggtcacaggatcttgcatactaaatggctctacaagaacgtgcacagtgtgcatcatgagtacgcgacaccgtttggtttgacatcagaatatgctcatcccgctgaaattctgttccttggttttgctaccattgttggtccggctctcaccgggcctcacctgatcaccctttggttatggatgatgctcagagttattgagacagttgaggcacattgtggttatcatttcccatggagcccctcgaattttcttcctctatacggcggtgctgacttccatgactaccatcatcgattactctacacaaagtctggcaactactcatcaacgtttgtttacatggactggatctttggcaccgataaaggttacagaaaacttaaggccctaaaagaaacctga

SEQ ID NO: 4229 - protein, 253 aa, Arabidopsis thaliana
MMQYLVTHFSDFQLACIGSFILHESVFFLSGLPYIFLERTGFLSNYKIQTKSNTPEAQGKCIARLLLYHCCVNLPLMMASYPVFRFMGMESSFPLPSWKVVSAQILFYFIIEDFVFYWGHRILHTKWLYKNVHSVHHEYATPFGLTSEYAHPAEILFLGFATIVGPALTGPHLITLWLWMMLRVIETVEAHCGYHFPWSPSNFLPLYGGADFHDYHHRLLYTKSGNYSSTFVYMDWIFGTDKGYRKLKALKET

SEQ ID NO: 4230 - DNA, 936 bp, Eremothecium gossypii
  CDS (1)..(936)
atgtcggcgatattcggaaactctacggttgctgcgatggtgggccaaggccagggcctaaactactggcaggtgttggccaacgtgaagacagtacagccacagctgaacgttttggagcagttctgggctgcgtggtacagctacatggaaaacgacgtgctggcgacggggctgctgttcttcgtgctgcatgaattcatgtacttcgcgcggtcgctaccatggttcatcatcgaccagatgtcgtggttccgcaagtacaagatacagccgacgaagacgccctcggcgaaggagcaatggcactgtctgaagtcggtgctgctatcgcacttcctggtggaggccattccgatctggacgtttcaccctctgtgccagaagctggggatcagcgttgaggtgccgttcccgacctggaagactgtcgccaccgagatagcgcttttctttgtcctagaagacacctggcactactgggcccatcgcgtgttccactacggtgtgttttacaagtacatccacaagcagcaccaccgctacgcggcgcccttcgggctgtgcgcggaatacgcgcacccggttgagaccatgctgctcgggttcggtaccgtggggatgcctgtgttgtacgttctctacactggcaagctgcatctatttactctgtgcttgtggatcacactacgtctattccaggcggtcgactcgcactcgggttacgacttcccatggtcgttgaacaagttcttgccgttctgggcgggcgcggagcaccatgacctacaccaccactactttattgggaactacgcctcgtccttcagatggtgggactacaccttagacacggaggccggtctagaagctaagaccaccagagaggagaggatgaagaagagggcagaattgagaggcaagaaacttaactaa

SEQ ID NO: 4231 - protein, 311 aa, Eremothecium gossypii
MSAIFGNSTVAAMVGQGQGLNYWQVLANVKTVQPQLNVLEQFWAAWYSYMENDVLATGLLFFVLHEFMYFARSLPWFIIDQMSWFRKYKIQPTKTPSAKEQWHCLKSVLLSHFLVEAIPIWTFHPLCQKLGISVEVPFPTWKTVATEIALFFVLEDTWHYWAHRVFHYGVFYKYIHKQHHRYAAPFGLCAEYAHPVETMLLGFGTVGMPVLYVLYTGKLHLFTLCLWITLRLFQAVDSHSGYDFPWSLNKFLPFWAGAEHHDLHHHYFIGNYASSFRWWDYTLDTEAGLEAKTTREERMKKRAELRGKKLN

SEQ ID NO: 4232 - DNA, 876 bp, Danio rerio
  CDS (1)..(876)
atggaggtgaacggcacagccaacatcctgtcttcagcttttctggcggtggaatttgtggattcatttcttccgcaaaatccactgcaggaaccttttaaacatgcgtggaaccacatgctgcagaactacaccaaattccagatcgccacctggggctcgctcatcgtccatgaactcatctatttcctcttctgcctgcctggatttatctttcagtttcttcctttcatgcaaaagtataagatccagccggataaaccagagacatgggagaaacagtggaagtgcttcaagatgctgctgtttaatcacttctgtatacagctaccgctcatctgcggcacatattacttcactgagttcttcagcatcccttatgactgggacaccatgccccgctggccttttctactggcccagtgttttggttgtgctgtaattgaagacacatggcattactttctccaccgagctctacatcatcgcagaatctacaaatacattcataaagtccatcacgacttcacttctccatttggcatgcaggcagaatatgcccaccctcttgagactttgatactgggcgctggattcttcattggcaccatggtcttctgcaatcatatgatcttactgtgggcctgggtcactttccgcctgctggaaaccattgatgttcacagtggttacgacattcctctgaaccccctgcatctgattccattttatgctggagctcgttttcatgatttccaccacatgaattttgttggcaactatggctctacattcacctggtgggacagacttttcgacaccgattcccagttcaacaaacattactcgcatcataaaactgcgaagagcgactga

SEQ ID NO: 4233 - protein, 291 aa, Danio rerio
MEVNGTANILSSAFLAVEFVDSFLPQNPLQEPFKHAWNHMLQNYTKFQIATWGSLIVHELIYFLFCLPGFIFQFLPFMQKYKIQPDKPETWEKQWKCFKMLLFNHFCIQLPLICGTYYFTEFFSIPYDWDTMPRWPFLLAQCFGCAVIEDTWHYFLHRALHHRRIYKYIHKVHHDFTSPFGMQAEYAHPLETLILGAGFFIGTMVFCNHMILLWAWVTFRLLETIDVHSGYDIPLNPLHLIPFYAGARFHDFHHMNFVGNYGSTFTWWDRLFDTDSQFNKHYSHHKTAKSD

SEQ ID NO: 4234 - DNA, 882 bp, Sus scrofa
  CDS (1)..(882)
atggcaacaaaccaaagtatcagcatctttagttcggcatccttggctgtggagtatgtagattcacttctacctgagaatcctctgcaggaaccatttaaaaatgcttggaattatatgttgaacaattatacaaagttccagattgcaacgtggggatccctcatagttcatgaggccctttatttctttttctgtttacctggatttttgtttcaatttataccttacatgaaaaagtacaaaattcagaaggataaaccagaaacatgggaaaaccagtggaaatgctttaaagtacttctgtttaatcacttttgtatccagtttcctttgatttgtggaacttattattttacggagtatttcagtattccttacgattgggaaacaatgccaagatggtacattgctttggcaagatgctttggctgtgctgtgattgaggatacctggcactatttcctgcataggctcttacaccacaaaagaatatataaatatattcataaaattcatcatgagtttcaggctccatttgggatggaagctgaatatgcacaccctctggaaaccctaattctgggaactggatttttcattggaatcatgctgttatgtgatcatgttattcttctttgggcctgggtgaccgttcgtttgatagaaactatcgatgtccatagtggttatgacatccctctcaaccctttacatctcatccctttctatgctggttctcgtcaccatgacttccaccacatgaacttcattggaaactatgcgtcgacatttacatggtgggacagaatttttggaacagacgctcaatataatgcctacaatgaaaagaggaaaaaggctgagaaaaagactgaataa

SEQ ID NO: 4235 - protein, 293 aa, Sus scrofa
MATNQSISIFSSASLAVEYVDSLLPENPLQEPFKNAWNYMLNNYTKFQIATWGSLIVHEALYFFFCLPGFLFQFIPYMKKYKIQKDKPETWENQWKCFKVLLFNHFCIQFPLICGTYYFTEYFSIPYDWETMPRWYIALARCFGCAVIEDTWHYFLHRLLHHKRIYKYIHKIHHEFQAPFGMEAEYAHPLETLILGTGFFIGIMLLCDHVILLWAWVTVRLIETIDVHSGYDIPLNPLHLIPFYAGSRHHDFHHMNFIGNYASTFTWWDRIFGTDAQYNAYNEKRKKAEKKTE

SEQ ID NO: 4236 - DNA, 894 bp, Anopheles gambiae str. PEST
  CDS (1)..(894)
atggatgcgatcatgtcgctcacggtggagctgttcgatcttccggcacaccagttccgggtgttttggggcgcctccggcagcatgtggcagtcgctgtgggaccgtttcctcgacttcaccggtgataacccgctcgccctttggaccgtcgggtcgtacgtgtacacctcgctggtctactggagcatcgggctggcctacacgctgctggacgtgaccgggcggccggcggccctgcgccggtacaaggtgcagcccggcacgaacgaaccggtcgacccagcccggctgcgcaccgtcatccggcaggtgctgttcaaccagttctgcaccgggctgccgctgctcttcctcatgtactacctgctgccggggcagacgcgcgacacgatccgccagctgcccaccttcgtgacggtcgtctggcagctcggcgtgtgcatcctgatcgaggaggtgatgttctactacagccaccggttgctgcacgacggccgcatctaccggtacatccacaagcggcaccacgagtggacggccccgatcgcgatcaccgcgatgtacgcgcacccggtcgagaacgtgctcagcaatctgctgccgattgcggtcggcgtgtggacgaccgggtgccacatctcggtcgcgtggctgtggttcacgctcgccatctcgaacacgctgcacgtgcactccggctaccatttgccgctgctgcccagcccggagcagcacgatttccatcatctgaagttcaaccaatgctacggcgtgctcggtgtgctggactggctgcacggcacgagcgaaatgtttcaccggtcgaagcaggcgaagcgggactacatcatgaccagcctggagccggtgcgagaaacccatcccgattag

SEQ ID NO: 4237 - protein, 297 aa, Anopheles gambiae str. PEST
MDAIMSLTVELFDLPAHQFRVFWGASGSMWQSLWDRFLDFTGDNPLALWTVGSYVYTSLVYWSIGLAYTLLDVTGRPAALRRYKVQPGTNEPVDPARLRTVIRQVLFNQFCTGLPLLFLMYYLLPGQTRDTIRQLPTFVTVVWQLGVCILIEEVMFYYSHRLLHDGRIYRYIHKRHHEWTAPIAITAMYAHPVENVLSNLLPIAVGVWTTGCHISVAWLWFTLAISNTLHVHSGYHLPLLPSPEQHDFHHLKFNQCYGVLGVLDWLHGTSEMFHRSKQAKRDYIMTSLEPVRETHPD

SEQ ID NO: 4238 - DNA, 840 bp, Anopheles gambiae str. PEST
  CDS (1)..(840)
atggctccgctagcgctgggctacggtaatggtacccgcgaatggtttgtggaccgctgggacgcactgctagacacgatcggtgacgatgtggatacgctctacatgtggttcctgaccgcgtacacgtacgggttcttctggctcgtcggcgggctgttcgtgctgatggacgtgaccaacaaaccgtcgttcttgcgcaagttcaaaaatcaacccggcgctaacgaaccgctcccgtgggccaagcttaaaaatctggtcaaaacggtcgcctacaaccagctggtgtacgggttgccgacgtcctacctgtccttccgggtgggcaagctgattgccgccagcattcccgatccgcgcatcctaccatcgccgtacatcattgtacgggacgttatggtgtgcattgtggcctgggaaatcaccttctactacagccaccggctgctgcactccagcttcttctacaagcgcatccacaagaagcaccacgagtggtcggccccagttgcctgggcggccatgtacgcccatccgttcgagttcatcatcagcgatctgctgccggtgtacgttgggcccgccctcatgaccagtcacgtgttcacgatcgtcatctggttcacgttcgtcatgatggacacgctggtggaccattccgggtatcatctgccggtgctcggcagctccgaaatgcacgattaccaccatctcaagttcaaccagtgctacggtttgttcggctggtgggacggactgcacggcacggacagtgagttccgcaagaagaagcagtaccagaggcaccatcgcatcttcagcctcaaatcggcctag

SEQ ID NO: 4239 - protein, 279 aa, Anopheles gambiae str. PEST
MAPLALGYGNGTREWFVDRWDALLDTIGDDVDTLYMWFLTAYTYGFFWLVGGLFVLMDVTNKPSFLRKFKNQPGANEPLPWAKLKNLVKTVAYNQLVYGLPTSYLSFRVGKLIAASIPDPRILPSPYIIVRDVMVCIVAWEITFYYSHRLLHSSFFYKRIHKKHHEWSAPVAWAAMYAHPFEFIISDLLPVYVGPALMTSHVFTIVIWFTFVMMDTLVDHSGYHLPVLGSSEMHDYHHLKFNQCYGLFGWWDGLHGTDSEFRKKKQYQRHHRIFSLKSA

SEQ ID NO: 4240 - DNA, 921 bp, Neurospora crassa
  CDS (1)..(921)
atggcttcggcagtccttaatgcgaccgtcgctggcctgagctcgacagacacgtacttcaccgtcttggaggaggtttccaagtacaatgttcagctgagctaccccgagaagctctgggcggcgtggtatctgtggatgcagaacgacgttctcgcgaccggtctcatgagcttcttcatgcacgagatcgtctacttcggcaggtcgctcccgtggatgatcatcgatgctctccccatgttcaacaagtacaagattcaaaaagaaaaacgccccacctggagggaacagttcgagtgcgccggtctcgttctcctcagccactgcaccgtcgaactccctcagatctggctcttccaccccatcgccacctactttggtctcgactatggcgtgcccttccctcctctttggaagatggcccttcacatctgcatcttcttcgtcatggaggatgcttggcactattggaaccaccgcgcgcttcactacggccctctctacaaggccatccacaagattcaccacacgtacagcgcgccctttggtctcaccgccgagtacgcctcccccattgaggttatgctcctcggtattggtactgtaggatcccccatcctctgggtttccatcaccaaggacctccatctcgccaccatgtatgtctggattgtcctccgtctcttccaggccatcgacgcccattccggctatgacttccccttcagcttgcgccacttcctccccttctggtgcggtgctgagcaccacgatctccaccacgagcgcttcatcggcaactatgcctccagcttccgctggtgggattactgcctcgacaccgaggccggtgaggaagctgccaaggctcgccgtgacaagaagcttgcggccatcaaggccaagaaggcccagtaa

SEQ ID NO: 4241 - protein, 306 aa, Neurospora crassa
MASAVLNATVAGLSSTDTYFTVLEEVSKYNVQLSYPEKLWAAWYLWMQNDVLATGLMSFFMHEIVYFGRSLPWMIIDALPMFNKYKIQKEKRPTWREQFECAGLVLLSHCTVELPQIWLFHPIATYFGLDYGVPFPPLWKMALHICIFFVMEDAWHYWNHRALHYGPLYKAIHKIHHTYSAPFGLTAEYASPIEVMLLGIGTVGSPILWVSITKDLHLATMYVWIVLRLFQAIDAHSGYDFPFSLRHFLPFWCGAEHHDLHHERFIGNYASSFRWWDYCLDTEAGEEAAKARRDKKLAAIKAKKAQ

SEQ ID NO: 4242 - DNA, 903 bp, Magnaporthe grisea 70-15
  CDS (1)..(903)
atggccaacgtcaccggggtggcttctgccaccgatatgccgatacaggctgtctttgccgaagtcagccagcactttcagcagctcacaatgatggagcggctatgggctacttggtacacctggatgcaaaatgatgtcttggccacggggcttttgacatttatcatccacgaagtagtgtatttcgggaggtctattccatggatcatcatggacagcatgccgatcttccagaaatacaaaatccagcagaccaaagtcccaaccatcaaggagcagcttcactgcgcggggctggtcctcctgagccacttcaccgtcgagctgcccgagatctgggtgttccaccccgtggccatctactgcggcatggcgtttgacgtgcccttccctccggcctggaagattgcgctgcacatcgccgtcttcttcgtgctcgaggacgcgtggcactactggacgcaccggctgatgcactacccgccgctgtaccgatcgatccacaagctgcaccacacgtacacggcgccctttgggctgacggccgagtacgcatccccgatcgaggtgctggtgctggggctgggcaccgcggggacgccgctgctgtgggtgtacctgacgggcgacctgcacctcttcacgatgcaggcgtggatcgtgctgaggctgctgcaggcggtggatgcgcacagcggctacgagttcccctggagcctgcaccacatcctgccgttctgggccggcgcgcagcaccacgacatccaccacgagcagtttgtcggcaactacgcctcgtcgtttaggtggtgggattactttatggacaccgaggccggcgctgaggccaacgccaagcggagggagaggaagatggcggcgctgaagaagacgctgtga

SEQ ID NO: 4243 - protein, 300 aa, Magnaporthe grisea 70-15
MANVTGVASATDMPIQAVFAEVSQHFQQLTMMERLWATWYTWMQNDVLATGLLTFIIHEVVYFGRSIPWIIMDSMPIFQKYKIQQTKVPTIKEQLHCAGLVLLSHFTVELPEIWVFHPVAIYCGMAFDVPFPPAWKIALHIAVFFVLEDAWHYWTHRLMHYPPLYRSIHKLHHTYTAPFGLTAEYASPIEVLVLGLGTAGTPLLWVYLTGDLHLFTMQAWIVLRLLQAVDAHSGYEFPWSLHHILPFWAGAQHHDIHHEQFVGNYASSFRWWDYFMDTEAGAEANAKRRERKMAALKKTL

SEQ ID NO: 4244 - DNA, 930 bp, Magnaporthe grisea 70-15
  CDS (1)..(930)
atggaagctttcaaaaacgccaccatcgcggcgggggctaccgccctgaacagtagccacggctatttcgatgttttcgaagaggtctcaaagtaccatgttcaactcagcgtcttggagcgcctttgggctgcgtggtatttgtggtggcagaatgatactcttgccacaggcataatgagcttcgccatgcacgagattgtttacttcggccggtccctcccctggattatcatcgacgccataccatacttcaggcaatggaagattcaaaaccaaaagatcccgacggccaaggaacaatgggactgcacgatgctcgtcctgctcggccactttaccgtcgaactgccccagatttgggtcttccaccccctggctacatactttggtctcgaccacggcgtccccttccctccggcttggaagatcgccatgcagattgccattttctttgttattgaagacctgtggcactaccttttccaccgcgcgctccattacggtcctctatacaagaacatccacaagttacaccacacctattcagcaccctttggtctcgccgccgaatacgcctctccaattgaagtaatgcttctggggtttggtgttgtcggaactccaatagtgtggacatccatcacgggtgacctgcaccttttcaccatgtatctgtggattgttctccgtctcttccaagccattgacgctcacagtggttacgatttcccttggagcttgcgcaagttcttgcccttctggggaggtgccgatttccatgatttgcaccacgagcgcttcatcggcaactacgcatccagcttcaggtggtgggactgggttttcgacactgaggctggcgatgagcccgcaaggaagaggagagagaaaaagcttgcggccctcaaggctaagaaggcccagtaa

SEQ ID NO: 4245 - protein, 309 aa, Magnaporthe grisea 70-15
MEAFKNATIAAGATALNSSHGYFDVFEEVSKYHVQLSVLERLWAAWYLWWQNDTLATGIMSFAMHEIVYFGRSLPWIIIDAIPYFRQWKIQNQKIPTAKEQWDCTMLVLLGHFTVELPQIWVFHPLATYFGLDHGVPFPPAWKIAMQIAIFFVIEDLWHYLFHRALHYGPLYKNIHKLHHTYSAPFGLAAEYASPIEVMLLGFGVVGTPIVWTSITGDLHLFTMYLWIVLRLFQAIDAHSGYDFPWSLRKFLPFWGGADFHDLHHERFIGNYASSFRWWDWVFDTEAGDEPARKRREKKLAALKAKKAQ

SEQ ID NO: 4246 - DNA, 918 bp, Gibberella zeae PH-1
  CDS (1)..(918)
atggatgcgctaaacgcgacctctttcgcgtccttcaaccaaaccaaggactactttgtcgtcctcgaggaggtttctaagtacaatgtccagctcaacatggtcgagaaactttgggccgcttggtacctttggatgcagaacgacaccctcgcgaccggtatcatgagttttgttctccacgaacttgtctacttcggccgctgcattcccttcatgctgatggatttcatcccctacttccagcaattccgaatccagaagcaaaagattcccaccattaaggagcaatgggactgtgccgccattgttctcatcagccacttcaccgccgaactccctcagatctggttcttccaccccatcgctacctacttcggcatggactacggcgtgcctttccctcctgtgtggaagatggctctccaaatcgctatttgcttcgtgatggaggatgcttggcactactggttccaccgtgctctgcactacggtcccctctacaaggccatccacaagatgcaccacacctactccgctcctttcggtctcgccgctgagtatgcttcacccatcgaaactgctctcctcggaattggtgtcgttggatgcccaattgtcctccttgctgttactggcgagctccacctcttcaccatgtacacctggatcgttctccgtcttttccaggccatcgactctcacagcggctatgactttccctggagtctgcgccacatcctccccgtctgggctggcgctcatcaccacgatcttcaccacgagaagttcatcggcaactacgcctccagcttcacctggtgggactactgcctggacaccgaggccggtgccgacgctcacaagcgccgccgcgagaagaagctcgctgccatcaaggcccagaagcagcaatag

SEQ ID NO: 4247 - protein, 305 aa, Gibberella zeae PH-1
MDALNATSFASFNQTKDYFVVLEEVSKYNVQLNMVEKLWAAWYLWMQNDTLATGIMSFVLHELVYFGRCIPFMLMDFIPYFQQFRIQKQKIPTIKEQWDCAAIVLISHFTAELPQIWFFHPIATYFGMDYGVPFPPVWKMALQIAICFVMEDAWHYWFHRALHYGPLYKAIHKMHHTYSAPFGLAAEYASPIETALLGIGVVGCPIVLLAVTGELHLFTMYTWIVLRLFQAIDSHSGYDFPWSLRHILPVWAGAHHHDLHHEKFIGNYASSFTWWDYCLDTEAGADAHKRRREKKLAAIKAQKQQ

SEQ ID NO: 4248 - DNA, 942 bp, Ustilago maydis 521
  CDS (1)..(942)
atggagttcgtctcgcagcagttcaactcgaccgtggggtcgattttgaacccgaccacgacgcacttggcagccgatttgtacaagaacactgactttgcttcgctcaacgtgttggagagggcatgggccaactggtacctctactggggcaacccggtgctcgcgacgggtatcatgtcgtttgtgctgcacgagctcgtgtactttggacgagccattccttggatcatcatcgactcgatgcctagcatgcgcaagtacaagctgcaggacgaaaagatccccacgcctgagcagcagtggaagtgcaccaagtacgtgctgctctcgcactttacggtcgagttgccacagatctggtcgtttcacccgatttgcgagtactttggtctcgccacgcacgacgttcctttccctcactggaccaagatcgcctggcagattggcgtgtttttcctgtttgaagacgcgtttcactactgggctcatcgcgctctccactggggtcctctgtacaagcacatccacaagaagcaccacgaatactcggcgccgttcggacttgcggctgaatacgcacatcctctggaagtgctgattctgggcatgggtacgattggaggaccgtttgcgctttgcgcgttcaccaaggaccttcacattttgaccgtctacatctggattgtgctgcgtctgttccaagctattgacgctcactctggttacgactttccgatttctttgcacaactgggtcccgttctgggcgggtgcggaccaccacgactaccaccaccaggcgtttgtaggctgctactcgacgtcgttccgatggtgggaccacatgctgggtaccgacctgtcgtacaagcgtgcgcgtgctcgtcaggccgagaagaagcgagaggccttgcaagctgcgaaggcgaaagcgcagtaa

SEQ ID NO: 4249 - protein, 313 aa, Ustilago maydis 521
MEFVSQQFNSTVGSILNPTTTHLAADLYKNTDFASLNVLERAWANWYLYWGNPVLATGIMSFVLHELVYFGRAIPWIIIDSMPSMRKYKLQDEKIPTPEQQWKCTKYVLLSHFTVELPQIWSFHPICEYFGLATHDVPFPHWTKIAWQIGVFFLFEDAFHYWAHRALHWGPLYKHIHKKHHEYSAPFGLAAEYAHPLEVLILGMGTIGGPFALCAFTKDLHILTVYIWIVLRLFQAIDAHSGYDFPISLHNWVPFWAGADHHDYHHQAFVGCYSTSFRWWDHMLGTDLSYKRARARQAEKKREALQAAKAKAQ

SEQ ID NO: 4250 - DNA, 1602 bp, Aspergillus nidulans FGSC A4
  CDS (1)..(1602)
atggcgaatgtaacactcccttctggctcgatgtcataccctgagctccttcaggttgccaaacaagactccagcctctcgtggccggagcagttgtggtgggcgcactataccttctggaacaacgatgtccttgcgactggggttatgacctttcttgcccacgagctcatctacttcggccgctgcattccctggatcgtcgccgatgctcttcccagtgtctttcgtcgtttcaagatccaagaccacaagaccccgtcattcagcgaccaatggacatgtgttaagtacatcctcgccatccacttcatcgtcgagctaccgttgatcgtcctctttcatccgatgatggaagtctgccacgtccaatatacgctgcccttcccgaaactgtctctcttcgctgcgcaagtcgctctctttttcatcgtcgaagacacataccactactggctgcatcgggccatgcattggggcccgctgtaccgttccatccaccgcattcaccaccaatacgctgcaccgttcgggctgacggctgaatacgccagtccggcagagacattcctgctaggcctgggtacaatttgcccgccccttattcttggatccatcactggcgatgtacatctgataactgtattgggatggatggcgctgcgtcagctgcaggcaattgacgcgcattcaggctatgacttcccctggagcttgcgacgaatcgtcccattttggggcggcgccgattggcacgatgaccatcatcgatacttttggggaaactattccagctctttcacgcattgggacatatatgtagcagtaacaagaacgagaggtaaagaagtccaggtcctcggaacggaagtgtgtgaagtggctgtaccggtacctgatccacgagcaaaactgggtgctaaccaaggtcacattatcgtgggcaatggcgcatcaccgaccggtcggatttacccggcctccgcagcctcttccttcctacgtaaagctgctctgctttgctcgggccctctggtccctttgtttgcttggatgcagcacacaaagcgcctattctctcctcttcacctccctcgtcctactgctatcctccgtttgttctgcgtctgctatccactgtccccaatctgctggcatatcatggcccattcaatgcgggtacttgtctatgctcgcgtttctgatatcccagggaaccctcaagctcgccatatcgcccttggagacctccttactggcaatctcctgggccggaggttctacgccactccccggccgccggtatacgaccacgtccatattccagcggatttcgactctagccagccgcttgagcggtggttcatcttcgacctgaatgttggagaaactctctcgcgtagtgaagtcacgcggttacctcatctggtctatcttgctagccgccagggcgatgaatggatattcattagacgcgatacttccattgagaatgcgaaatccaaagcagcgtcgtttacctggggcggacgttcagagcagaaactcgtttctgaattgcaaaaccagtccggagggcacagcgtcggtccagacacataa

SEQ ID NO: 4251 - protein, 533 aa, Aspergillus nidulans FGSC A4
MANVTLPSGSMSYPELLQVAKQDSSLSWPEQLWWAHYTFWNNDVLATGVMTFLAHELIYFGRCIPWIVADALPSVFRRFKIQDHKTPSFSDQWTCVKYILAIHFIVELPLIVLFHPMMEVCHVQYTLPFPKLSLFAAQVALFFIVEDTYHYWLHRAMHWGPLYRSIHRIHHQYAAPFGLTAEYASPAETFLLGLGTICPPLILGSITGDVHLITVLGWMALRQLQAIDAHSGYDFPWSLRRIVPFWGGADWHDDHHRYFWGNYSSSFTHWDIYVAVTRTRGKEVQVLGTEVCEVAVPVPDPRAKLGANQGHIIVGNGASPTGRIYPASAASSFLRKAALLCSGPLVPLFAWMQHTKRLFSPLHLPRPTAILRLFCVCYPLSPICWHIMAHSMRVLVYARVSDIPGNPQARHIALGDLLTGNLLGRRFYATPRPPVYDHVHIPADFDSSQPLERWFIFDLNVGETLSRSEVTRLPHLVYLASRQGDEWIFIRRDTSIENAKSKAASFTWGGRSEQKLVSELQNQSGGHSVGPDT

SEQ ID NO: 4252 - DNA, 825 bp, Gallus gallus
  CDS (1)..(825)
atgaactgcagcgtgcgggacagcgtgctgctcagctgcacaatggagagacagctggataggctgtgcctccagtttctttgggactttgtcagagcaaaagagacattaatcaagtcaccgttttttccagtgttgttttcttttacagcatacatggctttctgtcttccatatattgcactggactttttaagcactagactgccaaacttgagaaaatacaaaatccagccgcagagctatccaactcttggaatgatggtgccttgctttattcagagcgtgtatcaccatgttgtgtggattttcccagtgacatttcttcactggtattggaaaccaacgaatctaccggtgatagctccagagctgcctcaggtcctgctgcaagtaggagtttgcctgcttctgtttgatttcgaatatttcttgtggcatttgcttcatcacagagtgccttggctctacaagaccatccacaaggtgcatcacaagcatgtatcaacatttgctcttactacacagtattccagtgtatgggaactgctgtcactgggattctttgctgccatcaatccattcctcctcggatgccatcctttgacagaaatgattttcttccttgtcaacatctggttgtcagtggaggaccattcaggatatgaccttccgtggtcaactcaccgacttgtgcctttcggttggtatggaggagcaccgcatcatgatctccatcatctgaagttcaagtcaaactatgctccttacttcacccactgggacagactctttgggacatacacagagtcacatcctagttaa

SEQ ID NO: 4253 - protein, 274 aa, Gallus gallus
MNCSVRDSVLLSCTMERQLDRLCLQFLWDFVRAKETLIKSPFFPVLFSFTAYMAFCLPYIALDFLSTRLPNLRKYKIQPQSYPTLGMMVPCFIQSVYHHVVWIFPVTFLHWYWKPTNLPVIAPELPQVLLQVGVCLLLFDFEYFLWHLLHHRVPWLYKTIHKVHHKHVSTFALTTQYSSVWELLSLGFFAAINPFLLGCHPLTEMIFFLVNIWLSVEDHSGYDLPWSTHRLVPFGWYGGAPHHDLHHLKFKSNYAPYFTHWDRLFGTYTESHPS

SEQ ID NO: 4254 - DNA, 927 bp, Candida glabrata CBS138
  CDS (1)..(927)
atgtctgccgttttcaacaacgctacattgacggacttggtccgcgaagacacttacttcaagaccttggccaacatcggtaagtttcaaccacagttgaactttatggagcaatactgggctgcttggtacacttacatgaacaacgatgttctagccaccggtctaatgttcttcctattgcacgagttcatgtacttcttcagatgtctgccatggttcatcattgaccaaatcccatacttcagaaagtggaagttgcaaccaaccaagattccttccaccaaggaacaactatactgtttgaaggccgtcctgctgtcccacttcttggtcgaggccatcccaatctggactttccacccaatgtgtgaaaaactaggtatcaccgtcgaagtcccattcccttcaatcaagaaaatgtccctagagatcgctctgttcttcgttttggaagacatgtggcactactgggcccacaggctattccactacggtgtcttctacaagtacatccacaagcaacaccaccgttacgctgccccattcggtctatccgctgagtacgctcacccattggaaactatgtctctaggtttcggtaccgtcggtatgccaatcctatacgtcatgtacactggtaacttgcatttgttcaccttatgtgtatggattaccttgagactgttccaagccgtcgactctcactccggttacgacttcccatggtccttgaacaagttcttgcctttctgggccggtgccgaacaccacgacttgcaccaccactacttcatcggtaactacgcttcttctttcagatggtgggattactgtctggacaccgaatctggtccagaagctaaggtcgccagagaagaaagaatgaagtccaaggctgaacaaaaggctaagaagaccaattga

SEQ ID NO: 4255 - protein, 308 aa, Candida glabrata CBS138
MSAVFNNATLTDLVREDTYFKTLANIGKFQPQLNFMEQYWAAWYTYMNNDVLATGLMFFLLHEFMYFFRCLPWFIIDQIPYFRKWKLQPTKIPSTKEQLYCLKAVLLSHFLVEAIPIWTFHPMCEKLGITVEVPFPSIKKMSLEIALFFVLEDMWHYWAHRLFHYGVFYKYIHKQHHRYAAPFGLSAEYAHPLETMSLGFGTVGMPILYVMYTGNLHLFTLCVWITLRLFQAVDSHSGYDFPWSLNKFLPFWAGAEHHDLHHHYFIGNYASSFRWWDYCLDTESGPEAKVAREERMKSKAEQKAKKTN

SEQ ID NO: 4256 - DNA, 951 bp, Kluyveromyces lactis NRRL Y-1140
  CDS (1)..(951)
atgtcttctgctgtcatgtcttcagtgttcagcaatggtacaattgctgaacttgttggtcaaggtcaaggtttgagttatggccaggtgctctctaacataaaagttgttcaaccacaattaaacttcatggaacaatattgggctgcttggtactgttatatgaataacgatatcttggctaccggtttgatgtttttcttgttacatgaattcatgtactttttcagatgtctcccttgggctatcatcgatcaaataccatatttcagaagatggaagattcaaccaacaaagattccttctgcgaaggaacaacttttctgtctgaaatctgttcttctatcacatttcctagtggaagctattccaatttggactttccatccaatgtgtcaaaaattaggtatctctgtcgcggtacccttcccatctttgactactatggctaaacaaatttctttgttcttcttcctagaagatgcttggcattattggttccatcgtttgttccattacggtgtcttctacaagtatattcacaagcaacatcatcgttacgcggctcctttcggtctagctgctgagtacgctcaccctgtcgaaactttgtccttgggtttcggtaccgttggtatgccaatcttctacgtcatgtacaccggtaacttgcatctattcactttgtgtctatggattaccatgagattattccaagccgtcgattctcactctggttacgatttcccatggtctttaaacaaattcttgccattctggtctggtgctgaacatcacgatctacatcaccattacttcatcgggaactacgcttcctctttcagatggtgggattatgtattggacactgaagctggcccggaagctaaagctgaaagagaagaaagaatgaagctaaaggctgaaaagaaggcaaagaaagctaattaa

SEQ ID NO: 4257 - protein, 316 aa, Kluyveromyces lactis NRRL Y-1140
MSSAVMSSVFSNGTIAELVGQGQGLSYGQVLSNIKVVQPQLNFMEQYWAAWYCYMNNDILATGLMFFLLHEFMYFFRCLPWAIIDQIPYFRRWKIQPTKIPSAKEQLFCLKSVLLSHFLVEAIPIWTFHPMCQKLGISVAVPFPSLTTMAKQISLFFFLEDAWHYWFHRLFHYGVFYKYIHKQHHRYAAPFGLAAEYAHPVETLSLGFGTVGMPIFYVMYTGNLHLFTLCLWITMRLFQAVDSHSGYDFPWSLNKFLPFWSGAEHHDLHHHYFIGNYASSFRWWDYVLDTEAGPEAKAEREERMKLKAEKKAKKAN

SEQ ID NO: 4258 - DNA, 915 bp, Debaryomyces hansenii CBS767
  CDS (1)..(915)
atgtcatcaagtgtctttcacgattactctgggttttctaatgccacaacatttggcgaagtttacaataacttcaaccaaattgacctgttgaactggatggaaaaattatgggggtcatattattattacatgggcaatgacttgtttgccaccgggttgttgtttttcacattgcacgaggctatgtatttcggtagatgtatcccatggatgattatcgacagaattccatatttcaacaaatataagattcaggatgctaagattccatcgaacaaggaacagtgggaatgtttgaagtctgtgttaacatcgcactttttagtggaagcttttccaatctggtttttccacccattgtgtcaacaaatcggaattagtttcgagattccattcccagatatatcatctatgttgatccaattggcggtttttttcgtatgtgaggacgcatggcattactggttccatagagccttacaccacggtgtcttctacaagtatatccataagcaacatcacagatacgcggcaccattcggattgactgcagagtatgctcatccaattgaagttatgttattaggatttggtactgttggtattccaattgtgtggtgtttaatcactaagaatttgcatcttttcaccgtttgtatctggatcaccttaagattgttccaagcagttgattcacattccggatacgaattcccatggtcattacatcactttgtaccattctgggctggtgctgatcaccatgatgaacaccaccatttcttcattggaagttacagttcatctttcagatggtgggatttcgttttagataccgaagctggtcctaaaggtaagtcttcaagagagcaaaaaatgaagaccaaagctgaatcaaagaaacaattatag

SEQ ID NO: 4259 - protein, 304 aa, Debaryomyces hansenii CBS767
MSSSVFHDYSGFSNATTFGEVYNNFNQIDLLNWMEKLWGSYYYYMGNDLFATGLLFFTLHEAMYFGRCIPWMIIDRIPYFNKYKIQDAKIPSNKEQWECLKSVLTSHFLVEAFPIWFFHPLCQQIGISFEIPFPDISSMLIQLAVFFVCEDAWHYWFHRALHHGVFYKYIHKQHHRYAAPFGLTAEYAHPIEVMLLGFGTVGIPIVWCLITKNLHLFTVCIWITLRLFQAVDSHSGYEFPWSLHHFVPFWAGADHHDEHHHFFIGSYSSSFRWWDFVLDTEAGPKGKSSREQKMKTKAESKKQL

SEQ ID NO: 4260 - DNA, 996 bp, Debaryomyces hansenii CBS767
  CDS (1)..(996)
atggatttattcaaacggacatcagctttactgcccatattggcaaatagtcacttggcatctaatatctctacagaatcgtataccgatgtatttcatagcttgcaaaatctttcgcaaggggacacatcagtatcccagctcaacatacttgaaaagttgtgggcttcatggtatatttacatgaataatgatatcttggctactggtatattattttttgctacccatgaacttatgtatttcgggcggtgtttaccttggttaataattgatcggattagtttttttaataaatggaagatccaggatgaaaaaataccttctgacaaggagcagtgggaatgctttaagtcggtgttgaaactgcacctactcgtggaagccttaccaatctggttatttcatccattatgtgctactttgaacatctccatcgacgtcccattcccttcctacttagtaatgttcttacaaatctgcttattctttgtttgtgaagacttctggcattattgggctcacagactatttcattatggctggctatacaaatatattcataagcaacatcacagatatgccgcaccatttggcttgactgcagaatatgcgcatccggtagaggtaatgtctcttggatttggaaccgtgggattcccaatcatttatgcctacataaccaaatgcaaaccctcgcttgacctaccttccttgcatttattcactctttcgttctggataaccttgagactattccaagcggtggattcccactccggttacgactttccatggtcactacacaacgtattaccgttctgggcaggtgctgatcaccacgacgaccaccatcattattttattggcaactatgccagctcttttcgttggatcgattatttcatgagcacagaaagtggtgagattgcgaaagctaacagagaaaagcgcatgagaaggagagctgaaattcaagctaagaaatcacaataa

SEQ ID NO: 4261 - protein, 331 aa, Debaryomyces hansenii CBS767
MDLFKRTSALLPILANSHLASNISTESYTDVFHSLQNLSQGDTSVSQLNILEKLWASWYIYMNNDILATGILFFATHELMYFGRCLPWLIIDRISFFNKWKIQDEKIPSDKEQWECFKSVLKLHLLVEALPIWLFHPLCATLNISIDVPFPSYLVMFLQICLFFVCEDFWHYWAHRLFHYGWLYKYIHKQHHRYAAPFGLTAEYAHPVEVMSLGFGTVGFPIIYAYITKCKPSLDLPSLHLFTLSFWITLRLFQAVDSHSGYDFPWSLHNVLPFWAGADHHDDHHHYFIGNYASSFRWIDYFMSTESGEIAKANREKRMRRRAEIQAKKSQ

SEQ ID NO: 4262 - DNA, 807 bp, Oryza sativa (japonica cultivar-group)
  CDS (1)..(807)
atgatggcggcggcggggctggagtcggcgtgggagtacctcatcacgcatttcagcgagttccagctggcctccatcggcaccttcctcctccacgagagcgtcttcttcctctccggcctcccctctctcctcttcgagcgcctcggcctcttctccaagtacaagatccagaagaagagcaatacacccgattaccagaacagatgtgtagtgcgtctcgttctctaccatgtctgcgtcaatctccctctcaccattttatcatatcgcaccttcaaattcatgggcttgaggagcacccttccgctgcctcactggacagttgtcgtctcccaagtgctcttcttttttgtgcttgaggatttcatattctactgggggcatagggcactgcataccaaatggctgtaccagcatgttcacagcgtccaccatgaatatgccacaccctttggcctaacatctgaatatgctcaccctgctgagattctattcttgggctttgctaccgtggccggccctgcccttactggccctcacctcttcactctctgggtgtggatggtcttgagggtcttggagacagttgaggctcacagtggctaccacttcccatggagcccgtccaatttcttgccattgtatggcggcgctgaattccatgactatcatcaccgtgttctctacaccaagtctgggaattactcgtcgaccttcatctacatggactggctgtttgggactgataaagattaccgcaagacaaaggccctagaggagaaagaaaggacgaagcatctgtaa

SEQ ID NO: 4263 - protein, 268 aa, Oryza sativa (japonica cultivar-group)
MMAAAGLESAWEYLITHFSEFQLASIGTFLLHESVFFLSGLPSLLFERLGLFSKYKIQKKSNTPDYQNRCVVRLVLYHVCVNLPLTILSYRTFKFMGLRSTLPLPHWTVVVSQVLFFFVLEDFIFYWGHRALHTKWLYQHVHSVHHEYATPFGLTSEYAHPAEILFLGFATVAGPALTGPHLFTLWVWMVLRVLETVEAHSGYHFPWSPSNFLPLYGGAEFHDYHHRVLYTKSGNYSSTFIYMDWLFGTDKDYRKTKALEEKERTKHL

SEQ ID NO: 4264 - DNA, 930 bp, Yarrowia lipolytica CLIB99
  CDS (1)..(930)
atgtcttcgattctcgagagcatcaactccaccgtcacccccgcggcctcctacatcggcacctacgccaagctgtccgacgcccacgccgacaccctcaacattgtcgagcgggtgtgggcatcatactttgtgtggtggggcaatgatctcattgcttgcggcatcttcattttcctgctgcacgagattctctactttggccggtgcgtgccctggatgatcctcgaccagatcccctactttcacaagtggaagatccagggcgaggccaaggtgccctctgtggccgagcagtgggagtgcatgaagtccgtgctcatctcgcactttatggtcgaggccatccccatctggggcttctaccccgtctgcaagtacgccggaatttccatcgacgtgcccttcccctcctggatgaagatctgtgcccatctcgccctattttttgtgctggaggatacctggcactactggctgcaccgaggccttcactacggtcccttctacaagcacatccacaagcagcaccaccgatacgccgctccctttggtttgactgccgagtacgctcaccccgttgaggtggctttgcttggtgtcggaactgtgggcatccccattgcctgggtcatgctaaccggtgatctccatctcttcaccgtgtctgtgtggatcgccctgcgactcttccaggccatcgacgcccattctggctatgagttccccgtgtctctgcatcacttcttgcccatctgggccggtgccgaccaccacgatgaccaccatcgatacttcaccggcaactacgcctcgtcgttccgatggtgggactttgtgctcgacaccgaggccggtcccgccgccaaggccgagcgacagcagcgacttgccgccaaggctgctaagaaggccaagaagcagcagtaa

SEQ ID NO: 4265 - protein, 309 aa, Yarrowia lipolytica CLIB99
MSSILESINSTVTPAASYIGTYAKLSDAHADTLNIVERVWASYFVWWGNDLIACGIFIFLLHEILYFGRCVPWMILDQIPYFHKWKIQGEAKVPSVAEQWECMKSVLISHFMVEAIPIWGFYPVCKYAGISIDVPFPSWMKICAHLALFFVLEDTWHYWLHRGLHYGPFYKHIHKQHHRYAAPFGLTAEYAHPVEVALLGVGTVGIPIAWVMLTGDLHLFTVSVWIALRLFQAIDAHSGYEFPVSLHHFLPIWAGADHHDDHHRYFTGNYASSFRWWDFVLDTEAGPAAKAERQQRLAAKAAKKAKKQQ

SEQ ID NO: 4266 - DNA, 882 bp, Canis familiaris
  CDS (1)..(882)
atggcaacaaatgaaagtatcagcatctttagttcagcatccttggctgtggagtatgtagattcacttttacctgagaaccctctacaagaaccatttaaaaatgcttggaactatatgttgaataattatacaaagttccagattgcaacatggggatccttgatagttcacgaagttctttatttcttgttctgtttacctggatttttgtttcaatttatacctttcatgaaaaagtacaaaattcaaaaggataaaccagaaacctgggaaaaccaatggaaatgttttaaagtacttctctttaatcacttttgtatccagcttcctttgatctgtggaacttattattttacagagtattttaatataccttatgattgggaaagaatgccaagatggtatatgcttttggcaagatgctttggctgtgcggtgattgaggacacctggcactatttcctgcataggctcttgcatcacaaaagaatatataaatatattcataaagttcatcatgagtttcaggctccatttggaatggaagctgaatatgcacatcctttggaaactctgattcttggaactggatttttcattggaatcatgcttttatgtgatcatgtcattctcctttgggcatgggtgaccatccgtttgatagaaactattgatgtccatagtggctatgacattcccctgaaccctttaaatctgatccctttctatgctggttctcggcatcatgatttccaccacatgaacttcatcggaaactatgcttccacatttacatggtgggatagaatttttggaacagactctcaatttactgcctataatgaaaagatgaagaagattgagaaaaagatgcaataa

SEQ ID NO: 4267 - protein, 293 aa, Canis familiaris
MATNESISIFSSASLAVEYVDSLLPENPLQEPFKNAWNYMLNNYTKFQIATWGSLIVHEVLYFLFCLPGFLFQFIPFMKKYKIQKDKPETWENQWKCFKVLLFNHFCIQLPLICGTYYFTEYFNIPYDWERMPRWYMLLARCFGCAVIEDTWHYFLHRLLHHKRIYKYIHKVHHEFQAPFGMEAEYAHPLETLILGTGFFIGIMLLCDHVILLWAWVTIRLIETIDVHSGYDIPLNPLNLIPFYAGSRHHDFHHMNFIGNYASTFTWWDRIFGTDSQFTAYNEKMKKIEKKMQ

SEQ ID NO: 4268 - DNA, 813 bp, Canis familiaris
  CDS (1)..(813)
atgagcagccacaacagctcggggcccctcgccctgggcccgccgggccagctcctcctgcagccgctctgggaccaggtgcgcgcccgggccgcgctcgcgcagtcgccgccgttcgcggtcctcttctccatcaccgcctacctgggctgctgcctgcccttcgtgctgctggacctgctgtgcccccgcgtgcgcgcgctgcggcgctacaaggtgcacccggactgcgggccgtcggcgcgccagctgctgggctgcctgggccggaccgtgtgccagcacgtcgcgctgctgctgcccgcctcgctgctgcactgcgcccgcggcccggcgccctggccccgcgaggcccccgagctgctgcagctggcgcgccacgtgctgggctgcctgctgctcttcgacgccgaggtcttcgcctggcacgtgctgcaccacagggtgccctggctgtatcgcaccttccacaagctgcaccaccagcacgcggcctccttcgcgctggccacgcagtacatgggcgcctgggagctgctctccctgggcttcttccacgtgctgaacgtggtgctgctgcagtgccacccgctgagcgtgctggccttccacctgctcaacatctggctgtccgtggaggaccactccggctacgacttcccctggtccacgcacaggctggtgccctttggctggtacggtggcgtggcccaccacgacctgcaccactcgcagtttaactgcaacttcgccccctacttcacacactgggacagaatcctggggaccctgcggtccgctccggccaagtga

SEQ ID NO: 4269 - protein, 270 aa, Canis familiaris
MSSHNSSGPLALGPPGQLLLQPLWDQVRARAALAQSPPFAVLFSITAYLGCCLPFVLLDLLCPRVRALRRYKVHPDCGPSARQLLGCLGRTVCQHVALLLPASLLHCARGPAPWPREAPELLQLARHVLGCLLLFDAEVFAWHVLHHRVPWLYRTFHKLHHQHAASFALATQYMGAWELLSLGFFHVLNVVLLQCHPLSVLAFHLLNIWLSVEDHSGYDFPWSTHRLVPFGWYGGVAHHDLHHSQFNCNFAPYFTHWDRILGTLRSAPAK

SEQ ID NO: 4270 - DNA, 720 bp, Anopheles gambiae str. PEST
  CDS (1)..(720)
atgcccgacaacctgtacgtctggtactcgatgctgtactcgtacggtctgttctggcttctcggtggactgtttgtgctgatggacctgacgaatcggccgcactgcatgcgcaagtacaaaacgcaacccggcacgaacgagccgctcagctgggcacggtgcaaacagctcatccgcaccgtcgcctacaaccagctagtgtacggtgtcccgatgacctactgttcctatcacgcccgcaagctcatctccgacgaggtgccgaacgtacggatcctgccgacgctggacgttatcctgcgtgatatgctggtgtgcatcgttgcctgggaggtggccttctactacacgcaccggctgctgcactccagctttttctacaagcgcatccacaagcagcaccacgagtggccggccccggttgcctggtccgccatgtacgcccatccgttcgagttcatcatcagtgacctgttcccggtgtacctcgggccggcccttatgaagtgtcacatatttacgctcacgctctggctgacgttcgtgatgtgggacacgctcggcgaccattccggctaccatctgccatttctgggcagctcggaatcgcacgactaccatcatatgaccttcaaccaatgctacggcaactacggctggtgcgatcggctgcacggtacgaatgacgagtttcggaagaagaagcaataccaatag

SEQ ID NO: 4271 - protein, 239 aa, Anopheles gambiae str. PEST
MPDNLYVWYSMLYSYGLFWLLGGLFVLMDLTNRPHCMRKYKTQPGTNEPLSWARCKQLIRTVAYNQLVYGVPMTYCSYHARKLISDEVPNVRILPTLDVILRDMLVCIVAWEVAFYYTHRLLHSSFFYKRIHKQHHEWPAPVAWSAMYAHPFEFIISDLFPVYLGPALMKCHIFTLTLWLTFVMWDTLGDHSGYHLPFLGSSESHDYHHMTFNQCYGNYGWCDRLHGTNDEFRKKKQYQ

SEQ ID NO: 4272 - DNA, 1032 bp, Cryptococcus neoformans var. neoformans JEC21
  CDS (1)..(1032)
atggccgctgcagccgcctttgacctgctcgacaagtacatccccggcgcctcagattctctgaccattgtcaatgccaccaccgcgcaaaacaccctctatccaggtgtcgactttgccgccctcaactggctcgagagattatgggcatcctactacgtctgggtcggcaaccccatcattgccaccggcttgatgagctttttgctccacgaaattgtctattttggacggtgtatcccttggctcatcatcgatgctatgccctacttccaaaagtggaagcttcagcctaacaagcacgtctctcgcgcgcaaatcctcaaatgcaccaaggtcgttcttctcactcacttcacctgtgaagctccccttatcctcgccttccaccctatctgttgcttgttcggaatgaagacttacgaaatacctttttcatctatcggtcttatggctgcgcaaatcgcctttttcttcgtctttgaagacactttccattactgggctcacagggctttgcactatggtcctttgtacaagcacattcacaagctccaccacgagttctctgctcctattggtatcgccgccgaatatgcccatcctcttgaagttttgatcctcgcgcaaggaacgatctctggaccattcttgtacgctgtattcaggaatgaccttcacatcctcaccgtctacgtttggatcactcttcgtctctggcaagcagtcgacgctcattctggctacgacttcccttggtctctccgacacttcctccccttctgggccggtgccgaccaccacgatttccaccatgccactttcacttcatgcttctctaccagtttcaggtggtgggattactactttggcactgatgtcaagtaccacgcttacaaggctcgtgttgctgctgccggtgtcaaggaacgtgcagctgttgaaaagcgcgagatggaaaagctcgaaaaggagggtatcattgaggagcgcgctgcagcgtcgcacagcaagcgggggaagaaggagtag

SEQ ID NO: 4273 - protein, 343 aa, Cryptococcus neoformans var. neoformans JEC21
MAAAAAFDLLDKYIPGASDSLTIVNATTAQNTLYPGVDFAALNWLERLWASYYVWVGNPIIATGLMSFLLHEIVYFGRCIPWLIIDAMPYFQKWKLQPNKHVSRAQILKCTKVVLLTHFTCEAPLILAFHPICCLFGMKTYEIPFSSIGLMAAQIAFFFVFEDTFHYWAHRALHYGPLYKHIHKLHHEFSAPIGIAAEYAHPLEVLILAQGTISGPFLYAVFRNDLHILTVYVWITLRLWQAVDAHSGYDFPWSLRHFLPFWAGADHHDFHHATFTSCFSTSFRWWDYYFGTDVKYHAYKARVAAAGVKERAAVEKREMEKLEKEGIIEERAAASHSKRGKKE

SEQ ID NO: 4274 - DNA, 882 bp, Bos taurus
  CDS (1)..(882)
atggcaacaaatgaaagtatcagcgtctttagttcagcatccttggctgtggaatatgtagattcacttttgcctgacaatcctctgcaggaaccatttaaaaatgcttggaactatatgttgaataattatacaaagttccagattgcaacgtggggatctctcatagttcatgaggtcctttatttcttgttctgtttacctggatttttgtttcaatttataccttacatgaaaaagtacaaaattcaaaaggataaaccagaaacatgggaaaaccaatggaaatgttttaaagtgcttctctttaatcacttttgtatccagcttccgttgatttgtggaacttattattttacagagtatttcagtattccctatgattgggaaacaatgccaagatggtacatgcttttggcaagatgttttggctgtgcagtgatcgaggatacttggcactatttcttgcataggcttttacatcacaaaagaatatataaatacattcataaagttcatcatgagtttcaggctccatttggaatggaagctgaatatgcacatcctctggaaaccataattcttggaactggatttttcattggaatcatgcttttatgtgatcatgttattcttctttgggcctgggtgactgttcgtttgatagagactattgatgtccatagtggttatgacattcctctcaaccctttaaatctcattcctttctatgctggttctcggcatcacgatttccaccacatgaacttcattggaaactatgcttcaacatttacatggtgggacagaatttttggaacagactctcaatttaatgcctacaatgaaaagatgaagaaagttgagaaaaagactgaataa

SEQ ID NO: 4275 - protein, 293 aa, Bos taurus
MATNESISVFSSASLAVEYVDSLLPDNPLQEPFKNAWNYMLNNYTKFQIATWGSLIVHEVLYFLFCLPGFLFQFIPYMKKYKIQKDKPETWENQWKCFKVLLFNHFCIQLPLICGTYYFTEYFSIPYDWETMPRWYMLLARCFGCAVIEDTWHYFLHRLLHHKRIYKYIHKVHHEFQAPFGMEAEYAHPLETIILGTGFFIGIMLLCDHVILLWAWVTVRLIETIDVHSGYDIPLNPLNLIPFYAGSRHHDFHHMNFIGNYASTFTWWDRIFGTDSQFNAYNEKMKKVEKKTE

SEQ ID NO: 4276 - DNA, 846 bp, Dictyostelium discoideum
  CDS (1)..(846)
atgatgaaattaggaaatattttaagttttttcaaatcagaaaaaaactataacattgaccaactcgacccacaaccaaccaattcaattgaatatggttggtcatggattcttcaaagttatggtgaatttggtttattcttaattttttatatctcaatggctatcctttatgcccttagtgcaattgtcttccatttatttgacaaatataaacttttcccaaagttaaaacttcaagttactaaatatccatcatctcaagatattaaaagatgtattaataatttagttttaaattatattttcgttattttaccattgggtgttgtatttttcccattttcaaaagttttaggaatgagttatgatttaccattaccatcagtttggaaatttttatttgatattttcctttgtttaattggtgaagatttcttccattattttatgcatagatttttccatactccatggttctataaaaatattcataaggaacatcactactattcagcaccatttggatttacagcttcatatgcacatccagttgaagttgtatttttaggtattgccacattcgcaccagttttaattattagaccacattatctcactttttattcatggtttgtcgttcgtcaattagatgccgttttaactcactctggttatgatattgatgttttcccattcaatttcatgccatactatggtggtacatctttccatgattatcatcataaagagtttacatgcaactatggttcaagattcacttatttagataaattattaggaacttataaagaaagatcaaaaccaaaatcaaaatcaaactaa

SEQ ID NO: 4277 - protein, 281 aa, Dictyostelium discoideum
MMKLGNILSFFKSEKNYNIDQLDPQPTNSIEYGWSWILQSYGEFGLFLIFYISMAILYALSAIVFHLFDKYKLFPKLKLQVTKYPSSQDIKRCINNLVLNYIFVILPLGVVFFPFSKVLGMSYDLPLPSVWKFLFDIFLCLIGEDFFHYFMHRFFHTPWFYKNIHKEHHYYSAPFGFTASYAHPVEVVFLGIATFAPVLIIRPHYLTFYSWFVVRQLDAVLTHSGYDIDVFPFNFMPYYGGTSFHDYHHKEFTCNYGSRFTYLDKLLGTYKERSKPKSKSN

SEQ ID NO: 4278 - DNA, 1143 bp, Aspergillus nidulans FGSC A4
  CDS (1)..(1143)
atgaactttatgaattcgaccttctcgtcgactactcctgaaacctactgggatcattatgatgacatttccgcccatagctcacacctaaacgttgctgaacgtttgtgggcagcttggtatgcttggatgcaaaatgatgtcctagcgacaggtatcatgtccttcgttatgcacgagctagtatactttgggcggtctctgccgtggattctcatcgacacgcttggttttttcaagaactataagattcagagtagtaaaattccgtccttacgggagcagtgggattgcgccaaatttgtccttttgagccatttcacggttgagttaccccaaatatggcttttccatccaatggctcaattcttcggtctctctacatctgtgccgtttccttctttctggacaatggcctaccaaatcgcaatcttcttcgtcatggaagacacatggcattatttttcccatcgagctctccactggggtccactttacaaagccattcacaagatccatcatcaatattcagctccattcggcatggccgctgaatatgcgtcacctatagaggttatgattctgggatttggtactgttggatgcccaattgtatggtgcgctgcgactggggatctgcatatctttacgatgccattgatgcacacagtgggtatgagttcccatggagtctacaccactttcttcctttttgggctggagcagatcatcacgaccttcaccacgagaagttcgttggcaactactccagcagtttcaggtggtgggattatgttttggacacagagtacagtcccgaggcgatcaggcggaggcgggatcacaaggcggtcggcggtgcgaagaaaaccgaataacgctatcgtacttgaggtctcgtggaatggcattaatatgagcattgtcactccccttgccaggagtacttccccagacatgctcatttgggaccggggcataccccgtcatatcgatagcccgacggctcatcgactgggggaggttcccggccttgaagaacctccaaggtttagtttcgattacatcggccattcgtcctccttcaataatcctttatgggattggaacccttacccggttaacggggccgacctatcctga

SEQ ID NO: 4279 - protein, 380 aa, Aspergillus nidulans FGSC A4
MNFMNSTFSSTTPETYWDHYDDISAHSSHLNVAERLWAAWYAWMQNDVLATGIMSFVMHELVYFGRSLPWILIDTLGFFKNYKIQSSKIPSLREQWDCAKFVLLSHFTVELPQIWLFHPMAQFFGLSTSVPFPSFWTMAYQIAIFFVMEDTWHYFSHRALHWGPLYKAIHKIHHQYSAPFGMAAEYASPIEVMILGFGTVGCPIVWCAATGDLHIFTMPLMHTVGMSSHGVYTTFFLFGLEQIITTFTTRSSLATTPAVSGGGIMFWTQSTVPRRSGGGGITRRSAVRRKPNNAIVLEVSWNGINMSIVTPLARSTSPDMLIWDRGIPRHIDSPTAHRLGEVPGLEEPPRFSFDYIGHSSSFNNPLWDWNPYPVNGADLS

SEQ ID NO: 4280 - DNA, 966 bp, Candida albicans SC5314
  CDS (1)..(966): transl_table=12
atggaagttttgcatcaattaactactaatcatacttcaagtttatctaatttgataaataatcatccaacaagtttttcatcaattttaaaagaagttgatattactaatcatagtttaacttatattgaaaaattatgggcctcatattatatttatatgaataatgatattttagctacagggttattatttttcattactcatgaattaatgtattttggtagatgtttaccatggtttattattgataaaactccttggtttaatcgttataaaattcaaccaacaaaaattcctactaatcaagaacaatgggaatgttttaaaacggttttaaaacaacattttcttgttgaagctttacctatttggttattccatccagtatgtgctaaattaggtattacttatgatgttccattccccaattggaaaattcaagctatacaaattgccatttttttcatttgtgaagatttttggcattttgtattccatagtttatttcatcaaggttggttttataaaaatattcataaagttcatcataaatatgctgctccatttggtttagcagcagaatatgctcatccagtcgaagtcatggccttaggagtggggacggtggggttccctattttatatgcttatttggccacagtttatactaatatgccaccacttcatttatttacattgacaacttggattgttttaagattattccaagccgttgattctcattctggttatgattttccttggtcattaaacaagttcttcccactttgggctggtgctgctcatcatgatgaacatcatcattatttcattggtaattatgctagttcttttaccctttgggattggttattccaaactgaatgtggtacttatgctagaaaaagaagagaaagaaatagtcgagctagtgctgaaagtaaacataaaaaaactttatag

SEQ ID NO: 4281 - protein, 321 aa, Candida albicans SC5314
MEVLHQLTTNHTSSLSNLINNHPTSFSSILKEVDITNHSLTYIEKLWASYYIYMNNDILATGLLFFITHELMYFGRCLPWFIIDKTPWFNRYKIQPTKIPTNQEQWECFKTVLKQHFLVEALPIWLFHPVCAKLGITYDVPFPNWKIQAIQIAIFFICEDFWHFVFHSLFHQGWFYKNIHKVHHKYAAPFGLAAEYAHPVEVMALGVGTVGFPILYAYLATVYTNMPPLHLFTLTTWIVLRLFQAVDSHSGYDFPWSLNKFFPLWAGAAHHDEHHHYFIGNYASSFTLWDWLFQTECGTYARKRRERNSRASAESKHKKTL

SEQ ID NO: 4282 - DNA, 966 bp, Candida albicans SC5314
  CDS (1)..(966): transl_table=12
atggaagttttgcatcaattaactactaatcatacttcaagtttatctaatttgataaataatcatccaacaagtttttcatcaattttaaaagaagttgatattactaatcatagtttaacttatattgaaaaattatgggcctcatattatatttatatgaataatgatattttagctacagggttattatttttcattactcatgaattaatgtattttggtagatgtttaccatggtttattattgataaaactccttggtttaatcgttataaaattcaaccaacaaaaattcctactaatcaagaacaatgggaatgttttaaaacggttttaaaacaacattttcttgttgaagctttacctatttggttattccatccagtatgtgctaaattaggtattacttatgatgttccattccccaattggaaaattcaagctatacaaattgccatttttttcatttgtgaagatttttggcattttgtattccatagtttatttcatcaaggttggttttataaaaatattcataaagttcatcataaatatgctgctccatttggtttagcagcagaatatgctcatccagtcgaagtcatggccttaggagtggggacggtggggttccctattttatatgcttatttggccacagtttatactaatatgccaccacttcatttatttacattgacaacttggattgttttaagattattccaagccgttgattctcattctggttatgattttccttggtcattaaataagttcttcccactttgggctggtgctgctcatcatgatgaacatcatcattatttcattggtaattatgctagttcttttaccctttgggattggttattccaaactgaatgtggtacttatgctagaaaaagaagagaaagaaatagtcaagctagtgctgaaagtaaacataaaaaaactttatag

SEQ ID NO: 4283 - protein, 321 aa, Candida albicans SC5314
MEVLHQLTTNHTSSLSNLINNHPTSFSSILKEVDITNHSLTYIEKLWASYYIYMNNDILATGLLFFITHELMYFGRCLPWFIIDKTPWFNRYKIQPTKIPTNQEQWECFKTVLKQHFLVEALPIWLFHPVCAKLGITYDVPFPNWKIQAIQIAIFFICEDFWHFVFHSLFHQGWFYKNIHKVHHKYAAPFGLAAEYAHPVEVMALGVGTVGFPILYAYLATVYTNMPPLHLFTLTTWIVLRLFQAVDSHSGYDFPWSLNKFFPLWAGAAHHDEHHHYFIGNYASSFTLWDWLFQTECGTYARKRRERNSQASAESKHKKTL

SEQ ID NO: 4284 - DNA, 891 bp, Aspergillus fumigatus Af293
  CDS (1)..(891)
atgaattcaacactatactcgacttctcctggaacttactgggagcagtatgaggaagtttcccaacatagtgcacatctcaatgtcgtggagagactttggtctgcgtggtatgcctggatgcaaaatgatgtccttgcaactggcatcatgtcgtttgtgatgcacgagattgtctatttcggccgttctgttccctggatattgatcgacactttgggcttgttcaagaattataaaatccagaataataaaatcccttcacttagggagcaatgggattgcgccaagtttgtccttcttagccacttcactgtggaacttccgcagatttggcttttccaccccatggctcaattcttcggtctgtctacgtcggttccttttccctccgtttggaccatgatgtaccagatagccattttctttgttcttgaggatacatggcattatttctctcaccgtgccctccattggggccctttgtacaaggctatccataaaattcaccaccagtattcggcaccctttggtatggccgccgaatatgcatcgcctattgaggttatgattcttggatttgggaccgttggatgccccattctttggtgtgcattgaccggcgacctgcatatcttcacgatgtatgtctggattgttctacggcttttccaggccattgatgcgcacagcggctatgagttcccttggagtctccatcatttcttgcctttttgggctggagctgatcaccatgatcttcaccacgagaaatttgtcggcaactattcgagtagcttccggtggtgggattatcttcttgatactgaatatacacctgaagctcttaagcgccgaagggagggaaagcttacaaaaaaggctcagtga

SEQ ID NO: 4285 - protein, 296 aa, Aspergillus fumigatus Af293
MNSTLYSTSPGTYWEQYEEVSQHSAHLNVVERLWSAWYAWMQNDVLATGIMSFVMHEIVYFGRSVPWILIDTLGLFKNYKIQNNKIPSLREQWDCAKFVLLSHFTVELPQIWLFHPMAQFFGLSTSVPFPSVWTMMYQIAIFFVLEDTWHYFSHRALHWGPLYKAIHKIHHQYSAPFGMAAEYASPIEVMILGFGTVGCPILWCALTGDLHIFTMYVWIVLRLFQAIDAHSGYEFPWSLHHFLPFWAGADHHDLHHEKFVGNYSSSFRWWDYLLDTEYTPEALKRRREGKLTKKAQ

SEQ ID NO: 4286 - DNA, 909 bp, Aspergillus fumigatus Af293
  CDS (1)..(909)
atggactcgctcaattcgtcctatccgcagtccgccatggcgacctattccgatcttctcgacctcgccgctcagcagcaacctcatctctctggtctcgagagactttggtgggcgcattatgcctactgggacaataacattgtcgcaactgctacaggaatcatcaccttcctcgcccacgaaatcatctacttcagccgctgtctcccctggatcatcgccgactccctccccagcatcttcctgaaatacaagatccaagaccagaaacctcctccatccgcagcagagcaatgggcttgcacaaagtacatcctcctcatccactttgtcgtcgaactccccctcatcgtcctcttccacccaatgatggaactctgcggcctgagcttcaccatccccttcccagatctccgcactctcaccgcccaaataattatcttcttcctcctcgaagacacataccactactggctgcatcgcgccatgcactggggcccgctctaccgctccatccaccgcatccaccaccaatacgccgcgccctttggactaacagccgagtacgcgagtccctgggagactctcctgctgggcttgggtaccatcggccctccattgctcctggcactgatggactgcaacgtgcacttggtgacggtgctggcgtgggtgacgctgcgacagttccaggctatcgattcacattcggggtacgattttccctggagtctcaggcggattttgccgttctggggtggagcggattggcacgatgatcaccatcgatacttctgggggaattattccagttcgtttaggcactgggatgtgttgatgggtacggttgctggtccggaagcgagggagaagagacgcgccgagcgggagaagcggcaggcttga

SEQ ID NO: 4287 - protein, 302 aa, Aspergillus fumigatus Af293
MDSLNSSYPQSAMATYSDLLDLAAQQQPHLSGLERLWWAHYAYWDNNIVATATGIITFLAHEIIYFSRCLPWIIADSLPSIFLKYKIQDQKPPPSAAEQWACTKYILLIHFVVELPLIVLFHPMMELCGLSFTIPFPDLRTLTAQIIIFFLLEDTYHYWLHRAMHWGPLYRSIHRIHHQYAAPFGLTAEYASPWETLLLGLGTIGPPLLLALMDCNVHLVTVLAWVTLRQFQAIDSHSGYDFPWSLRRILPFWGGADWHDDHHRYFWGNYSSSFRHWDVLMGTVAGPEAREKRRAEREKRQA

SEQ ID NO: 4288 - DNA, 861 bp, Strongylocentrotus purpuratus
  CDS (1)..(861)
atggcggctgaatctgtgctaaatgatttgccaattgtggagaatgcaactgacggtggaatgggggcttttgaagaaggatggaggtacatgaattcaaactattccaggtttcagatctcaacatacatgtcagcatgccttcacatagttacctactttctcttctgctcaccatcgttcatcttccagtttttccgcttcatggaccggtacaagatacagcaggataaaccgaccacatgggaccaggaatggaaatgcttcaagcttgttattgccaaccaagtgctcatccagacaccattcttctcaggggcctacttcttctgccaatatatgaatattccatttgactatgagtccatgcctgtttggtatatgacacttgcccactgctttggtagtttagtgctagaggatgcctggcattacttccttcatagagctcttcatcataaaagcatctacaagtacatccacaagatccatcacaacttccaggcccctttcggcatgacggctgaatacgctcatccaatggagactatgattctgggaatgggtttcatgtggggtatgctcctcttctgcgatcacttgattttcttatggtgctggatgtgtgtccgtctgatcgaaaccatcgatgtccactccggatacgacttccccatcaatccacttcacgtcatcccattctatggaggtgcgaggttccatgacttccatcacaagaatttcaacggtaactactcctctacattcacctggtgggacaagatctttggtacagacatgcagtacaaggattattacgccaaactacaagatcagaagactgaaaagaaagccaactaa

SEQ ID NO: 4289 - protein, 286 aa, Strongylocentrotus purpuratus
MAAESVLNDLPIVENATDGGMGAFEEGWRYMNSNYSRFQISTYMSACLHIVTYFLFCSPSFIFQFFRFMDRYKIQQDKPTTWDQEWKCFKLVIANQVLIQTPFFSGAYFFCQYMNIPFDYESMPVWYMTLAHCFGSLVLEDAWHYFLHRALHHKSIYKYIHKIHHNFQAPFGMTAEYAHPMETMILGMGFMWGMLLFCDHLIFLWCWMCVRLIETIDVHSGYDFPINPLHVIPFYGGARFHDFHHKNFNGNYSSTFTWWDKIFGTDMQYKDYYAKLQDQKTEKKAN

SEQ ID NO: 4290 - DNA, 1029 bp, Strongylocentrotus purpuratus
  CDS (1)..(1029)
atgggggataacgagagtcgagacgagacctgctgctactcaggcaaggcatccctggaaaaggaagcagccattgacatcaaagatgcagaacaagaacaaaagagtcggttgtctcgattctgcgaggtctttgccaagatcgccctcattgttggtgggttcatcatcgtcctgggagcacttcggaacaccctcacatactaccttcagctgttttggggcgtgtcgggcaatttctggatgagctatgttggtgctcatcattgtccagtattggctagtgtgtgcatttttcctgatagtggatcttgtgaggccatcattcatcatcaagtacaagatacaaccaaccccagaatgaccctgatcccagaaggcaagctacgcaaggcggtgctgacggtgctcgctaaccagacagtggttgtatttcccatagccgtgggtgtgtaccacttaatggggtggaggggttgtggctttagcgcggcggagcttccctccttccagtgggtcatgctggagctctttgtcttccttatcgtcgaggagtttggcttctattactcacacagattgtcccaccatccaagactctacaagtacgtccacaagaagcaccatgagtggactgcgcccatcagcgtggtagccatctatgcccatcccatcgagcacatcttctccaacaccctccccgtcgtgctgggcccgttgattatgggctcgcatatcgctaccctcacaatgtgggccatgttagcccaggcgtcggccatcaactctcactgcgggtaccatctacccctcatgccttccccagaggcgcatgacttccaccatctaaaatttactaataactttggcacgctgggtttcctggaccgtcttcatggtaccgacgagctcttccgcaagaccaagccctaccaccgtcacttccttctccttgggctcacccctgtctcccagaccttccctgatgattccaggtgtaagaatatagagtgcgacaaggatgaatag

SEQ ID NO: 4291 - protein, 342 aa, Strongylocentrotus purpuratus
MGDNESRDETCCYSGKASLEKEAAIDIKDAEQEQKSRLSRFCEVFAKIALIVGGFIIVLGALRNTLTYYLQLFWGVSGNFWMSYVGAHHCPVLASVCIFPDSGSCEAIIHHQVQDTTNPRMTLIPEGKLRKAVLTVLANQTVVVFPIAVGVYHLMGWRGCGFSAAELPSFQWVMLELFVFLIVEEFGFYYSHRLSHHPRLYKYVHKKHHEWTAPISVVAIYAHPIEHIFSNTLPVVLGPLIMGSHIATLTMWAMLAQASAINSHCGYHLPLMPSPEAHDFHHLKFTNNFGTLGFLDRLHGTDELFRKTKPYHRHFLLLGLTPVSQTFPDDSRCKNIECDKDE

SEQ ID NO: 4292 - DNA, 801 bp, Canis familiaris
  CDS (1)..(801)
atggcaacaaatgaaagtatcagcatctttagttcagcatccttggctgtggagtatgtagattcacttttacctgagaaccctctacaagaaccatttaaaaatgcttggaactatatgttgaataattatacaaagttccagattgcaacatggggatccttgatagttcacgaagttctttatttcttgttctgtttacctggatttttgtttcaatttatacctttcatgaaaaagtacaaaattcaaaaggataaaccagaaacctgggaaaaccaatggaaatgttttaaagtacttctctttaatcacttttgtatccagcttcctttgatctgtggaacttattattttacagagtattttaatataccttatgattgggaaagaatgccaagatggtatatgcttttggcaagatgctttggctgtgcggtgattgaggacacctggcactatttcctgcataggctcttgcatcacaaaagaatatataaatatattcataaagttcatcatgagtttcaggctccatttggaatggaagctgaatatgcacatcctttggaaactctgattcttggaactggatttttcattggaatcatgcttttatgtgatcatgtcattctcctttgggcatgggtgaccatccgtttgatagaaactattgatgtccatagaatttgcctaaacatccaagtatcatgggtcgaaccgtatggatcgacagtgagagtgaggtggccaaatccggaattgcctgccccaagaacttcttctctggtcctgagctga

SEQ ID NO: 4293 - protein, 266 aa, Canis familiaris
MATNESISIFSSASLAVEYVDSLLPENPLQEPFKNAWNYMLNNYTKFQIATWGSLIVHEVLYFLFCLPGFLFQFIPFMKKYKIQKDKPETWENQWKCFKVLLFNHFCIQLPLICGTYYFTEYFNIPYDWERMPRWYMLLARCFGCAVIEDTWHYFLHRLLHHKRIYKYIHKVHHEFQAPFGMEAEYAHPLETLILGTGFFIGIMLLCDHVILLWAWVTIRLIETIDVHRICLNIQVSWVEPYGSTVRVRWPNPELPAPRTSSLVLS

SEQ ID NO: 4294 - DNA, 1364 bp, Mus musculus
  CDS (24)..(920)
gaattgtgggacatagtctcagcatgggctgctacaacggttcggagctccaagacctgggctgttccagccagctgctcctgcagcccctctgggacaccataaggacaagggaggcgttcacgcgctcacccatcttcccagtcaccttttctatcatcacttacgtgggcttctgcctaccgttcgtggtgctggacgtcctgtatccctgggtccccatcctgcgacgctacaagatccacccggacttctcgccttccgtaaagcagcttctgccttgcctggggctgacactctaccagcacctggtgttcgtgttcccggtgacgctgctgcactgggtgcgcagcccggcgctcctcccccaggaggcccctgagctcgtccagctcctaagtcacgtcctgatctgcctgctgctcttcgacaccgagatcttcgcgtggcacctgctgcaccataaggtgccctggctgtaccgcaccttccacaaggtgcatcaccagaactcgtcctccttcgcgctggcgacccaatacatgagcttctgggagctgctttcgctgaccttcttcgacgtgctgaacgtcgcggtgcttcggtgtcacccactcagcatctttacctttcacgtgattaacatctggctgtcggtggaggaccactcgggctatgacttcccgtggtccactcacagacttgtgccctttggctggtacgggggcgtggctcaccacgacatgcatcactctcagtttaactgcaattttgctccttacttcacacactgggacaaaatgctgggcactctgcggtccgcgcccctgccagagagcctttgcgcctgcggtgagcgctgcgtgaactccagagagcgatgcgctgtacacttgatccagaagaagaaacagacttgagttactttattagaagtttgtaacttttaaagtgatgcacactgctataaaatctaatgttgtttctgcagcctgacaaagtaatttatataatgtttctatgtgaatttaattgtggtcttggtgttaaatttcaacttatcccagtgtcattgactccaggacacaaggtagacattcagcgtggtgtatttgaatcattatgatctctgaaatgatttgtttctagaaccaagactttcctatgtatgaaatcgcactggaactgggctctaacctcacatgttgagagaagacctgatttctgactctttaaataatcaaatttgttcctgctgggcagtgaccaaggttatagtatattttttctacttttgaatgaaatgatatatttatattgaaaaaagttttatttgtattttaaaaataaaaagaacatgaact

SEQ ID NO: 4295 - protein, 298 aa, Mus musculus
MGCYNGSELQDLGCSSQLLLQPLWDTIRTREAFTRSPIFPVTFSIITYVGFCLPFVVLDVLYPWVPILRRYKIHPDFSPSVKQLLPCLGLTLYQHLVFVFPVTLLHWVRSPALLPQEAPELVQLLSHVLICLLLFDTEIFAWHLLHHKVPWLYRTFHKVHHQNSSSFALATQYMSFWELLSLTFFDVLNVAVLRCHPLSIFTFHVINIWLSVEDHSGYDFPWSTHRLVPFGWYGGVAHHDMHHSQFNCNFAPYFTHWDKMLGTLRSAPLPESLCACGERCVNSRERCAVHLIQKKKQT

SEQ ID NO: 4296 - DNA, 813 bp, Sus scrofa
  CDS (1)..(813)
atgagcggccacaacaactccgagctcttcgtcctctgcagctccagccagctgttcctgcagcccctctgggaccacctgaagacctgggagaccctcatcctgtcgcccttcttcccagtcttcttctccatcaccacctacttgggcttctgcctgcccttcgtggtactggatgtcttatgcccgtgggtgcccgcgctgcggcgctacaagatccacccggacttctcgccgtcggtgtggcagctgctgccctgcctggggctgacgctctaccagcatgtggtgttcgtgttcccgatgactctgttgcactgggcagcaagcccggttctcctgcccccagaagcccccgagctgctccagctggtgcgccacatcgtgctgtgcctgctgctcttcgacaccgaattcttcatctggcatgtgctgcatcacaaagtgccttggctgtaccggaccttccacaagatgcaccaccagaactcgtcctcgttcgcactggccacacagtacatgagtgtcggggagctactttctttgggtgtctttgacatggtgaacatcatgctgctccggtgccacccgctcaccgtcctgatcttccacgtgatcaacatctggctgtcggtggaggaccactccggctatgacttcccctggtccgctcacagactagtacctttcgggtggtatgggggcgtgacacaccacgacctacatcactcccagtttaactgcaacttcgccccttacttcacacactgggacaaaatactgggaacgctgcggtctgctcatgccaagtaa

SEQ ID NO: 4297 - protein, 270 aa, Sus scrofa
MSGHNNSELFVLCSSSQLFLQPLWDHLKTWETLILSPFFPVFFSITTYLGFCLPFVVLDVLCPWVPALRRYKIHPDFSPSVWQLLPCLGLTLYQHVVFVFPMTLLHWAASPVLLPPEAPELLQLVRHIVLCLLLFDTEFFIWHVLHHKVPWLYRTFHKMHHQNSSSFALATQYMSVGELLSLGVFDMVNIMLLRCHPLTVLIFHVINIWLSVEDHSGYDFPWSAHRLVPFGWYGGVTHHDLHHSQFNCNFAPYFTHWDKILGTLRSAHAK

SEQ ID NO: 4298 - DNA, 882 bp, Macaca fascicularis
  CDS (1)..(882)
atggcaacaaatgaaagtgtcagcatctttagttcagcatccttggctgtggaatatgtagattcacttttacctgagaatcctctgcaagaaccatttaaaaatgcttggaactatatgttgaataattatacaaagttccagattgcaacatggggatcccttatagttcatgaagccctttatttctcgttctgtttacctggatttttatttcaatttataccttatatgaaaaaatacaaaattcaaaaggataagccagagacatgggaaaaccaatggaaatgtttcaaagttcttctctttaatcacttctgtatccagctgcctttgatttgtggaacctattattttacagagtatttcaatattccttatgattgggaaagaatgccaagatggtattttcttttggcaagatgctttggctgtgcagtcattgaagatacttggcactattttatgcatagactcttacaccacaaaagaatatacaaatatattcataaagttcatcatgagtttcaggctccatttggaatggaagctgaatatgcacatcctttggagactctaattcttggaactggatttttcattggcatcgtgcttttgtgtgatcatgtaattcttctttgggcatgggtgaccattcgtttattagaaactattgatgtccatagtggctatgatattcctctcaaccctttaaatctgatccctttctatgctggttctcggcatcatgatttccaccacatgaacttcattggaaactatgcttcaacatttacatggtgggatcgaatttttggaacagactctcaatatcatgcctattatgaaaagaagaagaagtttgagaaaaagactgaataa

SEQ ID NO: 4299 - protein, 293 aa, Macaca fascicularis
MATNESVSIFSSASLAVEYVDSLLPENPLQEPFKNAWNYMLNNYTKFQIATWGSLIVHEALYFSFCLPGFLFQFIPYMKKYKIQKDKPETWENQWKCFKVLLFNHFCIQLPLICGTYYFTEYFNIPYDWERMPRWYFLLARCFGCAVIEDTWHYFMHRLLHHKRIYKYIHKVHHEFQAPFGMEAEYAHPLETLILGTGFFIGIVLLCDHVILLWAWVTIRLLETIDVHSGYDIPLNPLNLIPFYAGSRHHDFHHMNFIGNYASTFTWWDRIFGTDSQYHAYYEKKKKFEKKTE

SEQ ID NO: 4300 - DNA, 813 bp, Tetraodon nigroviridis
  CDS (1)..(813)
atgaacgcgtcgctcaccgcatcacccgtcgcccgcggggaacttgtcctgcagccgatgtgggacttgctgagggtggaggaggtgctcctgtccccggtgctgcccgcgtcttacgccttcctggcgcacgtcctcctctgcctcccctacctggccctggacgcgctgggcgccgtctctccgcaggtgcggctgtggaggctctccgcgggctccgggcccccgcccacgctgcgccagtggttcctgtgctgcgggaggatcctgcgcgcctacctgacctccgtgctgccgctgaccgcgctcctccaggggctgaggagccccgagctgccggagcgcgctccgtcctgcggccagctgctgctggaggtgtccgcctgcctcctgctcttcgacaccttcttcttcgcctggcatctgtgcctgcaccggactccttggctgtaccgcaacatccaccagttacaccatcagcaccggcagccgttcgccctgtcggcgcaggacgccagcgccgccgagctgctgtcgctgctgctgctggccatggccagcgcctggctggtgggctgccacccgctcagcgaagccgtcttccacctcctcaacacctggctggcggtggaggaccactgcggctacaacctgccctgggctctgcacaggctgctgcccttcatgggaggagccccctaccaccaagaccaccatgtcctctaccgtggcaactatgctccctacttcacccactgggaccggctcttcggcacctactgcccatcggtgaaggacaccagtgaactgtag

SEQ ID NO: 4301 - protein, 270 aa, Tetraodon nigroviridis
MNASLTASPVARGELVLQPMWDLLRVEEVLLSPVLPASYAFLAHVLLCLPYLALDALGAVSPQVRLWRLSAGSGPPPTLRQWFLCCGRILRAYLTSVLPLTALLQGLRSPELPERAPSCGQLLLEVSACLLLFDTFFFAWHLCLHRTPWLYRNIHQLHHQHRQPFALSAQDASAAELLSLLLLAMASAWLVGCHPLSEAVFHLLNTWLAVEDHCGYNLPWALHRLLPFMGGAPYHQDHHVLYRGNYAPYFTHWDRLFGTYCPSVKDTSEL

SEQ ID NO: 4302 - DNA, 882 bp, Oryza sativa
  CDS (1)..(882)
atggcggcgtccgccctcgactccgcctgggagggcctcaccggcagcttcaccgagttccagctcgccaccgtcgtcaccttcctcctccacgagaccgtcttcttcctctccggcctcccctccctcctcttcgagcgcttcggcctcttcgccaagtacaagatccagaagaagagcaataccccttcttaccagaatagatgtgtgctgcgtctcattctgtaccatgtctgtgtgaacttgcctgtaatggttttatcctaccctgccttcaaattcatgggcctgaggagctctcttcctctgccacactggacggttattgtttctcaagttcttttttactttgtactcgaggattttatattttattggggacatagggcactgcacaccaaatggctatacaagcatgttcacagcgttcaccatgagtacgtaatgctacatcttggcctcatacttttacattttgttattgttccagttcttttaaataacaatttcctgggcagatatgctacaccctttggcttgacttcagaatatgcccaccctgctgaaattttgttccttgggttcgccacaattgttggtccggccctcactggtccgcacttgttcactctatggctgtggatggtgttgagggtattggagacagttgaagctcacagtggataccatttcccatggagcccatcaaatttcttgccactgtatggaggctccgactttcatgactatcatcaccgtgtgctctacaccaaatcaggaaactacgcctctacttttgtttacatggactggctgtttggcacggacaaggattaccgcaatgccaaggctatcgaggagaaagacgggaagcatttgtaa

SEQ ID NO: 4303 - protein, 293 aa, Oryza sativa
MAASALDSAWEGLTGSFTEFQLATVVTFLLHETVFFLSGLPSLLFERFGLFAKYKIQKKSNTPSYQNRCVLRLILYHVCVNLPVMVLSYPAFKFMGLRSSLPLPHWTVIVSQVLFYFVLEDFIFYWGHRALHTKWLYKHVHSVHHEYVMLHLGLILLHFVIVPVLLNNNFLGRYATPFGLTSEYAHPAEILFLGFATIVGPALTGPHLFTLWLWMVLRVLETVEAHSGYHFPWSPSNFLPLYGGSDFHDYHHRVLYTKSGNYASTFVYMDWLFGTDKDYRNAKAIEEKDGKHL

SEQ ID NO: 4304 - DNA, 822 bp, Arabidopsis thaliana
  CDS (1)..(822)
atgatcccttatccaaccgtagaagatgcgtccgtggcgttaggacgaaaccttacttggttcgagacggtttggttcgattactcagccaccaaatccaatttccatgtatattgccacaccattctggttctcttccttgtcttttcactagctccttttcctcttgtgattgtcgaatggaccggttggttcgatcagtttaagattcagaagaaggttaagtattcgttgtctgatatgttccaatgttataaagaagtcatgaagttgttccttctcgtcgtcggcacattgcaaatcgtttcttatccttccatccagatggttgggattcgaagtggtttgccattaccatcgttaatggagatagtagcacaattagtggtttacttcttgatagaagattacactaactactggatccatagatggatgcattgcaaatggggttacgagaagattcatcgaatccatcatgagtacacatcacctatcggatacgcatcgccgtatgcgcattgggccgagattttgattcttgggattccgacgtttcttggaccggcaattgctcctggccatataatgacgttttggttatggatatctttacgacaattcgaggcgattgagacccacagcggatatgattttccatggagtgtgacaaaattaattccattttacggtggacctgagtatcatgactaccatcactacgttggaggacaaagccagagcaactttgcttcggttttcacttactgcgattacatcagttatggaactgataaaggctatcgaatccataagaagtag

SEQ ID NO: 4305 - protein, 273 aa, Arabidopsis thaliana
MIPYPTVEDASVALGRNLTWFETVWFDYSATKSNFHVYCHTILVLFLVFSLAPFPLVIVEWTGWFDQFKIQKKVKYSLSDMFQCYKEVMKLFLLVVGTLQIVSYPSIQMVGIRSGLPLPSLMEIVAQLVVYFLIEDYTNYWIHRWMHCKWGYEKIHRIHHEYTSPIGYASPYAHWAEILILGIPTFLGPAIAPGHIMTFWLWISLRQFEAIETHSGYDFPWSVTKLIPFYGGPEYHDYHHYVGGQSQSNFASVFTYCDYISYGTDKGYRIHKK

SEQ ID NO: 4306 - DNA, 729 bp, Nicotiana benthamiana
  CDS (1)..(729)
atggcatccatgattgaatctgcttggacgtatctcatttcaaatttcagtgatttccaattgacttgtcttggtgggtttgttcttcatgagagtatcttcttcttgtctggactcccgttcattctttttgaaagagcaggatggtttggaaagtacaaaattcagaagaagaataacagcccggaagctcaggagaaatgtatcactcgtctgctgatgtatcatctttgtgttaatctcccaatcctgcttggatcatatcctgtctttaaattcatggggacgcgaagtagtcttccactgccatcctggaaagtgatttcaacacaaataatattctatttcatcttggaggattttgtgttttattggggacacaggattttacatacgaaatggctctacaagcatgtccacagtgtccatcatgagtatgcaacaccatttgggttgacttctgagtatgctcaccctgctgaaattctcttccttggatttgctacaataattggtcctgcaatcacgggcccccatttgataacattatatctttgggtctcacttagagtccttgagacggttgaggcacattccgggtaccatttcccttggagcccgtcaaacttcttgccactatatgggggggctgattttcacgattatcatcatcgactgctctacacgaagtccggcaactactcatcgacatttgtttacatggactag

SEQ ID NO: 4307 - protein, 242 aa, Nicotiana benthamiana
MASMIESAWTYLISNFSDFQLTCLGGFVLHESIFFLSGLPFILFERAGWFGKYKIQKKNNSPEAQEKCITRLLMYHLCVNLPILLGSYPVFKFMGTRSSLPLPSWKVISTQIIFYFILEDFVFYWGHRILHTKWLYKHVHSVHHEYATPFGLTSEYAHPAEILFLGFATIIGPAITGPHLITLYLWVSLRVLETVEAHSGYHFPWSPSNFLPLYGGADFHDYHHRLLYTKSGNYSSTFVYMD

SEQ ID NO: 4308 - DNA, 735 bp, Nicotiana benthamiana
  CDS (1)..(735)
atgttgccctttaaaactctccaagaggcagaatctgccattggaagatcccttacaactctagagacaatttggttcaattactctgcaaacaaatctgattactatctttactgccataatatcctttttctcttcctaatcttctcttgtgtccctccttattgccttttccttgaacttttcttcagaaactctattcagtcttataaaattcaaccaaaagtcaatttttcactctctgaggtgttccattgttataagtctgttatgcgtatgttcatccttgttgtgggtccacttcagcttgtttcttatccatctgttaagatggttgggattagaacaagcttgcccttgccgtcactatgggaaattttgctgcagttgggcacatattttatagtggaggactattttaactattggatccataggttcttgcattgtaaatggggttatgaaaatattcacaaggttcaccatgaatacacagctccaataggctttgcagcaccatatgcgcattggctagagattttgatcctcgggatcccctcagctattgggcctgctattgcccctggtcatatggttacgttctggttgtggattgcgttgagacagatcgaagctattgagactcacagtggatatgaccttccttggactatcacaaagtatatacctttttatggtggacctgattaccatgactaccatcactatgtttag

SEQ ID NO: 4309 - protein, 244 aa, Nicotiana benthamiana
MLPFKTLQEAESAIGRSLTTLETIWFNYSANKSDYYLYCHNILFLFLIFSCVPPYCLFLELFFRNSIQSYKIQPKVNFSLSEVFHCYKSVMRMFILVVGPLQLVSYPSVKMVGIRTSLPLPSLWEILLQLGTYFIVEDYFNYWIHRFLHCKWGYENIHKVHHEYTAPIGFAAPYAHWLEILILGIPSAIGPAIAPGHMVTFWLWIALRQIEAIETHSGYDLPWTITKYIPFYGGPDYHDYHHYV

SEQ ID NO: 4310 - DNA, 897 bp, Arabidopsis thaliana
  CDS (1)..(897)
atgattccttacgctacagtcgaagaagcttcaatcgcactgggacgaaacctcacacgtctcgaaactctatggttcgattactccgccacgaagtccgattactatctctactgtcacaacattttgttcttgttcctcgtcttctctctcgttcctctccctctcgttttcgtcgaattggctcgatctgcttctggtttgtttaatcggtataagatccagcctaaggttaattactctttatctgatatgttcaaatgttacaaagacgtcatgacgatgtttatcctcgtcgttggtccattgcaactcgtttcttatccttcgattcagatgattgagatacgatctggattaccattaccaacaattacagagatgctgtcacagttagtagtctacttcttgatagaagaatacactaactactgggttcatagattctttcatagtaaatggggatacgataagattcatcgagttcatcacgagtacacagctcctataggatatgctgctccttatgcacattgggctgaagttttgcttctcggaatcccgacgtttatgggaccagctattgctcctggtcatatgataaccttttggttgtggattgctttaaggcaaatggaagctattgagactcacagtggatatgattttccatggagtccaacaaaatacatccctttctacggtggtgctgagtaccatgactatcatcactacgttggaggacaaagtcaaagcaacttcgcttcagtgttcacgtactgtgattacatttatggaactgacaagggttacagattccaaaagaagcttcttgagcagatcaaggagtcgtcgaagaagagcaacaagcataacggaggaataaaatccgattag

SEQ ID NO: 4311 - protein, 298 aa, Arabidopsis thaliana
MIPYATVEEASIALGRNLTRLETLWFDYSATKSDYYLYCHNILFLFLVFSLVPLPLVFVELARSASGLFNRYKIQPKVNYSLSDMFKCYKDVMTMFILVVGPLQLVSYPSIQMIEIRSGLPLPTITEMLSQLVVYFLIEEYTNYWVHRFFHSKWGYDKIHRVHHEYTAPIGYAAPYAHWAEVLLLGIPTFMGPAIAPGHMITFWLWIALRQMEAIETHSGYDFPWSPTKYIPFYGGAEYHDYHHYVGGQSQSNFASVFTYCDYIYGTDKGYRFQKKLLEQIKESSKKSNKHNGGIKSD

SEQ ID NO: 4312 - DNA, 894 bp, Aster tripolium
  CDS (1)..(894)
atgttgccttactcctccttgcaagaggctgaagcagccatgggtcgatctctcacctttgcggaaaccttgtggttcaactactctgccaacaagtccgactacgtcctctactgccacaacattcccttaattttcttcctcaccactttcttacccatcgtgtacgtggttatcgaattcctcttccctgattatgcagcctcttacaaaattcaacccaagattaaagtttctttatatgagaacttcaaagtttacttgggtgtaatgcgaacgttcttcctcctggttgcacccatactgctcgcctctcatccttctgtacaaatgattggtattcgaacaagcttgcccttaccctcactattggagattgcatctcaattgctggtctactttcttattgaggactacaccaactattggatccatagattctttcattgcaagtggatgtataacaatattcatgttgttcatcatgaatacacagcaccaaccgggtttgctacacagcatgcacactggtttagatattggtgtttgggtattccatctttcttgggcccttctattgctccgggccacatggttaccttcttgttgtggcttgctttgaggcagtttgaggcgatagagaatcacagtggatacgactttccatggacatataaaaaattcatcccattctctgctggggccgaatatcatgactatcaccattatgttggagaaaagagccagagcaacttttggcaccccatctttacttactgtgactacctatatggaacagacaagggatacaggaaccggaagaaacttctggcgcagcaggaaagatggtcaaaaagcgagggtaagcgtgcaaaaggggaacatatgcgatga

SEQ ID NO: 4313 - protein, 297 aa, Aster tripolium
MLPYSSLQEAEAAMGRSLTFAETLWFNYSANKSDYVLYCHNIPLIFFLTTFLPIVYVVIEFLFPDYAASYKIQPKIKVSLYENFKVYLGVMRTFFLLVAPILLASHPSVQMIGIRTSLPLPSLLEIASQLLVYFLIEDYTNYWIHRFFHCKWMYNNIHVVHHEYTAPTGFATQHAHWFRYWCLGIPSFLGPSIAPGHMVTFLLWLALRQFEAIENHSGYDFPWTYKKFIPFSAGAEYHDYHHYVGEKSQSNFWHPIFTYCDYLYGTDKGYRNRKKLLAQQERWSKSEGKRAKGEHMR

SEQ ID NO: 4314 - DNA, 897 bp, Mus musculus
  CDS (1)..(897)
atgggctgctacaacggttcggagctccaagacctgggctgttccagccagctgctcctgcagcccctctgggacaccataaggacaagggaggcgttcacgcgctcacccatcttcccagtcaccttttctatcatcacttacgtgggcttctgcctaccgttcgtggtgctggacgtcctgtatccctgggtccccatcctgcgacgctacaagatccacccggacttctcgccttctgtaaagcagcttctgccttgcctggggctgacactctaccagcacctggtgttcgtgttcccggtgacgctgctgcactgggtgcgcagcccggcgctcctcccccaggaggcccccgagcttgcccagctcctaagtcacgtcctgatctgcctgctgctcttcgacactgagatcttcgcgtggcacctgctgcaccataaggtgccctggctgtaccgcaccttccacaaggtgcatcaccagaactcgtcctccttcgcgctggcgacccaatacatgagcttctgggagctgctttcgctgaccttcttcgacgtgctgaacgtcgcggtgcttcggtgtcacccactcaccatctttacctttcacgtgattaacatctggctgtcggtggaggaccactcgggctatgacttcccgtggtccactcacagacttgtgccctttggctggtacgggggtgtggctcaccacgacatgcatcactctcagtttaactgcaattttgctccttacttcacacactgggacaaaatgctgggcactctgcggtccgcgcccctgccagagagcctttgcgcctgcggtgagcgctgcgtggactccagagagcgatgcgctgtacacttgatccagaagaagaaacagacttga

SEQ ID NO: 4315 - protein, 298 aa, Mus musculus
MGCYNGSELQDLGCSSQLLLQPLWDTIRTREAFTRSPIFPVTFSIITYVGFCLPFVVLDVLYPWVPILRRYKIHPDFSPSVKQLLPCLGLTLYQHLVFVFPVTLLHWVRSPALLPQEAPELAQLLSHVLICLLLFDTEIFAWHLLHHKVPWLYRTFHKVHHQNSSSFALATQYMSFWELLSLTFFDVLNVAVLRCHPLTIFTFHVINIWLSVEDHSGYDFPWSTHRLVPFGWYGGVAHHDMHHSQFNCNFAPYFTHWDKMLGTLRSAPLPESLCACGERCVDSRERCAVHLIQKKKQT

SEQ ID NO: 4316 - DNA, 900 bp, Arabidopsis thaliana
  CDS (1)..(900)
atgatcccatacgcaacaatcgaagaagcgtcgatcgcattatctcggaacctcacatggctagagactctctggttcgattactccgccaccaaatccgattactacctctactgccacaacattctcttcctcttcctcatcttctctctcgttcctctccctctcgttttcatcgaatcatctcaatccacctcagatttgttcaatcgctacaaaatccaaccaaaagtgaaaaactcattctcatcgatgttcaaatgttacaaagacgtcatgaagatgtccatcctcgtcgttggtccattacaactcgtttcttatccttcgattcagatgattgagatacgaagtggattaccattaccatcatgtatggagattgtagcacagttagtggtttacttcttggtagaggattatactaattactgggttcatagattctttcattgtaaatggggttatgagaagtttcatcatattcatcatgagtatacagctcctattggttatgctgctccttatgctcattgggctgaggttttgcttcttggcattcccacgtttcttggacctgctattgctcctggtcatatgattaccttttggttgtggattgctttacgacagattgaggctatcgaaactcatagcggatatgatttcccatggtctctgacaaagtacattccattttatggtggagctgagtatcatgattaccatcactacgttggaggacaaagccagagtaactttgcttcagtttttacttactgcgattacatctatggaactgataaaggttaccgattccagaagaagcttcttcagcagatgaaggagaagtccaagaagagcaacaagctggttaatggaggagagaaattcgattag

SEQ ID NO: 4317 - protein, 299 aa, Arabidopsis thaliana
MIPYATIEEASIALSRNLTWLETLWFDYSATKSDYYLYCHNILFLFLIFSLVPLPLVFIESSQSTSDLFNRYKIQPKVKNSFSSMFKCYKDVMKMSILVVGPLQLVSYPSIQMIEIRSGLPLPSCMEIVAQLVVYFLVEDYTNYWVHRFFHCKWGYEKFHHIHHEYTAPIGYAAPYAHWAEVLLLGIPTFLGPAIAPGHMITFWLWIALRQIEAIETHSGYDFPWSLTKYIPFYGGAEYHDYHHYVGGQSQSNFASVFTYCDYIYGTDKGYRFQKKLLQQMKEKSKKSNKLVNGGEKFD

SEQ ID NO: 4318 - DNA, 810 bp, Gossypium arboreum
  CDS (1)..(810)
atggctgccattattgaatctgggtggctgtatctgatcacgcatttcagtgacttccaactagcaagtctaggaagtttctttcttcacgaaagtgttttcttcttatccggacttccatttatatatctggaaagagctggattgttgagcaaatacaagattcagacgaaaaacaacagccttgctgctcaggaaaaatgtatcacccgcctgcttctgtatcacattggtgtcaaccttccgcttatgattgcatcttatcctttcttcagattcatgggcatgaaaagtagtctgccatttccatcctggaaagtggttctgtcacagataatattctatttcatcctggaggattttgtgttttactggggacatcgtattttacatacaaaatggctgtacaagcatgtgcacagtgttcatcatgagtatgctactccatttggactgacatccgagtatgctcaccctgccgagatattgttccttggctttgcaacaataattggtccagccatcactggcccacatcttattactctctggttatggatgactcttagagtcctagagacagttgaggcacattgtggttaccattttccatggagcctctcaaactttctacctttatatgggggtgctgattttcatgactatcatcatcgtttgctttatacaaaatctggcaactactcatctacatttgtttacatggactggatattcggtactgacaagggttacagaaaattgaaagcactaaagcgcgatggagtcgaagaagaagcaaagcaaacataa

SEQ ID NO: 4319 - protein, 269 aa, Gossypium arboreum
MAAIIESGWLYLITHFSDFQLASLGSFFLHESVFFLSGLPFIYLERAGLLSKYKIQTKNNSLAAQEKCITRLLLYHIGVNLPLMIASYPFFRFMGMKSSLPFPSWKVVLSQIIFYFILEDFVFYWGHRILHTKWLYKHVHSVHHEYATPFGLTSEYAHPAEILFLGFATIIGPAITGPHLITLWLWMTLRVLETVEAHCGYHFPWSLSNFLPLYGGADFHDYHHRLLYTKSGNYSSTFVYMDWIFGTDKGYRKLKALKRDGVEEEAKQT

SEQ ID NO: 4320 - DNA, 795 bp, Zea mays
  CDS (1)..(795)
atgtcagccatcgactcagcgtggcagctcctgatcgccaacttcaccgagttccagctcgccaccgtcgtcaccttcctgctccacgagaccgtcttcttcctctccggcctcccctccctcctcttcgagcgcttcggactcttcgccaagtacaagatccagaagaagagcaacacctctgcttaccaaaacagatgtgtcttgcgcctcattctctaccatgtatgtgtgaacctgcctgtcatgattttctcgtatcctgccttcaaattcatgggtctcaggagctctcttcctttgccacattggtcggttgttgtatctcaagttcttttctactttgtccttgaggattttatattctattgggggcacagggcattgcatacgaaatggctatacaaacacgttcacagcgtccaccacgagtacgccacaccctttggtttaacatcggaatatgcccacccagctgaaattttgttcctgggattcgccacagttgttggtcctgctcttactggccctcatctcttcaccctgtggctgtggatggtgttgagggttttggagacagttgaagctcacagcggctatcacttcccatggagcccatcaaatttcctgccgctgtatggcggctcggacttccatgactaccatcaccgtgtgctgtacacaaagtcagggaactatgcctcaacatttgtttacatggactggttgttcggcacggacaaggattatcgcaaggcaaagaccattgaggagaaagaagggaaaaatctgtag

SEQ ID NO: 4321 - protein, 264 aa, Zea mays
MSAIDSAWQLLIANFTEFQLATVVTFLLHETVFFLSGLPSLLFERFGLFAKYKIQKKSNTSAYQNRCVLRLILYHVCVNLPVMIFSYPAFKFMGLRSSLPLPHWSVVVSQVLFYFVLEDFIFYWGHRALHTKWLYKHVHSVHHEYATPFGLTSEYAHPAEILFLGFATVVGPALTGPHLFTLWLWMVLRVLETVEAHSGYHFPWSPSNFLPLYGGSDFHDYHHRVLYTKSGNYASTFVYMDWLFGTDKDYRKAKTIEEKEGKNL

SEQ ID NO: 4322 - DNA, 900 bp, Arabidopsis thaliana
  CDS (1)..(900)
atgatcccatacgcaacaatcgaagaagcgtcgatcgcattatctcgaaacctcacatggctagagactctctggttcgattactccgccaccaaatctgattactacctctactgccacaacattctcttcctcttcctcatcttctctctcgttcctctccctctcgttctcatcgaatcagctcaatccacctcagatttgttcaatcgctacaaaatccaaccaaaagtgaaaaactcgttctcatcgatgttgaaatgttacaaagacgtcatgaagatgttcatcctcgtcgttggtccattacaactcgtttcttatccttcgattcagatgattgagatacgaagtggattaccattaccatcatgtatggagattgtagcacagtttgtggtttacttcttggtagaggattatactaattactgggttcatagattctttcattgtaaatggggttatgagaagtttcatcatattcatcatgagtatacagctcctattggttatgctgctccttatgctcattgggctgaggttttgcttcttggcattcccacgtttcttggacctgctattgctcctggtcatatgattaccttttggttgtggattgctttacgacagattgaggctatcgaaactcatagcggatatgatttcccatggtctctgacaaagtacattccattttatggtggagctgagtatcatgattaccatcactacgttggaggacaaagccagagtaactttgcttcagtttttacttactgcgattacatctatggaactgataaaggttaccgattccagaagaagcttcttcagcagatgaaggagaagtccaagaagagcaacaagctggttaatggaggagagaaattcgattag

SEQ ID NO: 4323 - protein, 299 aa, Arabidopsis thaliana
MIPYATIEEASIALSRNLTWLETLWFDYSATKSDYYLYCHNILFLFLIFSLVPLPLVLIESAQSTSDLFNRYKIQPKVKNSFSSMLKCYKDVMKMFILVVGPLQLVSYPSIQMIEIRSGLPLPSCMEIVAQFVVYFLVEDYTNYWVHRFFHCKWGYEKFHHIHHEYTAPIGYAAPYAHWAEVLLLGIPTFLGPAIAPGHMITFWLWIALRQIEAIETHSGYDFPWSLTKYIPFYGGAEYHDYHHYVGGQSQSNFASVFTYCDYIYGTDKGYRFQKKLLQQMKEKSKKSNKLVNGGEKFD

SEQ ID NO: 4324 - DNA, 897 bp, Arabidopsis thaliana
  CDS (1)..(897)
atgattccttacgctacagtcgaagaagcttcaatcgcactgggacgaaacctcacacgtctcgaaactctatggttcgattactccgccacgaagtccgattactatctctactgtcacaacattttgttcttgttcctcgtcttctctctcgttcctctccctctcgttttcatcgaattggctcgatctgcttctggtttgtttaatcggtataagatccagcctaaggttaattactctttatctgatatgttcaaatgttacaaagacgtcatgacgatgtttatcctcgtcgttggtccattgcaactcgtttcttatccttcgattcagatgattgagatacgatctggattaccattaccaacaattacagagatgctgtcacagttagtagtctacttcttgatagaagactacactaactactgggtacatagattctttcatagtaaatggggatacgataagattcatcgagttcatcacgagtacacagctcctataggatatgctgctccttatgcacattgggctgaagttttgcttctcggaatcccgacgtttatgggaccagctattgctcctggtcatatgataaccttttggttgtggattgctttaaggcaaatggaagctattgagactcacagtggatatgattttccatggagtccaacaaaatacatccctttctacggtggtgctgagtaccatgactatcatcactacgttggaggacaaagtcaaagcaacttcgcttcagtgttcacgtactgtgattacatttatggaactgacaagggttacagattccaaaagaagcttcttgagcagatcaaggagtcgtcgaagaagagcaacaagcataacggaggaataaaatccgattag

SEQ ID NO: 4325 - protein, 298 aa, Arabidopsis thaliana
MIPYATVEEASIALGRNLTRLETLWFDYSATKSDYYLYCHNILFLFLVFSLVPLPLVFIELARSASGLFNRYKIQPKVNYSLSDMFKCYKDVMTMFILVVGPLQLVSYPSIQMIEIRSGLPLPTITEMLSQLVVYFLIEDYTNYWVHRFFHSKWGYDKIHRVHHEYTAPIGYAAPYAHWAEVLLLGIPTFMGPAIAPGHMITFWLWIALRQMEAIETHSGYDFPWSPTKYIPFYGGAEYHDYHHYVGGQSQSNFASVFTYCDYIYGTDKGYRFQKKLLEQIKESSKKSNKHNGGIKSD

SEQ ID NO: 4326 - DNA, 801 bp, Arabidopsis thaliana
  CDS (1)..(801)
atggcttccttcgtggaatctggttggcagtaccttgtgacacattttagcgactttcaactggcatgtattgggagttttctcttccatgaaagcgtgtttttcttatctggactccctttcatttttcttgaaaggcaaggctttctcagcaagtacaaaattcagacaaaaaataacacacctgcagcccaaggaaaatgtattactcgcctgttgctttatcatttctccgtaaacttgcccctgatgttggcctcctaccctgtcttccgagccatgggaatgcgaagcagttttcctctgccgtcctggaaagaagtgtctgcccagatattattctactttatcattgaggattttgtcttctattggggtcatcggatcttgcattcaaaatggctgtacaagaacgtgcatagtgtgcatcatgaatatgccacaccatttggtttgacatcagaatatgctcaccccgctgagattctatttctgggttttgctaccatagtcggtccagctcttactggccctcacctaattactctctggttatggatggtgttgagagtgctggagacagttgaggcacattgtggttatcatttcccatggagcctctcaaattttcttcctctgtatggaggtgctgacttccatgactaccatcaccgactgctatacacaaagtccggaaactactcttcaacttttgtgtatatggactggatctttggtactgacaaggggtacagaagactgaagacccttaaagaaaacggtgacatgaaacaaacgtga

SEQ ID NO: 4327 - protein, 266 aa, Arabidopsis thaliana
MASFVESGWQYLVTHFSDFQLACIGSFLFHESVFFLSGLPFIFLERQGFLSKYKIQTKNNTPAAQGKCITRLLLYHFSVNLPLMLASYPVFRAMGMRSSFPLPSWKEVSAQILFYFIIEDFVFYWGHRILHSKWLYKNVHSVHHEYATPFGLTSEYAHPAEILFLGFATIVGPALTGPHLITLWLWMVLRVLETVEAHCGYHFPWSLSNFLPLYGGADFHDYHHRLLYTKSGNYSSTFVYMDWIFGTDKGYRRLKTLKENGDMKQT

SEQ ID NO: 4328 - DNA, 723 bp, Arabidopsis thaliana
  CDS (1)..(723)
atggcgtgtattgggagttttatacttcatgaaagcgtgtttttcttgtctggactcccttacattttcctagaaaggactggttttctgagcaactacaaaattcagaccaaaagtaatactcctgaagcccagggaaaatgcattgctcgactattactttaccattgctgcgtaaacttgcccctcatgatggcgtcgtatcctgtattcagattcatgggcatggaaagcagttttcctctgccgtcctggaaagtggtgtctgcccagatcttattctacttcatcattgaggattttgtattctattggggtcacaggatcttgcatactaaatggctctacaagaacgtgcacagtgtgcatcatgagtacgcgacaccgtttggtttgacatcagaatatgctcatcccgctgaaattctgttccttggttttgctaccattgttggtccggctctcaccgggcctcacctgatcaccctttggttatggatgatgctcagagttattgagacagttgaggcacattgtggttatcatttcccatggagcccctcgaattttcttcctctatacggcggtgctgacttccatgactaccatcatcgattactctacacaaagtctggcaactactcatcaacgtttgtttacatggactggatctttggcaccgataaaggttacagaaaacttaaggccctaaaagaaacctga

SEQ ID NO: 4329 - protein, 240 aa, Arabidopsis thaliana
MACIGSFILHESVFFLSGLPYIFLERTGFLSNYKIQTKSNTPEAQGKCIARLLLYHCCVNLPLMMASYPVFRFMGMESSFPLPSWKVVSAQILFYFIIEDFVFYWGHRILHTKWLYKNVHSVHHEYATPFGLTSEYAHPAEILFLGFATIVGPALTGPHLITLWLWMMLRVIETVEAHCGYHFPWSPSNFLPLYGGADFHDYHHRLLYTKSGNYSSTFVYMDWIFGTDKGYRKLKALKET

SEQ ID NO: 4330 - DNA, 786 bp, Arabidopsis thaliana
  CDS (1)..(786)
atgtggttgatgcagtaccttgtgacacattttagcgactttcaactggcatgtattgggagttttctcctccatgaaagcgtgtttttcttatctggactccctttcatttttcttgaaaggcaaggctttctcagcaagtacaaaattcagacaaaaaataacacacctgcagcccaaggaaaatgtattactcgcctgttgctttatcatttctccgtaaacttgcccctgatgttggcctcctaccctgtcttccgagccatgggaatgcgaagcagttttcctctgccgtcctggaaagaagtgtctgcccagatattattctactttatcattgaggattttgtcttctattggggtcatcggatcttgcattcaaaatggctgtacaagaacgtgcatagtgtgcatcatgaatatgccacaccatttggtttgacatcagaatatgctcaccccgctgagattctatttctgggttttgctaccatagtcggtccagctcttactggccctcacctaattactctctggttatggatggtgttgagagtgctggagacagttgaggcacattgtggttatcatttcccatggagcctctcaaattttcttcctctgtatggaggtgctgacttccatgactaccatcaccgactgctatacacaaagtccggaaactactcttcaacttttgtgtatatggactggatctttggtactgacaaggggtacagaagactgaagacccttaaagaaaacggtgacatgaaacaaacgtga

SEQ ID NO: 4331 - protein, 261 aa, Arabidopsis thaliana
MWLMQYLVTHFSDFQLACIGSFLLHESVFFLSGLPFIFLERQGFLSKYKIQTKNNTPAAQGKCITRLLLYHFSVNLPLMLASYPVFRAMGMRSSFPLPSWKEVSAQILFYFIIEDFVFYWGHRILHSKWLYKNVHSVHHEYATPFGLTSEYAHPAEILFLGFATIVGPALTGPHLITLWLWMVLRVLETVEAHCGYHFPWSLSNFLPLYGGADFHDYHHRLLYTKSGNYSSTFVYMDWIFGTDKGYRRLKTLKENGDMKQT

SEQ ID NO: 4332 - DNA, 912 bp, Arabidopsis thaliana
  CDS (1)..(912)
atgattccttacgctacagtcgaagaagcttcaatcgcactgggacgaaacctcacacgtctcgaaactctatggttcgattactccgccacgaagtccgattactatctctactgtcacaacattttgttcttgttcctcgtcttctctctcgttcctctccctctcgttttcgtcgaattggctcgatctgcttctggtttgtttaatcggtataagatccagcctaaggttaattactctttatctgatatgttcaaatgttacaaagacgtcatgacgatgtttatcctcgtcgttggtccattgcaactcgtttcttatccttcgattcagatgattgagatacgatctggattaccattaccaacaattacagagatgctgtcacagttagtagtctacttcttgatagaagactacactaactactgggtacatagattctttcatagtaaatggggatacgataagattcatcgagttcatcacgagtacacagctcctataggatatgctgctccttatgcacattgggctgaagttttgcttctcggaatcccgacgtttatgggaccagctattgctcctggtcatatgataaccttttggttgtggattgctttaaggcaaatggaagctattgagactcacagtggatatgattttccatggagtccaacaaaatacatccctttctacggtggtgctgagtaccatgactatcatcactacgttggaggacaaagtcaaagcaacttcgcttcagtgttcacgtactgtgattacatttatggaactgacaagatgtggctatatcagggttacagattccaaaagaagcttcttgagcagatcaaggagtcgtcgaagaagagcaacaagcataacggaggaataaaatccgattag

SEQ ID NO: 4333 - protein, 303 aa, Arabidopsis thaliana
MIPYATVEEASIALGRNLTRLETLWFDYSATKSDYYLYCHNILFLFLVFSLVPLPLVFVELARSASGLFNRYKIQPKVNYSLSDMFKCYKDVMTMFILVVGPLQLVSYPSIQMIEIRSGLPLPTITEMLSQLVVYFLIEDYTNYWVHRFFHSKWGYDKIHRVHHEYTAPIGYAAPYAHWAEVLLLGIPTFMGPAIAPGHMITFWLWIALRQMEAIETHSGYDFPWSPTKYIPFYGGAEYHDYHHYVGGQSQSNFASVFTYCDYIYGTDKMWLYQGYRFQKKLLEQIKESSKKSNKHNGGIKSD

SEQ ID NO: 4334 - DNA, 927 bp, Candida albicans
  CDS (1)..(927): transl_table=12
atgtcttccattagtaatgtttatcatgactattcgagttttctgaatgcaactactttttcccaagtttatcaaaatttcaatcaattagataatttaaatgtttttgaaaaattatgggggtcatattattattatatggccaatgatttatttgctactggattattattttttttaactcatgaaattttttattttggtagatgtttaccatgggctataattgatagaattccttattttagaaaatggaaaattcaagatgaaaaaatccctagtgataaagaacaatgggaatgtcttaaatcagttttaacatctcatttcttagttgaagctttcccaatttggtttttccatccattatgtcaaaaaattggtattagttatcaagtaccattccctaaaattactgatatgttgattcaatgggcagtattttttgttttggaagatacttggcattattggtttcatagaggattacattatggggttttctataaatatattcataaacaacatcatagatatgctgctccatttggattggcagcagaatatgctcatccagttgaagttgccttattaggattgggtacggttggtattccgattgtttggtgtcttatcactggtaacttgcatcttttcacagtttccatttggatcattttaagattattccaagccgttgatgctcattccggttatgaattcccttggtctttacataatttcttgccattttgggctggtgctgatcatcatgatgaacatcatcattatttcattggtggatactcttcatcttttagatggtgggatttcattttggataccgaagctggtccaaaagctaaaaagggtagagaagacaaagtcaaacaaaatgttgaaaaattacaaaagaagaacttatag

SEQ ID NO: 4335 - protein, 308 aa, Candida albicans
MSSISNVYHDYSSFSNATTFSQVYQNFNQLDNLNVFEKLWGSYYYYMANDLFATGLLFFLTHEIFYFGRCLPWAIIDRIPYFRKWKIQDEKIPSDKEQWECLKSVLTSHFLVEAFPIWFFHPLCQKIGISYQVPFPKITDMLIQWAVFFVLEDTWHYWFHRGLHYGVFYKYIHKQHHRYAAPFGLAAEYAHPVEVALLGLGTVGIPIVWCLITGNLHLFTVSIWIILRLFQAVDAHSGYEFPWSLHNFLPFWAGADHHDEHHHYFIGGYSSSFRWWDFILDTEAGPKAKKGREDKVKQNVEKLQKKNL

SEQ ID NO: 4336 - DNA, 882 bp, Homo sapiens
  CDS (1)..(882)
atggcaacaaatgaaagtgtcagcatctttagttcagcatccttggctgtggaatatgtagattcacttttacctgagaatcctctgcaagaaccatttaaaaatgcttggaactatatgttgaataattatacaaagttccagattgcaacatggggatcccttatagttcatgaagccctttatttcttattctgtttacctggatttttatttcaatttataccttatatgaaaaaatacaaaattcaaaaggataagccagagacatgggaaaaccaatggaagtgtttcaaagttcttctctttaatcacttctgtatccagctgcctttgatttgtggaacctattattttacagagtatttcaatattccttatgattgggaaagaatgccaagatggtattttcttttggcaagatgctttggttgtgcagtcattgaagatacttggcactattttctgcatagactcttacaccacaaaagaatatacaagtatattcataaagttcatcatgagtttcaggctccatttggaatggaagctgaatatgcacatcctttggagactctaattcttggaactggatttttcattggaatcgtgcttttgtgtgatcatgtaattcttctttgggcatgggtgaccattcgtttattagaaactattgatgtccatagtggttatgatattcctctcaaccctttaaatctgatccctttctatgctggttctcggcatcatgatttccaccacatgaacttcattggaaactatgcttcaacatttacatggtgggatcgaatttttggaacagactctcagtataatgcctataatgaaaagaggaagaagtttgagaaaaagactgaataa

SEQ ID NO: 4337 - protein, 293 aa, Homo sapiens
MATNESVSIFSSASLAVEYVDSLLPENPLQEPFKNAWNYMLNNYTKFQIATWGSLIVHEALYFLFCLPGFLFQFIPYMKKYKIQKDKPETWENQWKCFKVLLFNHFCIQLPLICGTYYFTEYFNIPYDWERMPRWYFLLARCFGCAVIEDTWHYFLHRLLHHKRIYKYIHKVHHEFQAPFGMEAEYAHPLETLILGTGFFIGIVLLCDHVILLWAWVTIRLLETIDVHSGYDIPLNPLNLIPFYAGSRHHDFHHMNFIGNYASTFTWWDRIFGTDSQYNAYNEKRKKFEKKTE

SEQ ID NO: 4338 - DNA, 882 bp, Mus musculus
  CDS (1)..(882)
atggccacaaacaaaagtgttggcgtgttcagctctgcatccctggctgtggagtatgtggactcactgttgccggagaatcctctgcaggagccctttaagaatgcttgggtctacatgttggacaactatacaaagttccagatcgcaacctggggctccctgatagttcacgaagccatctatttcttgttctctttacctggattcctattccagtttataccttacatgagaaagtacaagattcaaaaggataaaccagaaaccttcgaaggccagtggaagtgtttgaaaaaaattctatttaatcatttttttatccagttgcctctgatttgtggaacatactattttacagagtttttcaatattccttatgattgggaaagaatgccaagatggtacttaactttggcaaggtgtttgggctgtgcagtcattgaggacacctggcattatttcctgcacagactccttcaccacaagagaatttataaatacattcataaagtccatcacgagtttcaggctccatttggaatcgaagcagaatacgcacatcccttggaaaccctgattcttgggacaggatttttcatcggaattgtgcttttgtgtgatcacgtaattctcctgtgggcatgggtgaccatacgtttgctggaaaccatcgatgtgcacagcggttatgatattcctctcaacccgctgaacttggttcctttttatacgggcgctcggcaccatgatttccaccacatgaacttcattgggaattatgcctccaccttcacgtggtgggataaactctttgggacagatgcccagtatcatgcctacattgaaaaatcgaagaagcttgggaaaaagtctgattga

SEQ ID NO: 4339 - protein, 293 aa, Mus musculus
MATNKSVGVFSSASLAVEYVDSLLPENPLQEPFKNAWVYMLDNYTKFQIATWGSLIVHEAIYFLFSLPGFLFQFIPYMRKYKIQKDKPETFEGQWKCLKKILFNHFFIQLPLICGTYYFTEFFNIPYDWERMPRWYLTLARCLGCAVIEDTWHYFLHRLLHHKRIYKYIHKVHHEFQAPFGIEAEYAHPLETLILGTGFFIGIVLLCDHVILLWAWVTIRLLETIDVHSGYDIPLNPLNLVPFYTGARHHDFHHMNFIGNYASTFTWWDKLFGTDAQYHAYIEKSKKLGKKSD

SEQ ID NO: 4340 - DNA, 882 bp, Rattus norvegicus
  CDS (1)..(882)
atggccatgaacaaaagtgttggcctcttcagctccgcatccctggctgtggactacgtagattccctgctgcctgagaatcctctgcaggaaccctttaagaatgcttgggtctacatgttggacaactatacaaagttccagatcgcaacctggggctccctgatcgttcatgagacgatctatttcctgttctctttacctggctttctattccagtttatacctttcatgagaaagtacaagattcaaaaggataaaccagaaacctttgaaggccagtggaagtgtttgaaaggaattctgtttaatcatttttttatccagttgcctctgatttgtggaacatactattttacagagtttttcaatattccttatgattgggaaagaatgccaagatggtatttcactttggcaaggtgtttgggctgtgcagtcatcgaggatacctggcactatttcctgcacagactccttcaccacaagaggatttataaatacattcataaagtccatcacgagttccaggctccatttggaatcgaagcagaatatgcacatcccttggaaaccctaattcttgggactggatttttcattggaattgtgcttttgtgtgatcatgtaattcttctgtgggcatgggtgaccatgcgtttgctagaaaccatcgatgtgcacagtggttatgatatccctctcaacccgttgaactacatccctttttataccggggctcggcatcacgatttccaccacatgaacttcattgggaattacgcctccaccttcacgtggtgggacagaatctttgggacggatgtccagtaccatgcctacactgaaaagatgaagaagcttgggaaaaagtctgagtga

SEQ ID NO: 4341 - protein, 293 aa, Rattus norvegicus
MAMNKSVGLFSSASLAVDYVDSLLPENPLQEPFKNAWVYMLDNYTKFQIATWGSLIVHETIYFLFSLPGFLFQFIPFMRKYKIQKDKPETFEGQWKCLKGILFNHFFIQLPLICGTYYFTEFFNIPYDWERMPRWYFTLARCLGCAVIEDTWHYFLHRLLHHKRIYKYIHKVHHEFQAPFGIEAEYAHPLETLILGTGFFIGIVLLCDHVILLWAWVTMRLLETIDVHSGYDIPLNPLNYIPFYTGARHHDFHHMNFIGNYASTFTWWDRIFGTDVQYHAYTEKMKKLGKKSE

SEQ ID NO: 4342 - DNA, 903 bp, Schizosaccharomyces pombe
  CDS (1)..(903)
atgaatactacttctgaagttattgttggcacaggctttcaagccatccgccaacaacttgctcaaatgcatcccgaactaaattttgtcgagcaattatggctcgcttactataagtggtttgacaacgatgttgttgctactggccttatgtccttccttcttcacgaacttatctacttcggtcgttgcattccttggatgattatcgatgccatgccctacttccgccgctggaaaatccaacccaagaaagttcccacccttgctgaacaatgggagtgcacacgcttggttcttctttctcattttaccgtggagcttcctcaaatctggctctttgaccctatgtgcgctacctttggtctttctacctctgttcccttccctcctgtcactaaaatgatttggcaaattaccctgttcttcttcctcgaagacacttggcattactgggctcatcgccttttccactatggtattttctatcgtttcattcacaaagttcaccaccgctacagtgcaccttttggtctttctgctgaatatgctcatccattggagatcatccttttgggtgccggtaccgtctttgttcctttgatgtggtgttacttcacccatgatttgcacttggtcaccatgtatatttggatcacccttcgtctattccaagcagtcgattctcatgctggctacgacttcccttggtctttgaacaaattccttcccatttgggcaggtgctgatcaccacgattatcaccatatggctttcaaggataacttctctagctctttccgctggtgggatgctgtccttaagactgatcagaactaccatcaattcaaagcccgtcgtcttgctgccaaatatgaggctgaaagcaaaaaggctaaataa

SEQ ID NO: 4343 - protein, 300 aa, Schizosaccharomyces pombe
MNTTSEVIVGTGFQAIRQQLAQMHPELNFVEQLWLAYYKWFDNDVVATGLMSFLLHELIYFGRCIPWMIIDAMPYFRRWKIQPKKVPTLAEQWECTRLVLLSHFTVELPQIWLFDPMCATFGLSTSVPFPPVTKMIWQITLFFFLEDTWHYWAHRLFHYGIFYRFIHKVHHRYSAPFGLSAEYAHPLEIILLGAGTVFVPLMWCYFTHDLHLVTMYIWITLRLFQAVDSHAGYDFPWSLNKFLPIWAGADHHDYHHMAFKDNFSSSFRWWDAVLKTDQNYHQFKARRLAAKYEAESKKAK

SEQ ID NO: 4344 - DNA, 894 bp, Glycine max; identical to SEQ ID NO: 2376
  CDS (1)..(894)

SEQ ID NO: 4345 - protein, 297 aa, Glycine max; identical to SEQ ID NO: 2377

SEQ ID NO: 4346 - DNA, 816 bp, Glycine max; identical to SEQ ID NO: 2380
  CDS (1)..(816)

SEQ ID NO: 4347 - protein, 271 aa, Glycine max; identical to SEQ ID NO: 2381

SEQ ID NO: 4348 - DNA, 807 bp, Zea mays; identical to SEQ ID NO: 2392
  CDS (1)..(807)

SEQ ID NO: 4349 - protein, 268 aa, Zea mays; identical to SEQ ID NO: 2393

SEQ ID NO: 4350 - DNA, 816 bp, Glycine max; identical to SEQ ID NO: 2420
  CDS (1)..(816)

SEQ ID NO: 4351 - protein, 271 aa, Glycine max; identical to SEQ ID NO: 2421

SEQ ID NO: 4352 - DNA, 894 bp, Glycine max; identical to SEQ ID NO: 2436
  CDS (1)..(894)

SEQ ID NO: 4353 - protein, 297 aa, Glycine max; identical to SEQ ID NO: 2437

SEQ ID NO: 4354 - DNA, 816 bp, Glycine max; identical to SEQ ID NO: 2478
  CDS (1)..(816)

SEQ ID NO: 4355 - protein, 271 aa, Glycine max; identical to SEQ ID NO: 2479

SEQ ID NO: 4356 - DNA, 1081 bp, Helianthus annuus; identical to SEQ ID NO: 2480
  CDS (20)..(931)

SEQ ID NO: 4357 - protein, 303 aa, Helianthus annuus; identical to SEQ ID NO: 2481

SEQ ID NO: 4358 - DNA, 975 bp, Hordeum vulgare; identical to SEQ ID NO: 2495
  CDS (150)..(701)

SEQ ID NO: 4359 - protein, 183 aa, Hordeum vulgare; identical to SEQ ID NO: 2496

SEQ ID NO: 4360 - DNA, 906 bp, Zea mays; identical to SEQ ID NO: 2549
  CDS (1)..(906)

SEQ ID NO: 4361 - protein, 301 aa, Zea mays; identical to SEQ ID NO: 2550

SEQ ID NO: 4362 - DNA, 807 bp, Zea mays; identical to SEQ ID NO: 2583
  CDS (1)..(807)

SEQ ID NO: 4363 - protein, 268 aa, Zea mays; identical to SEQ ID NO: 2584

SEQ ID NO: 4364 - DNA, 921 bp, Zea mays; identical to SEQ ID NO: 2607
  CDS (1)..(921)

SEQ ID NO: 4365 - protein, 306 aa, Zea mays; identical to SEQ ID NO: 2608

SEQ ID NO: 4366 - DNA, 24 bp, Artificial sequence
  primer
atgtctgccgttttcaacaacgct

SEQ ID NO: 4367 - DNA, 26 bp, Artificial sequence
  primer
ttagttagtcttcttttgagcattgt

SEQ ID NO: 4368 - protein, 340 aa, Artificial sequence
  consensus sequence
  Variant (2)..(29): Xaa in position 2 to 29 is any amino acid
  Variant (30)..(34): Xaa in position 30 to 34 is any or no amino acid
  Variant (36)..(42): Xaa in position 36 to 42 is any amino acid
  Variant (43)..(52): Xaa in position 43 to 52 is any or no amino acid
  Variant (56)..(66): Xaa in position 56 to 66 is any amino acid
  Variant (67)..(72): Xaa in position 67 to 72 is any or no amino acid
  Variant (74)..(86): Xaa in position 74 to 86 is any amino acid
  Variant (88)..(103): Xaa in position 88 to 103 is any amino acid
  Variant (104)..(109): Xaa in position 104 to 109 is any or no amino acid
  Variant (111)..(125): Xaa in position 111 to 125 is any amino acid
  Variant (128)..(130): Xaa in position 128 to 130 is any amino acid
  Variant (132)..(133): Xaa in position 132 to 133 is any amino acid
  Variant (136)..(137): Xaa in position 136 to 137 is any amino acid
  Variant (139)..(142): Xaa in position 139 to 142 is any amino acid
  Variant (143)..(143): Xaa in position 143 is any or no amino acid
  Variant (145)..(147): Xaa in position 145 to 147 is any amino acid
  Variant (149)..(150): Xaa in position 149 to 150 is any amino acid
  Variant (153)..(156): Xaa in position 153 to 156 is any amino acid
  Variant (157)..(183): Xaa in position 157 to 183 is any or no amino acid
  Variant (185)..(185): Xaa in position 185 is any amino acid
  Variant (187)..(190): Xaa in position 187 to 190 is any amino acid
  Variant (193)..(195): Xaa in position 193 to 195 is any amino acid
  Variant (197)..(199): Xaa in position 197 to 199 is any amino acid
  Variant (202)..(220): Xaa in position 202 to 220 is any amino acid
  Variant (221)..(239): Xaa in position 221 to 239 is any or no amino acid
  Variant (241)..(251): Xaa in position 241 to 251 is any amino acid
  Variant (252)..(263): Xaa in position 252 to 263 is any or no amino acid
  Variant (265)..(265): Xaa in position 265 is any amino acid
  Variant (268)..(268): Xaa in position 268 is any amino acid
  Variant (269)..(269): Xaa in position 269 is any or no amino acid
  Variant (271)..(272): Xaa in position 271 to 272 is any amino acid
  Variant (273)..(277): Xaa in position 273 to 277 is any or no amino acid
  Variant (279)..(280): Xaa in position 279 to 280 is any amino acid
  Variant (281)..(283): Xaa in position 281 to 283 is any or no amino acid
  Variant (285)..(287): Xaa in position 285 to 287 is any amino acid
  Variant (288)..(299): Xaa in position 288 to 299 is any or no amino acid
  Variant (302)..(302): Xaa in position 302 is any amino acid
  Variant (305)..(306): Xaa in position 305 to 306 is any amino acid
  Variant (307)..(335): Xaa in position 307 to 335 is any or no amino acid
  Variant (337)..(339): Xaa in position 337 to 339 is any amino acid
WXXXXXXXXXXXXXXXXXXXXXXXXXXXXXXXXXPXXXXXXXXXXXXXXXXXKIQXXXXXXXXXXXXXXXXXCXXXXXXXXXXXXXPXXXXXXXXXXXXXXXXXXXXXXPXXXXXXXXXXXXXXXEDXXXYXXHRXXHXXXXXYXXXHXXHHXXXXXXXXXXXXXXXXXXXXXXXXXXXXXXXPXGXXXXYAXXXEXXXLGXXXXXXXXXXXXXXXXXXXXXXXXXXXXXXXXXXXXXXWXXXXXXXXXXXXXXXXXXXXXXXHXGYXXPXXXXXXXPXXXXXGXXXXXXXXXXXXXXXHDXHHXXXXXXXXXXXXXXXXXXXXXXXXXXXXXXXFXXXD

SEQ ID NO: 4369 - DNA, 2154 bp, Saccharomyces cerevisiae
  CDS (270)..(1673)
gggagcttcgaagtttaaactgtttcgtatagggataccgacatgtatgtttataatataatgatgtttactatgagaaaaaggctgccggaatatcaacggttgctgtggtgagaaaatcgggtaacacctataggggttccatcacttcagatgccttgaactttgaaatctatacgaatataggaagactgagttggtagacctggtaagatagaagaggaagaaggcttctttattaccgcaactaagaataaacttatagcttcatgcgaatctcaaaaaatagtcataagcggcaaagaacgaggctatatttcctcgttacatttattatttattcgataataccctgccgtgcggtactcgtgccttggctggatgatgacccatttgaagcaacgcttctagaaatgggggatgaaccatggagtaaggacatcctttcaagcacacctccgttacatccatctgaagttaccgaggataacaaaagcttaaaacaaaggggcaatgtaccgcaatatgtcatcgataatagccctctgctccatttatatagtgaagaaaagtactggccagctgatgttaaggattttgtaaaaagattccagttgagagaccacagtggggagaaaattatcaatgaacaccttcgtgacttaagtgacttacaagagtattattcggtagagttagagaacggaacgtggggccgagtatccagtgaaggtacatatatgacaagtttagatgattttgataagggccctgactggttgttgggtgaacaaccagaatatggtacaggtcacataaagaaagcaccagcagttctttttgtcgttgacaaaggaaatggttgggtagacgcgttctggttttatttctaccccttcaattggggtccttatattatgggctccggaccatggggaaatcatgtaggggactgggaacattctttagtacgattctataaaggagaaccacaatatctatggatgagtgcgcatgggggtggtagtgcctataagttcgaagccattgagaaaatcaaaagattgcgtcgtgttgacggtaaattgacaaacgaggttattaagaagcctttaatatttagtgcaagaggcacacatgcacattatgcatcagtcggtcaacatgcgcacgatgttccgtttttctttatgccattgagtgactttactgatagagggccattatgggatccttctttaaactattatgcctatacagtgactgtgggggaaaaaatgacaccatgcggcgctgaagaaactaaaatgggactagaatggctatcgttcaaaggcgcttggggcgataaacaattaagacctagggatcccagacaaaaatggtgcccatttcaatggaaatatattgacggaccaaaaggtccactattcaaaaatatggaaagggtttctttatgccaaagatttaaatggtggaatttttggaagggctgcccggcaagaagatatataaaaagaggggaaggtttggatgcagaaaagaatgatcttgtgggtgacaattgtggtatcttgctgtacaacataaggccaaagtggctgcgtagcatactccgttttttgacgtggaggggaagcgtatgtttcattatggactactttacagggtaatgaatatttgggcgtttttcgctattttagcatgctgtagtgtatgtactgtgcatcgtcatgtagcactatttcagccgtatttttctttttttctttcgcaccgtctgtggttgtaaagttactgacacttttttttctagaaagttccggaaaattgcgacactcggtggagctcgagagttgtatccagttttcttgttcggcgatattccgaaccaggtcgggttgggctaacagccgcccaggatggaagaattaagaatttcatagaagccttcagttcttggcgaagtaaagtggcaaaacaaatggaagatctattgcattacatatataaaagcattagaacaatcttttctcattgacaggtattctcattgctctatatatattttcttcttcttgaaagaaatatcagtattacaatcataacaacaaccaaaagaaaataactaatagaccccattacaatatagaa

SEQ ID NO: 4370 - protein, 467 aa, Saccharomyces cerevisiae
MRISKNSHKRQRTRLYFLVTFIIYSIIPCRAVLVPWLDDDPFEATLLEMGDEPWSKDILSSTPPLHPSEVTEDNKSLKQRGNVPQYVIDNSPLLHLYSEEKYWPADVKDFVKRFQLRDHSGEKIINEHLRDLSDLQEYYSVELENGTWGRVSSEGTYMTSLDDFDKGPDWLLGEQPEYGTGHIKKAPAVLFVVDKGNGWVDAFWFYFYPFNWGPYIMGSGPWGNHVGDWEHSLVRFYKGEPQYLWMSAHGGGSAYKFEAIEKIKRLRRVDGKLTNEVIKKPLIFSARGTHAHYASVGQHAHDVPFFFMPLSDFTDRGPLWDPSLNYYAYTVTVGEKMTPCGAEETKMGLEWLSFKGAWGDKQLRPRDPRQKWCPFQWKYIDGPKGPLFKNMERVSLCQRFKWWNFWKGCPARRYIKRGEGLDAEKNDLVGDNCGILLYNIRPKWLRSILRFLTWRGSVCFIMDYFTG

SEQ ID NO: 4371 - DNA, 1404 bp, Saccharomyces cerevisiae
  CDS (1)..(1404)
atgcattgcgtactagcgcgaatattgttatggttcttaatagtagatctaagcgtcatacgggcgcttgtccttccaccattgaaagattatgatccgttagagcctttgatgaaaagagacatggccatgggtcaacggaacagattcaaagtcgacggccaattgccgcccatactaaattccacagatgtgacagatgatcagagaagtctgcatacgcctggagagattccatcttatgtcatcaatcattgtcccttagtgcacttgtatagcgaagagaaatattggccatcggacattgctgagtacgttcaaaacttccaaattaaagataaaaacggcaattctatatccactcatgaaaatttgacactgcatgacttgaaggcggaataccacgtagatttatttggcaacaaaacggaaacgcatatccccagtagcgaggtatttttaaccagtttggacgatttcgacaaggaccctaaatggttgctcggtcatctacccgaatacggaacaggctacaactctaaggcgcctgctattctgatcgtagtcgacaaggggaacgggtgggttgatgcgttctggtttttcttctacccattcaatcatggcccttttattatgggccatggaccctggggcaatcacgtcggtgactgggaacactctttggttcggttttataaaggtattccaaaatatctttggatgagtgcgcattccagtggaacaggctacagatacgaagctgttgagaaatttaagaaactacggaaaagaaaacagcaagatagtgacgatggtggggatactatactggaaagaccgttgatttttagtgctagaggcacgcatgctaattatgcatccgctgggcagcatgctcatgacattcctttttttttcatgcctttgagtgattttaccgatcgtggtcccctgtgggatccatctttgaacttttactcctatacttttgatggtaaaactgtgacaccctcctcagagagagaagaatctctcggtttggattggttgcattttcaaggtggatggggtgatcaacaactaccagctagagatccaagacagaaatggtgcgtagctcaatggaagtatatcggaggtcctcgtggccccctgtttaagaaattggatagattgaatctatgcggcggtgtgaaaaagtggaatttctggaatggtggctgccccgcaagaagattgataaaaaaagcagaaggcttggactctgagagcactgatcttatgggtgataattgtggtgtcctactctatagaatcagaccaaaatggctgagaggaattctaagatttctaatgtggagaggtatactctgttctcttatggaatttttcaccaattga

SEQ ID NO: 4372 - protein, 467 aa, Saccharomyces cerevisiae
MHCVLARILLWFLIVDLSVIRALVLPPLKDYDPLEPLMKRDMAMGQRNRFKVDGQLPPILNSTDVTDDQRSLHTPGEIPSYVINHCPLVHLYSEEKYWPSDIAEYVQNFQIKDKNGNSISTHENLTLHDLKAEYHVDLFGNKTETHIPSSEVFLTSLDDFDKDPKWLLGHLPEYGTGYNSKAPAILIVVDKGNGWVDAFWFFFYPFNHGPFIMGHGPWGNHVGDWEHSLVRFYKGIPKYLWMSAHSSGTGYRYEAVEKFKKLRKRKQQDSDDGGDTILERPLIFSARGTHANYASAGQHAHDIPFFFMPLSDFTDRGPLWDPSLNFYSYTFDGKTVTPSSEREESLGLDWLHFQGGWGDQQLPARDPRQKWCVAQWKYIGGPRGPLFKKLDRLNLCGGVKKWNFWNGGCPARRLIKKAEGLDSESTDLMGDNCGVLLYRIRPKWLRGILRFLMWRGILCSLMEFFTN

SEQ ID NO: 4373 - DNA, 1341 bp, Eremothecium gossypii
  CDS (1)..(1341)
atgataccgattgtgcgggtgatactgcaggcactgaccatgctgcagctgtgcctctgccacatttcgctatttccactggcagaggaaatggaagaagactttctggcaaaagcagaggctggtgagtgggttgatttgcacgtattcgacggacagtggcccaagaggcctgagcacgtgaccgagaaggagcgcacgattgcggacggggagatcccccaatatgtgctggaccactgcccgttggtacatctgtatagcgaggaaatctatatgccttccgatgtgaaagaatttgtgcagcacgtcagggtcgaagacaagcggggcaacgaagtccggagagggccgctggacatcgctaccagttttgccgggctagctggggaggacaccagtgatctttacctgactgcactagaggacttcagccagaatcccaactggctccttgggtacgctccagactatggcacaggtcgtatttccaatggcccatccgtgttgattgtggtcgacaagggtaatggatgggtagatgctttctggttttacttttatcccttcaaccttggtccgtttatcatgggtgctgggccgtggggaaaccacgtcggcgactgggagcactcgctcgtgcgctttttgaacggcaaaccgcagtatctttggatgagcgcccacggcagcggcagcggatacgtctacgatgctgtggagaagaaagatcattggagggtcgttgatggtgaactgcagcgcacggtgctgaagaggccgctaatattcagctcgcgaggtacgcacgcaaattatgcctctattggacagcatgcacacgacgtgccatttttctttagcccgctcagtgacttcaccgacaggggcccactgtgggatccgtccatgaatttctatgcttatacatttgatggtacaacggtcaccccatatagcaagcgggaacgcgaactgggtaccgattggctttattacaatgggagatggggcgacaagcaactcatttggtcagacaagcgtcaacactggtgtctgctacaatggagatatatagatgggccttatggtcccctcaagaagaacctccagcgcacggggctctgtcaaaggggcaggtggtggactttccatcagggatgtcctatccgccggatgataaaacgcggccaaggattggatgccgaacggaatgatcttgtgggagacaactgtggcattgcactttacaagatcagacctaagtggttaagagcgcttcttcggctgattacttggcaggggctgttctgtacctttatggattacttcactggctga

SEQ ID NO: 4374 - protein, 446 aa, Eremothecium gossypii
MIPIVRVILQALTMLQLCLCHISLFPLAEEMEEDFLAKAEAGEWVDLHVFDGQWPKRPEHVTEKERTIADGEIPQYVLDHCPLVHLYSEEIYMPSDVKEFVQHVRVEDKRGNEVRRGPLDIATSFAGLAGEDTSDLYLTALEDFSQNPNWLLGYAPDYGTGRISNGPSVLIVVDKGNGWVDAFWFYFYPFNLGPFIMGAGPWGNHVGDWEHSLVRFLNGKPQYLWMSAHGSGSGYVYDAVEKKDHWRVVDGELQRTVLKRPLIFSSRGTHANYASIGQHAHDVPFFFSPLSDFTDRGPLWDPSMNFYAYTFDGTTVTPYSKRERELGTDWLYYNGRWGDKQLIWSDKRQHWCLLQWRYIDGPYGPLKKNLQRTGLCQRGRWWTFHQGCPIRRMIKRGQGLDAERNDLVGDNCGIALYKIRPKWLRALLRLITWQGLFCTFMDYFTG

SEQ ID NO: 4375 - DNA, 1707 bp, Neurospora crassa
  CDS (1)..(1707)
atgatttacaccctccggcgggcgaccattttcgtcaccgccctcaccatcttctccgtcttggtcctaaccttcctcccgcgctacctcaatcctacgcctcccgatgccgaagaacgaaagcgagacagacaatgggtcaactcctccccatactggttcgatcgccaggtctgccgataccttggcctgtgcggtattcagcacatccgatgggatgcgcccactctgcccggttggggtcggggtcccagctctgacctcgacatgaaggaagagatagccaaagtgctcggtgttggtgactgggacgatgacggagcggcagtctttgtcaacaagcccggcaccgaatcttgggaacatgcgccaggccatgtcgacctcaagcgcaagcgatccgagtcttccgacacgctgcaaaaagtcccccagtacgtcctcgatcatgcgccgctcgtccacctctactcgggcgaacatttttggccttcggacatggctgagcacgtcaagcacatgggcctcctcgacgacgaagacgggtcggtgaacaggacggacgaacttgatctggggagtctcgctaggctcaacgccaagaacggcaccgtctttctgacgagcatggatgatgtggaatccaggcccgagtggctccacaaccgagccgggatccccgtcgagtatgaggatgacgatggtgatgacgagcacgacggaaaccccgacaagaaaatccccggaaacaacccgacggtgcctacggacggaaacacgtggtgggacgccgataaacagcacccgccgaaccggatcgtcgctccccggcatcgcaagggcggtccttcattgcgtcgcgagaagcgcttcatgcagggtgacgatgagccgcagcgtcccattggcggcaccccttccgacggagacaagaacaagcccaacccgagcggttattcgaatggccccgccgtgctcatccttgtcgacaaaggggccggcattctggacgccttctggttcttcttttactcgtacaatctggggcaaaccgtgctgggcatccgcttcggcaaccacgttggcgactgggagcactgcatggtgcgcttcgacaacgggatcccgaaagccatgtttttgtcggagcacgccggcggaaaggcctacgcttggcctgctttggagaagaaggcccaacccaacggcaaaccaccccgtccggtgatttattcggcagtaggaagtcacgccatgtatgccacgcctggcttgcacccctacgtcttgccgttcaagcttctgaaggacgtgaccgaccgcggtcctctgtgggaccctgctctcaaccactacagctattggtacgactacgaggccgggctgaacgaaaccgagtcaccctcatcccctcagtcgccctaccttggcaacccttccgatcctccaaaggagtacacctccttggtccccgcggcggataatccaaaggctccaacaagttggttccactttgaaggagcgtggggcgatgacgtctatagtctggcggactataggcagtggaggctgtttggcgagtatcactacattgtcggaccgctggggcccaagttcaaatacttggagaggaggaaggtgtgccagacagacaagtgtacgatgctgtggagcattgaggacggggagaagagcagttggtattga

SEQ ID NO: 4376 - protein, 568 aa, Neurospora crassa
MIYTLRRATIFVTALTIFSVLVLTFLPRYLNPTPPDAEERKRDRQWVNSSPYWFDRQVCRYLGLCGIQHIRWDAPTLPGWGRGPSSDLDMKEEIAKVLGVGDWDDDGAAVFVNKPGTESWEHAPGHVDLKRKRSESSDTLQKVPQYVLDHAPLVHLYSGEHFWPSDMAEHVKHMGLLDDEDGSVNRTDELDLGSLARLNAKNGTVFLTSMDDVESRPEWLHNRAGIPVEYEDDDGDDEHDGNPDKKIPGNNPTVPTDGNTWWDADKQHPPNRIVAPRHRKGGPSLRREKRFMQGDDEPQRPIGGTPSDGDKNKPNPSGYSNGPAVLILVDKGAGILDAFWFFFYSYNLGQTVLGIRFGNHVGDWEHCMVRFDNGIPKAMFLSEHAGGKAYAWPALEKKAQPNGKPPRPVIYSAVGSHAMYATPGLHPYVLPFKLLKDVTDRGPLWDPALNHYSYWYDYEAGLNETESPSSPQSPYLGNPSDPPKEYTSLVPAADNPKAPTSWFHFEGAWGDDVYSLADYRQWRLFGEYHYIVGPLGPKFKYLERRKVCQTDKCTMLWSIEDGEKSSWY

SEQ ID NO: 4377 - DNA, 1053 bp, Gibberella zeae PH-1
  CDS (1)..(1053)
atgtcatcgatgcatgatgcaccggcccagaccgtggtgtcttcaatcctcaatgacaccaatctggcagtaccagagtacataacacggcatgcaccgcttgtttatcttcattcaaacgatccattcttgccagcggatatcctcactcacgtccgacatacgactcctatgatcgattgcaagcccgtccctgatctaccagaacttgatcttgataacctggccatcctcaacgacgtccctgtccacggcgatcaagtagtcgcacttacttccaacgacaatgttacgaacctaccgtcatggcttctcggagaagctcccgatgataccggcaggatagccaactccacgccgtgcattgttctactcgtcgagcggagtcaacgagatgttgatgcttatttcttctatttttactcttacgaccagggtgcaaatatttcgcaggtgttgccacccttgaatagtctggcggggggcatggctgatgggatgcattacggtgaccatgttggcgactgggaacataactttgttcgcttccgcgatggaaaacctactgggatttattacagtcaacattcaagcggcgcagcatataattggaatgaggaaggcttgtcactcaggaatgatcggcctcttgtatttagtgcctggggctcacacgccaactacgcatcgtcaggtgaccacgttcacgacaaagctctctacgactggtgcgatgcaggaatactctgggaccccgttttgtcagcgtacttctatcacatggatcccacaaccttcagactaacgcgcctgtcgcctcccggatcgacgtcacgtccggcgacaaattacacatcattcttctacttcaccggcatatggggtgatgcagaatacccagagaatcatcctaatcaaagaaaggttccttactttggtctcaagcgctacgtctcaggtccacaaggtccaatctggaaaggacttgtaagaaaagggctgtttcccgatgaccctgagccgaagaagctgatccaaaagcctaatgtataa

SEQ ID NO: 4378 - protein, 350 aa, Gibberella zeae PH-1
MSSMHDAPAQTVVSSILNDTNLAVPEYITRHAPLVYLHSNDPFLPADILTHVRHTTPMIDCKPVPDLPELDLDNLAILNDVPVHGDQVVALTSNDNVTNLPSWLLGEAPDDTGRIANSTPCIVLLVERSQRDVDAYFFYFYSYDQGANISQVLPPLNSLAGGMADGMHYGDHVGDWEHNFVRFRDGKPTGIYYSQHSSGAAYNWNEEGLSLRNDRPLVFSAWGSHANYASSGDHVHDKALYDWCDAGILWDPVLSAYFYHMDPTTFRLTRLSPPGSTSRPATNYTSFFYFTGIWGDAEYPENHPNQRKVPYFGLKRYVSGPQGPIWKGLVRKGLFPDDPEPKKLIQKPNV

SEQ ID NO: 4379 - DNA, 1746 bp, Gibberella zeae PH-1
  CDS (1)..(1746)
atgagaatgcctgaatccggaatacctggtgataggcgtcttatgggcagcggagaaacaagaaatagtcccatcctgtcgggtacacgcccaagacttgtccagagctgcaagtttgcagttccattgcccaaacggtcaagtacctgcattactcacccttgtcttgccttgcctcgcctcgcctctccctccactcactaccttctgggtacctacgttacgcctcaaccagtcaccgcacactccgccaatctatccgtacccttgccgatcaacgcttttgtgttgcttgtctcgttcggcgcatggctactccctcgaatactagaccccacggataaaggtccagagagacgggaaagagaccgtcgctgggttaatagcagcccgtactttctggatcgtcaagcctgccgctggatgagcatatgcggactacaccacttacgcagtgaccctgctactcgtgggaacaacgaagacaaggagcctgaatggggagacctgaagcgccgttctctagcttgggagccagaggaaattccacgtcaagatcacaagcgcaacaaaaaccagcgccgccggattctccggaatatccccgactatgtcaccaagcatgcgcccttggttcatctgtattctggggaggagttttggccttcagatataggccagcacatcgaacacatgaccgcgtatgctggcgatgagcttatcaactcgactgagaaatggacccttcacaatttgcatgaactaaacaaatattctggcaacattactctccgaagcgacgacgatgttgagtcacgacccaattggctacacagtcattacaacgttcccaacccgtttccagatgatcatgacggagaccaggacaccaaaatacctgtaggaaaccctcaaggacaaccagagtctcaagaacccagcacttggtatgatgtcggcaagaaccgtcctatacacaagatttcggatcccagacatcgcaaattccaaaacggtcgtcgctcagaatcctacggccataagccagacgaaaatggttattcagctgccccagccgtactgatcgttgttgacaagggatctggcattgtcgacgccttctggttcttcttctattcatacaaccttggccaaaccgttttggggattcgttttggcaaccatgtgggtgattgggagcattgtatggtgcgcttcgagcacggtatccctcgaggcgtgttcttttcagaacacgaaggcgggcaagcatatgcttttgaggcggttgaaaagcgcggagaacgacccgtcatctattctgccgttggatcgcatgcgatgtacgctctgccaggagaccatccttacatcatcccgtttaaactcctcaaggatgtaacagacaagggacctctgtgggatccatcacttaacaactacgcctatcattacgattacacaaaggagggcggccacgaaccaggagatacggaggaacctctgagcctcgttcccgcagcctcgaatcctcacgcaccgacatcctggttccattaccgcggacattggggcgacgaagtatattctctcgctgatcctcgccagtggcgcttctttggtcagtatcactacgtcactggccctgatggacccatgttcaagactcttgatcgtgggaagatgtgccagaagcagagttgcaaaattctgtacaatcttgatcccaaaaacacttggtattaa

SEQ ID NO: 4380 - protein, 581 aa, Gibberella zeae PH-1
MRMPESGIPGDRRLMGSGETRNSPILSGTRPRLVQSCKFAVPLPKRSSTCITHPCLALPRLASPSTHYLLGTYVTPQPVTAHSANLSVPLPINAFVLLVSFGAWLLPRILDPTDKGPERRERDRRWVNSSPYFLDRQACRWMSICGLHHLRSDPATRGNNEDKEPEWGDLKRRSLAWEPEEIPRQDHKRNKNQRRRILRNIPDYVTKHAPLVHLYSGEEFWPSDIGQHIEHMTAYAGDELINSTEKWTLHNLHELNKYSGNITLRSDDDVESRPNWLHSHYNVPNPFPDDHDGDQDTKIPVGNPQGQPESQEPSTWYDVGKNRPIHKISDPRHRKFQNGRRSESYGHKPDENGYSAAPAVLIVVDKGSGIVDAFWFFFYSYNLGQTVLGIRFGNHVGDWEHCMVRFEHGIPRGVFFSEHEGGQAYAFEAVEKRGERPVIYSAVGSHAMYALPGDHPYIIPFKLLKDVTDKGPLWDPSLNNYAYHYDYTKEGGHEPGDTEEPLSLVPAASNPHAPTSWFHYRGHWGDEVYSLADPRQWRFFGQYHYVTGPDGPMFKTLDRGKMCQKQSCKILYNLDPKNTWY

SEQ ID NO: 4381 - DNA, 1194 bp, Aspergillus nidulans FGSC A4
  CDS (1)..(1194)
atgtccatgtaccttcctcgttctgtagaagccgctctggctgcgacggctataccggactacgtgctggattatggtaaattgctccctacacttgggtctagcgctacagaacaactgacgagactagcgcccctagtatggcttcacagtgaagaccgatacagaccttccggcatcgccgagcacctggatcatgccttgccgaaggtgaactatgaatcaatcgagggcgtctcgttgccgcttacgctagataacctggatcagctcaatgcgctgggtaatgagagcgtgtatctgacatcgcgagaaggcattgacgcgaacccgcagcctgagtggttttacggcgcagatttcaatgagaacggtcaagccagcgatgtttcgtcaattatcgtcgtaaatgatcgtggcgatggagaggtcgatgcgttttacttctatttttactcctataatctaggaaacacggtcttgggaatggagtttggcaaccacgttggagactgggagcataacatgatccgattccaggacggggcgccgcaggccatctggtacagccagcactctggaggacaggcattcacatatgatgcgacagagaagcagggaaagcggcccgtagcatactctgggaacgggacccatgccgtatactcaactccaggtggccatgatcacacaatccctggccttaaccttccagctggctttctcgttgatcagacgaaccagggcgttttgtgggaccccgccttgggcgcctatgcgtatgcttatgtgccagccacgcagaccttcgagccctatgactccagctttccagtgaactggctggacttcaacgggagatggggcgatgatgcgctccagggaggccctgaattgttcggacaagccaagtacgtaggagggcccaatggcccgaagtttaagaacattcagcgggagaagttattcgagaggcaaaagttactccgactcgagtcagagtcaggggtcgccaataccattgaactgaacaaacgacagaaccatgaatcagggcaacagttttacttggttagcggagcaaagggaactcgcccgagaccccagttcaatcgaacggatgctgcctgggtggttggagccagccaatcaaacacgacatttcgtgtttcgttggatggtgtggatagctga

SEQ ID NO: 4382 - protein, 397 aa, Aspergillus nidulans FGSC A4
MSMYLPRSVEAALAATAIPDYVLDYGKLLPTLGSSATEQLTRLAPLVWLHSEDRYRPSGIAEHLDHALPKVNYESIEGVSLPLTLDNLDQLNALGNESVYLTSREGIDANPQPEWFYGADFNENGQASDVSSIIVVNDRGDGEVDAFYFYFYSYNLGNTVLGMEFGNHVGDWEHNMIRFQDGAPQAIWYSQHSGGQAFTYDATEKQGKRPVAYSGNGTHAVYSTPGGHDHTIPGLNLPAGFLVDQTNQGVLWDPALGAYAYAYVPATQTFEPYDSSFPVNWLDFNGRWGDDALQGGPELFGQAKYVGGPNGPKFKNIQREKLFERQKLLRLESESGVANTIELNKRQNHESGQQFYLVSGAKGTRPRPQFNRTDAAWVVGASQSNTTFRVSLDGVDS

SEQ ID NO: 4383 - DNA, 1341 bp, Candida glabrata CBS138
  CDS (1)..(1341)
atgatctcttcagtgtatgtgacgctgattaatgtgtacattaaagctgataggaaagaatttgatatggatcctattggtaaatcagacttatggaaaagggacatatctcgaaatatgtacgataaacttccaagcataaagaaatctgatggtggctcaaactcgtttaaaaacggaactatcccagattatgttatagataactgccctttgattcacttatatagtgatgagaaatactggccgtccaatttttcagaatatgtgtcacatttcaaattgttggatgatgaaggagaagccatattagaccaactaaactcaatcaaagaattaaagcagagctacgtgcgatatgacgaagacggagcatcttatgaagttgactcggaagatatatttatgacatcgatagatgattttgataaggatcccggttggatgaaaggtttcaaaccaaaatatggaacaggatatgcagctcaagctccagcgttagtgtttgtagtagacaaaggtaatggatgggtagatgcgttttggttttatttctatccctttaactggggtccctttattatgggatatggaccttgggggaatcaccttggagattgggaacataccctggttcgcttttataatggtgttcctaagtatatatggatgagtgcgcatggaggagggagtgcctacacttacgaggcaattgagaaaaagaagcgtttaaggcgtattgagggtagaatcactaatgagttgatagaaaaaccgctacttttcagtgcaagaggcactcatgctaattatccatcggtaggtcaacattctcatgatgttccatttttctttatgccattaagtgactttacagatagaggtccactatgggacccatcgctcaactattacggatatacaataacaactaatggtaaattagctcctgctactaatcagacttcggaagatttgggaacttcatggctctatttccaagggcattggggagataagcaaatccctttccgtgatcccaggcaaaagtggtgtttggtccaatggaaatacataggtggcccaaggggtccactaaggaaaaatctaatgagaaaaggcctctgtcaaagatcaaaatggtggaactttatgggagtttgtcctgtacgcaagatgataaaaaatggtgttggcttggatgccgaacggaatgactacttaggcgataattgtggaatattactatataaggttagaccttccatttttcgttctatattgcgccttattacgtggaggggtggcttgtgctttttaatggaaagttttaccggctaa

SEQ ID NO: 4384 - protein, 446 aa, Candida glabrata CBS138
MISSVYVTLINVYIKADRKEFDMDPIGKSDLWKRDISRNMYDKLPSIKKSDGGSNSFKNGTIPDYVIDNCPLIHLYSDEKYWPSNFSEYVSHFKLLDDEGEAILDQLNSIKELKQSYVRYDEDGASYEVDSEDIFMTSIDDFDKDPGWMKGFKPKYGTGYAAQAPALVFVVDKGNGWVDAFWFYFYPFNWGPFIMGYGPWGNHLGDWEHTLVRFYNGVPKYIWMSAHGGGSAYTYEAIEKKKRLRRIEGRITNELIEKPLLFSARGTHANYPSVGQHSHDVPFFFMPLSDFTDRGPLWDPSLNYYGYTITTNGKLAPATNQTSEDLGTSWLYFQGHWGDKQIPFRDPRQKWCLVQWKYIGGPRGPLRKNLMRKGLCQRSKWWNFMGVCPVRKMIKNGVGLDAERNDYLGDNCGILLYKVRPSIFRSILRLITWRGGLCFLMESFTG

SEQ ID NO: 4385 - DNA, 1287 bp, Kluyveromyces lactis NRRL Y-1140
  CDS (1)..(1287)
atgagattctatatattgtttttgtacctatttggtactctagtagcggccatccatcttgatgacccgcttactaacttcaactttactcctcctataaaatctcctaacgaccttctggaccacgagcggacgttaactgacggtgaaattccaaggtatgttctagatcattcaccgttgatccatctttacagcgaagaaaaatatcttccaggagacatccaatcctttgtaccgcactttcaattggtaacatcgaattatgagacggttgtaaatgaacctctgaaaatatcagatctcaagggtgaatataacgttgcaggggaagttttatccagcgaaaccctgtatttacatactacagaaaagttcgaggaagacccatcttggttacgcgggactcatcctgaatatggaacaggattgactagagatgcttcatcaattgttatagtcgttgataaaggcaatggatgggtagacgcatattggttctatttctatcccttcaatttgggtccattcatcatgggttatggtccctggggtaatcacataggtgattgggaacattctttggttcggtttttcaagggcgaccctcagtatatttggatgagcgcccatgggggcggcgcgagttacacatatagatgcatagaaaaaaaggatagatggagagttactccagaggggaaatttgacaagactcaagtgataaaaaggccgttgttattcagcgccagaggtacacatgcaaactatgcaagtgttggccaacatgcccatgatgttccatttttcttcagtgcattaagtgatttcacagatagaggaccattatgggacccatctttgcgtttctatgggttcacatatgatgggaaatctttctacgagaaggaagggcaagaaataggaacatcttggttatactttttgggacaatgggggaacaaacaattgaaatggagtgatcctagacagaaatggtgtcctgtccaatggaaatatattgacggacccaagggacctgcagcaaagaatctagtaaggacaactctttgtgagcggagcaaatggtggaacttctggcatggctgtcctgtcagacggatgattaagagaggacaaggtttggatgcagaaagaaatgatttggtcggagataactgcggtatcgccctatacaggattcgtccaaaatggctacgatcattattccggctaatcacttggaggggagcgttttgcgcattcatggattacttcactggttga

SEQ ID NO: 4386 - protein, 428 aa, Kluyveromyces lactis NRRL Y-1140
MRFYILFLYLFGTLVAAIHLDDPLTNFNFTPPIKSPNDLLDHERTLTDGEIPRYVLDHSPLIHLYSEEKYLPGDIQSFVPHFQLVTSNYETVVNEPLKISDLKGEYNVAGEVLSSETLYLHTTEKFEEDPSWLRGTHPEYGTGLTRDASSIVIVVDKGNGWVDAYWFYFYPFNLGPFIMGYGPWGNHIGDWEHSLVRFFKGDPQYIWMSAHGGGASYTYRCIEKKDRWRVTPEGKFDKTQVIKRPLLFSARGTHANYASVGQHAHDVPFFFSALSDFTDRGPLWDPSLRFYGFTYDGKSFYEKEGQEIGTSWLYFLGQWGNKQLKWSDPRQKWCPVQWKYIDGPKGPAAKNLVRTTLCERSKWWNFWHGCPVRRMIKRGQGLDAERNDLVGDNCGIALYRIRPKWLRSLFRLITWRGAFCAFMDYFTG

SEQ ID NO: 4387 - DNA, 1311 bp, Debaryomyces hansenii CBS767
  CDS (1)..(1311)
atgataatatcatattggttctccatactaatatttgcgtttgcagtggaaggaacgaacctgcctcggtgggaggcagcaaatagctatattatggagtcgattggcacagaaaaggttgaaataaataatcttataaactcacccgataagaatttaccgccaatactgagttggccaaagaaagaagagagaacgttgaagaatggtgagataccacagtatgctattgattatgcgccattagttcatttatacacggaggaaaaatacttgccgtatgatatcaaggattacgtgacaaacttttttgtgacttatgaaaacggtagtgttgtcaagggcacggaagaagaaatgaaccttagtaaattatctaagttgccgaatgtgccggatatatttttactgtcccgaacagatttcgacaaggaccctgaatgggttactggtgcaaaaaataagccttcattgattgacggggagattaaaaatgcgccagcgacattaattgtagttgataaaggtaatgggtgggtagatgcattctggttctacttttattcgttcaatttgggtccatttgtcatgggatctggcccgtatggtaatcacgtaggcgattgggaacattcattagtgagattttataacggtgtaccggtgatcgtttggatgtcggcccatggtggaggaggtgcatatttctatcacaacttagaaaagtgggagattgacgacactcatcccataatattctcagctagaggaacgcatgcaaattatgtttcggttggacagcaccctcatgatttgccttacggtattttatccgatttcaccgacaggggtcctttgtggaaccctaccaagaattacttggcttattcgtatgatggtgtatttgtatatcctgcagaaaataacactaattcgagacatagaggtagagaagtggaatacggaaattggttgtcttttacaggacactggggtgatcagaagttacctgatgatgatcctcgtcaaaaacatctgttcattggaggttataaatacatcaatggtcccagtggtccattaatgaaaaatttggtgagattaaaaacctgcgaaagacacaaatggtggaatttctggaatggttgtaatgttagagagaatattaaatggggaattggtgtagaaagtgaagggtataattgtggaaatgttttcattaaaataaggcctgtttggcttaggagaatacttcaaaaaattacctggggtggtgggttttgttatattgttgatttgctttatggttaa

SEQ ID NO: 4388 - protein, 436 aa, Debaryomyces hansenii CBS767
MIISYWFSILIFAFAVEGTNLPRWEAANSYIMESIGTEKVEINNLINSPDKNLPPILSWPKKEERTLKNGEIPQYAIDYAPLVHLYTEEKYLPYDIKDYVTNFFVTYENGSVVKGTEEEMNLSKLSKLPNVPDIFLLSRTDFDKDPEWVTGAKNKPSLIDGEIKNAPATLIVVDKGNGWVDAFWFYFYSFNLGPFVMGSGPYGNHVGDWEHSLVRFYNGVPVIVWMSAHGGGGAYFYHNLEKWEIDDTHPIIFSARGTHANYVSVGQHPHDLPYGILSDFTDRGPLWNPTKNYLAYSYDGVFVYPAENNTNSRHRGREVEYGNWLSFTGHWGDQKLPDDDPRQKHLFIGGYKYINGPSGPLMKNLVRLKTCERHKWWNFWNGCNVRENIKWGIGVESEGYNCGNVFIKIRPVWLRRILQKITWGGGFCYIVDLLYG

SEQ ID NO: 4389 - DNA, 1218 bp, Yarrowia lipolytica CLIB99
  CDS (1)..(1218)
atgaaaatagcttggctattgtttacggcagcgacatttgtggagggtgtttctcgacataaaagagaccctgtttggaccgtgaatcccggccaggtcccggactacgtcctgcgtcactgtccaggagtgcatctttattcggaggaaaagtatctccctggtgatccagcagactatgtgaccaatttcaaaattgacacggcttctggcaagacggtattgaatggcagcgagtctgatccggtcactttggctcgcctcggtcaatattcgtttgagaagcactcttcaaggacatttatgacttcattaacggatttcaacgcagatccggactggatcacaggagaaggaaacatcccccatcttgtttcgggcaagattgatcatgccaagtctgtattgatcgtggttgacaaaggtgatggacttgtggatgccttctggttctacttttaccccttcaacctaggaccttttgtcatgggtggcgggccttatggcaaccatgtgggcgattgggagcactctctggtgcgtttccaggatggcgttccgcagattttgtggatgagtgcccatggtggcggaaacgcctattactataatgctgccgaaaaaatggacaacgatcctgaaagaagggtcttattttctgctcgaggcactcatgctaactacggatctgtaggccagcattctcacgatctacccttttacatgctttcggactttactgatcggggagctctgtgggaccctgttcagaactactacggatacactctgacgcaccgagaacggggcagaaccggagccgatcgcatctggtttgacggccgagtgctcacatcggacggccagtctccacacccgtcgtggctgaactaccttggccgatggggcgatcggcagcttccaaactcggatcctcgacaaaagtggcacccgttcaactggcgatacattgatggcccacgtggccccatggccaaaaacctgctgcgccacacagtctgcgagcgcaacaagtggtggaatttgtttcgaacgtgccgtatccgacgccgggtcgagacagcagaaggcatagaagccgagggatacgggtgcgtgggcctcatggactggcttccgtggtggatcggctggattccgtggactgtcacttggcgaggatacggctgctgggccattgaccgtctttggggttga

SEQ ID NO: 4390 - protein, 405 aa, Yarrowia lipolytica CLIB99
MKIAWLLFTAATFVEGVSRHKRDPVWTVNPGQVPDYVLRHCPGVHLYSEEKYLPGDPADYVTNFKIDTASGKTVLNGSESDPVTLARLGQYSFEKHSSRTFMTSLTDFNADPDWITGEGNIPHLVSGKIDHAKSVLIVVDKGDGLVDAFWFYFYPFNLGPFVMGGGPYGNHVGDWEHSLVRFQDGVPQILWMSAHGGGNAYYYNAAEKMDNDPERRVLFSARGTHANYGSVGQHSHDLPFYMLSDFTDRGALWDPVQNYYGYTLTHRERGRTGADRIWFDGRVLTSDGQSPHPSWLNYLGRWGDRQLPNSDPRQKWHPFNWRYIDGPRGPMAKNLLRHTVCERNKWWNLFRTCRIRRRVETAEGIEAEGYGCVGLMDWLPWWIGWIPWTVTWRGYGCWAIDRLWG

SEQ ID NO: 4391 - DNA, 1467 bp, Cryptococcus neoformans var. neoformans JEC21
  CDS (1)..(1467)
atgaatttcataggcttgtggtctttagccctcttgggcagtcagttcacttccgtcatcgccactcctcttcgtgttccgcaagttccttttgctgaaccatcattactccctcaagacgaaacggtccaaaaatggacgtctcaagatgtaaaagaccaggagatggccaagctcttgaaccaatatgctccgatttttaaactatctaaagacgaacgatattttcctagctcagtagattatatgctcccacattatagctttatagaggatgtttcaggcgacacataccctgctaaccacactattttaactccatgtcatttagacaccctccctttagccggagcatatttgtttctctcaataaacgaacctcataatccccagccatctctacttgaaaaagaatcgcattacctctatggtcctgcaggccaagaggaagaattggagaagaggaagaaaaacaacgaaagaggaaggatagaagaaccagtatacgggttttgggtcgatcaaaataggggggttgtggatctgtggtattgggctttctaccctctcaattttgggaagccagcaggtcgcctcggaatactaggtaaccatgtcgccgactgggagcacttgcgtgtgcggattgtagacggcgtgcccgtgtctgcggattatagtacgcatgaaggcggacgtcttagtgcagggacagtccggtgggaggacgttgaaaaagtccatgatcgacctgtggcatatgtagcgatgggcagccatggactggggaacatcttcaagattgtcgacaaaaccgacgacgaaggtcccatctgggatactttggacaacgttatccccgtacgctactgggctaatgctcatgacaggacgagagtgagacatgctggtaaagatagttggaggaattttaagggccggtggggtaataaaggagagactgattgttggtggcaccctatcactgggttttgccaggttgttgatgctccccctgggcctaaccgtgatttcggcgtacctcccgagtgcattgtcgcaccccgcgctaccgaatactcaacatataatttttacctatcttcccacgccgttgaatgggctgaagaaaatggcatcacaatggtcgaagtagaacaaacctgtgaaaggcctaggcgaggtaagggtgatgatgatacgtcggtcgaagatgtagagacttggagcacaaagggatcgattttgttcagaggcaaggaccaacattcagctcatttgcccgagtgtaagggcgttcagagctcagtaagaggatacaggatatctttatgcctcatcaacggtcagtgcttgactacttcacgtgagagacggatttgttcgtatgaaccgggagaaaggggcaataaacctggaggtgcggtgattgtgaacgatattgatgactggagatggaactattga

SEQ ID NO: 4392 - protein, 488 aa, Cryptococcus neoformans var. neoformans JEC21
MNFIGLWSLALLGSQFTSVIATPLRVPQVPFAEPSLLPQDETVQKWTSQDVKDQEMAKLLNQYAPIFKLSKDERYFPSSVDYMLPHYSFIEDVSGDTYPANHTILTPCHLDTLPLAGAYLFLSINEPHNPQPSLLEKESHYLYGPAGQEEELEKRKKNNERGRIEEPVYGFWVDQNRGVVDLWYWAFYPLNFGKPAGRLGILGNHVADWEHLRVRIVDGVPVSADYSTHEGGRLSAGTVRWEDVEKVHDRPVAYVAMGSHGLGNIFKIVDKTDDEGPIWDTLDNVIPVRYWANAHDRTRVRHAGKDSWRNFKGRWGNKGETDCWWHPITGFCQVVDAPPGPNRDFGVPPECIVAPRATEYSTYNFYLSSHAVEWAEENGITMVEVEQTCERPRRGKGDDDTSVEDVETWSTKGSILFRGKDQHSAHLPECKGVQSSVRGYRISLCLINGQCLTTSRERRICSYEPGERGNKPGGAVIVNDIDDWRWNY

SEQ ID NO: 4393 - DNA, 1926 bp, Aspergillus nidulans FGSC A4
  CDS (1)..(1926)
atgctttatttccttcttatagtgcctcccgttcctgttcctgtacccccgaatccaaatgctcgccttcgatccttcttcatcctgctcggtctcttcgctactgcggtagtagcgattgtcaatccccccgacgaccctccgttgaccgctatcttatcgccgcctggtggtgctatcccaatcgggaaatcatacatcagcacccccactactcttaccaccaccgcttctcccttaacctccgaaagtgctgccggtcgtaaagacgttggagtcgcccctaagtctgagttacgtaccgactccaacgctgcagcactccctagcactctcagtacctatgagcagatggtccagaagactaccgcggcaattgtcactctttcatcactcattgcctatgtgacgctcaacagtatcattcgggcggtcaagccgtcggtcttcatctggtatgaggaggattatgacgagaagagctggattgcgtcttcgcatcattggctcgatcggaaagcttgtcgctggttcggcatctgcggtgctgctcactttcgcccgtctcattcacgcttcggccatcgcaaggctgagtcactgatggagctccctggggaagcagatcagtcaccctggcgggagtactgggagaacaaaaccgctcatcccgaggaaacctgggacgaagcagaacggtctcgtcgtcagattccagattatgttttggactatgctccgctggtgcatctcttttctggtgaacagttctggccctgcgatattgcggagcatctctaccacatcacgcccatgctgaattatactccgattcagtcgcagtccgatcacccaaccttgcgaaatcttgaccaactgaatcgttgggaggccgggcgcaatgtcttccttactagcaatgatgacgtggaagaacgtcctccatggatggaaggggagaagaatgtcccaagccccccagacgatgacccggagccagcttgggctgattgggatggtcggatagacggtgctttcgcggatgatacgccccagaatcgagcaaaaaggtacgatacgcaactgcctctgcaggacagggagtcagaagatatctcgctagatcagctcggctatctcatgcaggatgaagataccgtacgtgatgaactgcgcaagcggtatggaggcgaaccgatatccatcaaggcggtaggcgggcgaagcgaggcgccagcaattctactcgtcatcgacaagggcaatggcattgtggatgctttctggttctatttctatagtttcaatcttggaaatgtggtactcaatgtgcggttcggaaaccacattggagattgggaacactgtcttgtgcgcttccaccacggaatccccaaggctcttttcttcagcgcccattctggaggcgaagcatacagctacgaagccttggagaagataggccgacgacctgtaatatactcagcaacaggcacccacgccatgtatgccactcccggagtgcactcatacatccttccatggggtcttctgcatgatcagacagaccgaggacctctttgggacccacttctcaactcccacatgtacacgtacgaccatgtcagtgacacccttcgcgcctctactctcagcccaactgcaccgacagagtggttttacttcaacggtcattggggcgacaagttctatcctctgggtgatcatcgacagtatcgatttgcaggccagtatcactatgtaaacggtccgcttggcccgcggttcaagcatcttaaccgccgcaaagtatgtcagacgccggatgaagagccctgtatcatcaaagacttcatcggagagaaaaagcgcgctaaacggtggtccacgtctggaccagggaacccttctgataacgtctcatga

SEQ ID NO: 4394 - protein, 641 aa, Aspergillus nidulans FGSC A4
MLYFLLIVPPVPVPVPPNPNARLRSFFILLGLFATAVVAIVNPPDDPPLTAILSPPGGAIPIGKSYISTPTTLTTTASPLTSESAAGRKDVGVAPKSELRTDSNAAALPSTLSTYEQMVQKTTAAIVTLSSLIAYVTLNSIIRAVKPSVFIWYEEDYDEKSWIASSHHWLDRKACRWFGICGAAHFRPSHSRFGHRKAESLMELPGEADQSPWREYWENKTAHPEETWDEAERSRRQIPDYVLDYAPLVHLFSGEQFWPCDIAEHLYHITPMLNYTPIQSQSDHPTLRNLDQLNRWEAGRNVFLTSNDDVEERPPWMEGEKNVPSPPDDDPEPAWADWDGRIDGAFADDTPQNRAKRYDTQLPLQDRESEDISLDQLGYLMQDEDTVRDELRKRYGGEPISIKAVGGRSEAPAILLVIDKGNGIVDAFWFYFYSFNLGNVVLNVRFGNHIGDWEHCLVRFHHGIPKALFFSAHSGGEAYSYEALEKIGRRPVIYSATGTHAMYATPGVHSYILPWGLLHDQTDRGPLWDPLLNSHMYTYDHVSDTLRASTLSPTAPTEWFYFNGHWGDKFYPLGDHRQYRFAGQYHYVNGPLGPRFKHLNRRKVCQTPDEEPCIIKDFIGEKKRAKRWSTSGPGNPSDNVS

SEQ ID NO: 4395 - DNA, 1329 bp, Candida albicans SC5314
  CDS (1)..(1329): transl_table=12
atgaagatgattattattgacttattaactatacttctgctatcattaccaatctgtttagcaaatgatccactatattttgacgttggggccaatagttatattcaaaacactcttgatgatgaatcacgagagattaaaatagaaaacattttacataatcctttattttataaagattatccaccgatagttagtccaccaaatgacactcaaaagactttaaaaccaggtgaaattcccgattatgttattaaatatgctcccttggtacatctttatagtgaagaaagatatttcccttatgatgttaaaaaatttgtcactaatttccatgtcacttggagaaatggttcaatttatcctggtacagaaaaaaatatgaatttagataaattagcaaatttacctaatagtacagatttatttcttactgctaatagtgattttgattctgatcctgaatggatcacagggttaaaaaataaacctagtttaatcaatggagaaattaaagatgccccagctacgttgattgtcgttgacaaggggaatggatgggtcgatgccttttggttttatttttattctttcaatttaggaccctatgtaatgggtcaaggtccatatgggaatcacgtgggagattgggaacattcattggtaagatattataagggagaaccagtaatagtatggatgtcggcccatagtggaggtggtggatattattatgataatttggaaaaatattctttagatccaaatcatccaatcattttcagtgctagaggtactcatgccaattacccaagtgtgggacaacatcctcatgatttaccatatactatattgagtgattttaccgatagaggtccattatggaatccatcattaaattatttatgctatagttttgacggcaaacatgtatacccaggaaacaattctaacccaaaacatgttggaagagaatgggattatggcaattggttatcatttagtggtcattggggggatgatactctttctagaaaggattcacgacaagtatattcatttattggtggttataaatatattgaaggtcctacaggtccattgagtaagaatttaatgagattagaaccatgtgaaagtgctcaatggtggaatttttggaaagtttgtaatgttcgtaatgatattgaatggggggttggggttgaatcagaaggattcaattgtgcacgattaactaataatattagaccaatatggttgaagaaatcaatacaaagtataatgtggggtggaggaatctgttttatagccaatttattggattaa

SEQ ID NO: 4396 - protein, 442 aa, Candida albicans SC5314
MKMIIIDLLTILSLSLPICLANDPLYFDVGANSYIQNTLDDESREIKIENILHNPLFYKDYPPIVSPPNDTQKTLKPGEIPDYVIKYAPLVHLYSEERYFPYDVKKFVTNFHVTWRNGSIYPGTEKNMNLDKLANLPNSTDLFLTANSDFDSDPEWITGLKNKPSLINGEIKDAPATLIVVDKGNGWVDAFWFYFYSFNLGPYVMGQGPYGNHVGDWEHSLVRYYKGEPVIVWMSAHSGGGGYYYDNLEKYSLDPNHPIIFSARGTHANYPSVGQHPHDLPYTILSDFTDRGPLWNPSLNYLCYSFDGKHVYPGNNSNPKHVGREWDYGNWLSFSGHWGDDTLSRKDSRQVYSFIGGYKYIEGPTGPLSKNLMRLEPCESAQWWNFWKVCNVRNDIEWGVGVESEGFNCARLTNNIRPIWLKKSIQSIMWGGGICFIANLLD

SEQ ID NO: 4397 - DNA, 1587 bp, Aspergillus fumigatus Af293
  CDS (1)..(1587)
atgattggcaaagcgaaaggcaccattatcattttgtcttcgctgattgcatatgtctccatcaatagcttagtacgtgctttgaatccggatgcattcatctggtacgatgaggacagggaagagcagcgctggatcgcgtcgtccccgtcgtggttggaccgtaaagcctgtcgctggctgagtctctgcggtaccgctcatttccacacggttggtccgcgcttcggccagcggagagtcctgacagagcccaatgcctctgtcacggcgcaagacgaagtcgctccgtggcggtccttctggttccgagaacaggagcatctggcgaatcagtgggatgatgccgaacgttcgctcagagagatacccgactatgtctttgaatatgctcctctcgtgcatctattctccaaagagcagttctggccatgtgatatcgcagagcatctgttccacaccacgccaatgttaaactacacgccggtgcaatcagagcatagtcatccaacgttggaggacctggaccgactgaaccaatggcaggatggtcgttacgtcttcctgaccagtaatgataatgtggaggagcggcccccgtggatggaaggagaaaagaatatccctgttgcgccagatgagcacgaagaagaatcatggtcggactgggacagtcgagtggatggggccattccaggagatacaccggagggccgcttaaagtggtatgacacgaatcacaactcgatgtcgaaagatgaagccgccaatctaccatgggagaatcttggttattccaagtcagaggatcttctgcaggatgaaagggtcagggacgagctgcggaaacgatacggtggcgaaccggtaaagatgcaagagactggaggccgaagtgaggcgcctgcagtgctgctcgtcgtggacaagggcaacggcatagtcgatgccttttggttcttcttttacagtttcaatctcggaaatgtggttctgaatgtacggtttggcaaccacatcggcgactgggagcattgccttgtccgtttctataacggccagcctaaagctcttttctttagtgcccattccgcgggcgaggcatatagttatgaagcggtggagaaaatcggacaacgaccagtcatctattctgcagtgggtacgcatgccatgtatgccactcctggtgtccattcgtatgttctcccctggggacttcttcatgaccaaacggaccgaggacctctctgggatcctctcttgaattcgcacatgtatacgtacgatcatgtgaatgacacgttgcgcgcctccacagccagcccgttggcacctacggagtggttctactttaacggtcactggggagataagttctatccgctgggagaccgtcgacagtatcgcttcgcaggtcaatatcactacgttaacggtcccctgggcccgcggttcaagcatctgcaccgccgcaaggtgtgtcaagggcccgacgaggatccctgtgtgattaaagattgggtgggcgaaaagatgcggcccaagcgcctgccaaatccccggccccacgagaatccagtgtga

SEQ ID NO: 4398 - protein, 528 aa, Aspergillus fumigatus Af293
MIGKAKGTIIILSSLIAYVSINSLVRALNPDAFIWYDEDREEQRWIASSPSWLDRKACRWLSLCGTAHFHTVGPRFGQRRVLTEPNASVTAQDEVAPWRSFWFREQEHLANQWDDAERSLREIPDYVFEYAPLVHLFSKEQFWPCDIAEHLFHTTPMLNYTPVQSEHSHPTLEDLDRLNQWQDGRYVFLTSNDNVEERPPWMEGEKNIPVAPDEHEEESWSDWDSRVDGAIPGDTPEGRLKWYDTNHNSMSKDEAANLPWENLGYSKSEDLLQDERVRDELRKRYGGEPVKMQETGGRSEAPAVLLVVDKGNGIVDAFWFFFYSFNLGNVVLNVRFGNHIGDWEHCLVRFYNGQPKALFFSAHSAGEAYSYEAVEKIGQRPVIYSAVGTHAMYATPGVHSYVLPWGLLHDQTDRGPLWDPLLNSHMYTYDHVNDTLRASTASPLAPTEWFYFNGHWGDKFYPLGDRRQYRFAGQYHYVNGPLGPRFKHLHRRKVCQGPDEDPCVIKDWVGEKMRPKRLPNPRPHENPV

SEQ ID NO: 4399 - DNA, 1467 bp, Cryptococcus neoformans var
  CDS (1)..(1467)
atgaatttcataggcttgtggtctttagccctcttgggcagtcagttcacttccgtcatcgccactcctcttcgtgttccgcaagttccttttgctgaaccatcattactccctcaagacgaaacggtccaaaaatggacgtctcaagatgtaaaagaccaggagatggccaagctcttgaaccaatatgctccgatttttaagctatctaaagacgaacgatattttcctagctcagtagattatatgctcccacattatagctttatagaggatgtttcaggcgacacataccctgctaaccacactattttaactccatgtcatttagacactctccctttagccggcgcatatttgtttctctcaataaacgaacctcataatccccagccatctctacttgaaaaagaatcgcattacctctacggtcctgcaggtcaagaggaagaattggagaagaggaagaaaaacaatgaaagaggaaggatagaagaaccagtatatgggttttgggtcgatcaaaataggggggttgtggatctgtggtattgggctttctaccctctcaattttgggaagccagcaggtcgcctcggaatactaggtaaccacgtcgccgactgggagcacttgcgtgtgcggattgtagacggcgtgcccgtgtctgcggattatagtacgcatgaaggcggacgtcttagtgcagggacagtccggtgggaggaggttgaaaaagtccatgatcgacctgtggcatatgtagcgatgggcagccatggactggggaacatcttcaagattgtcgacaaaaccgacgacgaaggtcccatctgggatactttggacaacgttatccccgtacgctattgggctaatgctcatgacaggacgagagtgagacatgctggtaaagatagttggaggaattttaagggccggtggggtaataaaggagagactgattgttggtggcaccctatcactgggttttgccaggttgttgatgctccccctggacctaaccgtgatttcggcgtacctcccgagtgcattgtcgcaccccgcgctaccgaatactcaacatataatttttacctatcttcccacgccgtggaatgggctgaagaaaacggcatcacaatggtcgaagtagaacaaacctgtgaaaggcctaggcgaggtaagggtgatgatgatacgtcggtcgaagatgtagagacttggagcacaaagggattgattttgttcagaggcaaggaccaacattcagctcatttgcccgagtgtaagggcgttcagagctcagtaagaggatacaggatatctttatgcctcatcaacggtcagtgcttgactacttcacgtgagagacggatttgttcgtatgaaccgggagaaaggggcaataaacctggaggtgcggtgattgtgaacgatattgatgactggagatggaactattga

SEQ ID NO: 4400 - protein, 488 aa, Cryptococcus neoformans var
MNFIGLWSLALLGSQFTSVIATPLRVPQVPFAEPSLLPQDETVQKWTSQDVKDQEMAKLLNQYAPIFKLSKDERYFPSSVDYMLPHYSFIEDVSGDTYPANHTILTPCHLDTLPLAGAYLFLSINEPHNPQPSLLEKESHYLYGPAGQEEELEKRKKNNERGRIEEPVYGFWVDQNRGVVDLWYWAFYPLNFGKPAGRLGILGNHVADWEHLRVRIVDGVPVSADYSTHEGGRLSAGTVRWEEVEKVHDRPVAYVAMGSHGLGNIFKIVDKTDDEGPIWDTLDNVIPVRYWANAHDRTRVRHAGKDSWRNFKGRWGNKGETDCWWHPITGFCQVVDAPPGPNRDFGVPPECIVAPRATEYSTYNFYLSSHAVEWAEENGITMVEVEQTCERPRRGKGDDDTSVEDVETWSTKGLILFRGKDQHSAHLPECKGVQSSVRGYRISLCLINGQCLTTSRERRICSYEPGERGNKPGGAVIVNDIDDWRWNY

SEQ ID NO: 4401 - DNA, 27 bp, Artificial sequence
  primer
atgcgaatctcaaaaaatagtcataag

SEQ ID NO: 4402 - DNA, 25 bp, Artificial sequence
  primer
ttaccctgtaaagtagtccataatg

SEQ ID NO: 4403 - protein, 469 aa, Artificial sequence
  consensus sequence
  Variant (2)..(2): Xaa in position 2 is any amino acid
  Variant (4)..(8): Xaa in position 4 to 8 is any amino acid
  Variant (11)..(12): Xaa in position 11 to 12 is any amino acid
  Variant (14)..(14): Xaa in position 14 is any amino acid
  Variant (16)..(16): Xaa in position 16 is any amino acid
  Variant (18)..(20): Xaa in position 18 to 20 is any amino acid
  Variant (22)..(50): Xaa in position 22 to 50 is any amino acid
  Variant (51)..(53): Xaa in position 51 to 53 is any or no amino acid
  Variant (55)..(64): Xaa in position 55 to 64 is any amino acid
  Variant (65)..(77): Xaa in position 65 to 77 is any or no amino acid
  Variant (79)..(87): Xaa in position 79 to 87 is any amino acid
  Variant (89)..(89): Xaa in position 89 is any amino acid
  Variant (90)..(91): Xaa in position 90 to 91 is any or no amino acid
  Variant (93)..(108): Xaa in position 93 to 108 is any amino acid
  Variant (109)..(195): Xaa in position 109 to 195 is any or no amino acid
  Variant (197)..(201): Xaa in position 197 to 201 is any amino acid
  Variant (204)..(204): Xaa in position 204 is any amino acid
  Variant (206)..(206): Xaa in position 206 is any amino acid
  Variant (208)..(208): Xaa in position 208 is any amino acid
  Variant (212)..(213): Xaa in position 212 to 213 is any amino acid
  Variant (215)..(215): Xaa in position 215 is any amino acid
  Variant (218)..(219): Xaa in position 218 to 219 is any amino acid
  Variant (221)..(221): Xaa in position 221 is any amino acid
  Variant (223)..(230): Xaa in position 223 to 230 is any amino acid
  Variant (231)..(245): Xaa in position 231 to 245 is any or no amino acid
  Variant (249)..(249): Xaa in position 249 is any amino acid
  Variant (255)..(256): Xaa in position 255 to 256 is any amino acid
  Variant (260)..(261): Xaa in position 260 to 261 is any amino acid
  Variant (263)..(263): Xaa in position 263 is any amino acid
  Variant (265)..(269): Xaa in position 265 to 269 is any amino acid
  Variant (271)..(271): Xaa in position 271 is any amino acid
  Variant (273)..(274): Xaa in position 273 to 274 is any amino acid
  Variant (276)..(277): Xaa in position 276 to 277 is any amino acid
  Variant (278)..(281): Xaa in position 278 to 281 is any or no amino acid
  Variant (283)..(287): Xaa in position 283 to 287 is any amino acid
  Variant (290)..(293): Xaa in position 290 to 293 is any amino acid
  Variant (294)..(311): Xaa in position 294 to 311 is any or no amino acid
  Variant (313)..(315): Xaa in position 313 to 315 is any amino acid
  Variant (318)..(318): Xaa in position 318 is any amino acid
  Variant (320)..(320): Xaa in position 320 is any amino acid
  Variant (323)..(323): Xaa in position 323 is any amino acid
  Variant (324)..(326): Xaa in position 324 to 326 is any or no amino acid
  Variant (328)..(330): Xaa in position 328 to 330 is any amino acid
  Variant (332)..(332): Xaa in position 332 is any amino acid
  Variant (334)..(334): Xaa in position 334 is any amino acid
  Variant (335)..(337): Xaa in position 335 to 337 is any or no amino acid
  Variant (339)..(341): Xaa in position 339 to 341 is any amino acid
  Variant (342)..(351): Xaa in position 342 to 351 is any or no amino acid
  Variant (353)..(353): Xaa in position 353 is any amino acid
  Variant (355)..(355): Xaa in position 355 is any amino acid
  Variant (360)..(360): Xaa in position 360 is any amino acid
  Variant (363)..(363): Xaa in position 363 is any amino acid
  Variant (365)..(370): Xaa in position 365 to 370 is any amino acid
  Variant (372)..(389): Xaa in position 372 to 389 is any amino acid
  Variant (390)..(420): Xaa in position 390 to 420 is any or no amino acid
  Variant (422)..(425): Xaa in position 422 to 425 is any amino acid
  Variant (427)..(427): Xaa in position 427 is any amino acid
  Variant (431)..(444): Xaa in position 431 to 444 is any amino acid
  Variant (445)..(454): Xaa in position 445 to 454 is any or no amino acid
  Variant (456)..(457): Xaa in position 456 to 457 is any amino acid
  Variant (460)..(460): Xaa in position 460 is any amino acid
  Variant (463)..(464): Xaa in position 463 to 464 is any amino acid
  Variant (466)..(468): Xaa in position 466 to 468 is any amino acid
PXYXXXXXPLXXLXSXEXXXPXXXXXXXXXXXXXXXXXXXXXXXXXXXXXXXXLXXXXXXXXXXXXXXXXXXXXXXXLXXXXXXXXXPXXXWXXXXXXXXXXXXXXXXXXXXXXXXXXXXXXXXXXXXXXXXXXXXXXXXXXXXXXXXXXXXXXXXXXXXXXXXXXXXXXXXXXXXXXXXXXXXXXXXXXXXXXXPXXXXXVDXGXGXVDAXXFXFYXXNXGXXXXXXXXXXXXXXXXXXXXXXXGNHXGDWEHXXVRFXXGXPXXXXXSXHXXGXXXXXXYXXXXXEKXXXXXXXXXXXXXXXXXXXXXXPXXXSAXGXHAXXXXYXXXGXHXXXXPXXXXXXXXXXXXXLXDXTDRGXLWXPXXXXXXYXXXXXXXXXXXXXXXXXXXXXXXXXXXXXXXXXXXXXXXXXXXXXXXXXWXXXXGXWGDXXXXXXXXXXXXXXXXXXXXXXXXYXXGPXGPXXKXXXR

SEQ ID NO: 4404 - DNA, 2841 bp, Saccharomyces cerevisiae
  CDS (1)..(2841)
atgagactcttcatcggtagaagatcacggtcgattgtaatatcttccaacaactactgtttatccttccagcgtttgcgcagcataccaggtgccagttctcagcagcgtcaattaagtaaaactcctagcgtaacaatcaagtcctaccctgacacagatctttcaagtgatagtaactatctcgaagtcaaaagttgcatatttaatggattattagggctcgtttgtcttaatggtgatatatatgttgccgtcatatctggtgttcagaatgttgggtttcctcgatggaaactgatagatcatcaagttaggccttcggagagcatttataaagtattggatgttgacttttacagcttagaaaatgatgttttcgactacctcctctgcgagagatcagagcaaaactatgataaattgattcatgagcatccttgcggccccctgaaaaaactgtttagtgatggaacattctactattctagagatttcgacatctctaatatcgtgaaaaaccatggtttatcacataacttagaatataccgtagataatcaagatttatcatttatttggaatgctaacttagcaagtgaggtaatcaactggagaagcaagatttcaaatgaggagaaacaactttttgccaacgcagggttcttaacatttgtaattcggggttattgcaagacagcattaatagaagacggcccaaatacagcctctataaccattatttccagaatttcgactgagagcaagcaggatacgctagaattggagggtattagtgaagatgggagagtgtcgctatttgttgagacagaaattgtagtaaccacagaaaagtttattttttcttatactcaagtgaacggaagcattcctcttttttgggaatctgtagaaagtcaactgttgtatggaaaaaaaattaaggtaacaaaagattctattgaagctcagggagcttttgacaggcattttgataatttaacctcaaagtatggtgttgtgagtatcgttaatatcataaaacctaaaagcgaatcacaagaaaagttagcactgacgtacaaggattgtgctgaatcaaagggaataaaaataacaaatatagaatacagctcaagcgttctgacaaagtctccccacaaattactttatttattaaaacaggatatttacgagtttggagcgtttgcctatgatatctctaggggcatctactttgcaaaacaaacgggggtattaagaataagcgcatttgattcaattgaaaaacctaacacagttgaaaggttagtgagcaaggaggtacttgaattaaccacaaatgaaattgatgtatttgaattgacttccccattcttggacgcacatgataagctatggtcagaaaactattactggcttgatcgaacgtatactaagcacacgaagaattctggtaaatatacaaaggtttattcgaagttatttggttcccgagttagattatacgacccgctccatatctacatctctcagtatttaaagcaattaaggtcaaaatatacgtttgagaaagacatctcaatttttgcaggtacatttaatataagtggtaaaattccaaaagatgatataaaagattggatatttccaaaatcaatgtccaaggaggatgaaatggctgatctttatgttatcggattagaagaagtggtagaacttaccccaggtcatatgcttgctaccgatccatatgtccgacaattttgggagaagaagatattaacactattaaatgggcccggacgcaaaaaaaaatatatccgtttatggagtacacagttgggtggtattttactattattattcatgaatgaaacggaatattccaaggtaaagcatattgagggggatgttaaaaaaaccgggtttggaggaatggcttctaataaaggagctgtcgcggttagttttaaatactcagctacaagattttgcgtactagtatctcatttagcggcaggcttagaaaatgttgaacaaaggcataatgattataagacgattgcgaaaagcatacgattttctaaaggattacgaataaaggatcacgatgcaattatttggatgggcgatttcaattacagaatattgatgtcaaacgaagatgttagacgaaaaattgtttctaaagaatatgccagcctatttgaaaaggatcaacttaatcaacaaatgatcgcaggtgagtcttttccatatttccatgaaatggcgattgatttcccacctacctataaattcgacccaggaactaaaaactacgacacgagcgaaaaaatgagaataccagcatggactgataggattttaagtaggggagaagtactagaacagttagaatataaatgctgtgaagatatactattttccgatcatcggcccgtatatgccatatttagggctagagtgactgtagtggatgaacaaaaaaagactactttgggtacgcaaatctacgagaagattatggaaaggctagagggattggatgatgatgagaaaattgcagttttgagtgatgatgcatttgttatcgaaagttttgagggcagtgattcgatagctggccctacgcattctccgacaccaattcccgagcccaaaagaggtagaaagttaccaccacctagttcggatttaaaaaaatggtggattggaagtgggaagcaagttaaagtagttcttgacgtagacccggccgtttacatgattaatcctaaaagagatcccaatccattcgttgagaacgaagatgagccactttttatagaaaggtaa

SEQ ID NO: 4405 - protein, 946 aa, Saccharomyces cerevisiae
MRLFIGRRSRSIVISSNNYCLSFQRLRSIPGASSQQRQLSKTPSVTIKSYPDTDLSSDSNYLEVKSCIFNGLLGLVCLNGDIYVAVISGVQNVGFPRWKLIDHQVRPSESIYKVLDVDFYSLENDVFDYLLCERSEQNYDKLIHEHPCGPLKKLFSDGTFYYSRDFDISNIVKNHGLSHNLEYTVDNQDLSFIWNANLASEVINWRSKISNEEKQLFANAGFLTFVIRGYCKTALIEDGPNTASITIISRISTESKQDTLELEGISEDGRVSLFVETEIVVTTEKFIFSYTQVNGSIPLFWESVESQLLYGKKIKVTKDSIEAQGAFDRHFDNLTSKYGVVSIVNIIKPKSESQEKLALTYKDCAESKGIKITNIEYSSSVLTKSPHKLLYLLKQDIYEFGAFAYDISRGIYFAKQTGVLRISAFDSIEKPNTVERLVSKEVLELTTNEIDVFELTSPFLDAHDKLWSENYYWLDRTYTKHTKNSGKYTKVYSKLFGSRVRLYDPLHIYISQYLKQLRSKYTFEKDISIFAGTFNISGKIPKDDIKDWIFPKSMSKEDEMADLYVIGLEEVVELTPGHMLATDPYVRQFWEKKILTLLNGPGRKKKYIRLWSTQLGGILLLLFMNETEYSKVKHIEGDVKKTGFGGMASNKGAVAVSFKYSATRFCVLVSHLAAGLENVEQRHNDYKTIAKSIRFSKGLRIKDHDAIIWMGDFNYRILMSNEDVRRKIVSKEYASLFEKDQLNQQMIAGESFPYFHEMAIDFPPTYKFDPGTKNYDTSEKMRIPAWTDRILSRGEVLEQLEYKCCEDILFSDHRPVYAIFRARVTVVDEQKKTTLGTQIYEKIMERLEGLDDDEKIAVLSDDAFVIESFEGSDSIAGPTHSPTPIPEPKRGRKLPPPSSDLKKWWIGSGKQVKVVLDVDPAVYMINPKRDPNPFVENEDEPLFIER

SEQ ID NO: 4406 - DNA, 3927 bp, Danio rerio
  CDS (1)..(3927)
atggcattcagtaaaggttatcgtatttatcacaagctggatccacctccatacagtgtgattgtggagaccagaaatcgagaagaatgtctgatgttcgagtctggagctgttgctgtactgtcggcggcagagaaagagacaataaaagcatcctacaccaagatgctggatgcctatgggatcctgggagttctgcgtctgaaccttggtgattctatgctgcacagtctggtggtcgtaacaggctgcagctcagtgggaaaagtccaggattcagaagtttttcgggtaacaggcacagactttgtctctctgaagaatgaccccacggatgaggaccggatcgctgatgtcaggaaagtcttaaactctgggaacttctatttcgcctggtcctcaactggagtgagtctggatctcagcttgaatgcccatcgcagaatcagagaagacacatccgacaatcgctttttctggaatcagtcccttcatctccatctcaagcattatggggtgaactgtgacgactggcttctgagattgatgtgtggtggcgtggagatccgcaccatctatgctgggcacaaacaggccaaagcttgtgtgatttctcggctcagttcggagagagcaggcacacgtttcaatgtccgaggcacgaatgatgatggccaggtggccaattttgtggagactgagcagattattttccttgatgacaaagtatcctccttcattcagatccgagggtcaataccgctattctgggagcagccaggaattcaggttggatcccaccgcgttaagctgtcccgtggttttgaagccaacgcgccggcttttgaaagacatttcagtgctctgaaaaggctgtatggcaaacagttgatcatcaatcttctgggaatgaaggagggtgaacacatgctcagcaaagcattccagagtcacctcaaagcttcagagcattccaacgctgtgaaaatgttgaactttgactatcatcagatggttaaaggagggaagactgagaagcttcagactgtgctgaaacctcagatcagcaagtttgtggaggattgtgatttcttctactactcaggggaaaccggcattcagagatgtcaaagcggaaccatccgttccaactgtctggactgcttggaccgaacaaacagcgtccaggcctttattgcacttgagatgcttcccaaacagctggaagccatgggtttgacagagaaacctcagctggtggctcgttttcaggaggttttccgctccatgtggtccaccaatggagactccatcagcaagatctacgcaggcactggtgctttagatggcaaggctaagggcggaaagctaaaagatggagctcgctcggtcaccagaaccatccagaacaacttctttgacagctctaaacaggaagccattgatatcctgagactgggcagcacccttaacagtgacctggcagataaagcacgagcgcttctcacgacaagcagcctatatgtctctgagccaattttacagtcagcctctccaagggtgcttctaggcatgtgtcagaaccacttcaaatacactcggcccaagaagatccgagtatgtgtgggaacgtggaacgtaaatggaggcaaacagtttcgcagcattgcgtttcgtaaccatacgctcaacgactggcttctggatgctcctaaaaaagccagacacccagaatttcaggatgtcaaaaacaaccctgtggacatctttgctattggttttgaggaaatggtggagctgaatgctggtaatatagtcagcgcaagcaccacaaaccaaaagctgtgggccgcagaactgcagaagaacatctcccgagatcaacgatatgtcctgctggcctcagaacagctggtcggtgtgtgtcttttcgtcttcattcgccctcagcacgcaccctttatcagggatgttgctgtagacacagtgaagactggaatgggcggagccactggtaataagggaggcgtggctattcgtatgctcttccacactaccagcatctgcttcgtgtgttcgcactttgctgccggtcaatcacaagtcaaagagaggaacgacgactataatgagattgcacgcaaactgtccttccccatgggtcgtcttctgtactctcatgattatgtattctggtgtggagacttcaactaccgaatcaatattcccaatgaagaggtgaaggagctgatcagacagcagaactgggatgcacttattggtggagatcaactggtggagcagaagaatgcaggccaggtcttcagaggctttattgaaggaaagctggattttgcgcccacttataaatacgaccttttttctgaggattacgacactagtgagaagtgccgcacaccggcctggaccgaccgtgtgctgtggaaaagaagaaagtggaactttgataaaactgcggaggagttggagttgaatgtagtaggagctccagtgaatgaggaagaacagtatccatggagccctggagacctcaaatattacggcagagctgagctgaaaacatctgatcacagacctgtggtggccatcatagatgtggacatacttgaggtggatcccgaggctcgtcatcaggtgtataaggaagtgatcgccctgcagggtcctcccgatggcaccatcctagtctctctctgctcttctggtcccgatgactactttgatgatgctttaattgacgatcttttggacaagtttgctaattttggcgaggttattcttatcaggtttgttgaagagaaaatgtgggtgacatttttggagggatactcagctctggccgctctgtctttgagtgggtctactgtgaatggaaagaccatagacatccgcctgaggagtcctggatggataaagagtcttgaggaggaaatgagtgtggagagaatctgtggtagtatcccaacatccaccagctccaccctgctggcagaaaactctgacctgggagaagagtatgacatggaaggtgatgtggacgaggaggttgaggatattttaccccagcacctgcagcctggagcaggcatggatctgagtgcgtctcctgccacatctccacgcaccagcccatgcccttcacccactcacggagagccagcaccacccatccgacccagcagagcgccaccacgcacagccggaccaccacagggttctccagttgatggtcagccagcaggagctccattctcacagggactagagccaaaacgtccccctccgccacgccctaatgccccgccagcccgacctgcacctccacagcgcccaccaccaccctcaggtcgaggtcaagccaccggaccagctcctggaggcatcccaaggccgatcccaccccgagcaggagtcatcagcgtcacgcctcaggccagacctcctcctcctgctcatcccggggcccccagacccacagcagaggtgcatcctggagcccctcgaccctcaccagataatcatcccggagctccaagacccactgctgaaccccaaagcaaaccgtctgagctgcctctgggtccacccccgacactgccaggtcccgtaaggcctcagatgacatcacccatgcagcctcagtctgtgtcgcccgttcagcctccagtccaaccccaactgcctccacccatacaatcccagctccctccaccaatgcagcccaccttacctgctcctctgatgcctcagcaggcccctcagacatcagccggagccggagccgctgccgcccctcagcctggactggcatctcccaaacctccaccccgcagccgttcctctcatgcactgccacctgaatctgctccagctccaacaacacagcaggagcaatcctcaggttaa

SEQ ID NO: 4407 - protein, 1308 aa, Danio rerio
MAFSKGYRIYHKLDPPPYSVIVETRNREECLMFESGAVAVLSAAEKETIKASYTKMLDAYGILGVLRLNLGDSMLHSLVVVTGCSSVGKVQDSEVFRVTGTDFVSLKNDPTDEDRIADVRKVLNSGNFYFAWSSTGVSLDLSLNAHRRIREDTSDNRFFWNQSLHLHLKHYGVNCDDWLLRLMCGGVEIRTIYAGHKQAKACVISRLSSERAGTRFNVRGTNDDGQVANFVETEQIIFLDDKVSSFIQIRGSIPLFWEQPGIQVGSHRVKLSRGFEANAPAFERHFSALKRLYGKQLIINLLGMKEGEHMLSKAFQSHLKASEHSNAVKMLNFDYHQMVKGGKTEKLQTVLKPQISKFVEDCDFFYYSGETGIQRCQSGTIRSNCLDCLDRTNSVQAFIALEMLPKQLEAMGLTEKPQLVARFQEVFRSMWSTNGDSISKIYAGTGALDGKAKGGKLKDGARSVTRTIQNNFFDSSKQEAIDILRLGSTLNSDLADKARALLTTSSLYVSEPILQSASPRVLLGMCQNHFKYTRPKKIRVCVGTWNVNGGKQFRSIAFRNHTLNDWLLDAPKKARHPEFQDVKNNPVDIFAIGFEEMVELNAGNIVSASTTNQKLWAAELQKNISRDQRYVLLASEQLVGVCLFVFIRPQHAPFIRDVAVDTVKTGMGGATGNKGGVAIRMLFHTTSICFVCSHFAAGQSQVKERNDDYNEIARKLSFPMGRLLYSHDYVFWCGDFNYRINIPNEEVKELIRQQNWDALIGGDQLVEQKNAGQVFRGFIEGKLDFAPTYKYDLFSEDYDTSEKCRTPAWTDRVLWKRRKWNFDKTAEELELNVVGAPVNEEEQYPWSPGDLKYYGRAELKTSDHRPVVAIIDVDILEVDPEARHQVYKEVIALQGPPDGTILVSLCSSGPDDYFDDALIDDLLDKFANFGEVILIRFVEEKMWVTFLEGYSALAALSLSGSTVNGKTIDIRLRSPGWIKSLEEEMSVERICGSIPTSTSSTLLAENSDLGEEYDMEGDVDEEVEDILPQHLQPGAGMDLSASPATSPRTSPCPSPTHGEPAPPIRPSRAPPRTAGPPQGSPVDGQPAGAPFSQGLEPKRPPPPRPNAPPARPAPPQRPPPPSGRGQATGPAPGGIPRPIPPRAGVISVTPQARPPPPAHPGAPRPTAEVHPGAPRPSPDNHPGAPRPTAEPQSKPSELPLGPPPTLPGPVRPQMTSPMQPQSVSPVQPPVQPQLPPPIQSQLPPPMQPTLPAPLMPQQAPQTSAGAGAAAAPQPGLASPKPPPRSRSSHALPPESAPAPTTQQEQSSG

SEQ ID NO: 4408 - DNA, 3342 bp, Caenorhabditis elegans
  CDS (1)..(3342)
atgtcagttcgagggattcggatatggcggaggaatgatgcacgatttcaaccatcaatccttgtcgaaaagaatggattagatggatctcttttgtttcagggtggagctattgcaacgttagattcggattcaacagacgttgaacgaagatcatatcaaaagatagttgatgcttatggaatacttggagtacttgctattacaaaagatgaagctgttctagttgctgttactggtgtactttcagttggacaactttatggagctgatattcttaaaattacaaatgtcgaatttatatcgttacgaacgtttggttccgtcgaaaatgttgattccagaattatcgatttacaacgactactttcatctcaaatgttctatttttcatcacttcaatcatatgatctcactcgttcagctcaacatcgtgattcacatgattgtagtgatgcacgattcttctggaatcgaagtcttcatttttcatttcaaagatatggaattgatacggataattggttgttgaaatgcatggctggatcagttctcgttcgtgttgtgtatgtcggtgcaaacacaggacgtgttgctctaatatctcgtctaagttgtgagcgtgtcggcactcgattcaacgtacgaggagccaattatctcggaaatgtggctaatttcgtcgagactgagcaattgttgcttttcgacgaaaaagaatgctcgctgctccaaattcgggggtctattccattattttgggagcagcctggagttaatgtcggatcacataaagtgaaattgagggctttcgagacgagtcttcctgcctatcacagacacttatcccaactccaacaccgttatggagaatttgcaatcgtcaatctattgggtcgaaaagaaggtgaacgagtgctcggtgatgcgttcaaaactcaacacaaatcttcacatttcgctccactagtcgactttatcgattttgattatcatgctcaaatgaagatttccaaagaggcaattgtgcagttgaaaaagaaaatgagcccacatatgacaaagcatggatttttctattcaatgggaaaagaaatagtgaaacgacaaactggagtaattcgaacaaattgtctagattgtctggataggacgaatgccgtacaaacagccatcggacttcaaatgtcacatgatcaagttgcatttctgaatttaaacgcgggaaaagtgaatgtagagcaacgagttgaagagattcttcgtgatttgtggcagaaaaatggagatcagtgtagtacgatctacgcgggaactggagctcttgacggaaagagcaagttgaaagacgcgtcgagatcgcttgcaagaactattcagaataatttgatggatggtgcaaagcaggaatcatttgatttatttttgactggagccgcatatgatccgaggcttttcgatagagcatgtaatatattgccacctagtttgatacaagaatacgctgacgccgtatcgcagcttgtcgagcgaagtcccgaaatcgccgaacctcaatccattaaaatattcgttggaacttggaatgtgaatggaggaaagaatattcataatgtggcattccgtaatgaatcgagtctctcccactggatatttgccaattcaatgacacgtctcgtatctgtagaagatgagcaactagctgatattgtagcaattggagttgaagaacttgttgatttgaatgcaagtaatatggttaaagcaagtaccacaaatcaacgaatgtggtgtgaaagtattcgaaaaactctttctgaaaaagctccatttgtgctcattggctccgagcagctcgtcggtgtttgtctattcctcttcgcaagaccacgtgtctcaccatacctgaaagactttgcagtggcttctgtaaagactggaatgggtggagcaactggaaataagggatccgttgccttccgaatcgtcgtattctccacttctatttgttttatttgttctcactttgcagccgggcaaaacgagattcgagacagaaatgaggattttgcgacgacgttgaaaaagattcgattcccgttgggcagagaaattgactcgcatgacgtcatattttggttgggagatttcaactatcgaattaatttgtcgggggatgaagttaagaatgctgttagaaatggagactatgcgaaattagtcgaaaatgatcaattgacacagcagaaagctcttggacagacatttgttggcttcaacgaaggacagctcacgttcgcaccaacatacaaatacgacacattcagtgatgactatgatacgagtgaaaagtgtcgtgcacccgcatggactgatcgaattctttggaaagatcagagaaagaagggaaaaacgcaacttctcagctatgatagatcagaattaaaaacttctgatcatcgacctgttggagctgttttcaaagtggaaacttttaaagttggcggcagaaaatgtgtggagctcatcgaggatgttgtagaatctatgggtccaccggacggaacaatcattgtcagtattgccggaaaacctcgattcccgccgcaaatgtttccgccgattcatgagaagttgaaggaactcggtgctcaagttcagctgagcaaattcgacgatggcgatctatggattgtactgaatagtggagaaatggcattagccgcattaagtatggatgggctgaagatcggaggaacagatcagattaatgtgaagttgaagtcaccggattgggcttatgctttgaagccacatctttcagattttgatttggaatcgtttgaagtgacggcagaggaagaggcattacttggtggtactgatggtgccgtttttgaatttgcagacgaagacgaggacgcaatcagtgtgtctagtctgacgcttactggttcggctcccgatcgacctcgtccaccatcagcaagaagtgaagcgatcagtgtagccaaacttgaatggccaacagaacaaccaaacgtcctctccacatcaatgccaacacgagcttcatcagcttctcttgccaatagttcttggtatgagcatgtaccaccacttgctccacctcaatcaaacaataataaaagccctccacaagcttgtctattcaatccattcactcaatctgcaccatccccggctccaccaccatccacgattcctcttccaccgactcgtggagcatcagttggaccaggtcctccagcggttcccgtcaggaaggcacccccaccgccacctcggcctgtcattccacctagaccaaaaaatatgtag

SEQ ID NO: 4409 - protein, 1113 aa, Caenorhabditis elegans
MSVRGIRIWRRNDARFQPSILVEKNGLDGSLLFQGGAIATLDSDSTDVERRSYQKIVDAYGILGVLAITKDEAVLVAVTGVLSVGQLYGADILKITNVEFISLRTFGSVENVDSRIIDLQRLLSSQMFYFSSLQSYDLTRSAQHRDSHDCSDARFFWNRSLHFSFQRYGIDTDNWLLKCMAGSVLVRVVYVGANTGRVALISRLSCERVGTRFNVRGANYLGNVANFVETEQLLLFDEKECSLLQIRGSIPLFWEQPGVNVGSHKVKLRAFETSLPAYHRHLSQLQHRYGEFAIVNLLGRKEGERVLGDAFKTQHKSSHFAPLVDFIDFDYHAQMKISKEAIVQLKKKMSPHMTKHGFFYSMGKEIVKRQTGVIRTNCLDCLDRTNAVQTAIGLQMSHDQVAFLNLNAGKVNVEQRVEEILRDLWQKNGDQCSTIYAGTGALDGKSKLKDASRSLARTIQNNLMDGAKQESFDLFLTGAAYDPRLFDRACNILPPSLIQEYADAVSQLVERSPEIAEPQSIKIFVGTWNVNGGKNIHNVAFRNESSLSHWIFANSMTRLVSVEDEQLADIVAIGVEELVDLNASNMVKASTTNQRMWCESIRKTLSEKAPFVLIGSEQLVGVCLFLFARPRVSPYLKDFAVASVKTGMGGATGNKGSVAFRIVVFSTSICFICSHFAAGQNEIRDRNEDFATTLKKIRFPLGREIDSHDVIFWLGDFNYRINLSGDEVKNAVRNGDYAKLVENDQLTQQKALGQTFVGFNEGQLTFAPTYKYDTFSDDYDTSEKCRAPAWTDRILWKDQRKKGKTQLLSYDRSELKTSDHRPVGAVFKVETFKVGGRKCVELIEDVVESMGPPDGTIIVSIAGKPRFPPQMFPPIHEKLKELGAQVQLSKFDDGDLWIVLNSGEMALAALSMDGLKIGGTDQINVKLKSPDWAYALKPHLSDFDLESFEVTAEEEALLGGTDGAVFEFADEDEDAISVSSLTLTGSAPDRPRPPSARSEAISVAKLEWPTEQPNVLSTSMPTRASSASLANSSWYEHVPPLAPPQSNNNKSPPQACLFNPFTQSAPSPAPPPSTIPLPPTRGASVGPGPPAVPVRKAPPPPPRPVIPPRPKNM

SEQ ID NO: 4410 - DNA, 3360 bp, Caenorhabditis elegans
  CDS (1)..(3360)
atgtcagttcgagggattcggatatggcggaggaatgatgcacgatttcaaccatcaatccttgtcgaaaagaatggattagatggatctcttttgtttcagggtggagctattgcaacgttagattcggattcaacagacgttgaacgaagatcatatcaaaagatagttgatgcttatggaatacttggagtacttgctattacaaaagatgaagctgttctagttgctgttactggtgtactttcagttggacaactttatggagctgatattcttaaaattacaaatgtcgaatttatatcgttacgaacgtttggttccgtcgaaaatgttgattccagaattatcgatttacaacgactactttcatctcaaatgttctatttttcatcacttcaatcatatgatctcactcgttcagctcaacatcgtgattcacatgattgtagtgatgcacgattcttctggaatcgaagtcttcatttttcatttcaaagatatggaattgatacggataattggttgttgaaatgcatggctggatcagttctcgttcgtgttgtgtatgtcggtgcaaacacaggacgtgttgctctaatatctcgtctaagttgtgagcgtgtcggcactcgattcaacgtacgaggagccaattatctcggaaatgtggctaatttcgtcgagactgagcaattgttgcttttcgacgaaaaagaatgctcgctgctccaaattcgggggtctattccattattttgggagcagcctggagttaatgtcggatcacataaagtgaaattgagggctttcgagacgagtcttcctgcctatcacagacacttatcccaactccaacaccgttatggagaatttgcaatcgtcaatctattgggtcgaaaagaaggtgaacgagtgctcggtgatgcgttcaaaactcaacacaaatcttcacatttcgctccactagtcgactttatcgattttgattatcatgctcaaatgaagatttccaaagaggcaattgtgcagttgaaaaagaaaatgagcccacatatgacaaagcatggatttttctattcaatgggaaaagaaatagtgaaacgacaaactggagtaattcgaacaaattgtctagattgtctggataggacgaatgccgtacaaacagccatcggacttcaaatgtcacatgatcaagttgcatttctgaatttaaacgcgggaaaagtgaatgtagagcaacgagttgaagagattcttcgtgatttgtggcagaaaaatggagatcagtgtagtacgatctacgcgggaactggagctcttgacggaaagagcaagttgaaagacgcgtcgagatcgcttgcaagaactattcagaataatttgatggatggtgcaaagcaggaatcatttgatttatttttgactggagccgcatatgatccgaggcttttcgatagagcatgtaatatattgccacctagtttgatacaagaaagctattactatcatgaatacgctgacgccgtatcgcagcttgtcgagcgaagtcccgaaatcgccgaacctcaatccattaaaatattcgttggaacttggaatgtgaatggaggaaagaatattcataatgtggcattccgtaatgaatcgagtctctcccactggatatttgccaattcaatgacacgtctcgtatctgtagaagatgagcaactagctgatattgtagcaattggagttgaagaacttgttgatttgaatgcaagtaatatggttaaagcaagtaccacaaatcaacgaatgtggtgtgaaagtattcgaaaaactctttctgaaaaagctccatttgtgctcattggctccgagcagctcgtcggtgtttgtctattcctcttcgcaagaccacgtgtctcaccatacctgaaagactttgcagtggcttctgtaaagactggaatgggtggagcaactggaaataagggatccgttgccttccgaatcgtcgtattctccacttctatttgttttatttgttctcactttgcagccgggcaaaacgagattcgagacagaaatgaggattttgcgacgacgttgaaaaagattcgattcccgttgggcagagaaattgactcgcatgacgtcatattttggttgggagatttcaactatcgaattaatttgtcgggggatgaagttaagaatgctgttagaaatggagactatgcgaaattagtcgaaaatgatcaattgacacagcagaaagctcttggacagacatttgttggcttcaacgaaggacagctcacgttcgcaccaacatacaaatacgacacattcagtgatgactatgatacgagtgaaaagtgtcgtgcacccgcatggactgatcgaattctttggaaagatcagagaaagaagggaaaaacgcaacttctcagctatgatagatcagaattaaaaacttctgatcatcgacctgttggagctgttttcaaagtggaaacttttaaagttggcggcagaaaatgtgtggagctcatcgaggatgttgtagaatctatgggtccaccggacggaacaatcattgtcagtattgccggaaaacctcgattcccgccgcaaatgtttccgccgattcatgagaagttgaaggaactcggtgctcaagttcagctgagcaaattcgacgatggcgatctatggattgtactgaatagtggagaaatggcattagccgcattaagtatggatgggctgaagatcggaggaacagatcagattaatgtgaagttgaagtcaccggattgggcttatgctttgaagccacatctttcagattttgatttggaatcgtttgaagtgacggcagaggaagaggcattacttggtggtactgatggtgccgtttttgaatttgcagacgaagacgaggacgcaatcagtgtgtctagtctgacgcttactggttcggctcccgatcgacctcgtccaccatcagcaagaagtgaagcgatcagtgtagccaaacttgaatggccaacagaacaaccaaacgtcctctccacatcaatgccaacacgagcttcatcagcttctcttgccaatagttcttggtatgagcatgtaccaccacttgctccacctcaatcaaacaataataaaagccctccacaagcttgtctattcaatccattcactcaatctgcaccatccccggctccaccaccatccacgattcctcttccaccgactcgtggagcatcagttggaccaggtcctccagcggttcccgtcaggaaggcacccccaccgccacctcggcctgtcattccacctagaccaaaaaatatgtag

SEQ ID NO: 4411 - protein, 1119 aa, Caenorhabditis elegans
MSVRGIRIWRRNDARFQPSILVEKNGLDGSLLFQGGAIATLDSDSTDVERRSYQKIVDAYGILGVLAITKDEAVLVAVTGVLSVGQLYGADILKITNVEFISLRTFGSVENVDSRIIDLQRLLSSQMFYFSSLQSYDLTRSAQHRDSHDCSDARFFWNRSLHFSFQRYGIDTDNWLLKCMAGSVLVRVVYVGANTGRVALISRLSCERVGTRFNVRGANYLGNVANFVETEQLLLFDEKECSLLQIRGSIPLFWEQPGVNVGSHKVKLRAFETSLPAYHRHLSQLQHRYGEFAIVNLLGRKEGERVLGDAFKTQHKSSHFAPLVDFIDFDYHAQMKISKEAIVQLKKKMSPHMTKHGFFYSMGKEIVKRQTGVIRTNCLDCLDRTNAVQTAIGLQMSHDQVAFLNLNAGKVNVEQRVEEILRDLWQKNGDQCSTIYAGTGALDGKSKLKDASRSLARTIQNNLMDGAKQESFDLFLTGAAYDPRLFDRACNILPPSLIQESYYYHEYADAVSQLVERSPEIAEPQSIKIFVGTWNVNGGKNIHNVAFRNESSLSHWIFANSMTRLVSVEDEQLADIVAIGVEELVDLNASNMVKASTTNQRMWCESIRKTLSEKAPFVLIGSEQLVGVCLFLFARPRVSPYLKDFAVASVKTGMGGATGNKGSVAFRIVVFSTSICFICSHFAAGQNEIRDRNEDFATTLKKIRFPLGREIDSHDVIFWLGDFNYRINLSGDEVKNAVRNGDYAKLVENDQLTQQKALGQTFVGFNEGQLTFAPTYKYDTFSDDYDTSEKCRAPAWTDRILWKDQRKKGKTQLLSYDRSELKTSDHRPVGAVFKVETFKVGGRKCVELIEDVVESMGPPDGTIIVSIAGKPRFPPQMFPPIHEKLKELGAQVQLSKFDDGDLWIVLNSGEMALAALSMDGLKIGGTDQINVKLKSPDWAYALKPHLSDFDLESFEVTAEEEALLGGTDGAVFEFADEDEDAISVSSLTLTGSAPDRPRPPSARSEAISVAKLEWPTEQPNVLSTSMPTRASSASLANSSWYEHVPPLAPPQSNNNKSPPQACLFNPFTQSAPSPAPPPSTIPLPPTRGASVGPGPPAVPVRKAPPPPPRPVIPPRPKNM

SEQ ID NO: 4412 - DNA, 3324 bp, Saccharomyces cerevisiae
  CDS (1)..(3324)
atgattatctttgtttcagaagaacctgaaaggaggctagccattgtatccaacttgtatgctcttgttcttaaaccggttgggaaaaagccatctgataaacccctttgtgccattgaacttcttcaaaaaaatgatttgaaaaaatatggcttcaaaagacttacatcacacgaaatttttggtgttatcggactcattgaggttaatggcctgctgtttgttggtgccatcactgggaaatcaaaagttgcacagccatgcccaggagagactgtgaacaaaatttttgctgtcgattttttttgtttaaatgacaacagttgggattttattgaaatcgactcctcaggttatcctgtgttgccggagactgcttcaactgaatatcaagacgccttgccaaaacatccatgctatgaattgaagaaactattatccaatggatctttttattatagttcagattttgatttgacctcaaccttacagcatcgtggatatggtcagcattctttgagtacagatacctacgaagaagaatatatgtggaactcttttctcatgcaagaaatgatcacatacagagatcatttggacacaaatttgaaacaaatcttggatgacgaggggtttttaacaacagttatccgtggatttgcggaaactttcgtctcgtacgttaagaagttgaaagttgctcttactatcatctcgaaacagagctggaaaagagcaggaacaagatttaatgcacgtggtgtggatgatgaggcaaacgttgccaatttcgtagaaacggaattcattatgtattctagccaatactgttatgcttttacacagattagaggcagtatacctgtattctgggagcaaggtacctctttaatcaatccaagagtacaaattacaagatcatttgaagccacccaaccggtatttgacaaacatatcatgaaatcagtggaaaagtacggacctgtgcatgtcgttaatttgttatcaacgaaatcttctgaaattgaactttcaaaacgatacaaggagcatttaactcattcaaaaaaattgaacttcaacaaagatatatttttgacagaattcgattttcataaagaaacttcgcaagaaggcttttccggtgtcagaaaactcattccattaatattggactctcttttatcttctggctattattcttacgatgttagagaaaaaaagaacatatctgaacaacatggcatatttaggaccaactgtttagattgtttggatagaacaaatttagctcagcaaattatttctttggctgcttttagaacttttctcgaagatttccgattgattagttcaaattcgttcatcgacgatgatgatttcgtttctaaacataacaccctgtgggctgatcacggtgatcaaatttcccaaatatatactggtactaatgctttgaagtcctcattttcaagaaaaggtaaaatgtcacttgctggggcattatcagacgccacaaaatcggtcagcagaatatatattaacaatttcatggataaagaaaagcaacaaaatatcgatactttgttgggaaggttaccgtatcagaaagcagtgcaactttatgatcccgtaaacgaatacgtaagtacgaaattacaaagcatgtctgataagttcacatcaacctccaacattaacttgttaataggatcattcaatgttaatggcgcaaccaaaaaagttgatttatcaaagtggttatttccaatcggtgaaaaatttaaacccgatattgttgttttaggtcttcaagaagttatagaactatctgcgggttcgattttgaacgctgattactcgaaaagctctttctgggaaaacttagtgggtgattgcttaaaccagtatgatgataaatatctgttgttaagagtagagcaaatgacttctttactaattttattttttgttaaagcagacaaagctaaatacgtcaaacaagtggagggtgctactaaaaaaactggctttaggggtatggctgggaataaaggtgcagtgtctataagatttgagtacggtgccacttcattttgttttgtcaattctcatctcgcagcaggagctacgaatgtcgaagaacgtcgaagtgattacgagagcatagttagaggtattactttcactagaactaagatgattcctcatcacgattcgattttctggttaggtgacatgaattatagaataaatctaccgaacgaagacgtcagaagagagttgctcaaccaagaagaaggatatatcgataaactgttgcattttgatcaacttaccctaggtattaattctggcagtgtatttgaaggcttcaaagaaccaactctcaagttccgtccaacatacaagtatgatcccgggacaggaacttatgattcttctgaaaaggaaaggacgccgtcatggacagatagaattatttataaaggggaaaacttacttcctttatcttattcagatgctccgataatgattagcgaccatcggccagtttacgcagcatatagagcaaaaataacttttgttgatgataaagagagactatctctcaagaaacgtttattcacagaatacaaacaagagcatcccgaagaaccgggttctctgatatcggatcttctcagccttgatctggataataagagcactgatggattcaaaagctcttctgaaagttctctacttgatattgatccgataatggcacaaccgacagcgtccagcgttgcttcttcgtcacctgtgtcttcagcatcggcttcactacaacctgtcagaactcaaaacagtagccagtcgcgtacccccataaagaaaccggtattgcgccccccacccccacctgctcataaatctgtatcagcacctgctccttcaacatcgaaggaaaaatcaccaacaccacagacctcaactgcatcgttgtcatctgtgactaaaaatatacaggaaaataaaccattggcgcaaaatagacgaattccaccaccaggttttagtcaaaatatattaactccaaaaagtaccagtaacttggcttcgcctatgtcttctaaggttgatttatataatagcgcgagtgaatctacacgttcagcccaagatgcaagacaacagacacctacagcatttgcagcatcaagagacgtcaatgggcagcccgaagctttgctaggtgatgaaaatccaattgagccagaggaaaaggccaaactaaaccatatgactttagactcatggcagccattgaccccaaaatga

SEQ ID NO: 4413 - protein, 1107 aa, Saccharomyces cerevisiae
MIIFVSEEPERRLAIVSNLYALVLKPVGKKPSDKPLCAIELLQKNDLKKYGFKRLTSHEIFGVIGLIEVNGLLFVGAITGKSKVAQPCPGETVNKIFAVDFFCLNDNSWDFIEIDSSGYPVLPETASTEYQDALPKHPCYELKKLLSNGSFYYSSDFDLTSTLQHRGYGQHSLSTDTYEEEYMWNSFLMQEMITYRDHLDTNLKQILDDEGFLTTVIRGFAETFVSYVKKLKVALTIISKQSWKRAGTRFNARGVDDEANVANFVETEFIMYSSQYCYAFTQIRGSIPVFWEQGTSLINPRVQITRSFEATQPVFDKHIMKSVEKYGPVHVVNLLSTKSSEIELSKRYKEHLTHSKKLNFNKDIFLTEFDFHKETSQEGFSGVRKLIPLILDSLLSSGYYSYDVREKKNISEQHGIFRTNCLDCLDRTNLAQQIISLAAFRTFLEDFRLISSNSFIDDDDFVSKHNTLWADHGDQISQIYTGTNALKSSFSRKGKMSLAGALSDATKSVSRIYINNFMDKEKQQNIDTLLGRLPYQKAVQLYDPVNEYVSTKLQSMSDKFTSTSNINLLIGSFNVNGATKKVDLSKWLFPIGEKFKPDIVVLGLQEVIELSAGSILNADYSKSSFWENLVGDCLNQYDDKYLLLRVEQMTSLLILFFVKADKAKYVKQVEGATKKTGFRGMAGNKGAVSIRFEYGATSFCFVNSHLAAGATNVEERRSDYESIVRGITFTRTKMIPHHDSIFWLGDMNYRINLPNEDVRRELLNQEEGYIDKLLHFDQLTLGINSGSVFEGFKEPTLKFRPTYKYDPGTGTYDSSEKERTPSWTDRIIYKGENLLPLSYSDAPIMISDHRPVYAAYRAKITFVDDKERLSLKKRLFTEYKQEHPEEPGSLISDLLSLDLDNKSTDGFKSSSESSLLDIDPIMAQPTASSVASSSPVSSASASLQPVRTQNSSQSRTPIKKPVLRPPPPPAHKSVSAPAPSTSKEKSPTPQTSTASLSSVTKNIQENKPLAQNRRIPPPGFSQNILTPKSTSNLASPMSSKVDLYNSASESTRSAQDARQQTPTAFAASRDVNGQPEALLGDENPIEPEEKAKLNHMTLDSWQPLTPK

SEQ ID NO: 4414 - DNA, 3651 bp, Mus musculus
  CDS (1)..(3651)
atgtcagtgggcagaattccagatgcagagatctacaaaatcactgccactgagttgtaccccctgcaggaagaggccaaggaagaggaccgcctgcccaccttaaagaaaatcctgagctcaggggtgttctatttcgcatggcccaatgatggcgcctgcttcgatctgaccatcagggctcagaaacagggtgatgacggctctgaatgggggacctctttcttctggaaccagctattgcatgtgcctctgcggcagcaccaggtgaactgtcataactggttgctgaaagtcatctgtggggtggtgaccatccgcacagtatatgcctcccacaagcaggccaaggcctgtctcatctctcgcatcagctgtgaacgcgcaggtgctcgcttcctcacccgtggtgtgaacgatgatggccacgtgtccaactttgtggagacagagcagacgatttacatggatgatggagtatcgtcctttgtccagatccgaggctccgttccgctgttctgggagcaaccaagacttcaggttggctcccatcatctgagactgcacagaggcctaggggccaacgctcctgcttttgaaaggcacatggtgcttctgaaggagcaatacggtaagcaggtggttgtgaacctgccgggtagcagaggcggtgaagaggtgctcaacagagccttcaagaagttgctctgggcttcttgccacgcgggtgacacacctatgataaattttgacttccatcagtttgccaaaggtaggaagctagagaaattggagaacctgttgagacctcagttacagctacactgggaagacttcggcgtgtttgcgaagggcgagaatgtaagtccacggtttcagaaaggcactctgcggatgaactgtctcgactgtctggatagaaccaacactgtgcagtgcttcattgctcttgaggtccttcatctgcagcttgagagcttggggctaaattcaaagcccatcattgaccgttttgtggagtccttcaaagccatgtggtctctgaatgggcacagcctgagcaaggtgttcacagggagcagggccctggaaggaaaggccaaggtgggaaagctgaaggatggggcccgatccatgtctcgcaccatccagtccaacttcttcgacggggtgaagcaggaggccatcaagctactgctagtcggagatgtctacaatgaagagtctacagacaaaggacggatgctgctggacaacacggcccttctggcgacccccaggatcttgaaggccatgacagaacgccagtcggaattcacgaatttcaagcgcatccagattgctgtggggacctggaatgtgaacggaggaaagcaattccgtagcaatctcctggggacggctgagctcacggactggctcctagatgctcctcagctgtcaggagcagtggactcccaggatgatggcagtcctgctgacgtatttgccatcgggtttgaggagatggtggaactgagtgcgggaaatattgtcaatgccagcaccaccaacaggaagatgtggggcgagcagcttcagaaagccatctcccgctcccatcggtacatcctcttgacctccgcacagctggtgggcgtctgtctttacatctttgtacgtccgtaccacgtcccgttcatcagagacgtggccatcgacaccgtgaagaccggcatggggggaaaggcggggaataagggtgctgtgggcatccgcttccagctccacagcaccagtttctgcttcgtctgtagccacctgacggctgggcagtctcaggtgaaggagaggaatgaagactaccgggagatcacgcacaaactctccttcccttcggggagaaacatattttcacatgattacgtgttttggtgtggcgatttcaactaccgtattgatcttacttacgaagaagtcttctattttgttaaacgccaagactggaagaaacttatggaatttgatcagttacagttacagaaatcaagtggaaaaatttttaaagactttcatgaaggagccgttaacttcggacccacctacaagtatgacgttggatcagctgcctacgacacaagtgacaagtgccgtaccccagcctggacagacagggtgctgtggtggaggaagaagcatccatatgataagacagctggtgaactcaaccttctagacagcgatctagacggcgatccccaaatcagacacacctggtctccaggcactctgaaatactacggccgtgcagagctgcaggcgtctgatcacagacctgtgctggccattgtggaggtggaggttcaagaggtggatgtaggagcccgggagagggtcttccaggaagtgtcctctgtccaaggcccgctggatgccaccgttgttgtaaacctccagtctccaaccctagaagagaaaaatgaatttccagaggacctgcgcacagaacttatgcagactttggggaattatgggacgattattctagtcaggatcaaccaagggcagatgctggtgacgtttgcagacagccactcggctctcagtgtgctggatgtggatggtatgaaggtgaaaggcagggccgtgaagattcgaccaaagaccaaagattggctagaaggcctgagagaggagcttctccggaagcgagacagcatggcccctgtgtctcccaccgccaactcctgcttgttggaggagaactttgacttctcgagtctggactatgagtccgaaggggatgttcttgaagaggatgaagactatttagtggatgggtttggccagcctgtagtctcagacagtgagctcggtggagacaactcttccgacaccatgagctccttgacacccgccagcaagtctcccgccctggctaaaaagaagcaacatccaacatacaaagacgacgctcacctggtgaccttaaagcaggagctggaagttgctgggaattttcgccaccgttctccgagcaggtccctgtccgttcccaataggcctcggccacctcacccaccacagagacccccccctccaactggcttaatggtgaagaagtcagcctcagacgcgtccatctcttctggcactcatggacaatattccatcttgcagacagcgaaacttctcccaggagcaccccagcaaccacccaaggctagaactggaataagtaaaccttacaacgtcaaacagatcaaaaccaccaacgctcaggaggcagaagcagctatccggtgtctcctggaagctagcggaggggtcccggaatcagccccaggtgccatacccctgagaaaccaagggtcttctaagccagaggccaccctggggcccccagccctgccccgccggcctgctccaagggttcccactatgaagaaaccaactttgaggaggacaggaaaggtgtactcgggcatctcccagtgcttgcgtgaagagctgcgctctgctgcctgcaccccacacgcagtgagtgcacaggactgcggagaccttaacaacagatggagaatgccacgtttctcgcactatattcacacaaaaaaatggaagaacgtatctctcagttttcaagatctctggctaaagtttcgcagatga

SEQ ID NO: 4415 - protein, 1216 aa, Mus musculus
MSVGRIPDAEIYKITATELYPLQEEAKEEDRLPTLKKILSSGVFYFAWPNDGACFDLTIRAQKQGDDGSEWGTSFFWNQLLHVPLRQHQVNCHNWLLKVICGVVTIRTVYASHKQAKACLISRISCERAGARFLTRGVNDDGHVSNFVETEQTIYMDDGVSSFVQIRGSVPLFWEQPRLQVGSHHLRLHRGLGANAPAFERHMVLLKEQYGKQVVVNLPGSRGGEEVLNRAFKKLLWASCHAGDTPMINFDFHQFAKGRKLEKLENLLRPQLQLHWEDFGVFAKGENVSPRFQKGTLRMNCLDCLDRTNTVQCFIALEVLHLQLESLGLNSKPIIDRFVESFKAMWSLNGHSLSKVFTGSRALEGKAKVGKLKDGARSMSRTIQSNFFDGVKQEAIKLLLVGDVYNEESTDKGRMLLDNTALLATPRILKAMTERQSEFTNFKRIQIAVGTWNVNGGKQFRSNLLGTAELTDWLLDAPQLSGAVDSQDDGSPADVFAIGFEEMVELSAGNIVNASTTNRKMWGEQLQKAISRSHRYILLTSAQLVGVCLYIFVRPYHVPFIRDVAIDTVKTGMGGKAGNKGAVGIRFQLHSTSFCFVCSHLTAGQSQVKERNEDYREITHKLSFPSGRNIFSHDYVFWCGDFNYRIDLTYEEVFYFVKRQDWKKLMEFDQLQLQKSSGKIFKDFHEGAVNFGPTYKYDVGSAAYDTSDKCRTPAWTDRVLWWRKKHPYDKTAGELNLLDSDLDGDPQIRHTWSPGTLKYYGRAELQASDHRPVLAIVEVEVQEVDVGARERVFQEVSSVQGPLDATVVVNLQSPTLEEKNEFPEDLRTELMQTLGNYGTIILVRINQGQMLVTFADSHSALSVLDVDGMKVKGRAVKIRPKTKDWLEGLREELLRKRDSMAPVSPTANSCLLEENFDFSSLDYESEGDVLEEDEDYLVDGFGQPVVSDSELGGDNSSDTMSSLTPASKSPALAKKKQHPTYKDDAHLVTLKQELEVAGNFRHRSPSRSLSVPNRPRPPHPPQRPPPPTGLMVKKSASDASISSGTHGQYSILQTAKLLPGAPQQPPKARTGISKPYNVKQIKTTNAQEAEAAIRCLLEASGGVPESAPGAIPLRNQGSSKPEATLGPPALPRRPAPRVPTMKKPTLRRTGKVYSGISQCLREELRSAACTPHAVSAQDCGDLNNRWRMPRFSHYIHTKKWKNVSLSFQDLWLKFRR

SEQ ID NO: 4416 - DNA, 2670 bp, Schizosaccharomyces pombe 972h-
  CDS (1)..(2670)
atgcagtgctatctcaaacgaaaagaaagatctgttgcatttattacagagaaatatgcggcaattattcaaaaaccgtctgttaaggattctgattgcataataacattcacttgtatctcacttgaagaattcgaaaagataaaggaatatgaattactttttggaggagagaagatattgggaacccttgggttgtttaattatgtatgtgaggatatgaaagaaggcgttttcctatgcgttgcccggaaagcaaaactagtgcttcgaattggtaatagagacccaatttcgaaacttgaaaatgtctccttcatctctttagatcaggaattatgggatgaagagttgttcgaacccatgcctcgtaatagttcaccaagctctactttttcgacaagcacttctgacttgaataatattgaaaaagataatttggttaatagcgaatattctagtaaatactcttcaactactaggatatatccatatcattccctttctcaattgaccgatttgctcaccgatggttcattttatgtctctacaaatatttcttgcttttcaaggtttcaatccgagcagccttatggtcccaaagatatttattgttggaatagatttctcataacggaattggataaccacttctctgaagcccatattttggagaaattcccgaacctgttgctccattgctttcggggttatgttgagagaatgttcattgatagtatgtctatgagtataatctccaaggtatctagttatggctctcggcaaacataccctccctctggtattgatgattcgtcttattgttctatgtttgtggagacagaatttattgtcgagatcgcacaaacggtctttagcttcgtacaagttcgagggacagtcccatgtttctgggaggaacaattctcttcttggtatggaccctctatttcttttttgagatcttcgcaggcaagtcaaagtctatttaattttcactttagtaagctatacaaagcttatggtgatatatatgtaatcgatcttttacaaacaaaaggctttgaagcttcgctatatgaagcttacaagcatcaccttatgcttctaccttttcctgccgttgtcaagaaattccactttacacctgatcctgctcgtcctgacattgatccacgattagagaccgatttggccgacgatttaaaagagatgggctatactcaaaagtctattgaaaatgacatgttggaatctttccaaaaaggagtgtttcggattaatgatttggattgtctgggacgcacaaacgttattcagtatcaaatatctcgattagtattaaaggatatattttttaaccttcaaataggagtaactttcaatattcttgaatacctaagacatctctggtctaataacggtgatgctattgcgaaactaattacaggggttggctccattggttcaagcgctacccgtagaggtcgtaaatctattgcgggatctttaagtgatatatccaaatcttttggccgcatgtatgttggaagatatccagacgtagaatctcaaaatgccattttattgctgttgggatgttttccgaatcaaagtcccgtactcatatctgaatccgtgtcttcttacatccaaggtgtgctaagacaacgtcgttctgaatatagagtcgaaagggattttagcatattttcgtcgacatttaatgcaaatggtaaagtacccagcactgatgaatttaaaaggctgttacttccatttggcgaaagaacttccgcttatgatctttacgttgtagcggttcaagagataattaccttgaacatgagtcatcttgttagttcaagcaatcagaaacttaggatttgggaagagaaaatacttatgattctcaattctcgagattctaataataagtatatgttaattagctctattcaaatggcaggtgttttccttggtgtatttatacggaaggatgatcatcttgttgtttcaaaagttaccaaaacaactcgaaagacaggctttggcgggttttctgccaataagggtgccgttgcaattgaaatgaatgtttgcgactcggatttttgttttgtttcttcacatttcgctcctaaggttaataatatttcggagcgcaacatggagtatacaagtatatctgataaccttgtttttccatctggaatgaaaatttatgatcatacgaacattttatggatgggtgattttaattatcgtatagattctgataacgaagaagttcgaaaacttgttgaactggacgacttagacaagttggcttcatatgatcagttatgcacagaaatgaagaaaggcaccgtgtttcatggtttagttgaaccacagttaacatttcttcctacttacaaatttgataatggaaccaatgattatgacacttcagataaacagagagtgccttcatggacagatcgaatcttggccacaaaaagttttactaggaattgctataaatcttgtgacattagatgttccgatcatcgtcctgtattcgctactttcagccttaaaatattcagtacttgtatggacaagaaagccggaatcataagagacgcaaggattgcttatattaaaagcaaaaatagtaataaatag

SEQ ID NO: 4417 - protein, 889 aa, Schizosaccharomyces pombe 972h-
MQCYLKRKERSVAFITEKYAAIIQKPSVKDSDCIITFTCISLEEFEKIKEYELLFGGEKILGTLGLFNYVCEDMKEGVFLCVARKAKLVLRIGNRDPISKLENVSFISLDQELWDEELFEPMPRNSSPSSTFSTSTSDLNNIEKDNLVNSEYSSKYSSTTRIYPYHSLSQLTDLLTDGSFYVSTNISCFSRFQSEQPYGPKDIYCWNRFLITELDNHFSEAHILEKFPNLLLHCFRGYVERMFIDSMSMSIISKVSSYGSRQTYPPSGIDDSSYCSMFVETEFIVEIAQTVFSFVQVRGTVPCFWEEQFSSWYGPSISFLRSSQASQSLFNFHFSKLYKAYGDIYVIDLLQTKGFEASLYEAYKHHLMLLPFPAVVKKFHFTPDPARPDIDPRLETDLADDLKEMGYTQKSIENDMLESFQKGVFRINDLDCLGRTNVIQYQISRLVLKDIFFNLQIGVTFNILEYLRHLWSNNGDAIAKLITGVGSIGSSATRRGRKSIAGSLSDISKSFGRMYVGRYPDVESQNAILLLLGCFPNQSPVLISESVSSYIQGVLRQRRSEYRVERDFSIFSSTFNANGKVPSTDEFKRLLLPFGERTSAYDLYVVAVQEIITLNMSHLVSSSNQKLRIWEEKILMILNSRDSNNKYMLISSIQMAGVFLGVFIRKDDHLVVSKVTKTTRKTGFGGFSANKGAVAIEMNVCDSDFCFVSSHFAPKVNNISERNMEYTSISDNLVFPSGMKIYDHTNILWMGDFNYRIDSDNEEVRKLVELDDLDKLASYDQLCTEMKKGTVFHGLVEPQLTFLPTYKFDNGTNDYDTSDKQRVPSWTDRILATKSFTRNCYKSCDIRCSDHRPVFATFSLKIFSTCMDKKAGIIRDARIAYIKSKNSNK

SEQ ID NO: 4418 - DNA, 3657 bp, Drosophila melanogaster
  CDS (1)..(3657)
atggccatgtccaaggtgatccgtgtgctggagaagtccattgccccctcgccgcacagcgtattactggagcatcggaacaagagcgacagcatcctgttcgagtcccatgcggtggccctgctgacccagcaggagacggatgtcatccggaagcagtacaccaaggtctgcgacgcctacggatgtctgggtgccctccaactaaacgccggcgagagcaccgtgctgttcctggtgctggtcaccggctgtgtgtccatgggcaagatcggcgacatcgagatcttccggatcacacaaaccacttttgtctcgctacaaaatgcagcgcccaacgaagacaagatcagcgaggtgcgcaagctgctcaactcgggcaccttctactttgcccacaccaatgccagtgcatcggcatccggagcgtcatcgtatcggttcgatattacgctttgcgcccagcgacgccagcaaacgcaggagacggacaaccgtttcttctggaatcgcatgatgcacatccacctgatgcgcttcggtatcgattgccagtcctggttgttgcaagccatgtgcggctccgtagaagtgcgcaccgtctacatcggtgccaaacaggcccgtgccgccatcatttcccgactgagctgcgaacgggctggcacgcgtttcaatgtccgtggtaccaacgatgagggctatgtggctaactttgtggaaaccgagcaagtgatctacgtggacggcgatgttactagttatgtgcagacgcgaggatcggtgccactcttctgggaacagccaggcgtccaggttggctcgcacaaggtgaagctatcacgaggattcgagacatcggccgccgcctttgatcgacacatgagcatgatgaggcaacgttacggctatcagacggtggtgaatctgctaggcagctcccttgttggcagcaaggagggcgaggccatgctgagtaatgagttccagcgtcatcacggcatgtcagcccacaaggatgtgccgcatgtggtgtttgactatcatcaggagtgtcgcggcggcaatttctcggcgctggccaagctcaaggaacggatcgtagcctgcggtgctaactacggcgtcttccacgcgtccaatggtcaggtgttgcgcgagcagttcggtgttgtgcgcacgaattgcctagactgtttggacaggacaaactgtgtgcagacgtatctcgggcttgacacgctcggtatccagctagaggctttgaaaatgggcggcaagcagcagaatatttcgcggtttgaggagatcttccgacagatgtggatcaacaacggaaatgaggtcagcaagatctacgccggcaccggggccatccaggggggatcaaaactaatggatggtgcgcgatctgcagcaagaacaattcaaaataacctactggacaactcaaagcaggaagccattgatgtcctgctagtgggctccacgcttagctcggagcttgcggatcgggctcgcatcctactgccctccaatatgttgcatgcacctaccactgtgttgagagagctatgcaagcgctacactgaatatgtgcgtcctcgaatggcacgtgtagccgtgggtacctataacgtcaacggcggcaagcacttccgcagcattgtgttcaaggattcgctggccgattggctgctcgactgccatgcccttgcccgctccaaggcgcttgtagatgtgaacaatccgtcggagaacgtcgatcatccggtggatatctacgccattggattcgaggagattgtggatctgaatgcttccaacataatggcggccagcaccgacaatgccaagttgtgggccgaggagctgcagaaaacgatctcgcgggacaatgactacgtgctgctcacataccagcaactggtgggcgtgtgcctatacatctacatccgaccggagcacgcgccgcacatccgggacgtggccatcgactgtgttaagacaggattgggtggtgccactgggaataagggtgcctgtgccattcgatttgtgcttcatggtacttccatgtgcttcgtgtgtgcccactttgcagccggacagtcacaggtggctgaaaggaacgctgactacgcggaaatcacccggaagctggccttcccgatgggcaggacgctaaaatcacacgactgggtgttttggtgcggcgacttcaactatcgcatcgacatggagaaggacgaattaaaggagtgcgtacgtaatggagatctctcaaccgtcctcgagttcgatcaattgcgcaaggagcaggaggctggcaatgtgtttggcgaattcctcgagggagagatcactttcgacccgacgtacaagtatgatttgttcagcgacgactacgacacctcggagaaacagcgagcgcccgcctggacagatcgggttctctggcgtcgcaggaaggcgctggccgagggcgactttgctgcctcagcctggaatcccggcaaattgattcactacggtcgttcggagctaaagcagagtgatcatagacccgtgatcgctattattgatgctgagataatggagatcgatcagcagcggagacgtgctgtattcgagcaggttatccgagatctgggtccgccggactccacgattgtggtacatgtcctggagtcttcagcaactggagatgaggatggaccaaccatatacgacgagaatgtgatgtcagccctgattaccgagctatccaagatgggagaggtcactttggtgcgctatgtggaggacaccatgtgggtcacatttcgggatggagaatcggctttaaatgcgtcttctaagaagagtatccaagtatgcggattagatcttatcctggagctgaagtcaaaggactggcagcatctggtggacagcgagatagagctatgcaccacgaacaccataccgctgtgcgctaatcctgtagagcatgcacaactcctgcaggccattacgccggagttgccccagcggcccaagcagccgcccacacgtcccccagcccgtcccccaatgcctatgtcgccaaagaactcaccacgccacctgccccacgtcggggtcatcagcattgtgcccaagccggcaaagccaccgatgccaccgcaaccgcaatctcaacctctaattccgtcgccgcttcagccgcaggtggcgccgcctcgtccgccggcaatggacaccacgccatcctccaaatcgcaatcgccaacggaacttgtatccgctagttcttcgacgtcctcttcgggaaagacttcgcccacagctccagctgtgctctccggtccgccgacgccgccgcgccaaatgcagagcaagcaggccacacccgtctcgacgcccacgcgccaagtcggttcgcccaaggatccgattccatctgataccgcctacgaaaccgccagtaatatttacgaggagattcaggaggatgtgcctgcgccacgccatccgccgccggctggaccgccgccagtgataggagcaccaatgggcccgccgccaccgctgccgaatcgcaggggcccaccacccataccaaataggagcggcaatgctccaccgctgcccacgcgacccgccaacaactga

SEQ ID NO: 4419 - protein, 1218 aa, Drosophila melanogaster
MAMSKVIRVLEKSIAPSPHSVLLEHRNKSDSILFESHAVALLTQQETDVIRKQYTKVCDAYGCLGALQLNAGESTVLFLVLVTGCVSMGKIGDIEIFRITQTTFVSLQNAAPNEDKISEVRKLLNSGTFYFAHTNASASASGASSYRFDITLCAQRRQQTQETDNRFFWNRMMHIHLMRFGIDCQSWLLQAMCGSVEVRTVYIGAKQARAAIISRLSCERAGTRFNVRGTNDEGYVANFVETEQVIYVDGDVTSYVQTRGSVPLFWEQPGVQVGSHKVKLSRGFETSAAAFDRHMSMMRQRYGYQTVVNLLGSSLVGSKEGEAMLSNEFQRHHGMSAHKDVPHVVFDYHQECRGGNFSALAKLKERIVACGANYGVFHASNGQVLREQFGVVRTNCLDCLDRTNCVQTYLGLDTLGIQLEALKMGGKQQNISRFEEIFRQMWINNGNEVSKIYAGTGAIQGGSKLMDGARSAARTIQNNLLDNSKQEAIDVLLVGSTLSSELADRARILLPSNMLHAPTTVLRELCKRYTEYVRPRMARVAVGTYNVNGGKHFRSIVFKDSLADWLLDCHALARSKALVDVNNPSENVDHPVDIYAIGFEEIVDLNASNIMAASTDNAKLWAEELQKTISRDNDYVLLTYQQLVGVCLYIYIRPEHAPHIRDVAIDCVKTGLGGATGNKGACAIRFVLHGTSMCFVCAHFAAGQSQVAERNADYAEITRKLAFPMGRTLKSHDWVFWCGDFNYRIDMEKDELKECVRNGDLSTVLEFDQLRKEQEAGNVFGEFLEGEITFDPTYKYDLFSDDYDTSEKQRAPAWTDRVLWRRRKALAEGDFAASAWNPGKLIHYGRSELKQSDHRPVIAIIDAEIMEIDQQRRRAVFEQVIRDLGPPDSTIVVHVLESSATGDEDGPTIYDENVMSALITELSKMGEVTLVRYVEDTMWVTFRDGESALNASSKKSIQVCGLDLILELKSKDWQHLVDSEIELCTTNTIPLCANPVEHAQLLQAITPELPQRPKQPPTRPPARPPMPMSPKNSPRHLPHVGVISIVPKPAKPPMPPQPQSQPLIPSPLQPQVAPPRPPAMDTTPSSKSQSPTELVSASSSTSSSGKTSPTAPAVLSGPPTPPRQMQSKQATPVSTPTRQVGSPKDPIPSDTAYETASNIYEEIQEDVPAPRHPPPAGPPPVIGAPMGPPPPLPNRRGPPPIPNRSGNAPPLPTRPANN

SEQ ID NO: 4420 - DNA, 3639 bp, Bos taurus
  CDS (1)..(3639)
atggcgttcagcaaaggatttcggatctatcacaaattggatcccccacctttcagcctcatagtggaaaccaggcataaggaagaatgtctcatgttcgagtctggggctgtagcggtgctctcatcagcagaaaaagaggcaatcaagggtacatactccaaagttctagatgcctatggacttttaggtgttttacgattaaatcttggtgatattatgttacattatctggtcctagtcactggatgtatgtctgttggaaaaattcaagaatctgaagttttccgagttacttccactgaatttatatcactgcgagttgattcttcggatgaggatcgcatttcggaagtgcgaaaagttttaaattcaggaaacttttattttgcatggtctgcatccggagtcagtttggatctgagtcttaatgcccaccgtagcttgcaagaacacacaactgacaatagattttcctggaatcagtctttgcacttgcatctcaagcactacggtgtgaattgtgccgactggttattacgcctcatgtgtgggggagtagaaatcagaacaatttatgctgctcataaacaggcaaaggcttgcctcatttccagactaagctgtgaacgagctgggaccaggtttaacgtccggggaacaaatgatgatggtcacgttgccaattttgtagaaacagaacaggttgtgtacttagatgactctgtttcttccttcatacaaatccggggatctgtcccattgttctgggagcagccaggattgcaggtgggatctcatcgtgtccgtatgtcaaggggatttgaagccaatgcacctgcttttgacaggcattttaggacacttaagaatttgtatggtaaacaaataatagtaaatctgcttggttctaaggaaggtgaacatatgctaagtaaggctttccagagtcatctgaaagcttctgaacatgctgctgatatccagatggtgaattttgactatcatcaaatggttaaaggaggaaaggcagaaaaattacatagtgttcttaaacctcaagtccagaagtttctggattatggaatttttcattttgatggaagtgaagttcaaaggtgccagagtggtacagttcgaacaaactgcttggattgtcttgacagaacaaatagtgtgcaggcattccttggtttagagatgctgactaaacagttggaagctcttggtttagctgaaaagcctcagttggtgactcgctttcaagaagtttttcgatcaatgtggtctgtgaatggtgattcaatcagtaagatttatgcaggaactggagcccttgaaggaaaggctaagttaaaagatggtgcccgttcagttagtagaacaattcagaataacttctttgacagctccaagcaagaagcaattgatgttttgctcctgggaaatactctaaatagtgatttagctgacaaagctcgagccctcttaactactggaagtttgcgtgtttctgaacagacgttacagtcagcatcttctaaagtactaaagagtatgtgtgagaatttctacaagtattcaaagcccaagaaaattcgagtatgtgtgggcacatggaacgtgaatggcgggaagcagtttcgcagcatagcttttaagaatcagacccttacggactggcttcttgatgcccccaagttagctggcatccaggagtttcaagataaaagaagtaaaccaatggatatatttccaattggttttgaggaaatggtagagctgaacgctggaaacattgtgaatgcaagcacaacaaatcagaagctctgggctgcggaacttcagaagaccatctccagagacaacaagtatgtcctgctggcctctgagcagttggtgggcgtctgtctgtttgtttttatcagaccacagcacgctcccttcatcagggatgttgcagttgatactgtgaaaactggaatgggaggcgcaactggaaataagggagcagttgcaatacgaatgctgttccacaccacaagcctctgctttgtctgcagccacttcgctgcgggacaatcccaagtcaaagaacgaaatgatgattttttagaaatagcgcggaagttgagttttccaatgggaaggctgctcttctcccatgactatgtgttttggtgtggcgatttcaactaccgaatcgatctccctaatgaggaagtgaaagagcttatcagacagcaaaactgggattctcttatcgcaggagatcagcttatcaatcagaaaaatgctggacagatttttagaggatttttagaaggaaaagtgacctttgctccaacgtataaatacgacttgttttctgatgactacgacactagtgaaaagtgccgcacccctgcatggacagaccgtgtcctctggagaagacggaagtggccttttgatagatcagctgaagatttagatctcctaaatgctagttttcaagatgaaagcaaaatcctctacacatggactcctggcactttgctgcactacggaagggctgagctgaagacttctgaccataggcctgttgttgccctgatcgatattgatatatttgaagttgaagctgaagagaggcaaaacatttataaagaagtaattgcagttcagggtccaccagatggtacggtgttggtctcaatcaaaagctctttaccagaaaataattttttcaacgatgctttgattgatgagcttttacagcagtttacaaatttcggtgaagttatactcataagatttgtggaagacaaaatgtgggttacgtttttagagggaagctctgccttgaatgttctgaacctgaatgggaaagagttactgggtaggacaataacaattactttaaaaagtccagactggatcaaaactttggaagaagaaatgagcttagagaaaatcaacgtccccttgccatcatcaaccagctccaccctcctaggtgaagacgcggaggtcacggccgacttcgatatggaaggtgatgtggatgactatagtgctgaggtagaggagatccttcctcagcatctccagccgtcttccagttctgccttggcacgtcccccggttcttcaccccggaccagtccctgccagtcacctaccatatcggagggggcctgtgccttccctcccagtgagaccaagtcgagctccgtccagaacgcccgggccccctgcttcacaaagttctcctgttgacactctgccggcaacacagctgcagcagaaagattcttcccagaccctggaacccaagcggcctccccctccccgcccggttgctcctcctgcacgtccagctcctccacaacgaccacctccgccttcaggggctaggagtcctgcacctgctagggaaagagtttggagcacccgaaaagcccaggaacgaccccggagagataatctaggaggcagccagcttccacctcaaggcggactgccaggcccgggacttgctggacacagtgcagccagaccgattattccgccccgtgctggagtcatcagcgcccccgagagccacggacgggtgtctgctgggagactgactcctgaaagccaaaggaaaacctga

SEQ ID NO: 4421 - protein, 1212 aa, Bos taurus
MAFSKGFRIYHKLDPPPFSLIVETRHKEECLMFESGAVAVLSSAEKEAIKGTYSKVLDAYGLLGVLRLNLGDIMLHYLVLVTGCMSVGKIQESEVFRVTSTEFISLRVDSSDEDRISEVRKVLNSGNFYFAWSASGVSLDLSLNAHRSLQEHTTDNRFSWNQSLHLHLKHYGVNCADWLLRLMCGGVEIRTIYAAHKQAKACLISRLSCERAGTRFNVRGTNDDGHVANFVETEQVVYLDDSVSSFIQIRGSVPLFWEQPGLQVGSHRVRMSRGFEANAPAFDRHFRTLKNLYGKQIIVNLLGSKEGEHMLSKAFQSHLKASEHAADIQMVNFDYHQMVKGGKAEKLHSVLKPQVQKFLDYGIFHFDGSEVQRCQSGTVRTNCLDCLDRTNSVQAFLGLEMLTKQLEALGLAEKPQLVTRFQEVFRSMWSVNGDSISKIYAGTGALEGKAKLKDGARSVSRTIQNNFFDSSKQEAIDVLLLGNTLNSDLADKARALLTTGSLRVSEQTLQSASSKVLKSMCENFYKYSKPKKIRVCVGTWNVNGGKQFRSIAFKNQTLTDWLLDAPKLAGIQEFQDKRSKPMDIFPIGFEEMVELNAGNIVNASTTNQKLWAAELQKTISRDNKYVLLASEQLVGVCLFVFIRPQHAPFIRDVAVDTVKTGMGGATGNKGAVAIRMLFHTTSLCFVCSHFAAGQSQVKERNDDFLEIARKLSFPMGRLLFSHDYVFWCGDFNYRIDLPNEEVKELIRQQNWDSLIAGDQLINQKNAGQIFRGFLEGKVTFAPTYKYDLFSDDYDTSEKCRTPAWTDRVLWRRRKWPFDRSAEDLDLLNASFQDESKILYTWTPGTLLHYGRAELKTSDHRPVVALIDIDIFEVEAEERQNIYKEVIAVQGPPDGTVLVSIKSSLPENNFFNDALIDELLQQFTNFGEVILIRFVEDKMWVTFLEGSSALNVLNLNGKELLGRTITITLKSPDWIKTLEEEMSLEKINVPLPSSTSSTLLGEDAEVTADFDMEGDVDDYSAEVEEILPQHLQPSSSSALARPPVLHPGPVPASHLPYRRGPVPSLPVRPSRAPSRTPGPPASQSSPVDTLPATQLQQKDSSQTLEPKRPPPPRPVAPPARPAPPQRPPPPSGARSPAPARERVWSTRKAQERPRRDNLGGSQLPPQGGLPGPGLAGHSAARPIIPPRAGVISAPESHGRVSAGRLTPESQRKT

SEQ ID NO: 4422 - DNA, 3888 bp, Homo sapiens
  CDS (1)..(3888)
atggcgttcagtaaaggattccggatctatcacaaattggatcccccacctttcagcctcatagtggaaactaggcataaggaagaatgtctcatgttcgagtctggggctgtcgctgtgctctcatctgcagaaaaagaggcaatcaagggtacatactccaaagtactggatgcatatggactcttaggtgttctgcggttaaatcttggtgatactatgttacattatctggtcctagtcactggatgtatgtctgttggaaaaattcaagaatctgaagttttccgagttacttccactgagtttatatcactgcgaatcgattcttcagatgaggatcgcatttcagaagtgcggaaagttttgaattcaggaaacttttattttgcatggtctgcatctggcatcagtttagatttgagtcttaatgcgcatcgtagcatgcaagaacagacaactgataatagatttttctggaatcagtctttgcatttgcatctcaaacactatggcgtgaattgtgatgactggttattacgtcttatgtgtggaggagtagaaatcagaacaatttatgctgctcataaacaggcgaaggcttgcctcatttcaagattaagctgtgaacgagctgggaccaggtttaatgtccggggaacaaatgatgatggtcatgttgccaattttgtagaaacagaacaggttgtgtacttagatgactcagtttcttccttcatacaaatccgaggatctgttccattgttctgggagcaaccagggttgcaagtgggatctcatcgtgtccgtatgtcaaggggatttgaagccaatgcacctgcttttgacaggcattttagaacacttaagaacttatatggtaaacaaataatagtaaatttgcttggatctaaggaaggtgaacatatgctaagtaaagctttccagagtcatttgaaagcttctgaacatgctgctgatatccagatggtgaattttgactatcatcaaatggttaagggaggaaaggcagaaaaattacatagtgttcttaaacctcaagtccagaagtttctagattatggatttttttatttcaatggaagtgaagttcaaagatgccagagtggtacagttcgaacaaactgcttggattgtcttgatagaacaaatagtgtgcaggcatttcttggcttagagatgctagctaaacagttggaagctcttggtttagctgaaaagcctcagttggtgactcgctttcaagaagtttttcggtcaatgtggtccgtgaatggtgattcaatcagtaagatatatgcaggaactggagctcttgaagggaaagcgaagttaaaagatggtgctcgctctgttacccgaacaattcagaataacttctttgacagctccaagcaagaggccattgatgttttgctactgggaaatactctgaatagtgatttagctgacaaagctcgagcacttttaactactggaagtttgcgtgtttctgagcagacattacagtcagcatcttctaaagtactaaagagcatgtgtgagaatttctacaaatattcaaagcctaagaaaattcgagtatgtgtcggaacctggaatgtgaatggtgggaagcaatttcgcagcatagcttttaagaatcagacactcactgactggcttcttgatgcacccaagttagctggcatccaggagtttcaagataaaagaagtaagccaactgatatatttgcaattggttttgaagaaatggtagaattgaatgctggaaacattgtgagtgcaagcacaacaaatcagaagctctgggctgtagaacttcagaagacaatctccagagacaacaagtatgtgctgctggcttctgaacagttggtgggcgtctgtttgtttgtttttatcagaccacagcatgctccttttatcagggatgttgcagttgatactgtgaagactggaatgggaggtgcaactggaaataagggagcagttgcaatccgaatgctcttccatacaaccagcctttgcttcgtctgtagccactttgctgcagggcagtcacaagtcaaagaaagaaatgaagattttatagaaatagcacgaaaattgagttttcctatgggaaggatgctattttcccatgactatgtattttggtgtggtgatttcaactatcgaatcgatctccctaacgaagaagttaaagagctcataagacagcaaaattgggattctcttatagcaggagatcaacttatcaatcagaaaaatgctggacaggtttttagaggatttttagaaggaaaggtaacctttgctccgacatataagtatgacttgttttctgacgactatgacaccagtgaaaagtgccgcacccctgcctggacagaccgtgtcctttggagaaggaggaaatggccttttgatagatcagctgaagatctagatcttctaaatgctagttttcaagatgaaagcaaaattctgtacacgtggactccaggcactttgctgcactatggaagagctgagctgaagacttctgaccacaggcctgtcgttgccctgattgatatagatatatttgaagttgaagctgaagagaggcaaaacatttataaagaagtaattgcagttcagggtccaccagatggtacagtattggtctcaatcaaaagttctttaccagaaaataatttttttgatgatgccttgattgatgagcttctgcagcagtttgcaagttttggtgaagttatacttataagatttgtagaagataaaatgtgggttacatttttggagggaagctctgccttgaatgttctgagcctaaatggtaaagagttattgaatcggactataactattgctttaaaaagtccagactggatcaaaaatttggaagaagaaatgagtttagagaaaattagcattgcattgccatcatcaacaagctctaccctgcttggtgaagatgcagaggttgcagcagattttgatatggaaggtgatgttgatgactatagtgctgaagtggaggaacttcttcctcagcatctccagccatcttcaagttccggccttggtacttcccccagctcttcaccccgaactagtccctgccagtcacctacaatatcagagggtcctgtaccttcccttcccatcagaccaagccgagcaccgtcaagaactcctgggcctcccagtgcacagagttctcctattgacgcgcagccagcaacgccgctgccgcagaaagaccccgcccagcccttggagcccaagcggccgccgccgccccgcccggtcgcccctcccacacgcccggctcccccacagagacctcctccgccttcaggggctaggagtcctgcacccactagaaaggaatttggagcacccaaaagccctggaacaacaaggaaagataatataggacgcagtcagccttcacctcaagcaggacttgcaggcccaggacctgctggatacagtacagccagaccgacgattcctcctcgtgctggagttatcagtgccccacagagccacgcgcgggcatctgctggaagactgactcctgaaagccaaagcaaaacatcagaaacgtcgaaaggttcaactttccttcctgaaccactgaagcctcaggctgcttttcctccgcagtcttctttgcccccgcctgctcaaaggttgcaagagcctcttgtccctgtggcagcacctatgcctcagtctggcccccagccaaatttggaaaccccaccacaaccaccacctcgaagcaggtcatcccatagcttgccttcagaagcttcctcacaaccgcaacaggagcaaccatcagggtaa

SEQ ID NO: 4423 - protein, 1295 aa, Homo sapiens
MAFSKGFRIYHKLDPPPFSLIVETRHKEECLMFESGAVAVLSSAEKEAIKGTYSKVLDAYGLLGVLRLNLGDTMLHYLVLVTGCMSVGKIQESEVFRVTSTEFISLRIDSSDEDRISEVRKVLNSGNFYFAWSASGISLDLSLNAHRSMQEQTTDNRFFWNQSLHLHLKHYGVNCDDWLLRLMCGGVEIRTIYAAHKQAKACLISRLSCERAGTRFNVRGTNDDGHVANFVETEQVVYLDDSVSSFIQIRGSVPLFWEQPGLQVGSHRVRMSRGFEANAPAFDRHFRTLKNLYGKQIIVNLLGSKEGEHMLSKAFQSHLKASEHAADIQMVNFDYHQMVKGGKAEKLHSVLKPQVQKFLDYGFFYFNGSEVQRCQSGTVRTNCLDCLDRTNSVQAFLGLEMLAKQLEALGLAEKPQLVTRFQEVFRSMWSVNGDSISKIYAGTGALEGKAKLKDGARSVTRTIQNNFFDSSKQEAIDVLLLGNTLNSDLADKARALLTTGSLRVSEQTLQSASSKVLKSMCENFYKYSKPKKIRVCVGTWNVNGGKQFRSIAFKNQTLTDWLLDAPKLAGIQEFQDKRSKPTDIFAIGFEEMVELNAGNIVSASTTNQKLWAVELQKTISRDNKYVLLASEQLVGVCLFVFIRPQHAPFIRDVAVDTVKTGMGGATGNKGAVAIRMLFHTTSLCFVCSHFAAGQSQVKERNEDFIEIARKLSFPMGRMLFSHDYVFWCGDFNYRIDLPNEEVKELIRQQNWDSLIAGDQLINQKNAGQVFRGFLEGKVTFAPTYKYDLFSDDYDTSEKCRTPAWTDRVLWRRRKWPFDRSAEDLDLLNASFQDESKILYTWTPGTLLHYGRAELKTSDHRPVVALIDIDIFEVEAEERQNIYKEVIAVQGPPDGTVLVSIKSSLPENNFFDDALIDELLQQFASFGEVILIRFVEDKMWVTFLEGSSALNVLSLNGKELLNRTITIALKSPDWIKNLEEEMSLEKISIALPSSTSSTLLGEDAEVAADFDMEGDVDDYSAEVEELLPQHLQPSSSSGLGTSPSSSPRTSPCQSPTISEGPVPSLPIRPSRAPSRTPGPPSAQSSPIDAQPATPLPQKDPAQPLEPKRPPPPRPVAPPTRPAPPQRPPPPSGARSPAPTRKEFGAPKSPGTTRKDNIGRSQPSPQAGLAGPGPAGYSTARPTIPPRAGVISAPQSHARASAGRLTPESQSKTSETSKGSTFLPEPLKPQAAFPPQSSLPPPAQRLQEPLVPVAAPMPQSGPQPNLETPPQPPPRSRSSHSLPSEASSQPQQEQPSG

SEQ ID NO: 4424 - DNA, 2838 bp, Eremothecium gossypii
  CDS (1)..(2838)
atgaagttgttcgttagaaaagagcccagagctatagcgcttgcctcaaacgattatgtgttggtattcgaaaggtcaaaaaacaacccaaaacagccccaagtgaaaaatgcgccgccaacgatcatggtgaagaccatgtcggaggcatcactagtaaacggtggtggttttgtcgaatggacagcatttttgattaaggggctcctaggggtgatccatgttcgcaaccaagtctttatcggattaattactggggtgaaggacgtagccaaaccacggtggaggattagagatggcaaaatgaaaagcattgaatccatttttcaaattctcagcgtcaatttttactgcttggactcgccgctgtatgatcagtggctctattatgtttcggaaatctgtcaggagaagttactaacggagcatccatgcgcaccacttaaaaaactctttagcgatggtacgttttattattctagagattttgatatcagtaatgtattgcaggaacgaggattaaagcatagaatcgagaataccatcgagaaccaggagaaaaaattcatatggaatttgaatctcatgtcagagatcttgcaactccgaggacgtattacgcctgctgagctacaagcatttgatggaggccagtttctcacttttttaatccgaggtttttgtaagacagttttcgcgaatgagattcatagcccgacctctttgactctaatatctaaaacctccattgaagacctcgacagcattaacgatttccagaaagggattgatgaagagggtaatgttgcgagatttattgaaagcgagcttataattcaaacagagcgttacctatttgcctacgtacagacaagtgctgatattccgctctcctgggaagtcgtagaaggtcaattgttgcatagtaagaagctgaagcttaccaaaagccctgagcgcatacaagcaacattcgatagacactttgatgatatgatttctcgctatggtgtgatcagcatagtaaacctcgttaagcacagaagctcttctcaagaaactttaagtggagcatataaggcatgcgcggaagttaaagagctccattataccgcagtcgattatcctgtcgatgtaattaagaagtcaccatacaaattaatgtactttttgagagatgatatatatgagtttggggcgttcgcatatgatattgctagaggtgtctatgtcggtaagcaaacaggctcttttcgtgttagtgcggtagatgccacttcaaaaatgaatttggttgagatgtgcataagcagagaagttctagacttgactactgacgaactagaagattttgcaataacaacaagtttggtgaagaagcatgaagctctctggtctgacaatgatttttggcttcatcgtatccacacgaaaaatataaaaaatccagccaaatataagaaagtttactcgcaggtctttagtctgtcgtcgaaagtactcttgtatgatccgttgcatgcacatatcgcgaagtgtttaaagaagttaaagaacgagtacacctatgaaaaagagataagcatattcgcggggacctttaatgttaatggtaagcaatgtaaagacgaagctatgggtacgtggctatttcctcctaatggtgaatctgaaggcaattatgccgacatatatgttataggcctagaagaggtagttgaattaactcccggacatatgctatctaccgatccaatgtcgaaacaattctgggagaaaacaatacttcgacacctaaattcccaggaggggaggcactataattgtattggaaccaatcagcttggaggggttttgctgttactctacgtcaatgaatccgaatgttccaagataaagcatttagagtacgacgtaaagaaaaccggttttggcgggatttccgcaaataaaggagctgctgctatccggttcatgtattctgccactaaattttgctttatagtctctcatttagctgcaggcttggaaaacgtcgagcagcggcacagtgactacaaaacgattatgaagagcataggattttcacgaggtaaacgcattaaggatcatgacggtattatatggatgggagatttcaactatagaattctattgtcaaatgaagaggtaagacgagcgatattagaaggagattatgggaaattattcgagaaagaccagttaaatcagcaaatgatcgccggtgagtcgttcccatattttaatgagatggaaataacatttccaccaacctacaagtttgaccctggcaccaaaagttacgatactagcgagaagatgcgtatacccgcttggactgacaggatcttaaacagaggagaaattctaaaagccatctcttacggatgcgccgaagatgtgatattttccgatcatagaccagtgtacgcgacgttcaaggcgcgcacgactgtagtagatgaagagcaaagagggcagctgtcgcgtattattcatgagaggctcacggagatgtttagcggcttaaacgatgaacaaaagtacgcatttttggtcgatagcgaactaattgtcgacaaaatagaaatggagggaaagctgccattagtctcacaggttaaaaagggtaagagacttcctccacctagttctgacttgcggaagtggtggattggcaacgggaagcaggttcgaatcacgctagacgtggatcctaaaaagcaaatgcttaatccggaacgtcctgtcaatccttttattccaggggaagacgggcaagcatacgtcgttccaaaaagccgacttaataattag

SEQ ID NO: 4425 - protein, 945 aa, Eremothecium gossypii
MKLFVRKEPRAIALASNDYVLVFERSKNNPKQPQVKNAPPTIMVKTMSEASLVNGGGFVEWTAFLIKGLLGVIHVRNQVFIGLITGVKDVAKPRWRIRDGKMKSIESIFQILSVNFYCLDSPLYDQWLYYVSEICQEKLLTEHPCAPLKKLFSDGTFYYSRDFDISNVLQERGLKHRIENTIENQEKKFIWNLNLMSEILQLRGRITPAELQAFDGGQFLTFLIRGFCKTVFANEIHSPTSLTLISKTSIEDLDSINDFQKGIDEEGNVARFIESELIIQTERYLFAYVQTSADIPLSWEVVEGQLLHSKKLKLTKSPERIQATFDRHFDDMISRYGVISIVNLVKHRSSSQETLSGAYKACAEVKELHYTAVDYPVDVIKKSPYKLMYFLRDDIYEFGAFAYDIARGVYVGKQTGSFRVSAVDATSKMNLVEMCISREVLDLTTDELEDFAITTSLVKKHEALWSDNDFWLHRIHTKNIKNPAKYKKVYSQVFSLSSKVLLYDPLHAHIAKCLKKLKNEYTYEKEISIFAGTFNVNGKQCKDEAMGTWLFPPNGESEGNYADIYVIGLEEVVELTPGHMLSTDPMSKQFWEKTILRHLNSQEGRHYNCIGTNQLGGVLLLLYVNESECSKIKHLEYDVKKTGFGGISANKGAAAIRFMYSATKFCFIVSHLAAGLENVEQRHSDYKTIMKSIGFSRGKRIKDHDGIIWMGDFNYRILLSNEEVRRAILEGDYGKLFEKDQLNQQMIAGESFPYFNEMEITFPPTYKFDPGTKSYDTSEKMRIPAWTDRILNRGEILKAISYGCAEDVIFSDHRPVYATFKARTTVVDEEQRGQLSRIIHERLTEMFSGLNDEQKYAFLVDSELIVDKIEMEGKLPLVSQVKKGKRLPPPSSDLRKWWIGNGKQVRITLDVDPKKQMLNPERPVNPFIPGEDGQAYVVPKSRLNN

SEQ ID NO: 4426 - DNA, 3189 bp, Eremothecium gossypii
  CDS (1)..(3189)
atgtttgtactagtgcagcgagagccgcagagacggattgctattatctcgaagtcatatgcccttatattcaaggccgtgaaggccgattgcggttcgccaggcgcttctggggcgagccggcccctctgtgccatcgagctgttgcccaagtcacatcttcgagagcagaactttgagaagctgacaaacctggaagtgtacggcttcctggggctaattgagatagaaaacaagatcttcatatgcacaatcaccggcaagtccaaggtggcccgtcctatcccgggggaaactgttaacaagatatacgcagttgatttcttctgcttgaacgacgaccggtgggactttgtcgagttcgacacgaacgggtactccattccgacgaccgaggaggactacgcatcgcagcagaccgtgactaagcacccatgccatgagttaaagaagctgctatctaacggatcgttttattacagctctgattttgacctgacttcgctgctgcagtaccgtggactggactcgcactccttaagtttcgatgacttccaggaggaatatatgtggaactcctttctcatgcaggagattattagctttcgggacaagctggaagaccaggcacgccaggttttggatgatgaagggttcctgacgacggtgatccgggggtttgcggagacgtttcctacatacattgggtccctaccggtgtgggtcaccataatttccaagcaaagttggcggcgggccggcacaaggttcaacgcgcgggggatagatgatgaagcaaatgtggctaattttgtggagactgagttcattatgtattcgaatgattactgttacgcattcacagaaattcggggcagcgtcccgatattttgggagcaggatacatctttgattaacccaaaggtgcaaataacgcggtccattgaggccactcaacccatatttgacgaacacttccaacggcttgtggacaagtatggccccatacacgttgtgaaccttctatccaccaaatactctgagatggagctctccaggcgctatagaactcatatagaacgctcaaaaagccttaaacttgatgagaatatttttctgaccgaatttgacttccatcgggagacgaaagaccagggattttctgctgcaagcagaattaggccgatgatcgagcggtctctactcgaaaatggttatttctcttatgacgtcaaagagaacaagcctatatcaaaacagcgcggtgttttccgagttaactgtttagactgcttggataggacaaacttgattcaacagttcatctcacggtacgcatttttgctcttcctacaagatttccaaatagtcaagtctaatgttgtgaacaatatggaggactatgaatggttccaaaaacacaacaacctgtgggcggatcatggagatgctgtatcgcaaatctatactggtaccaacgcccttaaatcttcgttctccaggaaagggaaaatgtccttggctggcgcgttatcagatgctaccaaatctgttagccgtatgtacatcaacaatttcatggataaaggaaaacagcagaacatcgactctttgctgggtcggttacctcaccaacagccagtgcagctatatgatcccatcaaggaatatgtcacttcgaaattggaaacaatggcccatgaatttacaaagtcctccaagataagtcttttggtggggaccttcaatgtaaacggcctgacgaaaaaggtcgacataactgattggttgtttcctattggaaataagtatttgccagatgtggtcgtactgggtatgcaggaagtcattgagctaaatgcgggatcaattcttaatgctgactattcgaagagtaatttttggcagcaattggtcaatgaatgtctgaatcaatacaatgagaaatatttgttgttgcgagctgagcagatgtcttctttattgatcttattcttcgttaagtcgacgaaggtatctcatatcaaacgcgttgaaggaggcagtaaaaaaacaggctttggcggaattactggtaacaaaggtgcggttgcaatccggtttgagtatggaaatacctcattctgttttgtaaactgccatttagccgcagggatctcaaataccgaggagcgccgttctgactacgagagtatcgccaaaggcatcaatttcaccagatcgaagaaggtaccacaccatgattccatcttttggctgggtgacctaaactacagacttgcgctgccaaacgaggatgttaggcagatattgaataataaagaagatggttatatcgagaaacttctagcttacgaccagttgactcaggagatgagtaacggatcctcatttaagggatttatggaaccctcaattcaattccgtccaacctacaagtacgatcatggtactaaccgctatgatagctcagaaaaggcacgtactccatcttggactgatagaatcatttacaaaggcaagaacctacaaccaatggcatacggagacgtctcactttgcctgagcgaccataagcctgtctattcagcatataaagccgacgtgaactttgtggatgaaacgataaaaatgtcactaaccaaagagctatacttccgatacaaggaggcgcacccagaacaggcatcaaacacatctattgctttgatagatgtcgtagcggagtccaagggcgctagaaagcgcaatatggaaagtccaataaatgattggagtgaaaccaacttgttggacttagaacctgcttctgttgtaagcataccatcgtccaactcctctacgccaggcatgtcgccccagccgcctgcacatgttcaaaagcatattccaggccctggaggaagacacagggttccaccgcctccgccaccagcacctcggggcaacggcatcgccgcatctggaacaaactcgcagagatcgctacagacaaacagtacccaggggagcccagtcccaccggcaaaagtaggtccgcctgttcctgctcggcgcggcacgctcccccctgggttcagcgactctatcctcgtacctaaaaatgcatccagtagcgcacttttcttccaccagcaccaacagcggcaaggccgccagcaactctcccagtcccaccccacgtcctag

SEQ ID NO: 4427 - protein, 1062 aa, Eremothecium gossypii
MFVLVQREPQRRIAIISKSYALIFKAVKADCGSPGASGASRPLCAIELLPKSHLREQNFEKLTNLEVYGFLGLIEIENKIFICTITGKSKVARPIPGETVNKIYAVDFFCLNDDRWDFVEFDTNGYSIPTTEEDYASQQTVTKHPCHELKKLLSNGSFYYSSDFDLTSLLQYRGLDSHSLSFDDFQEEYMWNSFLMQEIISFRDKLEDQARQVLDDEGFLTTVIRGFAETFPTYIGSLPVWVTIISKQSWRRAGTRFNARGIDDEANVANFVETEFIMYSNDYCYAFTEIRGSVPIFWEQDTSLINPKVQITRSIEATQPIFDEHFQRLVDKYGPIHVVNLLSTKYSEMELSRRYRTHIERSKSLKLDENIFLTEFDFHRETKDQGFSAASRIRPMIERSLLENGYFSYDVKENKPISKQRGVFRVNCLDCLDRTNLIQQFISRYAFLLFLQDFQIVKSNVVNNMEDYEWFQKHNNLWADHGDAVSQIYTGTNALKSSFSRKGKMSLAGALSDATKSVSRMYINNFMDKGKQQNIDSLLGRLPHQQPVQLYDPIKEYVTSKLETMAHEFTKSSKISLLVGTFNVNGLTKKVDITDWLFPIGNKYLPDVVVLGMQEVIELNAGSILNADYSKSNFWQQLVNECLNQYNEKYLLLRAEQMSSLLILFFVKSTKVSHIKRVEGGSKKTGFGGITGNKGAVAIRFEYGNTSFCFVNCHLAAGISNTEERRSDYESIAKGINFTRSKKVPHHDSIFWLGDLNYRLALPNEDVRQILNNKEDGYIEKLLAYDQLTQEMSNGSSFKGFMEPSIQFRPTYKYDHGTNRYDSSEKARTPSWTDRIIYKGKNLQPMAYGDVSLCLSDHKPVYSAYKADVNFVDETIKMSLTKELYFRYKEAHPEQASNTSIALIDVVAESKGARKRNMESPINDWSETNLLDLEPASVVSIPSSNSSTPGMSPQPPAHVQKHIPGPGGRHRVPPPPPPAPRGNGIAASGTNSQRSLQTNSTQGSPVPPAKVGPPVPARRGTLPPGFSDSILVPKNASSSALFFHQHQQRQGRQQLSQSHPTS

SEQ ID NO: 4428 - DNA, 3702 bp, Anopheles gambiae str. PEST
  CDS (1)..(3702)
atggccatgtcgaagggattccgcgtgctggagaaatccaaaccaccctccccgcacagcgtgctgctggagcatcggaacaagccggaaacgctgctgttcgagtcgcaggccgtggccgtgctgtcggcccaagagacggaaatcgtccgcaaacagtacaccaaagtgctggacgcgtacggttgcctgggcgtgctgcagctgaacgccggcgacagctccctgctctacctggtcatggtgaccgggtgcttttcggtgggaaaaattctcgacagtgaaatcttccgcatcacgcaaacgcagttcgtctcgctgcagtaccagccgacgaacgaggacaaggtggcggaaatacgcaaggtgctcaactcgggcacgttctacttttccttctcgaatgtggctggcagcggtggtggcggtaccggaccgaccattgcccagccgttcgggttcgatgtgacgctgtcggcacagcggcgacgccggacgcgcgaaaccgacaatcgcttcttctggaaccggatgctgttcatccatctgctccggttcggcgtggagtgtaacttctggctgctgaaggcaatgtgcggctcggtcgagatacggacggtgtacgcgggcagcaagcaggcacgcgccgccatcatatcgcggttgagctgcgaacgggccggcactcggttcaacgtgcgcggcaccaacgacgagggctgcgtggcgaactttgtcgagacggagcagtgcatctatctggacaacgagatcacgtcgtacgtgcagacgcgcggcagtgtgccactgttctgggagcagccgggcgtacaggtgggctcgcacaaggtgaaactgtcgcgcgggttcgaagcgtcccggtccgcgttcgaccggcacatgcgcacgatgaaggccaggtacgggcagcaggcgatcgtgaacctgctcggcaccagcctgatcggcagcaaggagggcgaggcgatgctgagcaacgaatttcagcgccaccatcgcgagtcggagcacacggacgtgccgcacctggtgttcgactaccatcaggagtgccggggcggcaacacggtcgcactgtccaagctgcggcagaagatcgacgcaacgtgcgccgactttgggatgttttacgcgatcggcgatgcggtgtaccgggagcagcggggcgccatccgcacgaactgcctggactgtctcgaccggacgaactgcgtgcagacgtacatcgggctggagatgctgaacgaacagatcacactgatggcggcgctggcggataagaagcagcagatgagctcccggttcgaggaagtgtttcgccagatgtggatcaacaacgggaacgaggtgagcaagatctacgccggcaccggggcgatccagggcggctcgaagctgatggacggggcacgatcggccgcccgcaccatccagaacaatctgctcgacaactcgaagcaggaggcgatcgatgtgctactggtcggttccacgctcagctcggagctggccgatcgggcccggatactgctgccctccaatatgctgcacgctcctacgccggtgctgagggaaatgtgcaaacggtacgaggagtacgtcaatccgctggtgttccgggtggcctgcggcacgtacaacgtcaacggtggcaagcacttccgcagcgtcgcctacaaggacgtttcgttggcggattggctgctcgattgccatcgtttggcacgatcgcgctcgctcgttgatttcagccaggtggacgatagcaacgaacctccggtggacatatttgcgattggatttcaggaaattgtcgacctgaacgcatcgaacattgtcgcggcaagctctgacaatgcaaaggcgtgggcggaagagctgcagaaggtggtcagccgggaccgggagtacgtgctgctcacctaccagcagctggtcggcgtctgtctgtacatctacatacggccccagcacgcccagtacatccgcgacgtggcaatcgattgcgtcaagacggggctgggtggcgcgacgggcaacaagggagcggccgccatccggttcgtcctgcacggcacctccatctgcttcgtgtgcgcccactttgccgccgggcagtcgcaggtggcggaacggaacgcggactacgcggaaattacgcgcaagatcgcgttcccgatgggccgctcgctcaagtcgcacgattacatcttctggtgcggcgacttcaactaccgcatcgacatggacaaggacgagctgcgggaggcgctgaagcagtcgccgcacgatctgaccgcggtgctgcagtacgaccagctgcgcatccaacagaacgcgggcagcgtgttcaacgagtttctcgagggcgaaatcagcttcccgccgacgtacaagtacgatctgttcagcgacgattacgacacgagcgaaaagtgccgcgcgccggcctggacggaccgggtgctgtggcggcggcgcaagcagagcccggacgcggaccggcacccgggctggaatccgggccggctggtgcactacgggcgggcggagctgaagcaaagcgaccaccggccggtcattgccatgatcgacatcgaggtgcactacatcgatccggagcgccggtcgaccgtgttcggtgatgtgatacgcgatctgggcccgccggacggcacgattctgatacaggcgtgcagcccgtccgcggccggcaccgactcgggcgacgaggacgagggcagcatctacgacgagaacctgatggcggcgctgatacaggagctgacgcagatcggggaggtgacgctggtgcgcttcgtcggcgacacgatgtgggtaacgttccgcgacgggcagtcggccctgaccgcggcccagaagcgctcggtgctggtgtgcggcgtgcagctctccatcaagctcaagacggagaactgggtggagcaggtggagaaggagatactgctctgcacgccgaacacggtcagcttctgcgacggcagccagaccgggggcgactacaacagcctcggcataccggagatcccggcgcgcccgaaaagcccaccctcggtaccgcagcagccgtccgcccgtccggggccgcccagtcgcccaccgttaccaaagtccccgcaagcatcaccaaagcatcagccacagcagcagcagcaccatcatcatcacccgcgggcgggcgtcatcagcctgggcccggagatactgatggcttcgaagctgcagcaaccgccgaaggtaccgccggccgtaccctgcccaccgcagcgaccgacaccaccggtcgaggatgcgtcgtcgacgatgacgaatacggtcatcttaagctgctctcattcgactctcttttccagcccgttcccgagcagccgtggaccaccgccccctccgccacggagcgacgtgtacgacctggacgtggtgagcaacagtaccaacagcagcagcaaatcggcaccgaccaaatcctcgcccccgggcacatccggcagctccggggcgggctctccctcatctacgaccggcggcaacggtgtactaccaccatcgggaccacccaagggagcaccgccaccactcccgatgcgacggggcgcaccccctcccataccaaatcgaagcggtggtccaccgccgctaccggcccgcccaaacaattag

SEQ ID NO: 4429 - protein, 1233 aa, Anopheles gambiae str. PEST
MAMSKGFRVLEKSKPPSPHSVLLEHRNKPETLLFESQAVAVLSAQETEIVRKQYTKVLDAYGCLGVLQLNAGDSSLLYLVMVTGCFSVGKILDSEIFRITQTQFVSLQYQPTNEDKVAEIRKVLNSGTFYFSFSNVAGSGGGGTGPTIAQPFGFDVTLSAQRRRRTRETDNRFFWNRMLFIHLLRFGVECNFWLLKAMCGSVEIRTVYAGSKQARAAIISRLSCERAGTRFNVRGTNDEGCVANFVETEQCIYLDNEITSYVQTRGSVPLFWEQPGVQVGSHKVKLSRGFEASRSAFDRHMRTMKARYGQQAIVNLLGTSLIGSKEGEAMLSNEFQRHHRESEHTDVPHLVFDYHQECRGGNTVALSKLRQKIDATCADFGMFYAIGDAVYREQRGAIRTNCLDCLDRTNCVQTYIGLEMLNEQITLMAALADKKQQMSSRFEEVFRQMWINNGNEVSKIYAGTGAIQGGSKLMDGARSAARTIQNNLLDNSKQEAIDVLLVGSTLSSELADRARILLPSNMLHAPTPVLREMCKRYEEYVNPLVFRVACGTYNVNGGKHFRSVAYKDVSLADWLLDCHRLARSRSLVDFSQVDDSNEPPVDIFAIGFQEIVDLNASNIVAASSDNAKAWAEELQKVVSRDREYVLLTYQQLVGVCLYIYIRPQHAQYIRDVAIDCVKTGLGGATGNKGAAAIRFVLHGTSICFVCAHFAAGQSQVAERNADYAEITRKIAFPMGRSLKSHDYIFWCGDFNYRIDMDKDELREALKQSPHDLTAVLQYDQLRIQQNAGSVFNEFLEGEISFPPTYKYDLFSDDYDTSEKCRAPAWTDRVLWRRRKQSPDADRHPGWNPGRLVHYGRAELKQSDHRPVIAMIDIEVHYIDPERRSTVFGDVIRDLGPPDGTILIQACSPSAAGTDSGDEDEGSIYDENLMAALIQELTQIGEVTLVRFVGDTMWVTFRDGQSALTAAQKRSVLVCGVQLSIKLKTENWVEQVEKEILLCTPNTVSFCDGSQTGGDYNSLGIPEIPARPKSPPSVPQQPSARPGPPSRPPLPKSPQASPKHQPQQQQHHHHHPRAGVISLGPEILMASKLQQPPKVPPAVPCPPQRPTPPVEDASSTMTNTVILSCSHSTLFSSPFPSSRGPPPPPPRSDVYDLDVVSNSTNSSSKSAPTKSSPPGTSGSSGAGSPSSTTGGNGVLPPSGPPKGAPPPLPMRRGAPPPIPNRSGGPPPLPARPNN

SEQ ID NO: 4430 - DNA, 3546 bp, Neurospora crassa
  CDS (1)..(3546)
atggactacaacagttctacatcgtctgctctttgggcgggccaatcaccgtctctcgacaagtcgagccaaatcctcatccgcgaataccctcaccgcgcgatcgcaattgcctcggaatcccacgctctcattcttcgacatagtcagagcacaagccaagccattgccaatggctctctcgcctccgttgcctccgctcgcccacgatccggcagtttcgacaacatgccttccaagtacgttcacgacgaattggatgctgcctcagtatacggccaaccgctgggccggagggacccaatggagcatccatgtgtcgagttgcagaagcttctcagtaacgggacattctactacagcacagacttcgacattaccaaccgtatgcaggacagaccagccgatgccgtaacgtttgatatcgacaatttcgacgagtcgtttctgtggaactcatacatgatccgtccgcttgtggaattccgctccaagctgcaggaacaggaacgagatgcgttggatgcctcgcggatcctgacgtccgcgattcgaggcttttgtagaacatgggccatccctcaggcctcagctcctttgagggctgccaagaccggtcttccttcatacttgaccatcatctcgcgtctgtcctgtaaaagggcaggcacaagatttaactcacggggcattgatgacgatggaaatgttgcaaattttgtggaaactgagacgacgtactggagcccttcaggcgttgtgttctcatatgctcaagtacgcggctcggttccagtcttttgggaacagcaagccgggctgctcccaaaccagcagaagattaccatcacacgatcaccggacggaacgcaaccggcattcaacaaacacttctctgatctggaacaggcatatggtgctgtccatgtgataaacctactcagcgtgtcgaagccaggagagtacgaactgacgtcgttgtaccgtaccggtattcggaactgccccctcagccggccagaggagggacagtcacgcgatcatgctctccttagagcgaccgagtacgacttccatgctgagacaaagggaccccaaggctatgaggcagcaaatgagatcaggcgttatctggagggctcagccgacggcttcgcatattacctggcccacgaggcggatgacggcgaagagagggcgggctccgatgaacgtacatcttcgcctggccaatgccgctatgtggttgtgctacaacaagaaggtgttttcagaacaaactgtctggattgtctcgacagaacgaaccttattcagacgatagtatcacaaatggcggtagagactttcttaggccatcaaggcgagggtgctgcgtcggacttttggtcacgccatgccaatctgtgggctgataacggtgatgctctgtcccgtatatatgccggcaccggtgctttgaagagttccttcactcggtcaggcaaaatgtctcttgccggagctatcgccgacgtccgcaagtcggctacccgactatatgtgaataacttcacggacaaacaacgacagatgaccattgatacacttcttggcagaatgattggtcaggggccagttcatctatatgaccctatcagtgattatgtgtctatggaactacagcggcgaagcaacgagttctctacaaatgaaaagattcggattttaatcggaactttcaacctgaacggcaagaccgacggtatcgacgaagacttgtcgtcttggctttgtccctccgaactgggcaatgctcaacccgaaattgttgcgatcgggttccaagaaatcgtcgaacttaatccgcagcagattatgaacagtgatccaaccagaaagcagttgtgggaacgtgcgataaaggctactctggatcgacactacaacagagctgatgatgagaaatacgtgttgttgagaagtggccagctcgtgggtgccgcattgtgcatcttcgttaaggcctctgctctccaaaacatcaaaaatgtcgaaggcagtgtcaaaaagacagggctctcgggcatggccggaaacaaaggagctgttgcgatcaggcttgattatgcaaacacaccgatatgcttcgtgacagcccatcttgctgctggttttaccaactacgaggagcgcaatagagattataccaccatcaatcacggcctccgattccaaagaaatagagggattgacgatcatgaccaccggccagtatatgccgtcttcgaatgcaccgtcaacattgtgaacgagagaattcgcaacaagatcagtcgtgagatatatgaacgcaggaaagcagatattggcggcgacatggccaacttggctggggatcagtccgacgacgaggatttaattggatacgatgctatcgagcctggcctccctccagcgagctccgatcgacagaaatggtggttagacaatggcaagatgccccgatcagccatccaaccaccaaaacccgagagccccgccttccagactattctcaatcccaaaaggccagccaacccttacatgcccactgatgaacctgactgggtcaatattccgagatctgagtcaagactttcctccttctcgagtctgtcaacatcaccgtttgaacatgtcaaccattcgatgctgctctctacttcggcgtcaaattcggcaccgagaagacctctccctcctccatttgatccatcgaaccttcccgcaaaggttgggcggttgcaactcaacgaagatgggaagaacggcaagtccgatactcctccaccaccccctcctccacgaaggcagaccggtatgggtgctctaggatccacatcgggacctggcatgaccacttcaccagtgactaggaagcttgccaatacggcagggacagcaggagcaggaccaacacaagcaacagccacaccaccactcccggtgcgctcgatgtctgtatcgtctgaacacaccattaagcagaaagctgcgccaccggtagccaagaaacctgcccacttggcagcactatcatcccctgagtccaacacttcggcacctgtgcctatcgaggacatgatgacactcagtaaatggaagcctctccagccagagtgttctccgaacccgcctctctcgggattacgaggatccttagccaacggaagttccacgtctctatcttcacacaaagatagaactggggatagcagcgtgccgctgcagccgtctcggggcgtcaatacaagcacgggagttgcgcctcaggcacggtacacgccgcctggaggtgtaggtctcgtcgggatggccgatcttcggcaaaagacccaggttccaggacggaagcctgtgcctatgtctacgcttgcgccagggccagcacttgttcagaaggcgacgaagcctgaggcgccgcagccgcctccgcctaggaaatcacatactgttaatcttctggacgatgatgacagtaatggcattcagatgggagggtggcaggcactgaaaccttcatga

SEQ ID NO: 4431 - protein, 1181 aa, Neurospora crassa
MDYNSSTSSALWAGQSPSLDKSSQILIREYPHRAIAIASESHALILRHSQSTSQAIANGSLASVASARPRSGSFDNMPSKYVHDELDAASVYGQPLGRRDPMEHPCVELQKLLSNGTFYYSTDFDITNRMQDRPADAVTFDIDNFDESFLWNSYMIRPLVEFRSKLQEQERDALDASRILTSAIRGFCRTWAIPQASAPLRAAKTGLPSYLTIISRLSCKRAGTRFNSRGIDDDGNVANFVETETTYWSPSGVVFSYAQVRGSVPVFWEQQAGLLPNQQKITITRSPDGTQPAFNKHFSDLEQAYGAVHVINLLSVSKPGEYELTSLYRTGIRNCPLSRPEEGQSRDHALLRATEYDFHAETKGPQGYEAANEIRRYLEGSADGFAYYLAHEADDGEERAGSDERTSSPGQCRYVVVLQQEGVFRTNCLDCLDRTNLIQTIVSQMAVETFLGHQGEGAASDFWSRHANLWADNGDALSRIYAGTGALKSSFTRSGKMSLAGAIADVRKSATRLYVNNFTDKQRQMTIDTLLGRMIGQGPVHLYDPISDYVSMELQRRSNEFSTNEKIRILIGTFNLNGKTDGIDEDLSSWLCPSELGNAQPEIVAIGFQEIVELNPQQIMNSDPTRKQLWERAIKATLDRHYNRADDEKYVLLRSGQLVGAALCIFVKASALQNIKNVEGSVKKTGLSGMAGNKGAVAIRLDYANTPICFVTAHLAAGFTNYEERNRDYTTINHGLRFQRNRGIDDHDHRPVYAVFECTVNIVNERIRNKISREIYERRKADIGGDMANLAGDQSDDEDLIGYDAIEPGLPPASSDRQKWWLDNGKMPRSAIQPPKPESPAFQTILNPKRPANPYMPTDEPDWVNIPRSESRLSSFSSLSTSPFEHVNHSMLLSTSASNSAPRRPLPPPFDPSNLPAKVGRLQLNEDGKNGKSDTPPPPPPPRRQTGMGALGSTSGPGMTTSPVTRKLANTAGTAGAGPTQATATPPLPVRSMSVSSEHTIKQKAAPPVAKKPAHLAALSSPESNTSAPVPIEDMMTLSKWKPLQPECSPNPPLSGLRGSLANGSSTSLSSHKDRTGDSSVPLQPSRGVNTSTGVAPQARYTPPGGVGLVGMADLRQKTQVPGRKPVPMSTLAPGPALVQKATKPEAPQPPPPRKSHTVNLLDDDDSNGIQMGGWQALKPS

SEQ ID NO: 4432 - DNA, 3807 bp, Mus musculus
  CDS (1)..(3807)
atgcccgactcgagcacgaatcaacacgggctcccccagctctttcctgaagtccctccctgtcgcccgcggggagggcagagctacagggctccacgcgaggaggacggaccctccctctgccggctcccctggccgtgccaccttcccactcccggggcgacggaggctcgcttcacggacccaggacgcggcggccgcaggaacccggtgaccagtaagcgccctgctcggcagcacggtcccgcgtgggcggaaacggctccgccctttcaccctaaggggcgggccttccgcctgggcagcggcgcaatgcggaagagctggacctgctggagcggaagtgacgcttcgggcggctgtagcggcggaggctgcgggagaaggaggaggaggagccggaggaagagggctgcctctgaagaaaggagaatggcgttcagcaaaggatttcgaatctaccacaaattggatcccccaccgttcagcctcatagtggaaactaggcataaggaagaatgtctcatgttcgagtctggggctgtggctgtgctctcatctgcagaaaaggaggctattaaaggcacatatgccaaagtactggatgcatacggacttttgggagttttacgattaaatcttggtgataccatgctgcactatctggtcctagtcactggatgcatgtctgtggggaaaatccaagaatctgaagttttccgagttacttccactgagtttatatcattgcgagttgatgcttcagatgaggaccgcatttcggaagtacgaaaagttttgaactcgggaaacttttattttgcatggtctgcatctggagtcagcttagatctgagtctgaatgcacatcgaagcatgcaagagcacacaaccgacaataggtttttctggaatcagtctctgcatttgcatctcaagcactatggtgtgaactgcgatgactggttattacggctcatgtgtgggggagtagagattagaaccatttatgctgcccataaacaggcaaaagcttgcctcatctcaagactaagctgtgaacgagctgggacaaggttcaatgtccggggaaccaacgatgatggtcatgttgccaactttgtagagacagagcaggttatatacttagatgactgtgtctcttccttcatacaaatccgaggatctgttccattgttctgggagcaaccagggttgcaagtgggatcccatcgtgttcgtatgtcaaggggatttgaagccaatgcgcctgcctttgacaggcatttccgaacacttaaggacttatatggtaaacagatagtagtgaatctgcttgggtctaaggaaggcgagcatatgctgagcaaggctttccagagtcatttaaaagcctctgaacacgcttctgatatccacatggtgtcttttgactatcatcaaatggttaaaggaggaaaggcagaaaaactacacagtattctcaaaccacaagtccagaagtttctagattatggatttttttatttcgatggcagtgaagttcaaaggtgccagagtggtacagttcgaacaaactgcttggattgtctggatagaacaaatagtgtgcaggcattccttggcttagagatgctcgctaagcagctggaagctctgggcttggctgagaagcctcagctggtgacccgcttccaagaagttttccggtccatgtggtctgtgaatggcgactcaatcagtaaaatatatgcaggcaccggggccctggaagggaaggccaaggctggaaagttaaaagatggtgcgcgatctgtcaccagaaccatccagaataacttcttcgacagctccaagcaggaagccattgatgtcctgctcctgggaaatactctcaacagcgatttagctgacaaagcccgagcgcttctaactactggaagtttgcgtgcatcttccaaagtcttaaagaacatgtgtgagaacttctacaaatactcaaagcccaagaagatccgagtgtgtgttggcacctggaatgtgaacggcgggaagcagttccgcagcatagcgttcaagaaccagacgctcacagactggcttctggacgctcccaagttagccggcatccaggagtttcaagataagagaagtaagccaactgatatatttgcaattggctttgaagaaatggtggagctgaatgctgggaacattgtgaatgcaagcacaaccaaccagaagctgtgggcagtggagctgcagaagaccatctccagggacaacaagtatgtcctgctggcctcggagcagctggtgggtgtctgcctgtttgtctttatcagaccacagcacgctccttttatcagggatgttgcagttgatactgtgaaaactggcatgggaggtgcaactggaaacaagggcgccgttgcaattcggatgctcttccacaccaccagcctttgcttcgtctgcagccactttgctgcagggcagtcccaagtcaaagagagaaatgaagattttgtagaaatagcacgaaaactgagtttccccatgggacgaatgctcttctcccatgactatgtattttggtgtggtgatttcaactatcgaattgaccttccgaatgaagaggttaaagagctcataagacaacaaaactgggattctctgatcgctggggatcagctcatcaaccagaaaaatgcaggacagatctttagaggattcttagagggaaaagtaacgtttgctccaacctataaatatgacttgttttctgaagactatgacaccagtgagaagtgtcgcacccctgcttggacagaccgtgtcctctggagaaggaggaagtggccttttgacagatcagctgaagatttagatctcctgaatgctagtttccaagatgaaagtaaaattctttatacatggacccctggcaccttgctgcactatggaagagccgagctgaagacttctgaccataggcccgtcgttgccttgattgacatagatatatttgaagttgaagctgaagagagacaaaaaatttataaagaagttattgccgtccagggcccaccagatggcacagtgctggtctcaatcaaaagttctgcacaagaaagtactttttttgatgatgctttgattgatgagcttctgcggcagtttgcacactttggtgaagttatactcataagatttgtagaagataaaatgtgggttacatttttggagggaagctctgccttgaatgctctgagcctaaatgggaaagagctattaaatcggactataacaattactttaaaaagtccagactggatcaaacatttggaagaagagatgagtttagagaaaatcagtgtcacgttgccctcatcagcaagctccaccctgcttggtgaagacgcagaggtcgcagcagactttgacatggaaggtgacgtcgatgactacagcgctgaagtagaggagcttcttcctcagcatctgcagccgtcctcaagttctggcctgggcacttctccaagttcttcaccccggaccagtccctgccagtcccccacagtaccagagtactccgccccttctcttcccatcagacctagccgagcaccgtcaagaactccaggacctccaagttcgcagggctctccagttgacactcagccagcggcccagaaggattcttcccagactctagagcccaagagaccaccccctccccgcccagtcgctcctccggcacgtcctgccccaccacagagaccacctccaccttcaggtctctaa

SEQ ID NO: 4433 - protein, 1268 aa, Mus musculus
MPDSSTNQHGLPQLFPEVPPCRPRGGQSYRAPREEDGPSLCRLPWPCHLPTPGATEARFTDPGRGGRRNPVTSKRPARQHGPAWAETAPPFHPKGRAFRLGSGAMRKSWTCWSGSDASGGCSGGGCGRRRRRSRRKRAASEERRMAFSKGFRIYHKLDPPPFSLIVETRHKEECLMFESGAVAVLSSAEKEAIKGTYAKVLDAYGLLGVLRLNLGDTMLHYLVLVTGCMSVGKIQESEVFRVTSTEFISLRVDASDEDRISEVRKVLNSGNFYFAWSASGVSLDLSLNAHRSMQEHTTDNRFFWNQSLHLHLKHYGVNCDDWLLRLMCGGVEIRTIYAAHKQAKACLISRLSCERAGTRFNVRGTNDDGHVANFVETEQVIYLDDCVSSFIQIRGSVPLFWEQPGLQVGSHRVRMSRGFEANAPAFDRHFRTLKDLYGKQIVVNLLGSKEGEHMLSKAFQSHLKASEHASDIHMVSFDYHQMVKGGKAEKLHSILKPQVQKFLDYGFFYFDGSEVQRCQSGTVRTNCLDCLDRTNSVQAFLGLEMLAKQLEALGLAEKPQLVTRFQEVFRSMWSVNGDSISKIYAGTGALEGKAKAGKLKDGARSVTRTIQNNFFDSSKQEAIDVLLLGNTLNSDLADKARALLTTGSLRASSKVLKNMCENFYKYSKPKKIRVCVGTWNVNGGKQFRSIAFKNQTLTDWLLDAPKLAGIQEFQDKRSKPTDIFAIGFEEMVELNAGNIVNASTTNQKLWAVELQKTISRDNKYVLLASEQLVGVCLFVFIRPQHAPFIRDVAVDTVKTGMGGATGNKGAVAIRMLFHTTSLCFVCSHFAAGQSQVKERNEDFVEIARKLSFPMGRMLFSHDYVFWCGDFNYRIDLPNEEVKELIRQQNWDSLIAGDQLINQKNAGQIFRGFLEGKVTFAPTYKYDLFSEDYDTSEKCRTPAWTDRVLWRRRKWPFDRSAEDLDLLNASFQDESKILYTWTPGTLLHYGRAELKTSDHRPVVALIDIDIFEVEAEERQKIYKEVIAVQGPPDGTVLVSIKSSAQESTFFDDALIDELLRQFAHFGEVILIRFVEDKMWVTFLEGSSALNALSLNGKELLNRTITITLKSPDWIKHLEEEMSLEKISVTLPSSASSTLLGEDAEVAADFDMEGDVDDYSAEVEELLPQHLQPSSSSGLGTSPSSSPRTSPCQSPTVPEYSAPSLPIRPSRAPSRTPGPPSSQGSPVDTQPAAQKDSSQTLEPKRPPPPRPVAPPARPAPPQRPPPPSGL

SEQ ID NO: 4434 - DNA, 4227 bp, Magnaporthe grisea 70-15
  CDS (1)..(4227)
atggagcagcattttcgtcgcgcggccaccggcatggacaacatgctcaacaacgtcttgagcatggagccgccgcccaacacatggggcccagtgcccaccgccgcccccatctctcaaacctcggccgaaaagaccagtcagctcttgattcgcgactatccattccgatccatcgccatcgtctccaaatcacatgctctagtctttcgacatggcagctccagccccgaccccctctcgaacggctccttctccgcccttccgaatccgcgctcccggccgggcgagggctcgagcaatgccgccaagtgcatggtggagttcgcccccaatactaggaagctgctggacgactaccgcccgcttacctcgcggcctatatacggtacactcggtttgatatccatgggccaagatgtcttcatttgcgtcattacgagcgcatcgagggttgcgacgttgcgcccgggagagaccattgagagaatcaatgccgtggagttcttttgtctgaatacgaacgagtatgatgacgttctttccacagacccgtattatgaggatgatgggtcgtcagcctacggccagggcttgagcagaagggatcctactatggagcacccgtgtgctgaagttcaaaagttgttgagcaatggaagcttctatttcagtaccgatttcgatcttacaaaccggctgcaggacagaccagcagacgcttctgcgttcaacattgacaactttgacgaggaattcttgtggaactctttcatgatagacccgcttgtgcagtttcggtcgcgtctgatagcgcatgaaagagaggctcttgatgcttcctggtttttgacatcggccattcgaggcttctgtcagacgatcactttgccacagccaatagcgccgttgaggggtggatccaaggctggcatgccatcttatcttacccttatatcccgtctttcatgccgccgggctggcacccgcttcaactcccgtggcattgatgacgacggcaacgtcgcaaactttgtcgagtcggaaacgacatattggagcccgtccggtgtggttttctcgtactgccaagtccgaggctcggttcctgtattctgggagcagtccgccgggctgatccctgggcagcaaaaaatcacgctcacaaggtcacctgatgggacacaaccagccttcaacaaacattttcaagatttggagcagacatacggagcagtacacgtggtcaacttgctgagcgcgacgaaaccaggggagcttgagcttactcaatccttccgctacggcatccagcattgtcccttgagtcgccgtggtgagaagcacacccagcaagatcatgcactcttgcgcgctaccgagtacgacttccatgccgagaccaagggcccgcaaggctacgaggctgcaaagcaaatcaggcactatattgaaaactcggcagatgggtttgcgtattacctttccgaagtgaccagggatacagaggaggtcggcaagccaacggcgccacgctatgtagtacttttgcagcaagagggcgtcttcaggacaaactgccttgattgtctcgaccgcactaacctcattcaaaccctgatctcacagatggcagttgaaacctttctgggtcataggggagagtttgctacatcggacttttggatgcggcactcgagtatgtgggcagacaatggtgatgcattgtcgaggatctatgctggcacgggagcgctcaagtcttcgttcacccgccacggcaagatgtcacttgccggtacttttgccgatgtccgaaaatcggcgacgcggctatatataaacaacttcgccgacaaagggcgacagaatacaatcgacctactcttgggccgcatctacgggcaagcacctgtggttctgtatgacccgattagtgactatgttgcagtggaactttcgaagcggagtgctcaattctcatccaccgagaccatatcaatcttggtggggacgttcaacctcaatggccggacagaggggatcgacgaagacctctcgccatggctttggcctgctgccctaggggacaggcagccagagattgttgccgttggattccaagaaattgtcgagctcagtccccaacaaatcatgaacagtgatccccgaaggaaacaactgtgggagaatgcggtcaagcaaacgcttaacgagaactgcgaacggcatggccaagaaaagtacgtcctgctcagaagtggacagcttgttggtgcagcgctttgcatttttgtcaaggcatctgcgctacgcaatatcaagaacgtcgagggcaacgtcaagaagactggtatgtcgggtatggccggcaacaaaggtgccgttgcgattagactcgattacgccagcacaccgatttgctttgtaacggcgcatctggctgctggatttgcaaactacgaggagagaaataaggactatgccaccattcaccagggtctccgatttcagagaaataggggcattgatgatcacgataccgtaatctggcttggtgatttcaactaccgcattggattgagcagagataagaccatggatctcatcaaaaggcaagacctcgggcgcctgtacgaaaatgatcagctgaatctgcaaatggttgctggtctctcctttcaatactactcggaggcacgaatcaactttatgcctacatacaaattcgatctcggaaacgatgtctacgactcctctgagaaggcgagaatccctgcgtggacggatcgtattctgcgaaaaggcaacaatattcgccaaacttcgtacgattcggctcctctgagattctcagaccacagacccgtctacggaacttttgactgcacagtcaacattgttgacgaggcactccgggagcagttctcgagggagatttatgaacgaagaaaggcagacatgggcgacgccatcagcattcagacggctgatactgatgacgaggacctgaaggggtatggatcgattgagcctggcttgcctccggctagtaccgacaggcagaagtggtggctcgaaaatggtcgaccggccaggtcaaccgtggcgccacccagacctaccgcatcatctcacgtcacagtcttgagtcccaacaggccgccgaatccatttgtgccgacagaggaaccagactgggtgactgtgcccagatcagactcgaggctgagcaactcgtactcgagcatctcaacaagtccatatgagcacgtgctaccgacactgaagcagcagcagacagtgaggaagttgccgcctccatacgatccatcggcgctctcggcacagttcacgagaaagcctgcagggcagagtgaccagcattcggcctcgagtctgcgcaacgagatgccatcttctgcactgtccgctcagttcacaagaagaccaagtacacagagcgagcatgtgtccagctcttatagaaaccagacgccgccgccgcctccgccccctagaagacaagcaggcaacagtggatctggccctggaccggagagggcgtcgacgcttccagccaagatgccaaccaaggttctgcctccaccatctgatgtgatcccaaggaaggctgtccagacgcaagcgcgaccgacatcgtcggcatcgtcaacgacaaaatcaagcaatgctccaccaccggtggccaagaagccggcacatctagctgggttgagcccagccgggagtccgacaattgctcagagcgaccaggtggcagtagcccagaggccaagatcgccaggacgagcagaggatgggctcaagggtgtcgttggaagactgggtgagcgacagcaggcaatgcaacaagtgtctccgctcagggggaaggatggcggattcgcacggaggccgattgcgtcgccaccaacagcaagtgagctagggattgacaagggggcagagtcagcagtgccgccaccaaaaccaagcaggaaaccaaccatgtcgccagaagtgcgaccgaaacccaaaccaccagcactgaggagcgagcagactgtggtgcatgatcaagtgaaccagggcaaccaactacagtcgaggccagtaccgcatcggccttcagcgacgacccagacttctgggggaaatgtcagtcttatggacaacgataccgacgatcaattgagtgctttcaaggtcctcagacccagttga

SEQ ID NO: 4435 - protein, 1408 aa, Magnaporthe grisea 70-15
MEQHFRRAATGMDNMLNNVLSMEPPPNTWGPVPTAAPISQTSAEKTSQLLIRDYPFRSIAIVSKSHALVFRHGSSSPDPLSNGSFSALPNPRSRPGEGSSNAAKCMVEFAPNTRKLLDDYRPLTSRPIYGTLGLISMGQDVFICVITSASRVATLRPGETIERINAVEFFCLNTNEYDDVLSTDPYYEDDGSSAYGQGLSRRDPTMEHPCAEVQKLLSNGSFYFSTDFDLTNRLQDRPADASAFNIDNFDEEFLWNSFMIDPLVQFRSRLIAHEREALDASWFLTSAIRGFCQTITLPQPIAPLRGGSKAGMPSYLTLISRLSCRRAGTRFNSRGIDDDGNVANFVESETTYWSPSGVVFSYCQVRGSVPVFWEQSAGLIPGQQKITLTRSPDGTQPAFNKHFQDLEQTYGAVHVVNLLSATKPGELELTQSFRYGIQHCPLSRRGEKHTQQDHALLRATEYDFHAETKGPQGYEAAKQIRHYIENSADGFAYYLSEVTRDTEEVGKPTAPRYVVLLQQEGVFRTNCLDCLDRTNLIQTLISQMAVETFLGHRGEFATSDFWMRHSSMWADNGDALSRIYAGTGALKSSFTRHGKMSLAGTFADVRKSATRLYINNFADKGRQNTIDLLLGRIYGQAPVVLYDPISDYVAVELSKRSAQFSSTETISILVGTFNLNGRTEGIDEDLSPWLWPAALGDRQPEIVAVGFQEIVELSPQQIMNSDPRRKQLWENAVKQTLNENCERHGQEKYVLLRSGQLVGAALCIFVKASALRNIKNVEGNVKKTGMSGMAGNKGAVAIRLDYASTPICFVTAHLAAGFANYEERNKDYATIHQGLRFQRNRGIDDHDTVIWLGDFNYRIGLSRDKTMDLIKRQDLGRLYENDQLNLQMVAGLSFQYYSEARINFMPTYKFDLGNDVYDSSEKARIPAWTDRILRKGNNIRQTSYDSAPLRFSDHRPVYGTFDCTVNIVDEALREQFSREIYERRKADMGDAISIQTADTDDEDLKGYGSIEPGLPPASTDRQKWWLENGRPARSTVAPPRPTASSHVTVLSPNRPPNPFVPTEEPDWVTVPRSDSRLSNSYSSISTSPYEHVLPTLKQQQTVRKLPPPYDPSALSAQFTRKPAGQSDQHSASSLRNEMPSSALSAQFTRRPSTQSEHVSSSYRNQTPPPPPPPRRQAGNSGSGPGPERASTLPAKMPTKVLPPPSDVIPRKAVQTQARPTSSASSTTKSSNAPPPVAKKPAHLAGLSPAGSPTIAQSDQVAVAQRPRSPGRAEDGLKGVVGRLGERQQAMQQVSPLRGKDGGFARRPIASPPTASELGIDKGAESAVPPPKPSRKPTMSPEVRPKPKPPALRSEQTVVHDQVNQGNQLQSRPVPHRPSATTQTSGGNVSLMDNDTDDQLSAFKVLRPS

SEQ ID NO: 4436 - DNA, 3927 bp, Gibberella zeae PH-1
  CDS (1)..(3927)
atggaacattcctcaccagcctggtcttcacaggctccctcgcccgaaaagtcatgcgaactatatatacgcgactaccctcatcgatccatcgccatcgtatcattctcccataccctaatatttcgatatactacgtctaccagtgaagccatcgcgaacggctcgcttacatccctagctgcgattacaagaccccgcgggaacgtcggcgagactgtagtgtcgaaatgcatggttgaattcgcacccgtttccaagaacctactacaagactatcgtcgtctaactcatcgaccgatttatgggacattgggcttgatcacagtcaacggcgaggtctttctatccatcattacacatgcgactcgggctgcaaccctacggcctggtgagacggtagaacgtataggtggagtcgcattctactgcctaagcagcgccgactatgacgatgtcgttcctctcgaaccgctcgatcccgagttttcagatgctgcatcggtgcagtccggtccttacggtcaaggccttggtcgaagggaggtggccatagagcatccttgccatgagttgcgcaacctactcagcaacggaacattttactacagtacagactttgacctgacaaaccgactccaagatagaccgatcaattccaactcctttgagattgacaattttgatgatgggttcctctggaactcattcatgatcagcccccttgtgcaatttcgttctcgactcatgccacacgagcgggcatctctcgattcatcacggatacttacttcagcaatccgtgggttttgtaagacaatgactatcccattgagctcttcgcccataaagaatgccaagtcagggatgccctctttcatgacgctgatatctcggctgtcttgtcgcagagctggaactcgcttcaattcacgaggcatcgacgatgatgggcatgtagcaaactttgtcgaaactgaaaccactttctggagtccagcagggacaatgttttcgtatgctcaagtgcgtgggtctgttccagtgttttgggagcaggcggccgaccttattccaggtcgtcagaagatcacagttaccagatctccagatgggactcaacctgctttcaacaaacattttgaggagcttgagcaatcctatggagcagttcatgtcatcaaccttcttagtgagactaagccgggtgaggtcgagctcagtaacctataccataatggcatcaaacattgccctttgagccgcgcaggacaggatggatcttcagaccatgctctcctacgagagacaaattacgattttcatgccgagacaaaaggacctgctggatacgaggccgctcgggatattcgccgctatattgaaaactccactgatgggttcgcatacttccttgcagaggagacaaacgagccaagctatgagcacgatagctctggacatgcgcgcatggtggtcgtgcttcaacaggagggtgttttccggaccaactgtcttgactgtctcgaccgaaccaatctcatacagacaatgatttcacaaatggcagtcgaggctttcctaggacaccggggcgaatatgccgcgtccgacttctggatgagacattccagtctctgggcagacaatggcgattccttgtccaagacctacgccggaacaggcgctctcaagtcatcgtttacacgccatggcaaaatgtcactggccggagctgtcgccgacgttcgcaaatctgtgcagcgtatctaccacaacaactttctcgacccatcccgtcagatcaccattgatatgcttctgggtcgtcttgttgggcaagcgccggttcttctgttcgatcctatcagcgacttcgtatcatcagagctagccaagagaagtggcgaattcacttcatacaacagtatcacgatatgggttggcactttcaatctcaacggacgtacagaaggcgtcgacgatgatcttggtccttggttattcccagaaaccctgggtaacgcccagccagatatatttgtggtgggattccaagagatcgtcgagctcagtcctcaacagatcatgaacagcgatccatcacggaagaatctgtgggaacaagctgtaaaacgtaacctaaacgagcgacagaagcggttaggaggtgagagatatgtgctgctacgaagtgggcaacttgtcggtgcagcactatgcatttttgtcaagacgcctagtctggccagcattaagaacgtcgagggcagcgtaaagaagacgggtatgtctggcatggctggaaacaagggtgcagtggcaatccgattcgactacgccaacactcatatctgctttgttacggctcatttggccgctggattttctaactacgacgaacgcaaccgtgattacgccacgattcaccacggtttacgtttccagaggaatcgtggaattgatgaccatgacgctgtgatctggttaggtgactttaactatcgtattggtctcaactcagaaaccgcacgagctctcgtgaagaaacgtgactttgagacgctgtatgagaacgaccagctcaatctccagatggtagctgggctgtcattcccattttattccgaagctcgaattacgttcccacccacatacaagttcgacattgggaccgataactacgatacctctgagaaggctcgcattcctgcgtggacagaccgtatcctccggaaggggtctaacctgagacaactgctgtacaactcggcacctctcaaattctctgatcatcgacctgtccatgctgcatttgagtgtagagtgagcattgtcgacgaacagttacgggaaacgatcagtaaggagctgtatcaacaccgaaaggcggatgttggggacacaacggctcatctcggcactggtgaggatagtgacgatgaagatcttatcggctacgattctatcgagcctgggctgcctcctgcgagttcagatcgccagaaatggtggctcgataacaaacagcctgctcgtgccgcggtgcctgtgcccaagcccaggagtggacaagctgtcgggctcaatcccaaccgtccctcgaatccatttggtctcacagatgagccagactggatctccatcccaaggtcatcctcaaaggcatcattgtcgagtatgtcaagctcgccattcgaaaaggtcagcttgcctaactccatggcatcagcctcgagcatccagcctcggaaactacctccgccatatgatccatcagcattgccagccaaggtgggacgtatcaaccttatggatgatcaaactcccatgggtcatgtagagacaccacctccacccccaccccctcgacgaggaacatcaggagtggcaccgagcaccgggtttggtcttaatagagtacagacgcagccacagccactaccaccacctctgaggtcggcatcagcagcttcgcacgcttctcagtactcgcaaaacagcaagggtggtaaaccggcgcctccagtagcaaagaaaccggcacatttgtcaacttcacccagctcgagcccaaggttgagtcacagcatcatggacgacgactttagaccacctttgccgtcaagggctcaaaccgggggtcctatggcaggttctcaatcacaaggccatggagttgcggcaaggaaacctgtaggtatgccgaagcaagggatgaacggaacgggtccaaatccatcaagcccgatcggtggcatggtgggtggggtgccatcgcgccgacccgcaccgccggtgcagcccaagccgcaattatcacagtcaaaccaacaccgagggcaagggtcggttgatttgttaggttcgctggacgaaagtcaggacgtaggatgggagacgttgaagccaagcacaagagcataa

SEQ ID NO: 4437 - protein, 1308 aa, Gibberella zeae PH-1
MEHSSPAWSSQAPSPEKSCELYIRDYPHRSIAIVSFSHTLIFRYTTSTSEAIANGSLTSLAAITRPRGNVGETVVSKCMVEFAPVSKNLLQDYRRLTHRPIYGTLGLITVNGEVFLSIITHATRAATLRPGETVERIGGVAFYCLSSADYDDVVPLEPLDPEFSDAASVQSGPYGQGLGRREVAIEHPCHELRNLLSNGTFYYSTDFDLTNRLQDRPINSNSFEIDNFDDGFLWNSFMISPLVQFRSRLMPHERASLDSSRILTSAIRGFCKTMTIPLSSSPIKNAKSGMPSFMTLISRLSCRRAGTRFNSRGIDDDGHVANFVETETTFWSPAGTMFSYAQVRGSVPVFWEQAADLIPGRQKITVTRSPDGTQPAFNKHFEELEQSYGAVHVINLLSETKPGEVELSNLYHNGIKHCPLSRAGQDGSSDHALLRETNYDFHAETKGPAGYEAARDIRRYIENSTDGFAYFLAEETNEPSYEHDSSGHARMVVVLQQEGVFRTNCLDCLDRTNLIQTMISQMAVEAFLGHRGEYAASDFWMRHSSLWADNGDSLSKTYAGTGALKSSFTRHGKMSLAGAVADVRKSVQRIYHNNFLDPSRQITIDMLLGRLVGQAPVLLFDPISDFVSSELAKRSGEFTSYNSITIWVGTFNLNGRTEGVDDDLGPWLFPETLGNAQPDIFVVGFQEIVELSPQQIMNSDPSRKNLWEQAVKRNLNERQKRLGGERYVLLRSGQLVGAALCIFVKTPSLASIKNVEGSVKKTGMSGMAGNKGAVAIRFDYANTHICFVTAHLAAGFSNYDERNRDYATIHHGLRFQRNRGIDDHDAVIWLGDFNYRIGLNSETARALVKKRDFETLYENDQLNLQMVAGLSFPFYSEARITFPPTYKFDIGTDNYDTSEKARIPAWTDRILRKGSNLRQLLYNSAPLKFSDHRPVHAAFECRVSIVDEQLRETISKELYQHRKADVGDTTAHLGTGEDSDDEDLIGYDSIEPGLPPASSDRQKWWLDNKQPARAAVPVPKPRSGQAVGLNPNRPSNPFGLTDEPDWISIPRSSSKASLSSMSSSPFEKVSLPNSMASASSIQPRKLPPPYDPSALPAKVGRINLMDDQTPMGHVETPPPPPPPRRGTSGVAPSTGFGLNRVQTQPQPLPPPLRSASAASHASQYSQNSKGGKPAPPVAKKPAHLSTSPSSSPRLSHSIMDDDFRPPLPSRAQTGGPMAGSQSQGHGVAARKPVGMPKQGMNGTGPNPSSPIGGMVGGVPSRRPAPPVQPKPQLSQSNQHRGQGSVDLLGSLDESQDVGWETLKPSTRA

SEQ ID NO: 4438 - DNA, 3459 bp, Apis mellifera
  CDS (1)..(3459)
atggcgatgggtaaaggatttcgcgtttacgaaaaactaaagccacctagtcctcattcacttatattagaacaacgaaatcgaaaggaaactgttctttttgaatcacaagcagttgctgtactttctgctgaagaaacagatactttaaaagggaaatacacaaaattattagatgcatatggatgtttaggtgtcttgcaattaaatgcaggtgaaaatactttattgtatcttgttcttgtcactggttgtttttcggttggtaaaataggagaatcagaagtatttagaattacacagactcattttgtaccacttcattacacacaaggtaatgaggatcgtgtatctgaagtcagaaaagttttaaactcaggtacattttatatttcttggtctgctaataaccaagaacctcttgatattactcttagtgcacagaggcgatgtaaatctacaataactgataatagatttttctggaatcgaatgttacatatacatttactaagatatggtgtagatacatctcattggttacttaaagcaatgtgtggtagtgtggaaattcgaactgtatatgttggtcatagacaagctcgtgctgttcttatatcaagattgagttgcgaacgtgcaggcacaaggtttaatgtcagaggaactaatgatgatggtcatgtagcaaattttgtagaaacagaacaagtaatatatttagataatgaagtaacctcttatgtgcaaactagaggatcagttcctttattctgggagcaacctggtattcaagttggttctcataaagtgaaaatttctcgtggttttgaagcatctgcacctgcttttaatagacacttaaatataatcaaagaaaggtatgggcagcaaataattgtcaatcttcttggatctagtctaattggaagcaaagaaggagaagcaatgttaagtcagttattccagactcatcataatatgtcagaacataatgatgtgcctcatattttatttgattatcatcaagaatgtagaggtggaaatatgaaaaatctttcaaaattaaaagcaaaaatagataaatatttagaatcattttcgttgttttatgcagctggtaatactgtcattcttgaacaaactggaactattagaacaaattgtctcgattgtctagatagaacaaattgtgtacaaacattttttgcattagaaatacttggcaaacaacttggattattaaaattacttgaaaagcaacagatggtttcaagatttgaagaagtatttagacaaatgtggatcaacaatggtaatgaagtaagtaaaatatatgctggtactggggcaattcaaggaagttcaaaattaatggatggtgcaagatctgcagctagaacaatacaaaataatttattagactccagtaaacaagaggctattgacatcttattattgggatcaacattaaatacagaattagcggatagagctcggttacttttaccttcaaatatgttacacgctccacccagtgttcttagagaaatgtgcaaaagatataatgaatatgtaactacaatgaatcttagagtaagtgtgggtacttataatgttaatggaggaaaacatttccgaagtgttgtatataaagatgtatctctttctgattggttactagatgctccacaaaaatcatcatctctagtatcagtcgaatatgataatgttcctgtagatatatttgcaataggatttgaagaaattgttgatttaaatgctagcaatataatggctgctagtactgataatgcaaaagcttgggcagaggaactacaaaaagtactttcccgagatactgaatatgttttagtcacctatcaacagttagttggcgtttgtctctatttatttatacgacctaagcatgcaccttatttaagagatgtagctgtagattgtgttaaaactggattaggaggtgcaacaggaaataaaggagctgcagctattagatgtgtattgtattctacgtctttttgtttcgtttgcgcgcatttcgctgctggacaaagtcaagttaatgaacgtaatgcagattatgcagaaataacacgaaaaattacatttcctatgggaagaacattgaatactcatgattatgtattttggtgtggagattttaattatagagttgatatggataaagatgaaatgaaagaaatgataaaaaaaaatgaatttaatcaaatattacaatatgatcaattgaaggttcaacagaatcatggaaatgtctttaaaaattttttggaaggtcctattatttttgctccaacatataagtatgatcttttttctgatgattatgatactagtgaaaaatgtcgtcaacctgcatggactgatagaatattatggaaacgtcgaaaacaagtacctgatattgattctcctacagattggaatccaggaaaattgattcattatggtagggcagaattaaaacaaagcgatcatcgacccgttattgctataatagatatagatattcattgtgttgaatctgaaaaacgtgaacgagtatttaaagaagtgattcaagatttaggtccacctgatggcactatagtagtaaaagcaattgaagaatcagatgatatagatagcgtatttgatgaaaattttatgatggcattattacaagatttctctcatattggtgaagtaattcttgttagattcgttggtgaaacaatctgggtaacatttagagatggacaatgtgctttgtcagcagcaagaaaaggtatgactcaagtatgtggccaaactttaaaattatctttgaaatcaccgaattgggtgcaattaattgaaaaagaaatagaactttgtagtaatactacagttgcgcaatttgtttcaaattctgtaataagaaattcaattcaaagattagaacaattagacataggagaacggtcgtcttctagtagaagtagtccaaatggagtaattccaccacctagaccagcaccaccaggtcgtccagctcaactacccaaaagtccaatacaagatcgaaaacaaggaccacgtgctggtgtatttagcgtgttgcccaatcaattcttaacaccattatctagagaaagagtagaatctgaacaaagtgaaagattatcaccagaatctgcaatttatgaagaaatattggatggatcacctaattatcctataccaaaccgtccaccaccaccactacctcgtacagatcctttgcaagaatcatctaatagatcacccagttctaaaccacctccgctaccccaaagacaagctcctcctcctccacaacatcctccacctattttacctacttcaaatgttccgccgccaattccagcaagaacatcaggtgggccgcctattccagctagaaatccacattga

SEQ ID NO: 4439 - protein, 1152 aa, Apis mellifera
MAMGKGFRVYEKLKPPSPHSLILEQRNRKETVLFESQAVAVLSAEETDTLKGKYTKLLDAYGCLGVLQLNAGENTLLYLVLVTGCFSVGKIGESEVFRITQTHFVPLHYTQGNEDRVSEVRKVLNSGTFYISWSANNQEPLDITLSAQRRCKSTITDNRFFWNRMLHIHLLRYGVDTSHWLLKAMCGSVEIRTVYVGHRQARAVLISRLSCERAGTRFNVRGTNDDGHVANFVETEQVIYLDNEVTSYVQTRGSVPLFWEQPGIQVGSHKVKISRGFEASAPAFNRHLNIIKERYGQQIIVNLLGSSLIGSKEGEAMLSQLFQTHHNMSEHNDVPHILFDYHQECRGGNMKNLSKLKAKIDKYLESFSLFYAAGNTVILEQTGTIRTNCLDCLDRTNCVQTFFALEILGKQLGLLKLLEKQQMVSRFEEVFRQMWINNGNEVSKIYAGTGAIQGSSKLMDGARSAARTIQNNLLDSSKQEAIDILLLGSTLNTELADRARLLLPSNMLHAPPSVLREMCKRYNEYVTTMNLRVSVGTYNVNGGKHFRSVVYKDVSLSDWLLDAPQKSSSLVSVEYDNVPVDIFAIGFEEIVDLNASNIMAASTDNAKAWAEELQKVLSRDTEYVLVTYQQLVGVCLYLFIRPKHAPYLRDVAVDCVKTGLGGATGNKGAAAIRCVLYSTSFCFVCAHFAAGQSQVNERNADYAEITRKITFPMGRTLNTHDYVFWCGDFNYRVDMDKDEMKEMIKKNEFNQILQYDQLKVQQNHGNVFKNFLEGPIIFAPTYKYDLFSDDYDTSEKCRQPAWTDRILWKRRKQVPDIDSPTDWNPGKLIHYGRAELKQSDHRPVIAIIDIDIHCVESEKRERVFKEVIQDLGPPDGTIVVKAIEESDDIDSVFDENFMMALLQDFSHIGEVILVRFVGETIWVTFRDGQCALSAARKGMTQVCGQTLKLSLKSPNWVQLIEKEIELCSNTTVAQFVSNSVIRNSIQRLEQLDIGERSSSSRSSPNGVIPPPRPAPPGRPAQLPKSPIQDRKQGPRAGVFSVLPNQFLTPLSRERVESEQSERLSPESAIYEEILDGSPNYPIPNRPPPPLPRTDPLQESSNRSPSSKPPPLPQRQAPPPPQHPPPILPTSNVPPPIPARTSGGPPIPARNPH

SEQ ID NO: 4440 - DNA, 3321 bp, Aspergillus nidulans FGSC A4
  CDS (1)..(3321)
atgcctagtattcgagtcttcagtcgggaccaccccgttcgcactcttattttggccacttcagacgatgcgttggttttccaacatagcttacgggagtctgccaacaatcattcatcagtcaatcatgacaggcaacgctgcttggtgaagtttgccagtctatcttccatagacttggcaagttaccgacctttaggatctgggtacggtaccctcgggctggtcactatagaccatgatgtgtttgtttgtgttgtcacgcgctcttccaaggcagccacagtcaggcctggagagacagttttaagaattgaggacgtagatctctattgtttgaaccgttccgaatatgaatttactccctattatgacgcggagtcttctgtcaatgaagacaccatttctaatacactcccggcgaaagatccttttctagccctgaagaaactcctgactgatggtagcttttactacagtcttgacttcaatcttacagatcgactgcaggatcgttcagacaagttgacagcttttgatatcgattcccttgacaaagatgttttgtggaatgcatatatgatccaacctcttctcatgtttagatcccacctaccaccgtatgaaaaacaacttctcgatgcctctcagattctcacatgtgttatccggggattctgcgggacaatagccattcctgctaatgctaacgtcttacattccgagcccaaggcacatttgccttcaatgctgaccctcatttcccgtttgtcttcacgacgagcaggcactcgatttaatgctcgcggtcttgacgacgatggaaatgtggccaacttcgtcgagacagagacaatcttggtttgcggaacatccggggtggccttctcttatgtgcaagtgcgtggctccgtcccaatcttctgggagcaagccacaggatttctccccgggcaacaaaagattgaagtgacccgatcaattgaggctactcaacacgcgtttgacaaacatatccagtttttggagctagaatatggcgctgtccatgtggtcaaccttctatgtgaatcaaaaccgggtgaaattgaactttcaacaaggtttcgcgaacatataaggaggaatctcagcagcaaaaaatcaaatctgccttcagatcatgctctgttacgtactacagagtttgatttccatgcagaagctcggggccccctaggatatggggccggaaatcaaataaagcacgagcttacacaatctctcaatggctttgcgtactttctctctaagcaaaaccgtccgtctgagatacctggaacatccgttgttctacaacaagaaggagtcttccgcaccaattgcctggattgccttgaccggacaaatcttgtgcagaccatcattagcttactggcccttgaatcgttcctgtcgcaagaaaacagtgtgctatactctgaagttcaccatcggcactccatactctgggctgataatggagatgctttatcaaagatctacgcgggcactggtgctctcaaaagctcgtatacacgacatgggaagatgtccattgcaggtgccttggccgatgcgcgtaaaactgccgccagattgtacatcaacaacttctcagacaaagctcgacagaggacaatcgatcttatgttgggtctcctgccagatcagctgccagtgcatctctacgatccaatcaatgacatggtctctgctaagctggatcgaatatcatcagaattcacttccaagaaattagccgatatctggaccggaacgttcaacgtgaatggacgtgtccaaggacccggtactgacttgagtccttggttatttcccgaggacaatgaccagcgcaagtgtccgactatattcgctgttggattccaggagattgttaccctgagccctcagcagatcatgtcaacagaccctacaacccgtaaatcctgggagcttgccgtcatggattgtttaaactcacgcgcagctgcgcggggatcaccgaagtatgtacttctgcgatcaggtcaattggttgggacagctctgatgatctacgtgcgcgaggatattctcagagacataaagaacgtggaaggaagtgtaaagaagaccgggctttctggaatagctggtaacaaaggaggctgtgccatccgcttcgaatattcgaataccaggctttgcttcgtaaccgctcatttagctgctggctttgcgaattatgatgaacggaacaatgactacgaaactatttgccagggacttcgctttcagaggaatagatttattgaggatcatgacgctgttatatggctgggagacttcaattataggattggccttcccaatcagacggttagggacttggtaagacagagcaattatcagaagctctatgacaatgatcaactgaatctgcaaatgctcgcgggcagggctttccaattctacagtgagggtcttgtcacgttccccccaacttacaaatatgacgtgggcagtgacacctatgacacttctgataaatcacgtattcccgcatggtgcgacaggattctgtggaaaggaccagatctgcgacaaagcggctatggtgcttcagacatgcgactttccgaccatcgtcctgtatgggcaaccttcacatgcacaattagcatcgttgatgagactcggaaagagagtttgaggcagtcgctccacgctcaacaatggagtaaatcccaaacggttggaacccaaataactcaatcaatgcgcacagacgataatgtcctcatacccgtcgaacctaccgctaccgggcttcctccacctagctcggagcaccgtaaatggtggctagataatggtgctcccgtaaaatcatctatacggccccctgccaaggactatatactgaatgagcaccggacttcaaaccctttctcatatagcgaaagcgaaaaacttgaatgggttcccattgttgcgacgcaaaggaagtttatggttaccggtggtgccatttctaggaagcctctagttccacccagaagtgcagcagcttcagtgtcgcctcggtctctgcaaaataagcccctaaaagcagaagagcatcaaaaagcttattcgccgccgatacctgcgaagcccagctcgctcgctttgaatcaatcaacaccattgccgcgccaatccgccagtgcatgcggcgatgccacacttccgattgcctcagggtcatcgttaccgacagcactactagatgatgatgtcaatgtggagttcaattggcagcctctccttcgatga

SEQ ID NO: 4441 - protein, 1106 aa, Aspergillus nidulans FGSC A4
MPSIRVFSRDHPVRTLILATSDDALVFQHSLRESANNHSSVNHDRQRCLVKFASLSSIDLASYRPLGSGYGTLGLVTIDHDVFVCVVTRSSKAATVRPGETVLRIEDVDLYCLNRSEYEFTPYYDAESSVNEDTISNTLPAKDPFLALKKLLTDGSFYYSLDFNLTDRLQDRSDKLTAFDIDSLDKDVLWNAYMIQPLLMFRSHLPPYEKQLLDASQILTCVIRGFCGTIAIPANANVLHSEPKAHLPSMLTLISRLSSRRAGTRFNARGLDDDGNVANFVETETILVCGTSGVAFSYVQVRGSVPIFWEQATGFLPGQQKIEVTRSIEATQHAFDKHIQFLELEYGAVHVVNLLCESKPGEIELSTRFREHIRRNLSSKKSNLPSDHALLRTTEFDFHAEARGPLGYGAGNQIKHELTQSLNGFAYFLSKQNRPSEIPGTSVVLQQEGVFRTNCLDCLDRTNLVQTIISLLALESFLSQENSVLYSEVHHRHSILWADNGDALSKIYAGTGALKSSYTRHGKMSIAGALADARKTAARLYINNFSDKARQRTIDLMLGLLPDQLPVHLYDPINDMVSAKLDRISSEFTSKKLADIWTGTFNVNGRVQGPGTDLSPWLFPEDNDQRKCPTIFAVGFQEIVTLSPQQIMSTDPTTRKSWELAVMDCLNSRAAARGSPKYVLLRSGQLVGTALMIYVREDILRDIKNVEGSVKKTGLSGIAGNKGGCAIRFEYSNTRLCFVTAHLAAGFANYDERNNDYETICQGLRFQRNRFIEDHDAVIWLGDFNYRIGLPNQTVRDLVRQSNYQKLYDNDQLNLQMLAGRAFQFYSEGLVTFPPTYKYDVGSDTYDTSDKSRIPAWCDRILWKGPDLRQSGYGASDMRLSDHRPVWATFTCTISIVDETRKESLRQSLHAQQWSKSQTVGTQITQSMRTDDNVLIPVEPTATGLPPPSSEHRKWWLDNGAPVKSSIRPPAKDYILNEHRTSNPFSYSESEKLEWVPIVATQRKFMVTGGAISRKPLVPPRSAAASVSPRSLQNKPLKAEEHQKAYSPPIPAKPSSLALNQSTPLPRQSASACGDATLPIASGSSLPTALLDDDVNVEFNWQPLLR

SEQ ID NO: 4442 - DNA, 4713 bp, Gallus gallus
  CDS (1)..(4713)
atggctttcagtaaaggatatcgtgtctatcacaagctggatccactcccgttcagcgtgatagtggaagccagaaacagagaagaatgtctcatgtttgaatctggagctgtggctgtcctctgtaagtcgttctgttttgataactacagaaccaatcggaagtttctactctgtagcctcacaaatttctgcgtgttggtgcagatctaccttcacagccaaacatctgcggaaaaagatacaatcaagaatacctactccaaagtaatggatgcatatgggcttctgggagtattaagattaaacctgggagacacgttgctacattatttggttctagtaacaggatgcatgtctgtgggaaagattcaagactctgaagtctttcgagttacctccactgaattcgtatcgttacgaatcgaatcaacagacgaagatcgtatttcagaagtgcgcaaagttttgaattcaggcaacttttattttgcatggtctgccactggtgtcagcttagatcttagtctcaatgctcaccgcagcatgcaagagcacaccactgacaacaggtttttctggaatcagtcactgcatttacatctgaagcactacggtgtgaattgtgatgactggttgttacgtctcatgtgtggaggagtggagataaggacaatttatgcagctcacaagcaggcaaaagcttgtctcatttcacgactaagctgtgagcgagctgggaccaggtttaacgtccggggaaccaacgatgatggccacgttgctaattttgttgaaacagagcaggtgatatatttagatgattctgtgtcatctttcatccagattcgagggtctgttcctttgttttgggagcaaccaggcctgcaggtggggtcccatcgtgtcagaatgtcaagaggtttcgaggcgaatgcaccagcttttgacaggcatttccgaactcttaaaaacttatatggcaaacaaattattgtgaatttacttggggcaaaagaaggggagcacatgctcagcaaagcttttcagagccacttaaaagcatctgaacattcagctgatatcaaaatggtgaactttgactatcatcaaatggttaaaggtggaaaggcagaaaaactacacagtgtgcttaagcctcaagtccagaaattcttagaatgtggatttttttattttgatggaaaggaagttaaaagatctcaaagtggtactgtcagaacaaactgcttggactgtctggatagaacaaacagcgtgcaggctttctttggcttagagatgctaacaaaacaactggaggtgttaggattagctgagaagcctcagctggttactcgctttcaggaagttttccgatccatgtggtctgtgaatggagattctgtcagtaaaatttatgctgggactggagcccttgaaggaaaagctaaggctggaaagctgaaggatggtgctcgttctgtgaccagaacgattcaaaataacttttttgatagctccaagcaggaggccattgatgttttgttattgggaaataccttaaatagtgatttagcagataaagcacgggctctcttaaccaccagcagtttacgcgcatctgtaaaagtgctgaagagtatgtgtgaaaacttttataagtatgcgaaacccaaaaaagttcgagtctgcgttgggacgtggaacgtcaatggggggaagcagtttcgaagtattgcctttaaaaatcagaccctcactgactggcttctagatgcaccaagcatagctggtattcatgaattccaagatcgaagaagcaaacctgtagacatatttgccattggatttgaagaaatggtggagttaaatgcaggaaacattgtgaatgcaagcacaaccaatcagaagctctgggctgcagaactgcagaagaccatatcgagagattacaagtatgtgctgctggcttccgagcagttagtgggtgtctgcctctttgtgttcatcaggccccagcatgctccctttatcagggacgttgctgttgatactgtaaagactggcatgggaggagccactggtaataaaggtgcagtagcaattcggatgctgtttcatacatccagtctttgctttgtctgcagccattttgctgcagggcaatcacaagttaaagaaagaaatgaagacttcatagaaatagctcgcaagctcagttttccaatgggaaggatgcttttttcccatgactacatcttttggtgtggtgactttaattaccgaatagatattcctaatgaggaggttaaggagctaatccgacagcaaaactgggattcccttatagcaggagaccagcttatcaatcagaaaaattctggacagatttttaggggatttttagaggggaaaataaattttgctcctacatacaagtatgatctgttttctgatgactatgacaccagtgaaaaatgtcgcacgccagcttggacggatcgtattctttggagaagaagaaaatggccctttgaccgatcagctgaagacctggatcttctgaatgctagctttcacgataacagtaaagtcccttatacgtggaatcctggtactttgttgcactacggaagagcagagctgaagacatctgaccacagacctgtggtggcgttgattgacattgacatatttgaaatcgaagcagaagagagacagaaagtttataaagaggtgattgcaacacagggaccacctgatggcacagtaatggtctccatcaaaagttcttcagcagaagaaaactactttgatgataacttgattgatgatcttcttcaaaaatttgcaaactacggagaggttatacttataagattcgtggcagacaagatgtgggtaacgtttttggaaggaagctctgctttgaatgttatgaatttgaacggtactgagatactaggaaggattataaacataagcttaaaaaatccagactggatcagaagtttggaggatgaaatgaatctagagaagattaacgttgggctgccttcgtcaacaagctctactttgctttgtgaagatgctgaggttactgcagactatgatatggaaggtgacattgatgactatagtgctgaagtagaagaaatccttcctcagcacctgcagccaacctcaagctctggcctcggaacctccccaagctcctcaccacgttccagtccctgtcagtcccctacgctgtcagatggacccacgctcccagtgagaccgagccgagccccagcaaaaactcctggaccaccagtttccgtgcacaatgaaactcaacttggtacccaacagaaagatacttctcagaccttggagcccaagcgccctccaccgcctcgccctgttgctcctcctgcacgtcctgctccaccacagagaccgcctccaccatcagttcgtagtcagcctccaccttcaactggattttcaagtgcaggaactgttggatatgctgctgctcgtccgactattccacctcgagctggagttattagcgcaccacaaagccatgtccgcccctctggtggaagaccaacacctgaacctcaaaccaaaccagctgaaccaccaaggggctccccgttgcttcctgaaccactaaagcctcaggctgctcctgcccagcccgtgactcagccaccacctgcgctaaagatgcaagagcctttgatacccgtggcatcacatccacctcagacaagtgccccaccaagtctggaaccgcccccacaaccacctcctcgtagccgatcatcccacactttgccttctgaatctgctccttcacagcagcaaattaaaacaaatggaacctatggcactaaacttgaaacacagttaaatagcgacccttttgaagatttgtcatttcagctgcttgtgtcaaagatgcagacatctgctcgaacatcagctgttccaaccttaaaccaaaaggaaacgatgcagttgccttccgcaacacaaagaaatgatattttgaatactgtaagttgcatgccagcaatgcctcctgctccaacccttaacatatcccaggaacacacgcgcagctctccaaatccatttgttactgggctgaacagcacaaatccattcactgaaagaacgcttactgctggaaacccatttagaacagaaactcgagaacctgaaataacttcacatttacaggaaggacacgccgctttcaatcccttcccttctctaaatccctccagttctaatacaagcaagcctgtattttctgttgatgcacctgaaaacagtttttgcttgcgaagtagatctctcatggtaaaacatgtacagccaaaaggatgggtaacttttgacgaggaggatgagaatttccacgtaaagctaaagccatctaaaagtgttccagattttaagcaaatcggttccaggaagtcagctggatctccagatttgctgggcactgaacaaaatacttttcttggttcagactttacctttggtaatgactggaataaaagttctactgattgtttctatacgatgccagcaagaagaccgcctgcacctcctgtcccatcgagagtaaccagcaacagatcccctgcagatcctttcacttctttggcacctaaggtgtcgccaacgcaagattttacagaaagatag

SEQ ID NO: 4443 - protein, 1570 aa, Gallus gallus
MAFSKGYRVYHKLDPLPFSVIVEARNREECLMFESGAVAVLCKSFCFDNYRTNRKFLLCSLTNFCVLVQIYLHSQTSAEKDTIKNTYSKVMDAYGLLGVLRLNLGDTLLHYLVLVTGCMSVGKIQDSEVFRVTSTEFVSLRIESTDEDRISEVRKVLNSGNFYFAWSATGVSLDLSLNAHRSMQEHTTDNRFFWNQSLHLHLKHYGVNCDDWLLRLMCGGVEIRTIYAAHKQAKACLISRLSCERAGTRFNVRGTNDDGHVANFVETEQVIYLDDSVSSFIQIRGSVPLFWEQPGLQVGSHRVRMSRGFEANAPAFDRHFRTLKNLYGKQIIVNLLGAKEGEHMLSKAFQSHLKASEHSADIKMVNFDYHQMVKGGKAEKLHSVLKPQVQKFLECGFFYFDGKEVKRSQSGTVRTNCLDCLDRTNSVQAFFGLEMLTKQLEVLGLAEKPQLVTRFQEVFRSMWSVNGDSVSKIYAGTGALEGKAKAGKLKDGARSVTRTIQNNFFDSSKQEAIDVLLLGNTLNSDLADKARALLTTSSLRASVKVLKSMCENFYKYAKPKKVRVCVGTWNVNGGKQFRSIAFKNQTLTDWLLDAPSIAGIHEFQDRRSKPVDIFAIGFEEMVELNAGNIVNASTTNQKLWAAELQKTISRDYKYVLLASEQLVGVCLFVFIRPQHAPFIRDVAVDTVKTGMGGATGNKGAVAIRMLFHTSSLCFVCSHFAAGQSQVKERNEDFIEIARKLSFPMGRMLFSHDYIFWCGDFNYRIDIPNEEVKELIRQQNWDSLIAGDQLINQKNSGQIFRGFLEGKINFAPTYKYDLFSDDYDTSEKCRTPAWTDRILWRRRKWPFDRSAEDLDLLNASFHDNSKVPYTWNPGTLLHYGRAELKTSDHRPVVALIDIDIFEIEAEERQKVYKEVIATQGPPDGTVMVSIKSSSAEENYFDDNLIDDLLQKFANYGEVILIRFVADKMWVTFLEGSSALNVMNLNGTEILGRIINISLKNPDWIRSLEDEMNLEKINVGLPSSTSSTLLCEDAEVTADYDMEGDIDDYSAEVEEILPQHLQPTSSSGLGTSPSSSPRSSPCQSPTLSDGPTLPVRPSRAPAKTPGPPVSVHNETQLGTQQKDTSQTLEPKRPPPPRPVAPPARPAPPQRPPPPSVRSQPPPSTGFSSAGTVGYAAARPTIPPRAGVISAPQSHVRPSGGRPTPEPQTKPAEPPRGSPLLPEPLKPQAAPAQPVTQPPPALKMQEPLIPVASHPPQTSAPPSLEPPPQPPPRSRSSHTLPSESAPSQQQIKTNGTYGTKLETQLNSDPFEDLSFQLLVSKMQTSARTSAVPTLNQKETMQLPSATQRNDILNTVSCMPAMPPAPTLNISQEHTRSSPNPFVTGLNSTNPFTERTLTAGNPFRTETREPEITSHLQEGHAAFNPFPSLNPSSSNTSKPVFSVDAPENSFCLRSRSLMVKHVQPKGWVTFDEEDENFHVKLKPSKSVPDFKQIGSRKSAGSPDLLGTEQNTFLGSDFTFGNDWNKSSTDCFYTMPARRPPAPPVPSRVTSNRSPADPFTSLAPKVSPTQDFTER

SEQ ID NO: 4444 - DNA, 4140 bp, Gallus gallus
  CDS (1)..(4140)
atgggatctatgcctgccttactttattgggtaacatttatgtatgttgttgaactttgcaggaaccaactactgcatgttcccttcaaacactaccaggtgaactgcgctgactggttgctgaaagtgatctgtggcgtagtagacattcgcactgtttatgcttcccacaagaaggcaaaagcctgccttatctctcggatcagctgtgagcgagctggtgcccggtttcacattcgaggggtcaatgatgatggacatgtgtctaactttgttgagacagagcagtcagcagcatgttgtcattatggaggtaaagctccacaactggatagttctctgaagcccaaagacaaagtcatcatagcattagcagcacgtatcaaccctgacagcaaagcgttatccaaaatgtggctgataattgttgcactgttagaggaacatacagtcgtcttggatgtgtttcttgaccatgacagaggacagaccatttacttggacgatgatgtctcttcctttgtgcagatcagaggttctgttccgctgttttgggagcaaccgggacttcagaaactgctatgggcctcttcccatgcagaagacactcccatgataaactttgactaccaccaatttgcaaaaggtgggaaagcagaaaaactggaaaatttactgagacctcaactgcaattgcactgggaagaatttggcgtctttgcaaagggcaagaatgtaagtccatgcctgcagacgggtacttttcgaatgaattgtttggactgcctggatcgtactaacagcgtacagtccttcattgcactggagatcctgctcacacaattggagatccttgggttgaactctagatctatagttgagcgctttgtggaatcgtacaaagcaatgtggactctcaatggtcacaatctgagcaaagtgtttactggcagccgtgcccttgaaggaaagcacaaggttgggaagctgaaggatggagcccgctctgtctctcgtaccattcagtcaaatttttttgatgcagtaaagcaggaagccatcaagctgcttctcatgggtgacttcttcagtgaggagtatgcagacaagggcaagatgctcatggatcacactgcgctgctggtaactccaagtattctgaaggccatgtcagagcgtcagtttgaattcacaagcttcaagcgtgttcgtgttgccatggggacctggaacgtgaatggagggaagcagtttcgaagcaacatcctcggtaccagcgagctgacagactggctgctggattctccaaagctctctggagtttctgaatttcaggatgatgagaactgccctcctgacatatttgcagtgggatttgaagagatggttgaattaagtgctggaaacattgtaaatgccagcacaacaaatagaaagatgtggggagaacagcttcaaaaggctatttccaggactcatcgctacattcagctgacatcagcacaacttgttggtgtttgtcttttcatctttgttcgaccctatcatgtccccttcatcagggatgtggcaatagacactgtgaagacaggaatgggaggaaagactggaaataaaggggcagtgagcatccgtttccagttctatagtaccagtttctgctttatatgcagtcacttaactgctgggcagactcaggtgaaggagaggaatgaagactataaagaaatcacacagaaactcagcttcccaatgggacggaacgtgttctctcatgactatgtcttctggtgtggtgattttaactatcgcattgacctaacatatgaggaagtcttttattttctcaaacgtcaagattggaaaacactcctggaatttgatcaattacaacagcaaaaatccagtggaaaaatttttaaagacttccatgaagggactattaattttggaccaacatataaatatgacgttgggtcagaggcttacgatacaagtgacaaatgcagaaccccagcttggactgaccgagttctttggtggagaaagaaattgccttttgaaaaaacagctggagagattaaccttctagacagtgatctgagtgcagaaactaaagtcagacacacctggacccctggagccttgatgtactacgggagagctgagctacaagcatctgaccacaggcctgtgttagctattgtagaagtggaagtccaggaagtcaatgaaggcgctcgtgagagtgttttccaggaagtgtcatctttccagggaccactggatgccacagtagtggtaaatctactatcaccagtgccagaagagaaaaatgattttcctgaggacctgcgtacagagcttatgcagatgtttgaggattatggtactgttgttctggtcaggatcagcggaggccaaatgctggtaacatttgcagacagcaagtcagcacttcgcgttatggatatagatggtatcaaagtcagaggcagaacagtgaagatccgtcccaaaactaaggactggctgaagggacttcaggaggaaattgctcggaaacgggacagcattgtccccatgtcccccactgcaaattcctgtcttttggaagaaaattttgacttctcaagtttggattatgactcagaaggtgatatagtggaggatgaagatgagtatttagatgatgctttgtgtcaacacctggaagcagacacagcggaatatttgcctgatggttctggacacctttcacccacagcactttcaaccaaatctggacaaaacccacggctgtataaagatgatacagacctggttgatttgaagcaggagctggaggcaagcggggagcgtcaccgccgatctccaagcaggtctctgtccgttcctaacaggcctcggccactccagcccccccagaggcctcctcctcctgttggaccatcgggcaagaagtcctcttcagatggttccctctcttcaggaagccactccacctgctccatcctggccatggcaaagctgctgcctggagcccctcagcagccgcctaaagttcggactggaataagtaaaccttacaacgtcaagcaaatcaaaaccaccactgctgaggaagcggaagaagctatcagatgtctgatggaagctaaaggaggattacaggaagatgcactgaagcctgctccaactcgaaaccaaacgttcaccaaacctgagcctgttcccagcatcacaaagtccctgtcctttcagggcccacaggcaggaccagcacttgtgccccatcggcctccacccaaagttccaactacgaagaagccagtacccctgcaaagggccggagccaagatggaaaatgccacatctagagaagagcgatttggccagcagacaatacagaatccctttggcttgccagagccttgcctagaagacggagctattctcagtccgaccaagattactccagtccctaagcccagaacatcacaacctgggaagcctcaggagagcagggggagcagtgacaggcagcccccctccccaagcacagatgaggccaatgcactccctccccagaacacttccttcatcccaaaggtgccaccacgaagaaagaagtcagctcctgcagctcttcatctgcaagttctccagagcagcgacaacccacttcttagagagttaatgttcaactccaacaacaacaatcctgtctgcccccagcctcaggactctgacgtccttcacgttgcctccacacgctctgccctctcagttcctaaactctctgccagccaagaaaataacacggtcacacagctggcactcaatacagaattgattactgtagcaggccagcctccgctgctctcggatagcagctcccttgcaaacagtaccaatctcttggacctggacacagattcttcctgccatcttcccagccaggcaccgtcagcagtttctgcagcacacggtccagaacacttgaaactccccggtcactgggtgacattcagcgatgatgaagacaatggtgcactgtcagaaggcttcaacaaactgcttgtccacgaacaaaacaagaacagcttggagaatacaaataataattcagaattgtaa

SEQ ID NO: 4445 - protein, 1379 aa, Gallus gallus
MGSMPALLYWVTFMYVVELCRNQLLHVPFKHYQVNCADWLLKVICGVVDIRTVYASHKKAKACLISRISCERAGARFHIRGVNDDGHVSNFVETEQSAACCHYGGKAPQLDSSLKPKDKVIIALAARINPDSKALSKMWLIIVALLEEHTVVLDVFLDHDRGQTIYLDDDVSSFVQIRGSVPLFWEQPGLQKLLWASSHAEDTPMINFDYHQFAKGGKAEKLENLLRPQLQLHWEEFGVFAKGKNVSPCLQTGTFRMNCLDCLDRTNSVQSFIALEILLTQLEILGLNSRSIVERFVESYKAMWTLNGHNLSKVFTGSRALEGKHKVGKLKDGARSVSRTIQSNFFDAVKQEAIKLLLMGDFFSEEYADKGKMLMDHTALLVTPSILKAMSERQFEFTSFKRVRVAMGTWNVNGGKQFRSNILGTSELTDWLLDSPKLSGVSEFQDDENCPPDIFAVGFEEMVELSAGNIVNASTTNRKMWGEQLQKAISRTHRYIQLTSAQLVGVCLFIFVRPYHVPFIRDVAIDTVKTGMGGKTGNKGAVSIRFQFYSTSFCFICSHLTAGQTQVKERNEDYKEITQKLSFPMGRNVFSHDYVFWCGDFNYRIDLTYEEVFYFLKRQDWKTLLEFDQLQQQKSSGKIFKDFHEGTINFGPTYKYDVGSEAYDTSDKCRTPAWTDRVLWWRKKLPFEKTAGEINLLDSDLSAETKVRHTWTPGALMYYGRAELQASDHRPVLAIVEVEVQEVNEGARESVFQEVSSFQGPLDATVVVNLLSPVPEEKNDFPEDLRTELMQMFEDYGTVVLVRISGGQMLVTFADSKSALRVMDIDGIKVRGRTVKIRPKTKDWLKGLQEEIARKRDSIVPMSPTANSCLLEENFDFSSLDYDSEGDIVEDEDEYLDDALCQHLEADTAEYLPDGSGHLSPTALSTKSGQNPRLYKDDTDLVDLKQELEASGERHRRSPSRSLSVPNRPRPLQPPQRPPPPVGPSGKKSSSDGSLSSGSHSTCSILAMAKLLPGAPQQPPKVRTGISKPYNVKQIKTTTAEEAEEAIRCLMEAKGGLQEDALKPAPTRNQTFTKPEPVPSITKSLSFQGPQAGPALVPHRPPPKVPTTKKPVPLQRAGAKMENATSREERFGQQTIQNPFGLPEPCLEDGAILSPTKITPVPKPRTSQPGKPQESRGSSDRQPPSPSTDEANALPPQNTSFIPKVPPRRKKSAPAALHLQVLQSSDNPLLRELMFNSNNNNPVCPQPQDSDVLHVASTRSALSVPKLSASQENNTVTQLALNTELITVAGQPPLLSDSSSLANSTNLLDLDTDSSCHLPSQAPSAVSAAHGPEHLKLPGHWVTFSDDEDNGALSEGFNKLLVHEQNKNSLENTNNNSEL

SEQ ID NO: 4446 - DNA, 3291 bp, Candida glabrata CBS138
  CDS (1)..(3291)
atgcttctactattgtcgaggcaaccggatagacggattgctattgtatccgatagacatgcgttaatatttaaatcagtcggtcacaacaaatcaactaatgctcctctttgtgctatcgatcttgttgagaagggacaactaaaagatcaagggtttaagaaactaacacataatgaagttcatggctttataggtatgatagaaattgaaggatatattttcttgggtgctatcactgggaaatctaaggttgcccaaccgatacctggtgaaactgtgaacaagatttatgctgtagatttcttttgcttgaatgattcaagatgggattttgttgaaattgataactctggttatccagttcttccaaatagagattccagcgacttgaaagagacattaccaagacacccatgctatgaactaaggaaattgctatctgatgggtctttcaactacagttcgaatttcgatttgacttctacactacagaagagacgctttagtgaccattcccttagtgtggataattttgaagaagaatacatgtggaattattttttaatgaatgagattataacttacagagatagactcgatatggaaaccaagaggatccttgatgatgagggttttttaacaacagtcattagaggctttgctgagacgtttgtgacatacgtgaaaaaacttaaggtaggtcttactgtaatttcaaaacagagttggaaaagagctgggacaagattcaatgctcgtggtgttgatgacgatgccaatgtggccaactttgtagaaaccgagttcattatgtactctaacgagtattgctattcatttacaataattagaggtagcatacctgttttttgggaacaagatacatccttgataaatcctaaagttcaaattacgagatcaaaggaggcaactcaacctgtatttgacaaacactttcataggttaattgaaaagtacgggccagtacatgtagttaatctgttgtctacaaaatcgtccgaaatagagctttcacagagatacaaacaacagattgtagattcaaaatcgttaaggttgaatgatgatgtcttctactcacattttgattttcataaagaaacatcacaagaggggttttctgctgttcgtagagttttgccgctgctgtcaaactccattctagaagctggttatttttcttatgatgttaaggacaaaaaagtgctttctgagcaacatggtgttttccgtgtaaattgtttggattgtttggacaggaccaatttagttcaacagactgtatcgttggccgtctttaagatattcttagaagattttcaaatcattggacccaaaagttttattgatgaagaggattttgctattaagcacaacaccttatgggcagatcatggtgatcaaatttctcaaatctatactggtactaacgctttgaaatcatccttttcacgtaaaggtaaaatgtctttggctggtgtcctttctgatgctaccaaatcagttagtagaatgtatatcaacaattttatggataaaggaaagcagcagaatattgattgtttattgggtagattggctgatcagaagagtgtcgaattgtatgatccttttaacgagtatgttacaaataaattgcatgaaagagcggaggaatttaccaataactcaaatattaatatttttgttggatcatttaacgtcaacgggacatcaaagcgatcagatttgtctaaatggttgttcccaatcggagataaatttaagcctgacattgtagtattaggcctacaggaagtaatcgaattaacagctggttctattttaaatgcagattatactaaaggatcattttgggagacaatggtaagcgattgcttaaaccagtatgatgataagtacctcttactaagagtagaacaaatgtcttcattattaattgtattttttgtgaaggccgacaaggcacattatgttaagcaagttgaaggagcatctaagaaaacggggtttggtggtatgactggtaacaaaggtgctgtctctattagattcgactacggtaatacatccttctgttttgttaatgcacatcttgctgcgggtgccaataacattgacgagagaagaaatgactttgaaagtattacaaacggcactcagttcacgaggtccaagaacatctctcatcatgactccattttttggcttggcgatttgaactatagaatccaattgactaatgaggaagtgaggaaactgttagtaacacaacctgatgggtatatagataaattactgaagtatgaccaattaactcaagaaatcaatgctggtgttgtcttcaaggaatttaaagaacctacattaaaatttagaccaacttataagtatgattatgggagcgacaactatgattcttctgaaaaggcgaggacaccttcatggactgatagaatcatatataagggcgaaaacttgtatccattggcatattctgatgcacatcttctactaagtgaccataggcctgtgtatgcagcatatagggcgaaagtgactttcattgatgatgataagaagcaccgtatagttcaagctcttcataaggaatacaagattgagcatccagaagagacctctttgactaacaatcttttattggatcttgacatagagtcacgcactcaatctgaacaaactaatggatctcagacctcatcgatcaattttgaagcgcctctctcacactctcttcaatcatccacatcatcgtttgcatctttaacaccgagaaatcggaacgcacaacaagatacagaagtaagatcaagttcagcatccgtgttgagttctccaggagcaattgataaaagtgttaaacctaagttatcagcaccacctccaccagcacctagaattcagccaaagaaggagttagaggttgagtccaatggaagcagactctcttctccggctactccaaagccaactgtcttgagtccacaagtgccccctaaacgtaaggtactcccacccgggttttctgattccattgtattaacaccaaaaaattcgagtcaaagtagtgttgatgttaaagcgctatctccttctcctaagccaaaagtttcgtcacctccaatttctctgaaatctaataatgaaggagaaggcaagcgcaagattccaccagcgaaacctgaaaagaaaccagaactcgagagtttaactctagactcatggaagcctttgcaaccaaaataa

SEQ ID NO: 4447 - protein, 1096 aa, Candida glabrata CBS138
MLLLLSRQPDRRIAIVSDRHALIFKSVGHNKSTNAPLCAIDLVEKGQLKDQGFKKLTHNEVHGFIGMIEIEGYIFLGAITGKSKVAQPIPGETVNKIYAVDFFCLNDSRWDFVEIDNSGYPVLPNRDSSDLKETLPRHPCYELRKLLSDGSFNYSSNFDLTSTLQKRRFSDHSLSVDNFEEEYMWNYFLMNEIITYRDRLDMETKRILDDEGFLTTVIRGFAETFVTYVKKLKVGLTVISKQSWKRAGTRFNARGVDDDANVANFVETEFIMYSNEYCYSFTIIRGSIPVFWEQDTSLINPKVQITRSKEATQPVFDKHFHRLIEKYGPVHVVNLLSTKSSEIELSQRYKQQIVDSKSLRLNDDVFYSHFDFHKETSQEGFSAVRRVLPLLSNSILEAGYFSYDVKDKKVLSEQHGVFRVNCLDCLDRTNLVQQTVSLAVFKIFLEDFQIIGPKSFIDEEDFAIKHNTLWADHGDQISQIYTGTNALKSSFSRKGKMSLAGVLSDATKSVSRMYINNFMDKGKQQNIDCLLGRLADQKSVELYDPFNEYVTNKLHERAEEFTNNSNINIFVGSFNVNGTSKRSDLSKWLFPIGDKFKPDIVVLGLQEVIELTAGSILNADYTKGSFWETMVSDCLNQYDDKYLLLRVEQMSSLLIVFFVKADKAHYVKQVEGASKKTGFGGMTGNKGAVSIRFDYGNTSFCFVNAHLAAGANNIDERRNDFESITNGTQFTRSKNISHHDSIFWLGDLNYRIQLTNEEVRKLLVTQPDGYIDKLLKYDQLTQEINAGVVFKEFKEPTLKFRPTYKYDYGSDNYDSSEKARTPSWTDRIIYKGENLYPLAYSDAHLLLSDHRPVYAAYRAKVTFIDDDKKHRIVQALHKEYKIEHPEETSLTNNLLLDLDIESRTQSEQTNGSQTSSINFEAPLSHSLQSSTSSFASLTPRNRNAQQDTEVRSSSASVLSSPGAIDKSVKPKLSAPPPPAPRIQPKKELEVESNGSRLSSPATPKPTVLSPQVPPKRKVLPPGFSDSIVLTPKNSSQSSVDVKALSPSPKPKVSSPPISLKSNNEGEGKRKIPPAKPEKKPELESLTLDSWKPLQPK

SEQ ID NO: 4448 - DNA, 2880 bp, Candida glabrata CBS138
  CDS (1)..(2880)
atgatcattctctcaacaaaaggccataacaggagaattgctattgcgtctaactcacaggcattgctattgaaagcagaagtggcttcaactggacgtttaagctgttctgtagaagttgttccgaagaaagaatgcattgaaaagggctttgaaaaactctctgatctagagatttatgccttcattgggcttattgagatcgatggtttgttatttattggaactattacaggtaaacgggaagttgctcaaccaataccagagacatctataaatagggttcttgctgttgatttcttctgcttgaactctaatcgttgggatggctatgatatcgatgacaacgggtatccaatggatactgacaagtcaaaacctccacctaataagaatgataatgttaggcacccatgttgggctttaatgaaattactttcaaatggaagcttttactttagtaacgaatttgatttgacatcttcactacagaacagaggattctactctagtggacttaacgataacgtttacgatgaaaaatatatgtggaataacttcatgatgatacaacttattggatatagagataggctagatagtgaaacaaaagagttatttgatactgagggatttataacaagcattatccggggctactgtgaaaccgcaataacatacattaatgattttaaagttggcatgaccataatatctcgcgaaagcttcaagaggacaggctataaaaatcgtgtaaggggaactaatgatgacggagaaacagctgattttattgaaacagagtttattatgtattctgggtcattctgctatgcatatacacaaattagaggtagcgtgccattgttttgggaacagaaagagtactctactaatcctaagattcatataactagggctttagaggctactaaacctgtttttgagcgccatatgactgcactccttaacacttacggtcatatgagaatagtcaacctattatcaactaaatcagatgaatcagagctaaatgaaaaatttcatgagcttttgtccctgtatccggagagctgcgaaataattgacttcgacttaaagagagaatacattcaagatggtattatagctacaaaacgtctcatccccatggttttaaaattcgttgagcaagatggatattattcttattatatatcaaaacatagaaccctctcagaacagcaagggatattcagaacaaattgcctagattgccttggaagaacgaatttagctcagcaaataatttctatgacagcatttaggacatttcttgaagattctcaaattataaaatgcagtgactacattgaagataaggagttttttttgactcacaataaaatttgggaagataatggccttgaacttgctaaaatacacacaggaaatactaatgataacaacattgttcaaaagaaaagcaaattatcgttgtccagtagattctctagtgtcaaaaattctgtgaatagaaaatacttcaaagtatttactgaagaaatagaactcgacacaactgatttgcttttgggaagaaaggatgaccaatatcctgttgaaatttttgatctgctgacagagtttgttaataatggtttgagacaacgaatttcagaatattctagttatagacaggttagcatattcgtcggatcttataatgcatctggcaaagttatagacgatgacttaactaaatggctattcccaatagaagagaaattcaaagcagatattgttgttataggactgcaagaggtagtcgaaatgtcagcaagatctatattgaatgctgatgaatctaaaggtggtatgtgggaggaaactattcggacctatctaggattttatggtgatagttatctattactaagaatagaacatatgacatctctcactttattggtgtttgctaaaaaaggaatgatagacttagtaaaaaatgtggaaggaacttataaaagaaccggatttggaggaatagccgccaataaaggagctgctgcatgtagtttaaaggttggcgaatcgagcttttgctttgttaattgccatttagcggccggtgaatctaatgtggatgaccggaaaaatgattatgtatcaataaaggatggactgaaattttctgttggtaagactttggatgaccatgacaatatcttttggtttggtgacatgaactacagggttactatgccaaatgaaaatgtcagagatgaacttatccagaagaaggatggctatttagaaaatttactaatgcatgatcagctaactcaggaaatatgctcggggacagtatttcatggctataaagagcctgaaatcaggtttaatccgacctacaaatatgatattggtaccgaattatatgatacctcagataaggaacgaacaccttcttggactgatagaatattatacaaaggtagcaatatacaagtattatcctactccgatgtcgatctcctttatagcgatcacaagccgatatatggtgcctatagggtgaaagtactgaccgtggactcattaaagagacaagttatcaaggagggattgcataaggagtttgagaatttagataatataaatcatttgtcaattgatgatgatgtgaattcttctgtgtctagcctgtcagtgtcatcctcacagaaaaccacatcaagaagcctttcagttaagagaaatagttctggatcaatacaaagaagaccacctcctatggagtctcctccttttaatgcttcttcaacagtaacaaagaagaactcattcaaaagacctcccccaccttcaattagtagtacaaattcttcgcactcttag

SEQ ID NO: 4449 - protein, 959 aa, Candida glabrata CBS138
MIILSTKGHNRRIAIASNSQALLLKAEVASTGRLSCSVEVVPKKECIEKGFEKLSDLEIYAFIGLIEIDGLLFIGTITGKREVAQPIPETSINRVLAVDFFCLNSNRWDGYDIDDNGYPMDTDKSKPPPNKNDNVRHPCWALMKLLSNGSFYFSNEFDLTSSLQNRGFYSSGLNDNVYDEKYMWNNFMMIQLIGYRDRLDSETKELFDTEGFITSIIRGYCETAITYINDFKVGMTIISRESFKRTGYKNRVRGTNDDGETADFIETEFIMYSGSFCYAYTQIRGSVPLFWEQKEYSTNPKIHITRALEATKPVFERHMTALLNTYGHMRIVNLLSTKSDESELNEKFHELLSLYPESCEIIDFDLKREYIQDGIIATKRLIPMVLKFVEQDGYYSYYISKHRTLSEQQGIFRTNCLDCLGRTNLAQQIISMTAFRTFLEDSQIIKCSDYIEDKEFFLTHNKIWEDNGLELAKIHTGNTNDNNIVQKKSKLSLSSRFSSVKNSVNRKYFKVFTEEIELDTTDLLLGRKDDQYPVEIFDLLTEFVNNGLRQRISEYSSYRQVSIFVGSYNASGKVIDDDLTKWLFPIEEKFKADIVVIGLQEVVEMSARSILNADESKGGMWEETIRTYLGFYGDSYLLLRIEHMTSLTLLVFAKKGMIDLVKNVEGTYKRTGFGGIAANKGAAACSLKVGESSFCFVNCHLAAGESNVDDRKNDYVSIKDGLKFSVGKTLDDHDNIFWFGDMNYRVTMPNENVRDELIQKKDGYLENLLMHDQLTQEICSGTVFHGYKEPEIRFNPTYKYDIGTELYDTSDKERTPSWTDRILYKGSNIQVLSYSDVDLLYSDHKPIYGAYRVKVLTVDSLKRQVIKEGLHKEFENLDNINHLSIDDDVNSSVSSLSVSSSQKTTSRSLSVKRNSSGSIQRRPPPMESPPFNASSTVTKKNSFKRPPPPSISSTNSSHS

SEQ ID NO: 4450 - DNA, 2856 bp, Candida glabrata CBS138
  CDS (1)..(2856)
atgagaatatttgttgggagaaatcccaggtctgtggtgttatcttctgaaagttatagtctaaaatttgaaagactctatgatcgatctaatcaaactcaaggcaatgtgcaagcccaacaaggccaaccaaatcaaataaaagcacccacagtttcgattaaaaacgtcagtgctagtgaattggtcaaagatggctatagagaattgagagcactacgtttgaatggcctactaggtttacttacaatcaatggtgatgtctacgtagtagtagttggtggggtacaaagtatagggtatcctagatggcacttggatgatagctcaaaaatcacaccagagcaatcaattaacaaaatattggaggttgatttcatcagcttagatacagagatttatgatcatttgttttttgaccggtcagagcagaattttgacaagctactgcatgaacatccctgtggtgtctacaaaagactcttcgctgacggttcattttattataccaaagattatgatttgacgaatgctgtgaagtcccctggtcttacccataacttggattatgcgatagataattttgatacatctttcatatggaatgcaaatttaattggtgaaattatcaattggagaggaaggctatcgatgaaagagaagcaggcttttgataacgctccttttttgatgttcgttattaggggcttttgcaaaacatccatagtcaatgaccctgatttaacagctacagtaactgttctatcaagagtttctacagaaggtcacaagtctatatccgattcagaaggtatgcacgaggactcgagagtttccaccattatcgaaactgaaactattgtaacaactgatagttttattctatcatacacacaaattgcagggaatattccactattttacgaaattattgatggacaactactttccggtaaaaagctgaagcttctaaaacaacctggtgaggggcaaaacgagtttaacaagcattttgacacactagaatcaaaatttggtattgtcagtgttgttaatttggttaaatctaggagcgattcacaagaaaccttggcatctatttacaagcaatattcggacaccagaggaataaaaataagcaatattccgtgtggttcacaaacactaaataaatctcctcataaagttttatatagtctgaaacaagacatatatgagtgtggagcttttgcatataatataaaaaagggaatttattttggtaaacaaaccggtgtaataagaattagtgcagcagacccgattgaaaaacctattctcttagaaaaactgataagtaaagaagtgttggaactagctactaaggaactagatgggtttagtataacttctccattgcttgaagtgcatgacaaattgtggtcagaaaatcatttctggttagaaagagtgtatgcgaaaaatcagaaaaattataataaatctgcaaaaatatatttgaaactgttttcatcacatgtaaaattattcgatccagttcatttttatatttcccaatacttgagacaatttaggagcagttttacacatatgaaggatataaaagtatttgcagggacctttaatgtcagcggcaaattgtctaaggatgatatttctcaatggatctttcctaatggtgtaaccacagaagaagactttgcagatgtgtatgtatttggtttagaagaagttgtagagctaactccaggacatatgctggcaatcgatccgtatattaaacaattctgggaaaaaaaattattggataccatcaattattatgataaagattctagctatactaaagtttggagtagtcagttgggtggtgttttattgattttattgatgaaatccagtgaatcactaaaggttaagcatgtcgagggagatgtcaagaaaacaggatttggtggtatcacatctaataaaggcgcagtagctgttagtttcaattactctgcaacaaggttctgtgtcctggtttcgcatttggcagcaggtctggagaatgtggaacagagacataacgactataaaatgatatcgaaaaacataagattctcacgaggtctaagaatcaaagatcatgatgcaattatatggatgggtgactttaactataggatattgatgtctaatgaggaagtacgtaagcttattgctttaaaggattataagagtctatttgaaaaggatcagctgaaccagcaaatgatagcaggtgaatcatttccctactttcacgagatgccaattgagttccctcctacctataaatttgatccaggaacaaggcaatacgatactagtgaaaaattaagaattcctgcttggactgatagaattttaggcaggggtgatgtcttgagacaactaacctatacttatgccccagatgttttattttctgatcatcgcccagtctcagctgtcttttctgcgaatgttactgtggtggatgagaaaaagaaagctgagttatcgtcagttatacataccaagttaatggagcggcttgaaggatgtgatgaggatgaacgcatagaaattctgaatgatggtaatttcaaactcaatgaacttgatgatgagatatctaatataaccaatatgaatgcaaaaccagaacaaaaacgggcaagaaagctaccaccaccaagttcagagattaggaaatggtgggtaggaaacggaaaacaagtcaaggttttcctagatactgatcctgaagagtttatgttgaatcctgaacacactcccaatccatttgattctaatgatacaagtccgttgtttgtacctaggtcatag

SEQ ID NO: 4451 - protein, 951 aa, Candida glabrata CBS138
MRIFVGRNPRSVVLSSESYSLKFERLYDRSNQTQGNVQAQQGQPNQIKAPTVSIKNVSASELVKDGYRELRALRLNGLLGLLTINGDVYVVVVGGVQSIGYPRWHLDDSSKITPEQSINKILEVDFISLDTEIYDHLFFDRSEQNFDKLLHEHPCGVYKRLFADGSFYYTKDYDLTNAVKSPGLTHNLDYAIDNFDTSFIWNANLIGEIINWRGRLSMKEKQAFDNAPFLMFVIRGFCKTSIVNDPDLTATVTVLSRVSTEGHKSISDSEGMHEDSRVSTIIETETIVTTDSFILSYTQIAGNIPLFYEIIDGQLLSGKKLKLLKQPGEGQNEFNKHFDTLESKFGIVSVVNLVKSRSDSQETLASIYKQYSDTRGIKISNIPCGSQTLNKSPHKVLYSLKQDIYECGAFAYNIKKGIYFGKQTGVIRISAADPIEKPILLEKLISKEVLELATKELDGFSITSPLLEVHDKLWSENHFWLERVYAKNQKNYNKSAKIYLKLFSSHVKLFDPVHFYISQYLRQFRSSFTHMKDIKVFAGTFNVSGKLSKDDISQWIFPNGVTTEEDFADVYVFGLEEVVELTPGHMLAIDPYIKQFWEKKLLDTINYYDKDSSYTKVWSSQLGGVLLILLMKSSESLKVKHVEGDVKKTGFGGITSNKGAVAVSFNYSATRFCVLVSHLAAGLENVEQRHNDYKMISKNIRFSRGLRIKDHDAIIWMGDFNYRILMSNEEVRKLIALKDYKSLFEKDQLNQQMIAGESFPYFHEMPIEFPPTYKFDPGTRQYDTSEKLRIPAWTDRILGRGDVLRQLTYTYAPDVLFSDHRPVSAVFSANVTVVDEKKKAELSSVIHTKLMERLEGCDEDERIEILNDGNFKLNELDDEISNITNMNAKPEQKRARKLPPPSSEIRKWWVGNGKQVKVFLDTDPEEFMLNPEHTPNPFDSNDTSPLFVPRS

SEQ ID NO: 4452 - DNA, 2826 bp, Kluyveromyces lactis NRRL Y-1140
  CDS (1)..(2826)
atgaaagtatatctacggaaaagtcctagagctattgctctagtttcgaatggatatgtgcttatttttgagaaaagacaaaatagtacgtcatcattcctgaagggcggttcacctaaggtcacagtgcaatcagtgttagaaagcgcttttgatacggagccatacacacaattgaaccacacaacatttactgcattgttcggattgatcactgttaagggtcaagtgtttattgggattatcacaagtaacaaaaaggtcggatctcccagatggaaactaaatgagcaggataaggtaatagaggaggaaaccatctatcaaatattgaacattaatttctattgcatagacagtgataaatacgactcaatgtttcaagatctctctgatataggctatgaaagacagttgactgaacatccatgtgggcatctaaaaatgcttatcagtgatgggtcattttattattccaatgattttgatatcactaacagtttacaagagagaggattggtgcatagaattgagtataccatagataaccaggatcagcgttatgtctggaattataaccaaatttccgaaatcgtacagctgcgatctagaatcgcagttcaagagcgaccgtattttgattcaggatcctttctggtattcctagtaagaggattttgtcaaacgataactgatggtatatcatcatcctgcactctaatatcgagaatatcaacggaaggtatgaataatctatcagaattcaagggaattgatcagagcggaaaggtttctaattttgtcgaaacggaaatcatagttcaaacgagacgaaacgtcttttcttatacaatgactggtggtgatataccattgaattgggaactagtagaaggtcaattcctccatggtaaaaaaccgaagttgttatcaaaggcaagcactgtacaaccttcttttgacctccattttgacgaattaatgtcgaagtacggtgttgtcagcatagtcaatgtttcgaaaccaaagaacgatgcttacgaagcaatgataaacacttaccaaaaatgcgcttcatcaaagggtattgatttaactttgatagaagactctaccagtgcgttgaacagaattccgcacaggataatatatcttttacaacaaaagatatacgagttcggatcgtttgcatacgatatggataagaaaatttacgtcggtaaacagactggtgtcttcaggattagtgccgtgaatcttttcaagaagctaaatattgtggagaaagttatcagcgccgacgtattggaattgaccatcaatgaattggaagagaaagacatttcttcagacttttggaaatcgcatgactctttatggaaaagcaacgatttctggttagagaggcttaatagcaagcactccaagaatccttctaaatataagaagatttaccgcggtctttttgatccaagtgcaatcgttgcgttatatgatccattgcatatatatgtgaccagatttctaagacaaagaagacacgaatatacgttcgaaaaggaaatatccatctttgcgggaacatttaatgtgaatgggaaactttcgaaagagaaactcgagggatggttaaaacctgaaaacgagtcccctgatctatatgtcattggtttggaagagatagtcgagttatcacctggccacatgctcgccacagacccttacatcaagactttctgggaaaagaaacttctgagtgagatcaactcctataatgacaagaagtatcatgctgtgtttaacagtcagctaggtgggctcgctttattggtatttacagatgaggagaacaaatcgcggatcaagcatatagagggtgatatgaagaaaactggttttggcggtatctcttcgaataaaggagctattgcagtgcacttgtggttgtctaacactaagttttgcttcgttgtatcgcatctttctgcgggattagagaatgttgaacaaagacacaatgactataagtcaattgctaaacacataagattttccaagggtacaagaatcaaagatcatgacggtgttatttggatgggtgatttcaactttcgtattcttctttccaacgatgatgtacgccaggcaatcatagataagaattaccacaggctatttgaaaaggatcagttaaaccagcaaatgatatctggggagtcttttccatttttcgatgagatggaaattacgtttccaccgacgtataagttcaatcctggtaccgatgtgtacgatactagtgaaaaaatgagaatacctgcatggactgatagaatcttaagtaggggtgagatacttagacaggaactttatggcagtgcagaggatatcgtattttctgaccatagacctgtttacggtttatttacggccaagttaacagtcatcgatgaaccaaagaaggctaagttagtggcaagcatcaaagacagtataaatgaaaccttaaaagacctaacagaagaagaaaaacttgcatatttggaagagaatgacattttggcatcaaaagaagaatacagttcatccaatccagcaactgcaaacgaaccaaagaaaaacaaaaagctaccaccacccagttctgaccagcacaaatggtgggttggaaacggaaaacaggcaaaagtttcattgcaagttaatccaaagaagtatatactaaacccggaaaggagcagcaatccctttcaacagtcagaactgccggttttcatggaaagaggccaactttcggaaagtgatctccaaaataagatggaatga

SEQ ID NO: 4453 - protein, 941 aa, Kluyveromyces lactis NRRL Y-1140
MKVYLRKSPRAIALVSNGYVLIFEKRQNSTSSFLKGGSPKVTVQSVLESAFDTEPYTQLNHTTFTALFGLITVKGQVFIGIITSNKKVGSPRWKLNEQDKVIEEETIYQILNINFYCIDSDKYDSMFQDLSDIGYERQLTEHPCGHLKMLISDGSFYYSNDFDITNSLQERGLVHRIEYTIDNQDQRYVWNYNQISEIVQLRSRIAVQERPYFDSGSFLVFLVRGFCQTITDGISSSCTLISRISTEGMNNLSEFKGIDQSGKVSNFVETEIIVQTRRNVFSYTMTGGDIPLNWELVEGQFLHGKKPKLLSKASTVQPSFDLHFDELMSKYGVVSIVNVSKPKNDAYEAMINTYQKCASSKGIDLTLIEDSTSALNRIPHRIIYLLQQKIYEFGSFAYDMDKKIYVGKQTGVFRISAVNLFKKLNIVEKVISADVLELTINELEEKDISSDFWKSHDSLWKSNDFWLERLNSKHSKNPSKYKKIYRGLFDPSAIVALYDPLHIYVTRFLRQRRHEYTFEKEISIFAGTFNVNGKLSKEKLEGWLKPENESPDLYVIGLEEIVELSPGHMLATDPYIKTFWEKKLLSEINSYNDKKYHAVFNSQLGGLALLVFTDEENKSRIKHIEGDMKKTGFGGISSNKGAIAVHLWLSNTKFCFVVSHLSAGLENVEQRHNDYKSIAKHIRFSKGTRIKDHDGVIWMGDFNFRILLSNDDVRQAIIDKNYHRLFEKDQLNQQMISGESFPFFDEMEITFPPTYKFNPGTDVYDTSEKMRIPAWTDRILSRGEILRQELYGSAEDIVFSDHRPVYGLFTAKLTVIDEPKKAKLVASIKDSINETLKDLTEEEKLAYLEENDILASKEEYSSSNPATANEPKKNKKLPPPSSDQHKWWVGNGKQAKVSLQVNPKKYILNPERSSNPFQQSELPVFMERGQLSESDLQNKME

SEQ ID NO: 4454 - DNA, 3282 bp, Kluyveromyces lactis NRRL Y-1140
  CDS (1)..(3282)
atgcagattttagtacagcaaggtcccgagagagtaatagcactcgcttctgaaagctttgcattgttgttgaaatatgtcccaccgaaggataagacacatccggtgtgtaccattgagatggttcccaagagctatttgaagaagcagaaatttgaaaaattgagcaagcttgaaatccatggcttcattgggttaattgagttggaaggaagtattttcataggtacaattactggaaaatctgaggttgccagcccaatcccgggagaaacagtcaacaaaatctatggagttgatttcttctgtctagatagtaatcgatgggatttcgttgagttcgattctaacggatttccaatcataccagaagaagaatatgcaagctcttccaatcaacagcaacagcacccgtgccatgatttgaagaaattactatcgaacggatcattctattatagttccgatttcgatctaacatctttactacagtctagaggtctcaaccagcattcgttatccttcgataattaccaagaagagtacatgtggaattcctttttaatgcaagaaatcatcacatttagaaaccatttggacgataaagccaagcaaataatggatgatgaaggattcttaacgacagtgatcagaggttttgctgaaactttcccatcatatatcggcagaatgcccgtcaatttaactatgatatcaaaacaatcttggaaaagagcgggaacaagatttaatgttagaggtattgatgacgaggcaaatgtagcaaacttttgtgaaactgaatttattatgtattcagaggaatactgctttgctgtgacagaaattagaggaagtgtacctgttttctgggaacaagatacagctctaatcaatccaaaggttacaattaccagatctgtcgaggcaacgcaatcgaccttcgatgagcactttaagagattaatacaaaaatacggccctgttcatgtagtaaatttattatcaacgaaatcttccgaaatagaactaacgagacgatacagagagcatttcgagcgttcaaaaagcctcaaattaaactctgaaatttttttaactgagtttgactttcacaaagagaccaaagaagaaggatttgctgctgcatcaaaaatcatgcctacattagagcgctctattctggaaaatggttatttctcatacgatgttaaagagaaaaaacaattgtctgagcaaaatggtgttttcagaacaaactgtttagattgcttagacagaaccaatctaattcagcagtttatttcaagatatacatttatcttgtttttagaagatttccaattaatcaaaccaaaacttccattaatcgaagaatatgattggtatcaaaaacacaataatatctgggctgatcacggtgatgcagtttctcaaatttatacaggaacgaatgcattaaaatcatcattttcaagaaaaggtaaaatgtcatttgctggtgctctctctgatgcaacaaagtccgtcagtagaatgtacatcaataactttatggacaaaaataaacagatgaacatcgacgcattgttgggccgtctaccacatcagcattctgtcgaattattcgatccgatcaatgactacgttaatgaagaacttagaaaacaagaagcacagtttactaccactagtaacattaagatcttatgtggcacattcaacgtaaatggactcaccaagtctgtagatttatcagaatggctataccctattggcaaaagatatcttcctgacattgttgtactgggtttgcaagaagtaattgaattgaatgcgtcttcgattttgaacgttgatacttcaaagtcacaattttggaaagacttagttcatagttgcttgaacaaacatgaaaattatatcatgttgagagccgagcaaatgtcatctttgattatattattctttgtcaaagctgacaaagttggaaatgtaaaaagagtagagggttcttcaaagaaaacaggtctaggaggaatgaccggtaacaaaggtgctgttgccattagattcgactatggaagtacatctttctgcttcatcaatgctcatttatctgctggcgtgaataatgtagaggaacgtagaagtgattatgagagtataaccaagggaattagtttcagcaggtcaaaaagaattgatcaccataattccactttctggctcggtgatttaaattataggattgagttgccaaacgaaaaggtaaggagtatcctctcattacctgataatgctgatttggataaattgctggagcatgaccagctgacatcggaaatggcttcagaatctgtcttcaaaggtttcatggaaccatcaattcagtttagaccaacgtacaagtacgatcatggtacagacagatacgatacttccgaaaaagctagaattccatcatggacggatagaatcttatacaaaggtgaaaacttacaaccaatggcgtatagtgatgccaaattgaatttgagtgatcacaaacctgtttatgcagcttacaaagccaaggtcaaatttattgacgaagaatcaaagatacaaatgaccaagaaactatatatggactacaaacaatcacatcctcaagattccggttctatcaatagtgcattgcttgatcttgagctagttgacgcgaaggaggagcctaaaccggtgatttcgacagaaatgagtctgttagatctggatctacatttcgaatctgccggagtgagcacaagccgggcgatgccgccaaaaccactatcaccttcttcaagatcttcatcctcaatgagtagtctatctttgactagtccaccagttggaccaactgccagaaggggcgataccgtaagaaatggtgctcaactaacaaaagaaccggaagccgtaagaagagtgcctccaccccctccacacaagaaaccagtcataacattggattctcctgttcgaacgccgtccccctcatcaatatccacgtcagcttcggatcgaaaaatcaccctggttccaccacctccaccttccagaaagcctaaccctccacctggtttctctgatgtcatattaactccaaagggatccactcctgagcctgtagcatcacctccagtacccatagatactgccgaatcatctgcaaagaaatcaaaacctcatgttccttcaaagaaacctgaactagcaatgtccctggattcttggaaaccacttcaaccaaaatag

SEQ ID NO: 4455 - protein, 1093 aa, Kluyveromyces lactis NRRL Y-1140
MQILVQQGPERVIALASESFALLLKYVPPKDKTHPVCTIEMVPKSYLKKQKFEKLSKLEIHGFIGLIELEGSIFIGTITGKSEVASPIPGETVNKIYGVDFFCLDSNRWDFVEFDSNGFPIIPEEEYASSSNQQQQHPCHDLKKLLSNGSFYYSSDFDLTSLLQSRGLNQHSLSFDNYQEEYMWNSFLMQEIITFRNHLDDKAKQIMDDEGFLTTVIRGFAETFPSYIGRMPVNLTMISKQSWKRAGTRFNVRGIDDEANVANFCETEFIMYSEEYCFAVTEIRGSVPVFWEQDTALINPKVTITRSVEATQSTFDEHFKRLIQKYGPVHVVNLLSTKSSEIELTRRYREHFERSKSLKLNSEIFLTEFDFHKETKEEGFAAASKIMPTLERSILENGYFSYDVKEKKQLSEQNGVFRTNCLDCLDRTNLIQQFISRYTFILFLEDFQLIKPKLPLIEEYDWYQKHNNIWADHGDAVSQIYTGTNALKSSFSRKGKMSFAGALSDATKSVSRMYINNFMDKNKQMNIDALLGRLPHQHSVELFDPINDYVNEELRKQEAQFTTTSNIKILCGTFNVNGLTKSVDLSEWLYPIGKRYLPDIVVLGLQEVIELNASSILNVDTSKSQFWKDLVHSCLNKHENYIMLRAEQMSSLIILFFVKADKVGNVKRVEGSSKKTGLGGMTGNKGAVAIRFDYGSTSFCFINAHLSAGVNNVEERRSDYESITKGISFSRSKRIDHHNSTFWLGDLNYRIELPNEKVRSILSLPDNADLDKLLEHDQLTSEMASESVFKGFMEPSIQFRPTYKYDHGTDRYDTSEKARIPSWTDRILYKGENLQPMAYSDAKLNLSDHKPVYAAYKAKVKFIDEESKIQMTKKLYMDYKQSHPQDSGSINSALLDLELVDAKEEPKPVISTEMSLLDLDLHFESAGVSTSRAMPPKPLSPSSRSSSSMSSLSLTSPPVGPTARRGDTVRNGAQLTKEPEAVRRVPPPPPHKKPVITLDSPVRTPSPSSISTSASDRKITLVPPPPPSRKPNPPPGFSDVILTPKGSTPEPVASPPVPIDTAESSAKKSKPHVPSKKPELAMSLDSWKPLQPK

SEQ ID NO: 4456 - DNA, 3459 bp, Debaryomyces hansenii CBS767
  CDS (1)..(3459)
atgaaggtagtttacaaagaaaatccacgtacaatttgtatacgttcggatacacattcgctatgctttgaggaactaaataccaatagatccaaacatttgctcaaggaatcggccgtcgctgttgaattattgcccaacgaccagataaccaaggagaacggatttaagccattattgaaaaaagaagtatttggatgtttgggtctaataagcattgataagaaggcatttttggcggtaattacgggagcgatgaccgacgtggcccatcccgtggtttatgagtcggtagataagatttattcggtggattttgtctcattgtcgagtgatgaatgggactttgttagttttgatacgtcgggacttccattggcttcaactgcagacgaatttgaggcggaaaataattatgccagagagccacatccatgtcatgagatgcagaagcttttgtcgaacgggtcgttctactattccaatgattttgatttgacgtcgttgatacaaaatagaggtatccagaacttgagactacaccacgaaaaggagggtgtgagaaagatcaatctcgaacattacctggaagaatacatgtggaattcatttatgatgtgcgagatattcgaattcaggtctaaattggactcgtacgtgcaatctaccttggacgacaataggtttttgactacggttatcaggggttttgccaaaacggtcaatttgaactcatcgggtgaaagtatgaccatcatatccaaacaatcgtggaaacgggctgggactaggttcaatgcccgtggtatagatgataacggtaatgtggccaattttgtggaaactgagttcattttcaatcagccgacccgtgaacaaataacatcgtttactcagattagggggtctgtacccacattttgggaacaggacctgactttaattaatccaaagattactcttacaaggtctcttgaggcaacacagccaatttttaataagcattttaccgaaatatgtcaaaagtacggtgtttgccatattataaatttgctatcaaagactaaacctgctgaggttcaagtcctgcgccgttataaacagttatatactgggtccaatcgccgggatgagatggcattcagtgaatttgatttccatcatgaaacaaagcaactgagtggtggttttgcgggagcaacgaaaattttgcctatgctttatgattctttagagaattttggatggtttgtttacgattctgaccaaggtgaaacagtcaccaggcaagatggcgtctttcggactaattgcttggattgtttggaccgtaccaatttgattcaacaagttatttgtcaaagcattttggaacataccttgcagaatcaacgcggtagtcgtgagggcaatcatgagcgttacgctgtggaagacctcgttaacaagcataacaccctttgggcggatcatggtgatgctatatcacaaatttataccggaacaaacgctctaaaatcttctttctcaagatcaggtaagatgaattttgcaggagctctttccgatgttacaaaatccgtctctagaatgtaccagaacacatttttggactctaaaaagcaatcgactatggatttattattgggttatgatgcacaaaattccttacctgttagaatatatgatccaatcaacgaatttgttcaagaaaagttgcatggcgaagcggggtcatttacaacatggaacgatataaacatatttgttggtacttttaatgtgaatgctgctgtaccccatggtaaagttgacttggccagctttctcttcccaccagaaaacactgaaattgaacttccagatgtatatgcgattggtttacaagaggtaatagagttaaatgcgggttcaattttaagttctgactcgtccaaaccatccttatgggcaaaattattggagacccaattaaattctcaaggagaaccttacttactattgagaaccgaatcaattgcgtcaatgtcgcttttcttgttcgttaagaagagtcaagtccataaagtaacacaggtggctggttcatccaagaagactggtttaggtggtattgccgctaacaaaggagcttgtggtgtgaggttcgagtttggactgacctcatttgtattggttacttctcatttggcggcaggtacaacagctctagttgaaagatataatgattatatgactattatgtctggcttaacttttacaagaaattttacaattaaagaccatgaccatattatatggtttggtgatttgaattatcgtgtatcgttgcctaatgaccaatgtaggtactttattgaaaatggagcatttgatgaactaacggcagtggaccaattaaatcaagaaatgactcgtaaaggggcattctatggtttcaaagaaggagctattaagttctaccctacatacaaatttgataagggaacatcgaactatgactcgtccgaaaaacaaagaataccatcatggacagatagagtcttgtacatgacttccaagggagtcgatccaataaaacaattaaattataattcatgcatgaacatagttgtaagtgaccacaaacccgtatattctacactcaaaagcagagtaaaatttgttgatgaagataagaaaatcaagctttcaaagcatttatacgatatttacaagaaggagcatggcgatataggtgaagtttcactattggaattatcagacagcatgaccctgtcgtcaaaaccttcgtcgttaaattcagattcaggcttttctatggataccttatcagaaatgaatcttcttgatgatgctgatacagatgctccaaaattgccagcacgtcctatggaacgtacaaacacattaccgaagagaattcctcccccacgaatgagcagaaaacaaatctccctggaccaaacaaaaacagcttcaaatgcattcccaaggaaactaccgccaacaccatataaccaagaagtgctcgttccaagcccttcaaagtctatatcaaatccattgctgcgttctccaactgcatctacgtcagcatccacgccaccacctcctccaccatcaagaaaagtgggtaatccagtgaagcctccaattgggttctctagtactccacttatctccagtagatcgaattctgctactccatccagaggctcacctatttcaacaccatctaccactggaaatgagcagaatcaagaacatccaaagctcaatcctattgttccaaccaaaccagcgtcgttagcgtcatctaaaaccaagtcgtcatcgctggaagctacatctgcatcttatattccaaattcaacacctgctacttcggcaagaagtacatcttctgacggcaatggcaagctgatgtcggaatggaaaccattgatgcctagttag

SEQ ID NO: 4457 - protein, 1152 aa, Debaryomyces hansenii CBS767
MKVVYKENPRTICIRSDTHSLCFEELNTNRSKHLLKESAVAVELLPNDQITKENGFKPLLKKEVFGCLGLISIDKKAFLAVITGAMTDVAHPVVYESVDKIYSVDFVSLSSDEWDFVSFDTSGLPLASTADEFEAENNYAREPHPCHEMQKLLSNGSFYYSNDFDLTSLIQNRGIQNLRLHHEKEGVRKINLEHYLEEYMWNSFMMCEIFEFRSKLDSYVQSTLDDNRFLTTVIRGFAKTVNLNSSGESMTIISKQSWKRAGTRFNARGIDDNGNVANFVETEFIFNQPTREQITSFTQIRGSVPTFWEQDLTLINPKITLTRSLEATQPIFNKHFTEICQKYGVCHIINLLSKTKPAEVQVLRRYKQLYTGSNRRDEMAFSEFDFHHETKQLSGGFAGATKILPMLYDSLENFGWFVYDSDQGETVTRQDGVFRTNCLDCLDRTNLIQQVICQSILEHTLQNQRGSREGNHERYAVEDLVNKHNTLWADHGDAISQIYTGTNALKSSFSRSGKMNFAGALSDVTKSVSRMYQNTFLDSKKQSTMDLLLGYDAQNSLPVRIYDPINEFVQEKLHGEAGSFTTWNDINIFVGTFNVNAAVPHGKVDLASFLFPPENTEIELPDVYAIGLQEVIELNAGSILSSDSSKPSLWAKLLETQLNSQGEPYLLLRTESIASMSLFLFVKKSQVHKVTQVAGSSKKTGLGGIAANKGACGVRFEFGLTSFVLVTSHLAAGTTALVERYNDYMTIMSGLTFTRNFTIKDHDHIIWFGDLNYRVSLPNDQCRYFIENGAFDELTAVDQLNQEMTRKGAFYGFKEGAIKFYPTYKFDKGTSNYDSSEKQRIPSWTDRVLYMTSKGVDPIKQLNYNSCMNIVVSDHKPVYSTLKSRVKFVDEDKKIKLSKHLYDIYKKEHGDIGEVSLLELSDSMTLSSKPSSLNSDSGFSMDTLSEMNLLDDADTDAPKLPARPMERTNTLPKRIPPPRMSRKQISLDQTKTASNAFPRKLPPTPYNQEVLVPSPSKSISNPLLRSPTASTSASTPPPPPPSRKVGNPVKPPIGFSSTPLISSRSNSATPSRGSPISTPSTTGNEQNQEHPKLNPIVPTKPASLASSKTKSSSLEATSASYIPNSTPATSARSTSSDGNGKLMSEWKPLMPS

SEQ ID NO: 4458 - DNA, 3132 bp, Debaryomyces hansenii CBS767
  CDS (1)..(3132)
atgagattgtacctcaatgagagaccaaggactcttataattgttagtaataactatgcgttgattattagacatcctttccctacctataaaaattcaaaccatcaccacatccaccaccatcatatacatttgcatcatcaccatggaagtacatcaggcaaaggggttgattctaaaggaagattatcatctaataaggttattgttgaatttgttagaaaagatatgttgaagttgggtaattataaagatataactccaaataagtctaagctgaacagacagcttcttgggtttcttggacttttgaatgtcaataacaatatccacctaggatttattactggtcagacgaagattgcatcgccgatgataggagaagatattcaaagaatcacgggtgtagatttttactgtttaaataatgatgaatatgactatttaattaataggtcggtgatcaatgaagaggacattcaaaatctccatctgcaatcaccccaatatgaccctgaaaaggtttcttcgggatatcctgctgcatcagtaagaaaattgcttgagctgggtgcattttattactccaaagatttcgatataacctcgaatgttcaagaaagaggtttccgagatataaatgacccaacattcacgttaatggcagattccccttactttaaaagatttatgtggaattcgtacatgatctcagaatttattgagtttcgtaatagattgtcgcctcctgataggttacaatttgacttgactgggtttttaacgactataacaagagggtttgcccaaactgttaatacatgtataacaccaaatgaagaagcattgttgacaatcatttcaaagcaatcgtgtatgaaaaatggtcccttattcggtgattggggtgttgatgataaaggagatgtttcgaactttgttgaaactgaaatgattatatacaccaagaagatttgcttttcctacgttttagtaagaggaaatgtgccgacgttttgggaattagaaaatccgaataaaaagtcacttttatcgtccaaaaagaataagaagatttccactccaaggtcatttgaagcatcccaacatgccttcgttaggcacttcgacaaacttgttaatcagtttagtgaggtgcatatcgtcaacttgttatcttcggacggctataaaggtgaactcaatcataattataaggagcatattgattatttcaataggaacattaagaataactcctcaagtgcaaacggaaaaatgtcgttgaattacaagttaccatgtactgatttaccaataaatatagctacaataaagaaatatggttatacgccatcgaatcctcgcaatatatctgatatcttggttgattctataatcgattatggagccttgttttatgataagtcaaagaaaaacttcactggtagacaactaggagtcttccgtataaattcatttgatagtcttaaaaaggctaattttatttctaaaattataagtcaagaagttattgaattggcattccgtgatacgggaattgcagttgatcctgatatatttattaagcatgctaaattatggtctgaaaatgatgagtatttatctaaaatcacatcgagctatatttcaaattcatcaaaattacaagcatcgagtagagcatctacgaagagctcagttaaatctcatctttctaagaagtacttgagcagtgttgtcagtacaaagcccagtgaaatggcgatgctaaaattattgggtcatttacaagatcaagtagatataaaacttcataatccaatccatgactatgttacaagagaattaaataaaagggctaaggagtttagctcctacgaagatatttccatttatgcaagtacatttaacgtaaatgggctttgctacgagggagatatatctgagtggctctttcctaaaaaggaaaatattactaccaactatgatgtagtatttattggatttcaagaggttactgaattaacggctggaaaaatggtgactacagattcaagcaatagaaatttttgggaaagaaaaatcaaaagtgcgttggaagaatgtaacccaaatcataataaatatgtttcactatggtgtggccaaattggaagtatagcaatatttttattcattaatcaaaacaaaattgagaacgtaagtaacgttgaaggatcatttaaaaaaacgggattcgggggaatgggagcaaacaaaggtgcggttgcagtgagtttcaactatgccaattcagaaatttgtcttgttgcgtcacatttagctgctggtttaagtaatacggacgaaagacatcaaaactataaatctattgcaaaaggtatcaagttctcaaaaaacagaagaattcgagaccatgatgcggtaatctggttgggtgattttaattaccgagttgggttaacaaatgagcaagtaaggcctctcattgaaaagaaagaattctctaaattatttgaatatgatcaactaaacaagcagatggccagcggggaaagttttcctttctttgatgagatggaaattacatttcctccaacatataagtttgataatggtacaaaaaactacgatacatccgagaagcagagaattcctgcttggacagatagaatattaagtttatcaaggaacaagattattaaacaattgtcctatgattcaagcccagatttgatattttctgatcacagacctgttcacgcaacatttactatgtccgtcaatgttattgacgaaacaatcaaaaagaacttgtctcatgatttgtacgaaaactatagaaagagcattggtgatattaatgaatcgttaattacaagcaataatttgacattatttgatgctgagtttgatgataaggttttgccagctccaagttccgatgttatgaaatggtggcttgaaagcgggaagccagcaaagatcagtattccagaattgaatagtgataatttccatgatggtactgtcaacattatcaacccaaaattaccacataatccattcatgaaaactgatgagcctgagttcatttctaaaaaatctttgctaaatttattaaaatga

SEQ ID NO: 4459 - protein, 1043 aa, Debaryomyces hansenii CBS767
MRLYLNERPRTLIIVSNNYALIIRHPFPTYKNSNHHHIHHHHIHLHHHHGSTSGKGVDSKGRLSSNKVIVEFVRKDMLKLGNYKDITPNKSKLNRQLLGFLGLLNVNNNIHLGFITGQTKIASPMIGEDIQRITGVDFYCLNNDEYDYLINRSVINEEDIQNLHLQSPQYDPEKVSSGYPAASVRKLLELGAFYYSKDFDITSNVQERGFRDINDPTFTLMADSPYFKRFMWNSYMISEFIEFRNRLSPPDRLQFDLTGFLTTITRGFAQTVNTCITPNEEALLTIISKQSCMKNGPLFGDWGVDDKGDVSNFVETEMIIYTKKICFSYVLVRGNVPTFWELENPNKKSLLSSKKNKKISTPRSFEASQHAFVRHFDKLVNQFSEVHIVNLLSSDGYKGELNHNYKEHIDYFNRNIKNNSSSANGKMSLNYKLPCTDLPINIATIKKYGYTPSNPRNISDILVDSIIDYGALFYDKSKKNFTGRQLGVFRINSFDSLKKANFISKIISQEVIELAFRDTGIAVDPDIFIKHAKLWSENDEYLSKITSSYISNSSKLQASSRASTKSSVKSHLSKKYLSSVVSTKPSEMAMLKLLGHLQDQVDIKLHNPIHDYVTRELNKRAKEFSSYEDISIYASTFNVNGLCYEGDISEWLFPKKENITTNYDVVFIGFQEVTELTAGKMVTTDSSNRNFWERKIKSALEECNPNHNKYVSLWCGQIGSIAIFLFINQNKIENVSNVEGSFKKTGFGGMGANKGAVAVSFNYANSEICLVASHLAAGLSNTDERHQNYKSIAKGIKFSKNRRIRDHDAVIWLGDFNYRVGLTNEQVRPLIEKKEFSKLFEYDQLNKQMASGESFPFFDEMEITFPPTYKFDNGTKNYDTSEKQRIPAWTDRILSLSRNKIIKQLSYDSSPDLIFSDHRPVHATFTMSVNVIDETIKKNLSHDLYENYRKSIGDINESLITSNNLTLFDAEFDDKVLPAPSSDVMKWWLESGKPAKISIPELNSDNFHDGTVNIINPKLPHNPFMKTDEPEFISKKSLLNLLK

SEQ ID NO: 4460 - DNA, 2589 bp, Mus musculus
  CDS (1)..(2589)
atggcgttcagcaaaggatttcgaatctaccacaaattggatcccccaccgttcagcctcatagtggaaactaggcataaggaagaatgtctcatgttcgagtctggggctgtggctgtgctctcatctgcagaaaaggaggctattaaaggcacatatgccaaagtactggatgcatacggacttttgggagttttacgattaaatcttggtgataccatgctgcactatctggtcctagtcactggatgcatgtctgtggggaaaatccaagaatctgaagttttccgagttacttccactgagtttatatcattgcgagttgatgcttcagatgaggaccgcatttcggaagtacgaaaagttttgaactcgggaaacttttattttgcatggtctgcatctggagtcagcttagatctgagtctgaatgcacatcgaagcatgcaagagcacacaaccgacaataggtttttctggaatcagtctctgcatttgcatctcaagcactatggtgtgaactgcgatgactggttattacggctcatgtgtgggggagtagagattagaaccatttatgctgcccataaacaggcaaaagcttgcctcatctcaagactaagctgtgaacgagctgggacaaggttcaatgtccggggaaccaacgatgatggtcatgttgccaactttgtagagacagagcaggttatatacttagatgactgtgtctcttccttcatacaaatccgaggatctgttccattgttctgggagcaaccagggttgcaagtgggatcccatcgtgttcgtatgtcaaggggatttgaagccaatgcgcctgcctttgacaggcatttccgaacacttaaggacttatatggtaaacagatagtagtgaatctgcttgggtctaaggaaggcgagcatatgctgagcaaggctttccagagtcatttaaaagcctctgaacacgcttctgatatccacatggtgtcttttgactatcatcaaatggttaaaggaggaaaggcagaaaaactacacagtattctcaaaccacaagtccagaagtttctagattatggatttttttatttcgatggcagtgaagttcaaaggtgccagagtggtacagttcgaacaaactgcttggattgtctggatagaacaaatagtgtgcaggcattccttggcttagagatgctcgctaagcagctggaagctctgggcttggctgagaagcctcagctggtgacccgcttccaagaagttttccggtccatgtggtctgtgaatggcgactcaatcagtaaaatatatgcaggcaccggggccctggaagggaaggccaaggctggaaagttaaaagatggtgcgcgatctgtcaccagaaccatccagaataacttcttcgacagctccaagcaggaagccattgatgtcctgctcctgggaaatactctcaacagcgatttagctgacaaagcccgagcgcttctaactactggaagtttgcgtgcatcttccaaagtcttaaagaacatgtgtgagaacttctacaaatactcaaagcccaagaagatccgagtgtgtgttggcacctggaatgtgaacggcgggaagcagttccgcagcatagcgttcaagaaccagacgctcacagactggcttctggacgctcccaagttagccggcatccaggagtttcaagataagagaagtaagccaactgatatatttgcaattggctttgaagaaatggtggagctgaatgctgggaacattgtgaatgcaagcacaaccaaccagaagctgtgggcagtggagctgcagaagaccatctccagggacaacaagtatgtcctgctggcctcggagcagctggtgggtgtctgcctgtttgtctttatcagaccacagcacgctccttttatcagggatgttgcagttgatactgtgaaaactggcatgggaggtgcaactggaaacaagggcgccgttgcaattcggatgctcttccacaccaccagcctttgcttcgtctgcagccactttgctgcagggcagtcccaagtcaaagagagaaatgaagattttgtagaaatagcacgaaaactgagtttccccatgggacgaatgctcttctcccatgactatgtattttggtgtggtgatttcaactatcgaattgaccttccgaatgaagaggttaaagagctcataagacaacaaaactgggattctctgatcgctggggatcagctcatcaaccagaaaaatgcaggacagatctttagaggattcttagagggaaaagtaacgtttgctccaacctataaatatgacttgttttctgaagactatgacaccagtgagaagtgtcgcacccctgcttggacagaccgtgtcctctggagaaggaggaagtggccttttgacagatcagctgaagatttagatctcctgaatgctagtttccaagatgaaagtaaaattctttatacatggacccctggcaccttgctgcactatggaagagccgagctgaagacttctgaccataggtttaagcaacctcagtttttctaa

SEQ ID NO: 4461 - protein, 862 aa, Mus musculus
MAFSKGFRIYHKLDPPPFSLIVETRHKEECLMFESGAVAVLSSAEKEAIKGTYAKVLDAYGLLGVLRLNLGDTMLHYLVLVTGCMSVGKIQESEVFRVTSTEFISLRVDASDEDRISEVRKVLNSGNFYFAWSASGVSLDLSLNAHRSMQEHTTDNRFFWNQSLHLHLKHYGVNCDDWLLRLMCGGVEIRTIYAAHKQAKACLISRLSCERAGTRFNVRGTNDDGHVANFVETEQVIYLDDCVSSFIQIRGSVPLFWEQPGLQVGSHRVRMSRGFEANAPAFDRHFRTLKDLYGKQIVVNLLGSKEGEHMLSKAFQSHLKASEHASDIHMVSFDYHQMVKGGKAEKLHSILKPQVQKFLDYGFFYFDGSEVQRCQSGTVRTNCLDCLDRTNSVQAFLGLEMLAKQLEALGLAEKPQLVTRFQEVFRSMWSVNGDSISKIYAGTGALEGKAKAGKLKDGARSVTRTIQNNFFDSSKQEAIDVLLLGNTLNSDLADKARALLTTGSLRASSKVLKNMCENFYKYSKPKKIRVCVGTWNVNGGKQFRSIAFKNQTLTDWLLDAPKLAGIQEFQDKRSKPTDIFAIGFEEMVELNAGNIVNASTTNQKLWAVELQKTISRDNKYVLLASEQLVGVCLFVFIRPQHAPFIRDVAVDTVKTGMGGATGNKGAVAIRMLFHTTSLCFVCSHFAAGQSQVKERNEDFVEIARKLSFPMGRMLFSHDYVFWCGDFNYRIDLPNEEVKELIRQQNWDSLIAGDQLINQKNAGQIFRGFLEGKVTFAPTYKYDLFSEDYDTSEKCRTPAWTDRVLWRRRKWPFDRSAEDLDLLNASFQDESKILYTWTPGTLLHYGRAELKTSDHRFKQPQFF

SEQ ID NO: 4462 - DNA, 3186 bp, Yarrowia lipolytica CLIB99
  CDS (1)..(3186)
atgaaagtctacgtgtacgaaaaccctcgttcgctggcgctggtgtcggagaagtatgcgctggtgttccggtatgcgacgccgaccgacgacaagaaccggccccggtgcattgtggagtttgcgccgattgagaagattgatttccgcaagcaccgggcgctgtcgccgctcgattgccacggatttttgggtctcatcaacatttcaagcgacgtctttttgtgtgtgatcaccgccaagtcgctggtggcttctcctcggcctggagaaaccatcaaccgggtggtgggtgtggagttccattgtctcaacagaaacacttgggactttgtgacgctggacctcaacggttatcctattgatttgcacgaccaggccagcagttctggcatcaccgagcacccctgcacacagcttcgaaagatgctcaccaactcatccttctactactcgacggactttgatctcacgtcgtccatgcagacccgaggcactgcccagcccgccagcatgcgcaatcccgccggtcaggtcatttcaaccctcgagtcgtccgacgcctccttcctgtggaactcgtacatgatgacggagctcgtcaagttcagagacaacttgcccgactttgaacgcagcgagttggacaagtgcggctttttgaccacactgatccggggctttgccgaaacggtcaacacgcggatcggtaactacgacgagaaccccatctcgtgccgactcaccattgtgtccaaacaatcatgtcgaatggccggtacccggtttctggccagaggtatcgatgatgacggctttgtcgccaactttgtcgagacagaaacgatcctgtacacagaacgaggccaggcgcagattgtgtgcgcatttctgcaggtgcgaggctcggtgcctttcttctgggaacaggactcccagctgctcagcaacaaggtgcagatcacccggtccattgacgcggcacagccggcattcgagcgacatatggactacctgtgtaacaagtatggctccatccacgtggtcaacctgctctctcgtgaaaagtcgcacgaaaacgaactcacccagcgataccatggccatatcaagaagctcaacgaggcaggaggctcgcattccaccgaccctgcttctggatcgtctcgaggaggtcttgtggccgtgaccgactttgattttcaccacgaagtctctaagcagggctactctgctgctactcgtgttctcaaccgggtcattgacgccatggaggagtacggcttttactctgccgactcttccagtcccaatgtgactctccagaacggtgttttccgaacaaactgtctggactgtctggatcgaaccaacatgatccagcaggttatttctcgtcaggcccttcagatcttcctggatcgaaaccatctcggctgcaaccccgatttttggagcaaacataacatcttgtgggccgataacggcgatcagctgtcccagatttacgctggaaccaacgctctcaaaaccagttacactcggtccggaaagatgaacctggctggagctctggccgatgtgacaaaatccgtgggacgtctgtacatcaacaacttcaccgacaagacgaaacagaacaccacggacgttcttctcggccgactctcggaccaggagggaattctcttgtacgacccaatcaacgattttgtggtcaaggagctggagcgccgaaaactcgagttctcgtccaccaccaacatcaaggtatttgctggcaccttcaatctcaacggcgagctgtctgatgccgatctcgcgggctggttcttccctcccaagtctgcgaaggagctttctgggggcgcaggttttgatgtgcatgacgacttgccctccattgtgctcgtgggctttcaagaaatcgtccagctgacgcccggacagattctgaatgcggatccgggcaaaaaggagttctgggagaagcgtgtggaggctgttctcaacacgcgcgacgagtacgtgcttctgcggtctcaccagctggtgggaactgctctgttgctgtttgtaagaaaggccgaagttggctttgtcaagaacattgagggagctatcaagaagactggtcttggaggtatggccggaaacaagggaggagtggctgtgtcgttttcatacgccaacacccggttctgctttattaccgcgcatcttgcagccggtacttccaacattgaagagcgtcatcacgatttcaagacgctcaataccggtctgcggttctcgagaggtctcacaatcaaggaccacgactgtgttatttggttgggagacttcaactaccgaattgatatggatggagatgtggtgcgtcagattgtggccaaaaaggaatatggtctgctgtttgaacacgatcagctcaacagacagatggtgcttggagaaacgttcccttactacaacgagatggagatcaacttcccccctacgtacaagtttgacaacggaacagccacctacgacacctctgagaagttcagaactccttcgtggactgaccgagtgctgtacaagggcactggtctgcggggcatcaactacggttgtgtttcagacctgctgttctcggaccatagacccgtctacgccgagttcaacgcccagattctcattgttgaccagaaacgaaaagccgcacttggaaaggagctgtacgacaagcgtcgaagcgaaatgggcggctccaacgatctcatttcgctgtctgatctcaacgaggttaccctcacccacggtctgcctcctccctctactgacgcgcgaaagtggtggatcagtggaggccagactgccaaggttcccattgttccccccgccaagggcatgattctcaaccccaagaaaatcaacccgttcgagggcgatctgcccgacttcgtcgacaagcctgctcttcccccgcgacgaaaacccattggaagtccgcccgtgaaaccgatgcccaaacccaagccttcgtctcttcgctcggcctctgctgtcagcgccactgctccccagctccccattccggagctgtcgcaaacctctctgctagacatgcccattggccccattgagagccagagcagcgcaggacagagcagcagcaccgagaagagtttgcttgactag

SEQ ID NO: 4463 - protein, 1061 aa, Yarrowia lipolytica CLIB99
MKVYVYENPRSLALVSEKYALVFRYATPTDDKNRPRCIVEFAPIEKIDFRKHRALSPLDCHGFLGLINISSDVFLCVITAKSLVASPRPGETINRVVGVEFHCLNRNTWDFVTLDLNGYPIDLHDQASSSGITEHPCTQLRKMLTNSSFYYSTDFDLTSSMQTRGTAQPASMRNPAGQVISTLESSDASFLWNSYMMTELVKFRDNLPDFERSELDKCGFLTTLIRGFAETVNTRIGNYDENPISCRLTIVSKQSCRMAGTRFLARGIDDDGFVANFVETETILYTERGQAQIVCAFLQVRGSVPFFWEQDSQLLSNKVQITRSIDAAQPAFERHMDYLCNKYGSIHVVNLLSREKSHENELTQRYHGHIKKLNEAGGSHSTDPASGSSRGGLVAVTDFDFHHEVSKQGYSAATRVLNRVIDAMEEYGFYSADSSSPNVTLQNGVFRTNCLDCLDRTNMIQQVISRQALQIFLDRNHLGCNPDFWSKHNILWADNGDQLSQIYAGTNALKTSYTRSGKMNLAGALADVTKSVGRLYINNFTDKTKQNTTDVLLGRLSDQEGILLYDPINDFVVKELERRKLEFSSTTNIKVFAGTFNLNGELSDADLAGWFFPPKSAKELSGGAGFDVHDDLPSIVLVGFQEIVQLTPGQILNADPGKKEFWEKRVEAVLNTRDEYVLLRSHQLVGTALLLFVRKAEVGFVKNIEGAIKKTGLGGMAGNKGGVAVSFSYANTRFCFITAHLAAGTSNIEERHHDFKTLNTGLRFSRGLTIKDHDCVIWLGDFNYRIDMDGDVVRQIVAKKEYGLLFEHDQLNRQMVLGETFPYYNEMEINFPPTYKFDNGTATYDTSEKFRTPSWTDRVLYKGTGLRGINYGCVSDLLFSDHRPVYAEFNAQILIVDQKRKAALGKELYDKRRSEMGGSNDLISLSDLNEVTLTHGLPPPSTDARKWWISGGQTAKVPIVPPAKGMILNPKKINPFEGDLPDFVDKPALPPRRKPIGSPPVKPMPKPKPSSLRSASAVSATAPQLPIPELSQTSLLDMPIGPIESQSSAGQSSSTEKSLLD

SEQ ID NO: 4464 - DNA, 4251 bp, Pan troglodytes
  CDS (1)..(4251)
atggggggaaaagcaaaacagttggactccatgaaagaattgcacaaaacaaatcgacagcagcatgagaaacatctgcaaagccgagtggactctaccagggctattgaaagattagaagggtcttctgggggtattggtgaacggtataaatttttgcaagaaatgcgagggtatgtccaagacttgcttgagtgtttcagtgaaaaggtgccactgattaatgaacttgaatcagcaatacatcagctgtacaaacagcgagcttcccgccttgtccaaagacgacaagatgatattaaagatgaatcttcggagttttcaagccattcaaacaaagctctgatggcaccaaatcttgattcctttggacgcgatcgggcactgtatcaagagcatgcaaaacgtcgcattgcagagcgggaggccaggaggactcgtcgtagacaagccagagaacaaaccggtaagatggcagatcaccttgaaggcctttccagtgatgatgaagaaacttctacagatattactaatttcaatctggaaaaagatcgaatttcaaaagaatccggcaaagtttttgaagatgtccttgaaagtttctattcaattgactgtattaaatcacagtttgaagcatggcgttcaaaatactacacatcctacaaagatgcttacattggcctttgtttgccaaaattattcaaccccctcatacgacttcagctcctcacttggactcctcttgaggcaaaatgtcgtgactttgagaatatgctgtggtttgaatctttgctgttttatggttgtgaagaacgagagcaagaaaaagatgatgtagatgttgccctactacctaccattgtggaaaaggtgattcttcctaaactaacagtgatagctgaaaatatgtgggaccctttttctacaacacagacttcaagaatggtgggaattacactaaaattaatcaatggatatccttcagtagtgaatgcagaaaataaaaatacacaggtatacctaaaggcacttttattgagaatgagaagaactttagatgatgatgtatttatgcccttatatcccaaaaatgtcttagaaaataaaaattctgggccttacttgttttttcaacgacagttttggtcttcagttaagctgttaggcaattttcttcagtggtatggcattttctcaaataaaactctgcaagagttatcaatagatggtttattaaatcgatatattctcatggcttttcagaattcagaatatggagatgacagcatcaaaaaagcccaaaatgtaatcaattgtttccccaaacaatggttcatgaatctgaaaggagaaaggactatttctcagttagaaaacttttgccgataccttgtacacttagcggatacaatttatagaaatagtatcgggtgttctgatgtggaaaaaagaaatgcaaggcccgtgggggcggcggggttggtcctgacgcccagcttggggagcagcaatacgcagccccccaagcttttctccggagtccctccccggcgctcacgctctgaagagcccacgcaaaaggaccaaggaggccagatcttccctctccctgcacccccggcggtgggatcgcagctctgcctgggggcggccgcaggaggcaaagcggctgtcagcccgcccgcgggaacgaaccgaatccgcctgggcgccggggcatctcttctggcgcataaatggagggtttgggctgctcggctcttccgtctctccgagaaggagccgctttcccgggcagtcgactgcccgggacccccgaggagccccagtcgggtcggtgccccaagtcgtgactcttcccgggtggccattcgtatttatcggccccgcctgccgtccccccagccggcggtagcccggggcaggagaggcggcggtaacctgtgccttttcccttgcccttcgtcgccacccccgggagagcctgtcgcggctgcctccgaagaaaggagaatggcgttcagtaaaggattccggatctatcacaaattggatcccccacctttcagcctcatagtggaaactaggcataaggaagaatgtctcatgttcgagtctggggctgtcgctgtgctctcatctgcagaaaaagaggcaatcaagggtacatactccaaagtactggatgcatatggactcttaggtgttttgcggttaaatcttggtgatactatgttacattacctggtcctagtcactggatgtatgtctgttggaaaaattcaagaatctgaagttttccgagttacttccactgagtttatatcactgcgaatcgattcttcagatgaggatcgcatttcagaagtgcggaaagttttgaattcaggaaacttttattttgcatggtctgcatctggcatcagtttagatttgagtcttaatgcgcatcgtagcatgcaagaacagacaactgataatagatttttctgcaagaaaggaggaagaaccctgaagaccctcgatgccccttttcagcagcaagtagctacagagaataacctctaccccatctcccaaaagatttctgggtcccaacgccttgagggagcaatgaatcagtctttgcatttgcatctcaaacactatggtgtaaattgtgatgactggttattacgtcttatgtgtggaggagtagaaatcagaacaatttatgctgctcataaacaggcaaaggcttgcctcatttcaagattaagctgtgaacgagctgggaccaggtttaatgtccggggaacaaatgatgatggtcatgttgccaattttgtagaaacagaacaggttgtgtacttagatgactcagtttcttccttcatacaaatccgaggatctgttccattgttctgggagcaaccagggttgcaagtgggatctcatcgtgtccgtatgtcaaggggatttgaagccaatgcacctgcttttgacaggcattttagaacacttaagaacttatatggtaaacaaataatagtaaatttgcttggatctaaggaaggtgaacatatgctaagtaaagctttccagagtcatttgaaagcttctgaacatgctgctgatatccagatggtgaattttgactatcatcaaatgatgctagctaaacagttggaagctcttggtttagctgaaaagcctcagttggtgactcgctttcaagaagtttttcggtcaatgtggtccgtgaatggtgattcaatcagtaagatatatgcaggaactggagctcttgaagggaaagcgaaggctggaaagttaaaagatggtgctcgttctgttacccgaacaattcagaataacttctttgacagctccaagcaagaggccattgatgttttgctactgggaaatactctgaatagtgatttagctgacaaagctcgagcacttttaactactggaagtttgcgtgcatcttctaaagtactaaagagcatgtgtgagaatttctacaaatattcaaagcccaagaaaattcgagtatgtgtcggaacctggaatgtgaatggtgggaagcaatttcgcagcatagcttttaagaatcagacactcactgactggcttcttgatgcacccaagttagctggcatccaggagtttcaagataaaagaagtaagccaactgatatatttgcaattggttttgaagaaatggtagaattgaatgctggaaacattgtgagtgcaagcacaacaaatcagaagctctgggctgtagaacttcagaagacaatctccagagacaacaagtatgtgctgctggcttctgaacagttggtgggcgtctgtttgtttgtttttatcagaccacagcatgctccttttatcagggatgttgcagttgatactgtgaagactggaatgggaggtgcaactggaaataagggagcagttgcaatccgaatgctcttccatacaaccagcctttgcttcgtctgtagccactttgctgcagggcagtcacaagtcaaagaaagaaatgaagattttatagaaatagcacgaaaattgagttttcctatgggaaggatgctgttttcccatgactatgtattttggtgtggtgatttcaactatcgaatcgatctccctaacgaagaagttaaagagctcataagacagcaaaattgggattctcttatagcaggagatcaacttatcaatcagaaaaatgctggacaggttttttag

SEQ ID NO: 4465 - protein, 1416 aa, Pan troglodytes
MGGKAKQLDSMKELHKTNRQQHEKHLQSRVDSTRAIERLEGSSGGIGERYKFLQEMRGYVQDLLECFSEKVPLINELESAIHQLYKQRASRLVQRRQDDIKDESSEFSSHSNKALMAPNLDSFGRDRALYQEHAKRRIAEREARRTRRRQAREQTGKMADHLEGLSSDDEETSTDITNFNLEKDRISKESGKVFEDVLESFYSIDCIKSQFEAWRSKYYTSYKDAYIGLCLPKLFNPLIRLQLLTWTPLEAKCRDFENMLWFESLLFYGCEEREQEKDDVDVALLPTIVEKVILPKLTVIAENMWDPFSTTQTSRMVGITLKLINGYPSVVNAENKNTQVYLKALLLRMRRTLDDDVFMPLYPKNVLENKNSGPYLFFQRQFWSSVKLLGNFLQWYGIFSNKTLQELSIDGLLNRYILMAFQNSEYGDDSIKKAQNVINCFPKQWFMNLKGERTISQLENFCRYLVHLADTIYRNSIGCSDVEKRNARPVGAAGLVLTPSLGSSNTQPPKLFSGVPPRRSRSEEPTQKDQGGQIFPLPAPPAVGSQLCLGAAAGGKAAVSPPAGTNRIRLGAGASLLAHKWRVWAARLFRLSEKEPLSRAVDCPGPPRSPSRVGAPSRDSSRVAIRIYRPRLPSPQPAVARGRRGGGNLCLFPCPSSPPPGEPVAAASEERRMAFSKGFRIYHKLDPPPFSLIVETRHKEECLMFESGAVAVLSSAEKEAIKGTYSKVLDAYGLLGVLRLNLGDTMLHYLVLVTGCMSVGKIQESEVFRVTSTEFISLRIDSSDEDRISEVRKVLNSGNFYFAWSASGISLDLSLNAHRSMQEQTTDNRFFCKKGGRTLKTLDAPFQQQVATENNLYPISQKISGSQRLEGAMNQSLHLHLKHYGVNCDDWLLRLMCGGVEIRTIYAAHKQAKACLISRLSCERAGTRFNVRGTNDDGHVANFVETEQVVYLDDSVSSFIQIRGSVPLFWEQPGLQVGSHRVRMSRGFEANAPAFDRHFRTLKNLYGKQIIVNLLGSKEGEHMLSKAFQSHLKASEHAADIQMVNFDYHQMMLAKQLEALGLAEKPQLVTRFQEVFRSMWSVNGDSISKIYAGTGALEGKAKAGKLKDGARSVTRTIQNNFFDSSKQEAIDVLLLGNTLNSDLADKARALLTTGSLRASSKVLKSMCENFYKYSKPKKIRVCVGTWNVNGGKQFRSIAFKNQTLTDWLLDAPKLAGIQEFQDKRSKPTDIFAIGFEEMVELNAGNIVSASTTNQKLWAVELQKTISRDNKYVLLASEQLVGVCLFVFIRPQHAPFIRDVAVDTVKTGMGGATGNKGAVAIRMLFHTTSLCFVCSHFAAGQSQVKERNEDFIEIARKLSFPMGRMLFSHDYVFWCGDFNYRIDLPNEEVKELIRQQNWDSLIAGDQLINQKNAGQVF

SEQ ID NO: 4466 - DNA, 4716 bp, Canis familiaris
  CDS (1)..(4716)
atggcgttcagcaaaggatttcggatctatcacaaactggaccccccacctttcagtctcatagtggaaactaggcataaggaggaatgtctcatgttcgagtctggggctgtagctgtgctttcatctgcagaaaaagaggcaatcaagggtacatactccaaagtactggatgcatatggacttttaggtgttttacgattaaatcttggtgataccatgttacattatctggttttagtcactggatgtatgtctgttggaaaaattcaagaatctgaagttttccgagttacttctactgaattcatatcactacgaattgattcttcagaagaggatcgcatttcagaagtgcgaaaagttttgaattcaggaaacttttattttgcatggtctgcatctggaatcagtttagatctaagtcttaatgcacatcgtagcatgcaagaacacacaactgataatagatttttctggaatcagtctttgcatttgcatctcaagcactatggtgtgaattgtgatgactggttattacgcctcatgtgtgggggagtagaaatcagaacaatttatgctgctcataagcaggcaaaggcttgcctcatttccagactcagctgtgaacgagctgggaccaggtttaatgtccgaggaacaaatgatgatggtcacgttgctaattttgtagaaacagaacaggttgtatacttagatgactctgtttcttctttcatacaaatccggggatccgttcctttgttctgggagcaaccagggttgcaggtgggatctcatcgtgttcgtatgtcaaggggatttgaagccaatgcacctgcttttgataggcattttagaacacttaagaatttatatggtaaacaaataatagtaaatttgcttggatctaaggaaggtgaacatatgctaagtaaggctttccagagtcatttgaaagcttctgaacacgttgctgatatccacatggtgaattttgactatcatcaaatggttaaaggaggaaaggcagaaaaattgcatagtgttcttaaacctcaagtccaaaagtttgtagattatggatttttttatttcaatggaagtgaagtccaaagatgccagagtggtactgttcgaacaaactgcttggactgtcttgatagaacaaatagtgtgcaggcattccttggcttagagatgctagctaaacagctggaagctctcggcttggctgaaaagcctcagttggtgactcgctttcaagaagtttttcggtcaatgtggtctgtgaatggtgattccatcagtaagatatacgcagggactggagctcttgaaggaaaggctaagttaaaagatggtgctcgttctgttactagaacgattcagaataacttctttgacagctccaagcaagaggccatagatgttttactactgggaaatactctaaatagtgatttagctgacaaagctcgagcacttctaactacaggaagtttgcgtgtttctgaacagacattacagtcagcatcttccaaagtactaaagagcatgtgtgagaatttctacaagtattcaaagcccaagaaaattcgagtatgtgttggaacctggaacgtgaatggtgggaagcagtttcgcagtatagcttttaagaatcagacactcaccgactggcttcttgatgcacctaagttagctggcatccaggaatttcaagataaaagaagtaagccaacagatatatttgcaattggttttgaagaaatggttgagttaaatgctggaaacatcgtgaatgcaagcacaaccaatcagaagctctgggctgtggaactgcagaagaccatctccagagacaacaagtatgtgctgctggcttctgagcagctggtgggcgtctgcctgtttgtttttatcagaccacagcatgctcctttcatcagggatgttgcagttgatactgtgaagactggaatgggaggtgccactggaaataagggagcagttgcaatccgaatgctattccatacaacaagcctctgcttcgtctgtagccactttgctgcagggcaatcacaagtcaaagaaagaaatgaagattttgtagaaattgcacggaagttgagttttccaatgggaaggatgctgttttcccatgactacgtattttggtgtggtgatttcaactatcggattgatctccctaatgaagaagttaaagagctcataagacagcaaaattgggattctcttatagcaggagatcagcttatcaatcaaaaaaatgctggacagatttttagaggatttttagaaggaaaagtgacctttgctccgacatacaaatatgacttgttttctgacgactatgacaccagtgaaaagtgccgcacccctgcttggacagaccgtgtcctctggagaagaaggaagtggccttttgacagatcagctgaagatttagatcttctaaatgctagttttcaagatggaagcaaaatcctgtacacatggactcctggcactttgctgcactatggaagagctgagctgaagacttctgaccataggcctgtcgttgccctgattgatatagatatatttgaagttgaagctgaagagaggcaaaacatttataaagaagtaatcgcagttcagggcccaccagatggtacagtattggtctcaatcaaaagttctgtccaagaaaataattttttcgatgatgctttgattgatgagcttctgcagcagtttacaaattttggtgaagttatcctcataagatttgtggaagataaaatgtgggtcacatttttggagggaagctctgccttgagtgttctgaacctaaatggtaaagagttattgggtcggactataactattactttaaaaagtccagactggatcaaaaatttggaggaagaaatgagtttagagaaaattaatgttgcattgccatcatcgacaagctccaccctgcttggtgaagatgcggaggtcactgcagattttgatatggaaggtgatgtcgatgactacagtgctgaagtggaggaaattcttccccagcacctccagccatcttcaagttctggcctgggcacttccccaggctcttcaccccggaccagtccctgccagtcaccgaccatatcggagggccctgtaccttcccttcctgtaagaccaagccgagcaccatcaagaactcctgggcacccgagctcacaaagttctcctgtcgacactctcccagcaacacagctacagcaaagagattcccagccccttgagcccaaacggccacctcctccccgcccgattgctccccccgcacgccctgcgcccccccagagaccacctccaccttcaggggctaggagtcctgcacctgctagaaaagaattcggaggtgttggagcccctcccagtcctggggcagctaggcgagagatggaagcacccaaaagccctggaacaacacggaaagatactataggacgcaatcagccttcacctcaagcaggattcacaggcccaggacctgctggatacagtgcagccagaccgactgttccaccccgtgcaggagtgatcagtgccccccagagccatgctcgggcatctgctggaagattgactcctgaaagccaaagcaaaccatcagaagtcccaaaaggtccagttcttcttcctgaaccactgaagcctcaggctgcccttcctgtgcaggcttctctgcccccacctgttcagaagatgcaggagcctcttgtccctgtggcagcacctttgcctcagtctgccccccagccgaacttggaaaccccgccacagccaccccctcggagccggtcgtcccacagcttgccttcagagccttcatcacaaccacaggtaaaaacaaatggaatctctgctgtcagactggaatcaccattaaagagtgacccatttgaagatctgtcatttaatctgcttgctgtatcaaaggctcagttatctgttcaaacatcatctgttctaactccaaacccaaaagggttgattcagttgccttctgcaacacaaagtaacatgagtactttgagttctgtaagttgcatgcctccaattccagcccggagtaagtcccaggaaaatatgcgatgttctccaaacccatttattacgagcttgaccagcacaaatccttttacggacaggactgccgctcctggaaacccatttagagctgagtctcaagaatctgagttaagttcatggctttccaaagaagagcctgttgctaacagtcctttcccttctctgaagcctcttggttataacaatagcaagccttcatcttcatttgatggttttaaggacaattttgatctgcagggccagtctatggcaaaagtcagcaacccaaaaggatgggtaacgttcgaggaagaagaggactttggtgtgaaaggaaagtcaaagtcgtcttgcttagacatactgggtcatcagccaagttcactttctggctccagcatgacctttgatgatgactggaataaaggtacagatgttcctctctgtgtgcagccatcaagaagaccacctccacctcctgtcactctgctcccatctggcaccaccccttccgtagctcctttcacaaccttggcatctaaggcatcacccacactagacttcacagaaagataa

SEQ ID NO: 4467 - protein, 1571 aa, Canis familiaris
MAFSKGFRIYHKLDPPPFSLIVETRHKEECLMFESGAVAVLSSAEKEAIKGTYSKVLDAYGLLGVLRLNLGDTMLHYLVLVTGCMSVGKIQESEVFRVTSTEFISLRIDSSEEDRISEVRKVLNSGNFYFAWSASGISLDLSLNAHRSMQEHTTDNRFFWNQSLHLHLKHYGVNCDDWLLRLMCGGVEIRTIYAAHKQAKACLISRLSCERAGTRFNVRGTNDDGHVANFVETEQVVYLDDSVSSFIQIRGSVPLFWEQPGLQVGSHRVRMSRGFEANAPAFDRHFRTLKNLYGKQIIVNLLGSKEGEHMLSKAFQSHLKASEHVADIHMVNFDYHQMVKGGKAEKLHSVLKPQVQKFVDYGFFYFNGSEVQRCQSGTVRTNCLDCLDRTNSVQAFLGLEMLAKQLEALGLAEKPQLVTRFQEVFRSMWSVNGDSISKIYAGTGALEGKAKLKDGARSVTRTIQNNFFDSSKQEAIDVLLLGNTLNSDLADKARALLTTGSLRVSEQTLQSASSKVLKSMCENFYKYSKPKKIRVCVGTWNVNGGKQFRSIAFKNQTLTDWLLDAPKLAGIQEFQDKRSKPTDIFAIGFEEMVELNAGNIVNASTTNQKLWAVELQKTISRDNKYVLLASEQLVGVCLFVFIRPQHAPFIRDVAVDTVKTGMGGATGNKGAVAIRMLFHTTSLCFVCSHFAAGQSQVKERNEDFVEIARKLSFPMGRMLFSHDYVFWCGDFNYRIDLPNEEVKELIRQQNWDSLIAGDQLINQKNAGQIFRGFLEGKVTFAPTYKYDLFSDDYDTSEKCRTPAWTDRVLWRRRKWPFDRSAEDLDLLNASFQDGSKILYTWTPGTLLHYGRAELKTSDHRPVVALIDIDIFEVEAEERQNIYKEVIAVQGPPDGTVLVSIKSSVQENNFFDDALIDELLQQFTNFGEVILIRFVEDKMWVTFLEGSSALSVLNLNGKELLGRTITITLKSPDWIKNLEEEMSLEKINVALPSSTSSTLLGEDAEVTADFDMEGDVDDYSAEVEEILPQHLQPSSSSGLGTSPGSSPRTSPCQSPTISEGPVPSLPVRPSRAPSRTPGHPSSQSSPVDTLPATQLQQRDSQPLEPKRPPPPRPIAPPARPAPPQRPPPPSGARSPAPARKEFGGVGAPPSPGAARREMEAPKSPGTTRKDTIGRNQPSPQAGFTGPGPAGYSAARPTVPPRAGVISAPQSHARASAGRLTPESQSKPSEVPKGPVLLPEPLKPQAALPVQASLPPPVQKMQEPLVPVAAPLPQSAPQPNLETPPQPPPRSRSSHSLPSEPSSQPQVKTNGISAVRLESPLKSDPFEDLSFNLLAVSKAQLSVQTSSVLTPNPKGLIQLPSATQSNMSTLSSVSCMPPIPARSKSQENMRCSPNPFITSLTSTNPFTDRTAAPGNPFRAESQESELSSWLSKEEPVANSPFPSLKPLGYNNSKPSSSFDGFKDNFDLQGQSMAKVSNPKGWVTFEEEEDFGVKGKSKSSCLDILGHQPSSLSGSSMTFDDDWNKGTDVPLCVQPSRRPPPPPVTLLPSGTTPSVAPFTTLASKASPTLDFTER

SEQ ID NO: 4468 - DNA, 4404 bp, Canis familiaris
  CDS (1)..(4404)
atgcagggaatggagaagctgcctcgtccccctcacccatcatcagtgtgggagccggaggcctatggcctccgagaaatggctccggaagagaaggaggtcattaagggccagtatgggaagctcacggatgcttacggctgcttgggggagctcaggttgagatctggcggtgcctccctgagcttcctggttctggtgacaggctgcacatccgtgggcagaattccagaggctgaaatctacaagatcaccgccaccgacttctaccctctacaggaggaggccaaggaggaggaccgcctcgtagccttgaggaaaatcctcaactcgggtgtcttctacttctcgtggcccaatgatgggtctagcttcgacctcaccgtccgggcgcagaagcagggccatgacagctacgaatgggggagctccttcttttggaaccagctgctgcacgctcccctgaggcagcaccaggtgagctgctgcgactggctgctgaaggtcatctgcggcgtggtgtccatccgcaccgtgtatgcctcgcacaaacaggccaaggcctgcctcatctcccgcatcagctgcgagcgcgccggcgctcgcttccacacccgcggcgtgaacgacgatggccacgtgtccaacttcgtggagactgagcagacgatttacatggatgatggagtgtcctcttttgtccagatcagaggctccgttccgctgttttgggagcagccagggcttcaggttggctctcatcatctgagactcaacagaggcctagaagccaatgcccctgcttttgacagacacatggtgcttctgaaggagcagtatgggaagcaagtggtcgtaaacctgctggggagcagaggcggagaggaggtgctcaacagagccttcaagaaattgctctgggcttcttgccacgccggcgacacacctatgataaactttgacttccatcagctggccaaaggtgggaagctagagaaattggagaatttgttgaggccccagttgaagctccactgggatgactttgacgtgttcaccaagggcgagaatgtaagtccacgttttcagaaaggcactttgcggatgaactgtcttgattgcctggaccgaaccaacacagtgcagagcttcatagcactcgaggtccttcatctacagctcgagagcctcggcctgaattcaaagcccatcgctgaccgctttgtggaatcctttaaagccatgtggtctctgaatggacacagcctgagcaagatgttcacaggcagccgggccctagaagggaaggccaaggtgggtaagctgaaggatggggcccggtccgtgtctcgcactatccagtccaacttctttgatggagtgaagcaagaggccatcaagctgctgctggttggggatgtctacactgaggagtctgcagacaaaggaaggatgcttctggacaacacagccctgctggtgactcccaggatcctgagggccatggctgagcgccagtcggaattcacaaatttcaggcggatccgaattgccacggggacgtggaacgtgaacggaggcaagcagttccggagcaacctcctggggacggccgagctggccgactggctcctcgactcccccacgcgctcgggcctcccgggatcccaggatgaggacagcccagctgacatatttgccgtggggtttgaagagatggtggaactgagcgcagggaatatcgtcaatgccagtaccaccaacaggaagatgtggggtgagcagctccagaaggccatctcacgctcccataggtacattctcttgacttcggcacagctggtgggcgtctgtctgtatatctttgtacgtccataccatgtcccattcatcagggacgtggccatcgacacggtgaagacaggcatgggaggaaaggcgggcaacaagggcgccgtgggcatccgctttcagttccacagttccagcttctgcttcgtgtgcagccacctgacggccggccagtcgcaggtgaaggagaggaatgaagactaccgggagatcacccagaagctgagtttcccgatgggaagaaacattttttctcatgattacgtgttttggtgtggcgatttcaactaccgcattgatctcacttatgaagaagtcttctattttgtcaaacgccaagactggaagaaacttctggagtttgatcagctacagctacagaaatcaagtggaaaaatttttaaagactttcacgaaggcgctattaattttggacctacctacaagtatgacgttggctctgctgcctacgacacaagtgacaaatgtcgcacccccgcctggacagaccgggtcctgtggtggaggaagaggcactcttttgacagaacagctgaagaactcaaccttctagacaacgatgtagatgctgacaacacagtcagacattgctggtctcctggtgtgctcaagtattacggccgagcagaactacaagcatctgatcacagacctgtgctggcgatcgtggaggtggaagttcaagaagtcgatgtgggtgctcgagagagggtgttccaggaagtgtcctctttccagggccccctcgatgccactgttgtagtcaacctccagtcgccaactttagaagagaaaaatgagtttcctgaggatgtacgcacagaactcatgcagaccttgggcaattatgggaccattgttcttgtcaggatcaaccaagggcaaatgctggtgacttttgcagacagtcactcggctctcagcgtcctggacgtggacggtatgaaggtaaaaggcagagcagtgaagatcagaccaaagaccaaggactggctaaaaggtttgcaagaggagatcatccgaaagcgggatagcatggcttccatgtctcccactgccaattcctgtttgctggaggaaaactttgacttcacaactttggactatgagtcagagggggatattctcgaagatgacgaagactatttggtggatgagctaaatcagtctgtggtctcagatggtgagatgggggcggacaacctttctgaagcctccacggctgcggtgtctgccagcaagtcacctgcactcactaaaaagaagcagcacccgacgtacaaagatgacgctgacctggtggagctaaagcaggagctggaagcagttggggatttccggcaccgttctccaagcaggtctttgtcggttcccactaggcctcggccacctcacccaccgcagagacctccccctccaactggtttaatggtgaaaaagtcggcttcggacgtgtccatctcctccggcacccacgggcagtactcgattttgcagacggcaaagcttctgccaggagcacctcaggaagcacccaaagccaggatggggataagtaaaccctataatgtcaagcagatcaaaactaccaatgcccaggaggcagaagcagccatccgatgtctcctagaagccagaggaggcaccccaggcgaagccctaaacgccccggccctgagggaccaagggccttccaaaccagagccccctgcgggggcggccccgctgctgccccgtcggcctgcacccagagttcctgccatcaagaagccaaccttgcggaggacgggcaagccggagtcaccagaaggacagtttgggcagcagacggtccatttcacgatcgggcccccagagaccagccttgacgcccctcctctagcaacccctcctgttcccaaaccgaggacacttcagcctgggaagggtgccgagaggaagcccgcaccagaagaggcccctcccatggcaggagccgccctgccgccccccctggaggtgccacctcccgcaccccaggcccccccgaggaggaggaagaaatcggcacccgcagccttccacctgcaggtgctgcagagcaacagccagctcctccaggccctcacctgcagcaccccaagcagcgactggccccctgcacacctgcccgaccagggtgcacttgtgccgccacttgccagcctcagtgcttcctctgccacaagccccgaaactgagggccccagggagacccaggcagaggcagcctcccttctgggtgactatcaggatcccttctggagccttctccatcaccctagccttttgaagaatacctggctttccaagagctctgacccactggactcgggggctcagggcctggaaagagcacacacggccccactgcacccactgcaagttgctgcctcgccggcctcggagctgcccctggagcacggacagaaagatttcaccggctggatggcagtcagtgacaaggacaagaggaccgtgctgcaggtgtttgacccactggcaaaaacatga

SEQ ID NO: 4469 - protein, 1467 aa, Canis familiaris
MQGMEKLPRPPHPSSVWEPEAYGLREMAPEEKEVIKGQYGKLTDAYGCLGELRLRSGGASLSFLVLVTGCTSVGRIPEAEIYKITATDFYPLQEEAKEEDRLVALRKILNSGVFYFSWPNDGSSFDLTVRAQKQGHDSYEWGSSFFWNQLLHAPLRQHQVSCCDWLLKVICGVVSIRTVYASHKQAKACLISRISCERAGARFHTRGVNDDGHVSNFVETEQTIYMDDGVSSFVQIRGSVPLFWEQPGLQVGSHHLRLNRGLEANAPAFDRHMVLLKEQYGKQVVVNLLGSRGGEEVLNRAFKKLLWASCHAGDTPMINFDFHQLAKGGKLEKLENLLRPQLKLHWDDFDVFTKGENVSPRFQKGTLRMNCLDCLDRTNTVQSFIALEVLHLQLESLGLNSKPIADRFVESFKAMWSLNGHSLSKMFTGSRALEGKAKVGKLKDGARSVSRTIQSNFFDGVKQEAIKLLLVGDVYTEESADKGRMLLDNTALLVTPRILRAMAERQSEFTNFRRIRIATGTWNVNGGKQFRSNLLGTAELADWLLDSPTRSGLPGSQDEDSPADIFAVGFEEMVELSAGNIVNASTTNRKMWGEQLQKAISRSHRYILLTSAQLVGVCLYIFVRPYHVPFIRDVAIDTVKTGMGGKAGNKGAVGIRFQFHSSSFCFVCSHLTAGQSQVKERNEDYREITQKLSFPMGRNIFSHDYVFWCGDFNYRIDLTYEEVFYFVKRQDWKKLLEFDQLQLQKSSGKIFKDFHEGAINFGPTYKYDVGSAAYDTSDKCRTPAWTDRVLWWRKRHSFDRTAEELNLLDNDVDADNTVRHCWSPGVLKYYGRAELQASDHRPVLAIVEVEVQEVDVGARERVFQEVSSFQGPLDATVVVNLQSPTLEEKNEFPEDVRTELMQTLGNYGTIVLVRINQGQMLVTFADSHSALSVLDVDGMKVKGRAVKIRPKTKDWLKGLQEEIIRKRDSMASMSPTANSCLLEENFDFTTLDYESEGDILEDDEDYLVDELNQSVVSDGEMGADNLSEASTAAVSASKSPALTKKKQHPTYKDDADLVELKQELEAVGDFRHRSPSRSLSVPTRPRPPHPPQRPPPPTGLMVKKSASDVSISSGTHGQYSILQTAKLLPGAPQEAPKARMGISKPYNVKQIKTTNAQEAEAAIRCLLEARGGTPGEALNAPALRDQGPSKPEPPAGAAPLLPRRPAPRVPAIKKPTLRRTGKPESPEGQFGQQTVHFTIGPPETSLDAPPLATPPVPKPRTLQPGKGAERKPAPEEAPPMAGAALPPPLEVPPPAPQAPPRRRKKSAPAAFHLQVLQSNSQLLQALTCSTPSSDWPPAHLPDQGALVPPLASLSASSATSPETEGPRETQAEAASLLGDYQDPFWSLLHHPSLLKNTWLSKSSDPLDSGAQGLERAHTAPLHPLQVAASPASELPLEHGQKDFTGWMAVSDKDKRTVLQVFDPLAKT

SEQ ID NO: 4470 - DNA, 3867 bp, Cryptococcus neoformans var. neoformans JEC21
  CDS (1)..(3867)
atgccgggcgctctataccttcgcccatctcctcgcgccttcttcctcattacagattctcatgccctcgtgttccgacaaccatcctcttccgagtccaaggcgtccagaggcgtggtagtggcagagtttctccctttggaagaagtagactataatgacctcatcaaggtaaaaggaagggcggatggagtattgggagttgtcagcgtacctagcgaacgatctccaatcccagaaatcttcttactccttctgactcattcaatttctcttccgcctctcatcccatcttcttccctccagccttctcggattatctctgttgaattccactctctttcctctcccttctgggaccaacccgaacttaccaacgctgccaggtctcttgattacggctatgacgatgaatatgacgaagtcagtgcgacatatgccgctgctggaggtaattctacccaaatgtcggcagcacaacaagcaggccttcaacatccatgtagcggaatgaaaaagtatctcgaatcaggatccttcttttttgctcaagactgcaaatgggatatttcatctcgtctatcaagctcttccaactgggtcaaagaacaacaatcgagttccggtggtggtcaccctttggaggatttcgacgagaggtttgtctggaacaagagtctgttggaaccgttcctcgactttagaaaaggtctcggcgaagagatgcgccagaacctagacgaccaagccatgctcatacctatcatccagggattctgcgggtcccttccaatccatactgggagatcatccaattctgctctggggatgatcagcaggctcagctggaagcgagctggagcacgattccgtacgagaggaatcgatgacgatggccaagtagccaactttgtggagaccgaagtcctgctagccttggagggcgtgtgtatgagctatgtgcaggtgagaggaagtgtacctcttttctggcaacaacctaatgcagggttgggcacattgcaacaaagagttgagatcaccaggccaccacaagcgactcagccagcattcgacaaacatttcctcgagctattatcagaatacagctccattcacgctatcaaccttctgggccagaaagatgctgaatctatgctatctcaagcatactcctcccatcttacatcgctcaaatgtgctcttgacaaagcacccccagaagaaaaagaacgtatgaacgccgcacctcgtgggacgttagaattgtccccctatgattttcactctgcggtgaggctgggtgggcatgataaagtaagatacgatttggataggagcctgagggaggtggtgagtagtagggagagatttgggtggacggtagtggatatggataatggagatgtagtggaagagcagcaaggtgttttccgggtaaactgtctagactgcctcgacagaacaaattacgtccaagacgtcctttccacactcaccatcacctccttcctctcctccctgtcctcccctcttctctcctccccaaccctctggtccgcccaccgcgagctctgggccgacaacggtgatcgcttatccaaaatctacgccggcacgggcgctatcaacacctctgcgacgaggagtgggaaaaagacttttgctggtttgttaagcgatgcgacgaagagtgtagggagagcgtatataaataattttcaagataaagggaagcaggcggccattgatatgcttttgggaatgatggcgggtcaaagacctgtcattctttttgatcccataagcgagtctgttcaagcggcgttagcaacgagggcgaatgagtattcgtcgactagaaaggtcaccatcttctctggaacgtggaatcttaatggaaaggtgaaacccgatatctacatgattgcctttcaagaaattgtcgaactaaccgctggccaaatcttacaaaccgaccccgctaagaaacgtatgtgggaaaaattcatcatggatacgtttgcgatgcggaaaggagggaaagattcggattatgtgctgtttagaggtgatcagctcgtcggcacggctttgatcattgttgtgaaaaagcatcttgttccgcatatacggaatgttgaaagtgctactaaaaagaccggtcttcagggcttaagcggtaacaaaggcggtgtagcaatccggttaaacctgtatgactcaacagtttgttttgtgacttgccatctggcagcaggacattcgaatgtaggtgacagaaatgcggattggaggacggtcgtaggcggtacaaggttcttgagggggaaagttattgaagatcatgagatcattatttgggcggcagattttaattaccgtgtttcgctccctaatcttgaagtaagagacctcgtaaaggccaacagtttagatgctttgctcggcgcagatcaattgttgaaagccatggacgctggagaggtgtttatggggtacgatgaaggaccgatccggttccccgataatggaacggacagttatgatacgagtgagaagcagagaatccccgcttggacagatcgagtcttgttcaaaggctccgctctccgtttacatgagtacacccgcgccgaactcatgacgtccgatcaccgccctgtttacgcagtctttgaggcgaccatccgcgagatcgatcgtgcaaaaaaggaggagatcgcaaaagagttggtacatgggctcgtaaagagtggtgcggagaagaagatcgcagcaaaagtaggtgtggagattggaggtggtggagcaagagatttggcgaggggtatggcgaaagtcggcttgtcgccatcgaaaaatcagagatatccgcctcggccgagctcatcggcgtctacaagtgagaagggcagtccaacacttgcagcaggtcgaattcgctctatctcaacactccaacccccatctacctctgccactagttctctcagagctctagccccaagtagatcgtcatccagtctatctcttaaagaaagatccactccaccactacctcctcgtccaaatcttccttccagaccatctcagactctcctgcactcaccttcaaagccgtcgacaaggctccaagcccccccatcattacccccggcttcgcgttcgaggtcgacgtcgcatgcttctgcgaatggaacaggtttggcctcatcagtcacttctgcgtatcctggagccccttcccctgtgacaccgagttctaccggcgattttgttatcattcctcagccttctacctctgacattaatgtttccgccggagcgcgtcttgcgccttctttaccacctcgcgcaatccctgttgcccccaagatctctccatccaaaaatagtatcaaaattgacaatgaacaaaaagccccgactcggcgggaagcacctcctataccacgtaaatcattagacatcaacggatctcctcccaaggggttgatgtcaccggtgactcccgatgttgtgaaagcaaaaaatgtcttgactggagccgcgggtgcgagtgtgtatgctgggacacgtacacgtacgagacctatcccacccaaaccattgaccaagacgtcctcaggttctgtagcagcaatggtggcatcattgaatggaaatgataagaagacgaatgacgatacgaggacgagtaatccgcaggcaactttaacaagcgcggatgccgagcaaagtgcgggatcgggcccggcgatgacggacaaggcggatgtttcgacatctccgaaaagcaaaaagcatgcacctgtggtgcccaaaaagcctgtagcgctgaaaggcgcgggtgcagagcagtaa

SEQ ID NO: 4471 - protein, 1288 aa, Cryptococcus neoformans var. neoformans JEC21
MPGALYLRPSPRAFFLITDSHALVFRQPSSSESKASRGVVVAEFLPLEEVDYNDLIKVKGRADGVLGVVSVPSERSPIPEIFLLLLTHSISLPPLIPSSSLQPSRIISVEFHSLSSPFWDQPELTNAARSLDYGYDDEYDEVSATYAAAGGNSTQMSAAQQAGLQHPCSGMKKYLESGSFFFAQDCKWDISSRLSSSSNWVKEQQSSSGGGHPLEDFDERFVWNKSLLEPFLDFRKGLGEEMRQNLDDQAMLIPIIQGFCGSLPIHTGRSSNSALGMISRLSWKRAGARFRTRGIDDDGQVANFVETEVLLALEGVCMSYVQVRGSVPLFWQQPNAGLGTLQQRVEITRPPQATQPAFDKHFLELLSEYSSIHAINLLGQKDAESMLSQAYSSHLTSLKCALDKAPPEEKERMNAAPRGTLELSPYDFHSAVRLGGHDKVRYDLDRSLREVVSSRERFGWTVVDMDNGDVVEEQQGVFRVNCLDCLDRTNYVQDVLSTLTITSFLSSLSSPLLSSPTLWSAHRELWADNGDRLSKIYAGTGAINTSATRSGKKTFAGLLSDATKSVGRAYINNFQDKGKQAAIDMLLGMMAGQRPVILFDPISESVQAALATRANEYSSTRKVTIFSGTWNLNGKVKPDIYMIAFQEIVELTAGQILQTDPAKKRMWEKFIMDTFAMRKGGKDSDYVLFRGDQLVGTALIIVVKKHLVPHIRNVESATKKTGLQGLSGNKGGVAIRLNLYDSTVCFVTCHLAAGHSNVGDRNADWRTVVGGTRFLRGKVIEDHEIIIWAADFNYRVSLPNLEVRDLVKANSLDALLGADQLLKAMDAGEVFMGYDEGPIRFPDNGTDSYDTSEKQRIPAWTDRVLFKGSALRLHEYTRAELMTSDHRPVYAVFEATIREIDRAKKEEIAKELVHGLVKSGAEKKIAAKVGVEIGGGGARDLARGMAKVGLSPSKNQRYPPRPSSSASTSEKGSPTLAAGRIRSISTLQPPSTSATSSLRALAPSRSSSSLSLKERSTPPLPPRPNLPSRPSQTLLHSPSKPSTRLQAPPSLPPASRSRSTSHASANGTGLASSVTSAYPGAPSPVTPSSTGDFVIIPQPSTSDINVSAGARLAPSLPPRAIPVAPKISPSKNSIKIDNEQKAPTRREAPPIPRKSLDINGSPPKGLMSPVTPDVVKAKNVLTGAAGASVYAGTRTRTRPIPPKPLTKTSSGSVAAMVASLNGNDKKTNDDTRTSNPQATLTSADAEQSAGSGPAMTDKADVSTSPKSKKHAPVVPKKPVALKGAGAEQ

SEQ ID NO: 4472 - DNA, 4293 bp, Rattus norvegicus
  CDS (1)..(4293)
atggacagctcttcgagcaccacccagccggcgcggggtgcagaccatcccccgcctttcactcgcccgtcgggtccgcggaggcggcagggggtggtcctgatgcccgactcaagcacgaatcaacacgggctccccacagttctttcctgcagtccctccctgtcgcccgcggggagggctgagctagagggctccacgcgaggaggccggaccctccctctgccggctcccctggccgtgcctcccgtccactcccggggtgaccgaggcttcacggaccctgcggcgcaatgcggaagagctggacctgctggagcggaagtgacgcttcgggcggctgtagcggcggcggctgcgggcagaaggagaaggaggagccggaggaagagggctgcctctgaagaaaggagaatggcgttcagcaaaggatttcgaatctaccacaaattggatcccccaccgttcagcctcatagtggaaactaggcataaggaagaatgtctcatgttcgagtctggggccgtggcagtgctctcatctgcagaaaaggaggccattaaaggcacatatgccaaagtgctggatgcatatggacttttgggagttttacgattaaatcttggtgataccatgttgcattatctggtcctagtcactggatgcatgtctgttgggaaaattcaagaatctgaagtcttccgagttacttccactgagtttatatcacttcgagttgatgcttcagatgaggaccgcatttcagaagtacgaaaggttttgaactcaggaaacttttattttgcatggtctgcatctggagtcagcttagatctgagtctgaacgcacatcgaagcatgcaggagcacacaactgacaataggtttttctggaatcagtctttgcatctgcatctcaagcactatggtgtgaattgtgatgactggttgttacggctcatgtgtggaggagtagagattagaacaatttatgctgcccataaacaggcaaaagcttgcctcatttcaagactaagctgtgagcgagctgggacaaggttcaacgtccggggaacaaatgatgacggtcatgttgccaactttgtagagacagagcaggttatatacttagatgactgtgtctcctccttcatacaaatccgaggatctgttccgttgttctgggagcaaccagggttgcaagtgggatctcatcgtgttcgaatgtcaaggggatttgaagccaatgcgcctgcctttgacaggcatttccgaacccttaaggacttatatggtaaacaaatagtagtaaatctgcttggatctaaggagggtgagcatatgctgagcaaggccttccagagtcacttgaaagcctctgaacacgcttctgatatccacatggtgtcctttgattatcatcaaatggttaaaggaggaaaggcagaaaaattgcacagtgttctcaaaccacaagtccagaagtttctagattatggatttttttatttcgatggcagtgcagttcaaaggtgccagagtggtacagttcggacaaactgcctggactgtctggatagaacaaacagtgtgcaggcgttccttggcttagagatgctagctaaacagctggaagctctgggcttggctgaaaagcctcagttggtgactcgctttcaagaagttttccggtccatgtggtctgtgaatggcgattcaatcagtaaaatatatgcaggcaccggagccctggaagggaaggccaagttaaaagatggtgcgcgatctgtcaccagaaccattcagaataacttcttcgacagctccaagcaagaagccattgatgttctgcttctgggaaacactctgaacagcgacttagccgacaaagcccgggcacttctaactactgggagtttgcgtgtgtctgaacagacattacagtcagcatcttccaaagtcttaaagaacatgtgtgagaacttctacaagtactcaaagcccaagaagatccgagtgtgtgttggaacctggaatgtgaacggcgggaaacagttccgcagcatagcattcaagaaccagaccctcaccgactggcttcttgatgcacccaagttagctggcatccaggagtttcaagataagagaagtaagccaactgatatatttgcaattggctttgaagaaatggtggagctgaatgctgggaacattgtgaatgcaagcacaacaaaccagaagctgtgggcagtggaactgcagaagaccatctccagagacaacaagtatgttctcctggcctcggagcagttggtgggtgtctgcctgtttgtctttatcagaccgcagcatgctccctttatcagggatgttgcagtcgatactgtgaaaactgggatgggaggcgcgactggaaataagggcgctgttgcaatccggatgctcttccacaccaccagcctttgctttgtctgcagtcactttgctgcaggccagtcccaagtcaaagagagaaatgaagatttcgtagaaatagcacgaaaattgagtttccccatgggaagaatgctcttctcccatgattacgtattctggtgtggtgatttcaactatcgaatcgatcttcctaatgaagaagttaaagagctcataagacagcaaaattgggattctcttatagctggagatcaactcatcaatcagaaaaatgcaggacagatctttagaggatttttagagggaaaagtaacgtttgctccaacctataaatatgacttgttttccgaagactatgacaccagtgaaaagtgccgcacccctgcttggacagaccgagtcctctggagaaggaggaagtggccttttgacagatcagctgaagacttagatcttctgaatgctagtttccaagatgaaagtaaaatcctgtatacatggactcctggcaccttgctgcactatggaagagccgagctgaagacttctgaccacaggcccgttgtcgccctgatcgatatagatatatttgaagttgaagctgaagagagacaaaaaatttataaagaagttattgcagtccagggcccaccggacggcacagtactggtctcaatcaaaagttctgcacaagagaatactttctttgacgatgctttgatcgatgagcttctgcagcagtttgcacacttcggcgaagttatacttataagattcgtagaagataaaatgtgggttacatttttggaggggagctctgccttgaatgttctgagcctaaatggtaaagagttattaaatcggactataacaattactttaaaaagtccagactggatcaaaactttggaagaagagatgagtttagagaaaatcagtgtcacattgccctcatcaaccagttccaccctgctcggtgaagatgcagaggtctcagcggactttgacatggaaggtgatgtcgacgactacagtgctgaggtggaggagcttcttcctcagcacctccagccatcctccagctctggcctcggcacctctccaagctcttcgccccggaccagtccctgccagtcacccacagcaccagagtactccgcaccttctcttcccatcagacctagtcgagcaccatcaagaactccaggacctctaagttcacagggtgctccagttgacacccagccagcagcccagaaggagtcttcccagaccatagagcccaagaggccaccccctccccgcccagttgctcctccagcacgtcctgccccaccacagaggccacctccaccttcaggggctaggagtccggcacctgctagaaaagaatttggagcacccaaaagcccgggaacagcacggaaagataatatagggcgtaatcagccttcccctcaagccggacttgcaggcccaggaccttctggatatggtgcagctagaccgacaattccagctcgtgctggagtgatcagtgcccctcagagccaggctcgggtgtctgctggaaggctgactcctgaaagccaaagcaaacccttggagacatcgaaaggtcctgctgtccttccagaaccactgaagcctcaggctgcatttcctccgcagccttctctgcccacacctgctcaaaagttacaggacccacttgtccccatagcagcacctatgcctccctccattccccaatcgaatttggaaactccacccctgcccccacctcggagcaggtcatctcaaagcttgccttcagactcctcaccacagctacaacaggagcaaccaacagggtaa

SEQ ID NO: 4473 - protein, 1430 aa, Rattus norvegicus
MDSSSSTTQPARGADHPPPFTRPSGPRRRQGVVLMPDSSTNQHGLPTVLSCSPSLSPAGRAELEGSTRGGRTLPLPAPLAVPPVHSRGDRGFTDPAAQCGRAGPAGAEVTLRAAVAAAAAGRRRRRSRRKRAASEERRMAFSKGFRIYHKLDPPPFSLIVETRHKEECLMFESGAVAVLSSAEKEAIKGTYAKVLDAYGLLGVLRLNLGDTMLHYLVLVTGCMSVGKIQESEVFRVTSTEFISLRVDASDEDRISEVRKVLNSGNFYFAWSASGVSLDLSLNAHRSMQEHTTDNRFFWNQSLHLHLKHYGVNCDDWLLRLMCGGVEIRTIYAAHKQAKACLISRLSCERAGTRFNVRGTNDDGHVANFVETEQVIYLDDCVSSFIQIRGSVPLFWEQPGLQVGSHRVRMSRGFEANAPAFDRHFRTLKDLYGKQIVVNLLGSKEGEHMLSKAFQSHLKASEHASDIHMVSFDYHQMVKGGKAEKLHSVLKPQVQKFLDYGFFYFDGSAVQRCQSGTVRTNCLDCLDRTNSVQAFLGLEMLAKQLEALGLAEKPQLVTRFQEVFRSMWSVNGDSISKIYAGTGALEGKAKLKDGARSVTRTIQNNFFDSSKQEAIDVLLLGNTLNSDLADKARALLTTGSLRVSEQTLQSASSKVLKNMCENFYKYSKPKKIRVCVGTWNVNGGKQFRSIAFKNQTLTDWLLDAPKLAGIQEFQDKRSKPTDIFAIGFEEMVELNAGNIVNASTTNQKLWAVELQKTISRDNKYVLLASEQLVGVCLFVFIRPQHAPFIRDVAVDTVKTGMGGATGNKGAVAIRMLFHTTSLCFVCSHFAAGQSQVKERNEDFVEIARKLSFPMGRMLFSHDYVFWCGDFNYRIDLPNEEVKELIRQQNWDSLIAGDQLINQKNAGQIFRGFLEGKVTFAPTYKYDLFSEDYDTSEKCRTPAWTDRVLWRRRKWPFDRSAEDLDLLNASFQDESKILYTWTPGTLLHYGRAELKTSDHRPVVALIDIDIFEVEAEERQKIYKEVIAVQGPPDGTVLVSIKSSAQENTFFDDALIDELLQQFAHFGEVILIRFVEDKMWVTFLEGSSALNVLSLNGKELLNRTITITLKSPDWIKTLEEEMSLEKISVTLPSSTSSTLLGEDAEVSADFDMEGDVDDYSAEVEELLPQHLQPSSSSGLGTSPSSSPRTSPCQSPTAPEYSAPSLPIRPSRAPSRTPGPLSSQGAPVDTQPAAQKESSQTIEPKRPPPPRPVAPPARPAPPQRPPPPSGARSPAPARKEFGAPKSPGTARKDNIGRNQPSPQAGLAGPGPSGYGAARPTIPARAGVISAPQSQARVSAGRLTPESQSKPLETSKGPAVLPEPLKPQAAFPPQPSLPTPAQKLQDPLVPIAAPMPPSIPQSNLETPPLPPPRSRSSQSLPSDSSPQLQQEQPTG

SEQ ID NO: 4474 - DNA, 2961 bp, Candida albicans SC5314
  CDS (1)..(2961): transl_table=12
atgagactatatttgatagaaaagcctagaacgtttgttatcactacgaatacacatgcattaattattcgacatccttcgccgacatataaacattctggtataaagggtttagtaagtgggcacagcaaagataaagatcaaaacaaggatacaaaagtgttggtcgagtttgttttaaaagaatatctagacttgagcttatatagagacatcaccccgaaacatggtggattactagggttattgggactactaaatgtcaaagggaaaacattcattggctttataactcgagacgaatggactgcatcggcaacggttactgataggatttacaagatcacagatacagagttctactgtattaacaatgatgaatacgattacttgcttgataaggaatatgaaaacatgagtcaccaagaacgtgaacgattgcgatatcctgcagcgtcggtgcaacgattgttgtcgagtggggcattttactattccaagcagtttgatatgacttcaaatattcaagagcgtggatttgtcagcagtgattataaattaattgctgactcttccttttttaaatcgtttatgtggaatggatttatgacggaagaattgatagaaaccaggaaaagaatgtctcctgctgaacaaaagattatcgacaaatcgggacttctcattattgtcatcagaggctatgctaaaactgtcaacactactgttggtgggtgtgaagccttgatgaccttgatatcgaagcagagttgtgcaaaagaaggaccccttttcggggattggggcagtgatggtgatggctatgtttctaactacttggaatccgaaatcattatctatactgaaaaattctgtttgtcttatgttatcgttcgagggaatgtgccgatgtattgggaattggaaaacaatttttcaacgaaaactatacttgcagccaatgggaagcaaattgctttccctcgttcttttgaagcttcgcaggaagcacttgttcgacatttcgataggctttcatctcagtacggagatattcatgttcttaatacgttatcagataaatcttacaagggtgtgttaaactctgcttatgaagaacaactcaaatactttttacagaacagagagtcaactgatatcggatataaagttttatatactcgtattcctattgcatcatctagaattaaaaaaattggctattcaggacagaatccatacgacatagtatcactactttcgaattcaattatcgactttggtgccttattttacgacagcaaaccaaactcttttattggtaagcaattgggagtatttcgaatcaattctttcgatagtctcaacaaggctaattttctaagtaaaataatcagtcaggaagttatagatttggcattcagagatattggtttggaattggatagagagttatacgtaaagcatgctcagctatgggaagaaaatgatttgtggatatccaaattaacattaaattttgcctcaacaagtgacaagctacacacgtcccacaattcaattaaatcttcctttgttaagtcacatataacgaaaaagtattttggaggtgtagttgaatcgaaaccgaatgaaattgctatgcttaagcttttggggcgattgcaagaccaatctcctgtaaccatgttcaatccaattcataattatgttaacaaagagttgaataagcgtgccaaggattttacctcaaaattggatttatcagtttatgcatcaacatttaatgtaaatggttcagtttatgaaggcgatattgacaaatggatatacccagaggaaaatgattatgacttgatttttattggactacaagaaattgtcgtgcttaacgcaggacaaatggtgaatactgatttccgaaataagacccaatgggaaagaaagattttgggtgtgttgcaaaaacggaacaaatacatggtgatgtggagtggtcaattaggaggggttgccttgtatttttttgtgaaagagtcacaagtcaaatatgtttccaatgttgaatgttctttcaaaaaaaccggtcttggtggagtatcagctaataaaggtgggatagctgtgagtttcaagttttccgataccactatttgttttgtgtctgctcatcttgcggcggggctaagcaacattgaggaaagacaccaaaactataaagcactaattaaggggatccagttttcgaaaaatcgacgcattcaaaaccatgacgctgttatttggttgggtgatttcaattacagaattgatttgactaatgatcaagtaaaaccaatgattttacaaaaattatacgccaagatctttgaatgtgatcaattgaataagcaaatggctaatggggaaagtttcccatttttttcagaacaagaaattaacttcccaccaacttataaatttgataaaggtaccaaagtttacgatactagtgaaaagcagagaatcccggcatggacagatcgtatattatttctttcacgacaaaatcttatagaaccattgctgtacaattcttgccaaaacttgactttttctgatcatcgacccgtttatgctacattcaagattacagttaaaataataaaccacacaattaaaaagaatctatctgacgaaatatataaaaactacaaagacagtcataatggtatatttgatattttagtaaaatcatttgataataaagaattaaatgaaggaaaggacgccagtttgcctgcacccagttcagataaacataaatggtggttagaagggggtaaagctgcaaaaattataatcccaggtcttgaagatgataatatggttatgaatccatggcgaccaataaatccatttgagaaaagtaacgagcctgagtttgtttctaaaaatgatttggaagctattcaaaattga

SEQ ID NO: 4475 - protein, 986 aa, Candida albicans SC5314
MRLYLIEKPRTFVITTNTHALIIRHPSPTYKHSGIKGLVSGHSKDKDQNKDTKVLVEFVLKEYLDLSLYRDITPKHGGLLGLLGLLNVKGKTFIGFITRDEWTASATVTDRIYKITDTEFYCINNDEYDYLLDKEYENMSHQERERLRYPAASVQRLLSSGAFYYSKQFDMTSNIQERGFVSSDYKLIADSSFFKSFMWNGFMTEELIETRKRMSPAEQKIIDKSGLLIIVIRGYAKTVNTTVGGCEALMTLISKQSCAKEGPLFGDWGSDGDGYVSNYLESEIIIYTEKFCLSYVIVRGNVPMYWELENNFSTKTILAANGKQIAFPRSFEASQEALVRHFDRLSSQYGDIHVLNTLSDKSYKGVLNSAYEEQLKYFLQNRESTDIGYKVLYTRIPIASSRIKKIGYSGQNPYDIVSLLSNSIIDFGALFYDSKPNSFIGKQLGVFRINSFDSLNKANFLSKIISQEVIDLAFRDIGLELDRELYVKHAQLWEENDLWISKLTLNFASTSDKLHTSHNSIKSSFVKSHITKKYFGGVVESKPNEIAMLKLLGRLQDQSPVTMFNPIHNYVNKELNKRAKDFTSKLDLSVYASTFNVNGSVYEGDIDKWIYPEENDYDLIFIGLQEIVVLNAGQMVNTDFRNKTQWERKILGVLQKRNKYMVMWSGQLGGVALYFFVKESQVKYVSNVECSFKKTGLGGVSANKGGIAVSFKFSDTTICFVSAHLAAGLSNIEERHQNYKALIKGIQFSKNRRIQNHDAVIWLGDFNYRIDLTNDQVKPMILQKLYAKIFECDQLNKQMANGESFPFFSEQEINFPPTYKFDKGTKVYDTSEKQRIPAWTDRILFLSRQNLIEPLSYNSCQNLTFSDHRPVYATFKITVKIINHTIKKNLSDEIYKNYKDSHNGIFDILVKSFDNKELNEGKDASLPAPSSDKHKWWLEGGKAAKIIIPGLEDDNMVMNPWRPINPFEKSNEPEFVSKNDLEAIQN

SEQ ID NO: 4476 - DNA, 2814 bp, Candida albicans SC5314
  CDS (1)..(2814): transl_table=12
atggatacaaaagagctggtcgagtttgttttaaaagaatatctagacttgagcttatatagagacatcaccccgaaacatggtggattactagggttattgggactactaaatgtcaaagggaaaacattcattggctttataactcgagacgaatggactgcatcggcaacggttactgataggatttacaagatcacagatacagagttctactgtattaacaatgatgaatacgattacttgcttgataaggaatatgaaaacatgagtcaccaagaacgtgaacgattgcgatatcctgcagcgtcggtgcaacgattgttgtcgagtggggcattttactattccaagcagtttgatatgacttcaaatattcaagagcgtggatttgtcagtagcgattataaattaattgctgactcttccttttttaaatcgtttatgtggaatggatttatgacggaagaattgatagaaaccaggaaaagaatgtctcctgctgaacaaaagattatcgacaaatcgggacttctcattattgtcatcagaggctatgctaaaactgtcaacactactgttggtgggtgtgaagccttgatgaccttgatatcgaagcagagttgtgcaaaagaaggaccccttttcggggattggggcagtgatggtgatggctatgtttctaactacttggaatccgaaatcattatctatactgaaaaattctgtttgtcttatgttatcgttcgagggaatgtgccgatgtattgggaattggaaaacaatttttcaacgaaaactatacttgcagccaatgggaagcaaattgctttccctcgttcttttgaagcttcgcaggaagcacttgttcgacatttcgataggctttcatctcagtacggagatattcatgttcttaatgcgttatcagataaatcttacaagggtgtgttaaactctgcttatgaagaacaactcaaatactttttacagaacagagagtcaactgatatcggatataaagttttatatactcgtattcctattgcatcatctagaattaaaaaaattggctattcaggacagaatccatacgacatagtatcactactttcgaattcaattatcgactttggtgccttattttacgacagcaaaccaaactcttttattggtaagcaattgggagtatttcgaatcaattctttcgatagtctcaacaaggctaattttctaagtaaaataatcagtcaggaagttatagatttggcattcagagatattggtttggaattggatagagagttatacgtaaagcatgctcagctatgggaagaaaatgatttgtggatatccaaattaacattaaattttgcctcaacaagtgacaagctacacacgtcccacaattcaattaaatcttcctttgttaagtcacatataacgaaaaagtattttggaggtgtagttgaatcgaaaccgaatgaaattgctatgcttaagcttttggggcgattgcaagaccaatctcctgtaaccatgttcaatccaattcataattatgttaacaaagagttgaataagcgtgccaaggattttacctcaaaattggatttatcagtttatgcatcaacatttaatgtaaatggttcagtttatgaaggcgatattgacaaatggatatacccagaggaaaatgattatgacttgatttttattggactacaagaaattgtcgtgcttaacgcaggacaaatggtgaatactgatttccgaaataagacccaatgggaaagaaagattttgggtgtgttgcaaaaacggaacaaatacatggtgatgtggagtggtcaattaggaggggttgccttgtatttttttgtgaaagagtcacaagtcaaatatgtttccaatgttgaatgttctttcaaaaaaaccggtcttggtggagtatcagctaataaaggtgggatagctgtgagtttcaagttttccgataccactatttgttttgtgtctgctcatcttgcggcggggctaagcaacattgaggaaagacaccaaaactataaagcactaattaaggggatccagttttcgaaaaatcgacgcattcaaaaccatgacgctgttatttggttgggtgatttcaattacagaattgatttgactaatgatcaagtaaaaccaatgattttacaaaaattatacgccaagatctttgaatgtgatcaattgaataagcaaatggctaatggggaaagtttcccatttttttcagaacaagaaattaacttcccaccaacttataaatttgataaaggtaccaaagtttacgatactagtgaaaagcagagaatcccggcatggacagatcgtatattatttctttcacgacaaaatcttatagaaccattgctgtacaattcttgccaaaacttgactttttctgatcatcgacccgtttatgctacattcaagattacagttaaaataataaaccacacaattaaaaagaatctatctgacgaaatatataaaaactacaaagacagtcataatggtatatttgatattttagtaaaatcatttgataataaagaattaaatgaaggaaaggacgccagtttgcctgcacccagttcagataaacataaatggtggttagaagggggtaaagctgcaaaaattataatcccaggtcttgaagatgataatatggttatgaatccatggcgaccaataaatccatttgagaaaagtaacgagcctgagtttgtttctaaaaatgatttggaagctattcaaaattga

SEQ ID NO: 4477 - protein, 937 aa, Candida albicans SC5314
MDTKESVEFVLKEYLDLSLYRDITPKHGGLLGLLGLLNVKGKTFIGFITRDEWTASATVTDRIYKITDTEFYCINNDEYDYLLDKEYENMSHQERERLRYPAASVQRLLSSGAFYYSKQFDMTSNIQERGFVSSDYKLIADSSFFKSFMWNGFMTEELIETRKRMSPAEQKIIDKSGLLIIVIRGYAKTVNTTVGGCEALMTLISKQSCAKEGPLFGDWGSDGDGYVSNYLESEIIIYTEKFCLSYVIVRGNVPMYWELENNFSTKTILAANGKQIAFPRSFEASQEALVRHFDRLSSQYGDIHVLNALSDKSYKGVLNSAYEEQLKYFLQNRESTDIGYKVLYTRIPIASSRIKKIGYSGQNPYDIVSLLSNSIIDFGALFYDSKPNSFIGKQLGVFRINSFDSLNKANFLSKIISQEVIDLAFRDIGLELDRELYVKHAQLWEENDLWISKLTLNFASTSDKLHTSHNSIKSSFVKSHITKKYFGGVVESKPNEIAMLKLLGRLQDQSPVTMFNPIHNYVNKELNKRAKDFTSKLDLSVYASTFNVNGSVYEGDIDKWIYPEENDYDLIFIGLQEIVVLNAGQMVNTDFRNKTQWERKILGVLQKRNKYMVMWSGQLGGVALYFFVKESQVKYVSNVECSFKKTGLGGVSANKGGIAVSFKFSDTTICFVSAHLAAGLSNIEERHQNYKALIKGIQFSKNRRIQNHDAVIWLGDFNYRIDLTNDQVKPMILQKLYAKIFECDQLNKQMANGESFPFFSEQEINFPPTYKFDKGTKVYDTSEKQRIPAWTDRILFLSRQNLIEPLSYNSCQNLTFSDHRPVYATFKITVKIINHTIKKNLSDEIYKNYKDSHNGIFDILVKSFDNKELNEGKDASLPAPSSDKHKWWLEGGKAAKIIIPGLEDDNMVMNPWRPINPFEKSNEPEFVSKNDLEAIQN

SEQ ID NO: 4478 - DNA, 3402 bp, Candida albicans SC5314
  CDS (1)..(3402): transl_table=12
atgaagttactatataaggaacaccctcgaacattagtactatattcagatactttcagtttatcatttcgaatcaaatcgtccaaagaactcgattccaagaaaccaacagttaatgttgatttaatcccaaacacaaacatcaccaaagaacaaggttatagaacattaattcgaagagacgtttttggatgtttaggattaatctatgtggaagatcaaatatatcttgcaattattacaggggcattaactaatgttgctcgtcccattgaaaatgaaacagttgataaaatttattcggtggattttgtatctttaaataatgatgattgggattttgttgaattagatagttcaggatatcctattgttgttaatgaagaacaagatgacgatgataataatattactagtgataggtatgcacgagtacaacatccatgttttgaattaaggaaattattatctaatggatcattttattattctaatgattttgatttaacgtcattattacaaaatagaggagttagtagtcctgacactagaataaattctattgatcattataaaccagaatatatgtggaattcatttttaatggatgaattgattcatttccgatctaatttagatacttataatcaattaattttggatgataatcggtttttaactactgtgattagagggtttgcgaaaacaaccccgattggcagtaatggtgattccttgacgattatttctaaacaatcttggaaacgtgctgggacaagatataatactcgaggtattgacgataatgggaatgttgccaattttgttgaaacggaatatatctattataatccatcgaaatcatcaattttcactttcacacaaatcagaggatcggtacctacattttgggaacaagattcaagtttgatgaatcctaaaattactttaacaagatccacccaagcaacacaaccagtttttaataaacattttggtgatattcttcaaagttatggagtgtgtcatattgttgatttactttcgaaaactaaatcatcagaagtacaaatatcacaaagataccaacaactttataatcattgtgacaagaaagaagaaatcgactatacggcatttgatttccatcatgaaacaaaaattgctggaggttttgctggggcaacaaaaattttaccctatttacaagattcattaaatctgtttggttggtttacttatgatatgaatcgtcaagaagttattactcgacaagatgggattttccgtgtaaattgtttagattgtcttgatcgtactaatttaatcgaacaagttatttgtcgatccgttttggaaaatattttaactaatcaagggatttataataatcgtatggcatttgaaggaatgattcaaaaacacaatacattatgggctgataatggtgatgccatatcacaaatttatacggggaccaatgccttgaaatcatcattttcaagatcaggtaaaatgaactttgctggggcattatcagatgttactaaatcagtttcaagaatgtatcaaaatacatttgtcgatgggaaaaaacaactgacaatagatatattggttggagttgatggaagaaattcttgtaaagtgaaagtttataatcctgccagtgaatacattaaaagtaaattaaaagaacaagaaaattcatttacaagttttgaaaatgttaaaatttttacagggacttataatgtcaatgcatttaacccgttgatgacgaaaaatatcgatttaacttcttggttgttcccttctagtgtacaaaatggtgatggatcattaccggatatgtatgccattggattacaagaattgattgaattaaatgcaagttcgatattaaatgctgatggtagtagagcattacaatggtcacaattattaaatgaacaattgaattcttttcaaatggatgaagaatatgtcttgttaagaacagaatcaattgctacaatggcattatttttatatgttaaaaaatccaaagtatcatatgtaacaagagttgctgggtcatccaaaaagactggtttaggaggtatggcagccaataaaggtgcttgtggaattagatgtttatttggtaccacgtcatttgcttttgttacatgtcatttagctgctgggacattggccgtcacagaaagatataatgattattcaacaataatgcaaggattagttttcccccgtaattattatattaaagatcatgatcacgtaatatggtttggtgatttaaattatcgaattgatattcccaatttagaatgtcgtcaattggtggctaatggtgcttacaaggaattattagaaaatgatcaattaactcgtgaaagaagagatcgaggagcttttaatgaatttaaagaaggtttagtgaaatttcctccaacttataaattcgataaatatactaatgattatgatactagtgaaaaacaaagaactccatcatggacagatcgtgttttatttttaagtgataagaaattaactactactaatccattgaaattattaaagtatgattctgctattgatgtcttgtattctgatcataaagccgtttatgcaagttttgaaaccacagctaagattattaatgaacaaatcaagaaaaataaattgaatgaaattattctgtctttatcatttaagaaaataacaccatcaccatcgccatcacctgccccattaacaacatcatcaacaacaacaacaacaacaacaatgtctcgtacatcaagtttaacaaggtcttcaacttcaattttgacaccaactccagtatcagctggaggaaccactgatttaatacatggattaggtcaaacaacaacaaccactttgtcactggcaccacctccgccacctccggcaagacgtgccatgacaacgccttcaactattccaccaattgggttttcttcaactccattaattccatctccattaagttccaatagatcatcaccagcaccatctataaattcaagttcagaaaagaaacatgacaccaaaccaccaattccaccaatgaaaagaaataccacattaaatgatattaaattatcatcaccatcacttacaaattctataaagagtgggaaagttttaaaagatgatagtgatgttgatacaatgaaaaaacttgatgttaaaccaatgattcctaaaaaacctgaaaatttgaaatcaattcataaagatggaaaattggacaataatgggaattcaacatctcaaaacacaaacggtggtgaaagtggtggtggcggagtagccacacccaaatcaatggctagttggcaaccattagttcctggtcgtaaatag

SEQ ID NO: 4479 - protein, 1133 aa, Candida albicans SC5314
MKLLYKEHPRTLVLYSDTFSLSFRIKSSKELDSKKPTVNVDLIPNTNITKEQGYRTLIRRDVFGCLGLIYVEDQIYLAIITGALTNVARPIENETVDKIYSVDFVSLNNDDWDFVELDSSGYPIVVNEEQDDDDNNITSDRYARVQHPCFELRKLLSNGSFYYSNDFDLTSLLQNRGVSSPDTRINSIDHYKPEYMWNSFLMDELIHFRSNLDTYNQLILDDNRFLTTVIRGFAKTTPIGSNGDSLTIISKQSWKRAGTRYNTRGIDDNGNVANFVETEYIYYNPSKSSIFTFTQIRGSVPTFWEQDSSLMNPKITLTRSTQATQPVFNKHFGDILQSYGVCHIVDLLSKTKSSEVQISQRYQQLYNHCDKKEEIDYTAFDFHHETKIAGGFAGATKILPYLQDSLNSFGWFTYDMNRQEVITRQDGIFRVNCLDCLDRTNLIEQVICRSVLENILTNQGIYNNRMAFEGMIQKHNTLWADNGDAISQIYTGTNALKSSFSRSGKMNFAGALSDVTKSVSRMYQNTFVDGKKQSTIDILVGVDGRNSCKVKVYNPASEYIKSKLKEQENSFTSFENVKIFTGTYNVNAFNPLMTKNIDLTSWLFPSSVQNGDGSLPDMYAIGLQELIELNASSILNADGSRALQWSQLLNEQLNSFQMDEEYVLLRTESIATMALFLYVKKSKVSYVTRVAGSSKKTGLGGMAANKGACGIRCLFGTTSFAFVTCHLAAGTLAVTERYNDYSTIMQGLVFPRNYYIKDHDHVIWFGDLNYRIDIPNLECRQLVANGAYKELLENDQLTRERRDRGAFNEFKEGLVKFPPTYKFDKYTNDYDTSEKQRTPSWTDRVLFLSDKKLTTTNPLKLLKYDSAIDVLYSDHKAVYASFETTAKIINEQIKKNKLNEIISSLSFKKITPSPSPSPAPLTTSSTTTTTTTMSRTSSLTRSSTSILTPTPVSAGGTTDLIHGLGQTTTTTLSSAPPPPPPARRAMTTPSTIPPIGFSSTPLIPSPLSSNRSSPAPSINSSSEKKHDTKPPIPPMKRNTTLNDIKLSSPSLTNSIKSGKVLKDDSDVDTMKKLDVKPMIPKKPENLKSIHKDGKLDNNGNSTSQNTNGGESGGGGVATPKSMASWQPLVPGRK

SEQ ID NO: 4480 - DNA, 3483 bp, Aspergillus fumigatus Af293
  CDS (1)..(3483)
atgcctgttttgcgagtcctctgcaaagactaccctcagcgtactctgattttggctactactgacgacgctttggtatttaaagccatcgcaacagaagtggaccacagtacaggaaaaaaagaacgagacaatatccattgcttggttgaattttgcagtttgtcttccgtggacttaacaggttaccgccgtctatgcgatgggcacggtacgcttgggttaatcgctcttgacggagatgtgttcttgtgtgtggtgactggtgcctccaaggccgcaacagttaggcctggcgaagctgtatggcgaattgacaatgtgcactttctttgtctcaatcattcatgcaatgaagatggtcttaattatgagtccgaatccgagtttgccgctgaagaatccaaccggggtgaagataaagaaattgtcactgatcacccattcttagcgttgaaaaagctcctgagtgatggcagtttttactatagcctagatttcgatctcactaatcggctgcagaaccgctcgaacaaagctgatgcgttcgacatgggctctcttgatgaggacatgctgtggaactcatacatgattaacccccttctttccctcagaagccacttgtctcgccttgggaaactgcacctcgacatgtctcgaatgttgacatatgtaatacgaggattctgtagcactttgaccattcccacttctagaccgatagtccagcaagcaccaacgcgcttgccaccaacattgactgttatatcacgccagtcatctcgacgggcaggtacgagattcaattctaggggcattgacgatgacggaaacgttgcgaattttgtggaaacggaaactgttctctggattcctccctgctttactttctcgtacgtccagattcgtggttctgtgcccgttttttgggaacaagcacctggcttcttccctggccagcagaagattgaggtgatcaggtcatgcgaggcaaccaaacacgccttcgacaagcacttcgaaagtcttgaatcacgatacggcgctgttcatattgttaatctcttgagctctctgaaacccggagaagttgagctttcaacgaggtttaacgaattggttagccgaagtccacttaaccagaaggctaacgctgatgcctcctccaaccatatgttacttgaaatgacggaattcgattttcatgcggaggcccgcggtccgctaggatatggagctagtgatcaaatcaaggacgttattctgcattctgtggatggttttggatacttcttgtcagagagcacttgctatggtaacgaggcaaaaacctcatccgtcgttctgcaacaagaaggcgtttttcggacgaattgtctagattgtcttgacagaaccaatcttgtacagacgatcattagtactatggcccttgaatctttctttcgtcaacagggagctcacattgatcccgaactttggctcaggcactcaaccctttgggccgacaatggggatgctctatcgcgaatctacgctggtactggtgcgctgaaaagctcattcacgcgacatggaagaatgtctctcgctggtgcccttgcagatgcacgaaaaaccgcaacacggctatacgtgaacaacttctccgacaaagctcggcaaaggacaatagatttactactaggacgtctaccaaaccaagccacagtgcagctcttcgatccaatgaatgatatagtctcggagaaactcgctcggcgagcatccgagtattcttacaagaaatcgactctgatctggactggaacgttcaacgtgaatggacgccatgagggccctgataacgatttaactccctggctctttcctctccccgatcaggggggggaagatccaagcatctttgccgttggtttccaagaaattgttgcactaaatccacaacaaattatgtctaccgacccaactcctcgcaaagtgtgggaagccgctgtcagaaattgtctcaacaatcgtgctgagaagatggggagtacaaagtacgttcttctgcggagtggccagctggttggagcagctcttatgatattcgttaaagaagatatactcggagacataaagaacgttgaagggagtgtcaggaaaacaggtctctcggggatgagcggtaacaaaggaggctgtgctatccgctttgagtattcaaagactcgattatgctttgtaactgctcaccttgcagctggattcgcgaactatgaagagagaaacaatgactataaaattatctgtcgaggtctcaggttccagaaaaacagaacgattgatgatcatgacactatcatctggcttggtgatttcaactaccgaataggtctcagtaatcaaacagtcagagacctggcagcgcagcgcaactaccagaggttgcacgacaatgatcagctaaacctgcaaatgatggcgggcaatgtgttccaattttacagcgagggactgatttcatttccaccgacttataaatatgacgttggcacaaattattacgacacatccgaaaagtcccgcatccctgcatggtgcgatagaattctgtggaaaggatcaaatatacatcagttgcattacgactctgcctgtttacaatgctcagatcatcgccctgtgtgggcagttttctcctgtgacatcaattttgttgatgatcacctaagagaaaatatcaggagcatgatctacgcaatggaggtaggggattcacccgagacaccggcaaagtcaaagacccaagcaaaagtgcgtaagcgagagtcagccgaactggactttcttacacttgaccttccatcagccagctcagacgatcggagatggtggttggacaatggtatgccggtgaaatcaattatacaacccccttcaaatggatggtcactgaacatgaatcgcgagtccaacccattttcttcaagtaatgcccctgattgggtacctgcaagaagattaacggacagtcaaaaggctgtggttgataacatagatcccatcacatacaagcctccattgcccccacgcggtgggaatggagctgcggattcttcggatttaatttacgaaactgacatgcaatcttccagagcaaatggggcaaaaaaagcaccaccaatccctcgaaaacctgttgctttacgcaacgatcataaggccttgtctggccaagctggatggcagtccggtatgaaagcactggggagcgttccgtcgcagccaagtaatcgacttgacgttccgaggttcgatttgggcgaccaaattaaacctccacctgctgtgcacagggttccaggtagtcaagactctctaagcgttggatccaggcaccttggtggatttgagcgtcatacagacatcaccaaggacctacttgatggtgaggtagactcagaaatcaagtgggagcccttgttaccaaaatga

SEQ ID NO: 4481 - protein, 1160 aa, Aspergillus fumigatus Af293
MPVLRVLCKDYPQRTLILATTDDALVFKAIATEVDHSTGKKERDNIHCLVEFCSLSSVDLTGYRRLCDGHGTLGLIALDGDVFLCVVTGASKAATVRPGEAVWRIDNVHFLCLNHSCNEDGLNYESESEFAAEESNRGEDKEIVTDHPFLALKKLLSDGSFYYSLDFDLTNRLQNRSNKADAFDMGSLDEDMLWNSYMINPLLSLRSHLSRLGKLHLDMSRMLTYVIRGFCSTLTIPTSRPIVQQAPTRLPPTLTVISRQSSRRAGTRFNSRGIDDDGNVANFVETETVLWIPPCFTFSYVQIRGSVPVFWEQAPGFFPGQQKIEVIRSCEATKHAFDKHFESLESRYGAVHIVNLLSSLKPGEVELSTRFNELVSRSPLNQKANADASSNHMLLEMTEFDFHAEARGPLGYGASDQIKDVILHSVDGFGYFLSESTCYGNEAKTSSVVLQQEGVFRTNCLDCLDRTNLVQTIISTMALESFFRQQGAHIDPELWLRHSTLWADNGDALSRIYAGTGALKSSFTRHGRMSLAGALADARKTATRLYVNNFSDKARQRTIDLLLGRLPNQATVQLFDPMNDIVSEKLARRASEYSYKKSTLIWTGTFNVNGRHEGPDNDLTPWLFPLPDQGGEDPSIFAVGFQEIVALNPQQIMSTDPTPRKVWEAAVRNCLNNRAEKMGSTKYVLLRSGQLVGAALMIFVKEDILGDIKNVEGSVRKTGLSGMSGNKGGCAIRFEYSKTRLCFVTAHLAAGFANYEERNNDYKIICRGLRFQKNRTIDDHDTIIWLGDFNYRIGLSNQTVRDLAAQRNYQRLHDNDQLNLQMMAGNVFQFYSEGLISFPPTYKYDVGTNYYDTSEKSRIPAWCDRILWKGSNIHQLHYDSACLQCSDHRPVWAVFSCDINFVDDHLRENIRSMIYAMEVGDSPETPAKSKTQAKVRKRESAELDFLTLDLPSASSDDRRWWLDNGMPVKSIIQPPSNGWSLNMNRESNPFSSSNAPDWVPARRLTDSQKAVVDNIDPITYKPPLPPRGGNGAADSSDLIYETDMQSSRANGAKKAPPIPRKPVALRNDHKALSGQAGWQSGMKALGSVPSQPSNRLDVPRFDLGDQIKPPPAVHRVPGSQDSLSVGSRHLGGFERHTDITKDLLDGEVDSEIKWEPLLPK

SEQ ID NO: 4482 - DNA, 3537 bp, Ustilago maydis 521
  CDS (1)..(3537)
atgcacgtctacttgcaggatgcgcctcgcgtgatcgcactcgtctcgggtgacattgacgcatccaccaacggctacgcatccgaaaagctcgcttctgcaacagccatcctcatctcgacgcaagtaaatccaatccaaaacgacaatgcatcggtgctcgcaggttcccatgcggccaatcccgtttccaccgccaaggcagtagtagaagtcgtcaaggagcaagaaatacaagccctcacgctacaaaggctcactgcaaagtccatatacgggtctcttggcctcatcaatgtcggccaggacctcttcgtggctgttgtcacctcggcccaggaggtcggcgcaattcgaccaggcgagacggtgatgcgcattacttcggtctccttctactgcgtcaatcgctcgacatgggacgaaacgcttatatcggaagctccaggctcgcagccggagatgcacgactcgtatgggccgggtcatgaaggtgctgtcacccagccaagtgtctacgagcatccgtgcaccagtctgaagaagtttttgggcactggcactttctactttgcccagggcggaaccttcgatctttcgactcgcctcagtaaacggcttgccgatgccgccagggcacaaaagtcgggtcacgacattgcgcagtacgacggacgctttgtatggaacaattacatgatcgaaccgctcattcactttcgcgaacgactcgacagagcccatcgtgctagattggacgatggctgcttcctgctactggcgatacaaggatttgtaggcactttcaaggtgcctctttctccagcaagtgaaccaacgtttggagcttctcctgcagcttcggcgaccatagcaactctggccttgatcagtcgtctcagctggaagagggcaggtacacgcttcaacacccgcggagttgacgatgacggcaatgttgccaactttgtcgagaccgagacgctcttcagcaacggtaacgtcacatttgcctatgaccaagtccgtggctcggtcccactcttctgggagcagcaaggccttcaagccttcaacgcaaaaatccagatcactcgctcgcgtggcgcttcgcagcccgccttcgatcgccactttgctgaccttatttctcactactctcgtattcatgccatcaatcttctaggcacacgcgatgcagagacggtcctcacttcagcttacgcagagcacatgcgacacagtgcggcggaaaagatagctgtccttcctccggacgaatcagcttcattgaaggacgacgttgtcctagatgacggttccgagcgcctcggcctgaccaatttcgacttccatacagtttcacgtaacacgggtggcattgatggtgtccgcagtgatctccgctatctcggtcctgtgcagcttaagcgcaaggcattcgggtattcggtcattgactcggccaccggccaggtgcttcggcgccaaaagggcatctttcggaccaactgcctcgactgcctggaccgcacgaatgtgatcgaagatatgctctcacgctccatgctggacacgatgttcgaagctgctgcgaatcgcgacacctcctaccaagcatttcaagacccgaatcattcgatctgggtctctcatcgtgtgctctgggcagaaaatggcgatgcgctctccaagatctatgctggcacaggcgctctcaacacaagcttcaccagaaccggcaggaagacgctcggcggtcttctaagcgacgcagcaaagagtgcaggtcgaatgtacatcaacaatttccaggacaagaacaagcaaaacgtcatcgatgcgctcctcggtaacatggccaatcaaaaaccggtgactgtgttcgatcctgtgcttgaaagcgtcaccgcagagctcaatgctagggtcgacgaatattcctctagtcgcgatatttccatacatgtcggcacgtacaacctcaacggaaaactccctggcgagtctctcattccatggctattccccgatggcgaggatcgagagcccgacatctttgccataggattccaagagattgtgcagctgacgccgcagcagatcctcatgactgatccggacaagattcgtacctgggaggccaagatcatggaaacaatcgcgcggagaagcggcggacgctcccgctacgttctgcttcgcagcgaacagctcgtaggaactgcactcgtgattctcatcaaagaagagctcatcaacgatgtccggctcgtcgaagccgcgacgcgtaagacgggtctcaaaggtatgagcggcaataaaggaggcgtcgcaatccgcatggattacttcgacactgccatctgctttgtcaccgcccattttgctgcaggccattccgcgtgggaagagaggaacgccgactattggaccatcacacgtggtctctcgttcgcacgcggcaagactgttggcagtcacgaccatgtcatctggcttggtgacttcaactatcgcatcgatctaacaaacgacgctgttcgctctatgctagcgcgcgaggaccttgttgggctctattcacgggaccagcttcatcgcagcaaagacgccggcgaagtgttccctgggtacgaggaagggtctatcacgtttgcacccacctacaagtatgacaacggttctgaccagtacgattcatctgaaaaacagcgaatccccgcgtggaccgatcgcatcctgtttcgcgggcttgacctacgtcagctgagctattcgcgggccgagctgaggaccagcgaccacagacccgtttatgccagctttgttgggcccgtccgcatcgtggatcatctgaagcgcaacgaaatacggaagcagctactgcaggcgaacaaggccgtcatcggactcgcgggcggaggagacgagtcatcggattgttccgacgacgaaagtctccccgatccttctgatgaacaccagcaatggtggaaccagtcgatgtccatgtccgaaggtgacagtagtgaagacgagagtcttgggctctcgaatcctttccgccaagataatgcggagggtccaaagtggacgcagaattcctcccaagttgccaccaaatctcgaaccacgaagctgtcgcttggtagcagagcaggctcggaacgcgctcctgagcgaattagctcaacaccggcttctcctactctaacatcaagcaccaatgaggctagcccggcctttgcgggagcgcctttgcataaaacgatatcgacgtcgcccaccgttggcaggaggattgtttcaggacctgcaatgctggccaacggacgatctgctccacctccaatccccaccaagccgacgactgcggcaactagcatcagtgggagcggtgcgactttgccggcatgctcaaagtcgtcgtctcctgcgccaccggagttgcccaagagacctggcatgggttcgcgatctacgtcctattcatcggtcaagtctcgcaagagtctcttggacgatagcgattga

SEQ ID NO: 4483 - protein, 1178 aa, Ustilago maydis 521
MHVYLQDAPRVIALVSGDIDASTNGYASEKLASATAILISTQVNPIQNDNASVLAGSHAANPVSTAKAVVEVVKEQEIQALTLQRLTAKSIYGSLGLINVGQDLFVAVVTSAQEVGAIRPGETVMRITSVSFYCVNRSTWDETLISEAPGSQPEMHDSYGPGHEGAVTQPSVYEHPCTSLKKFLGTGTFYFAQGGTFDLSTRLSKRLADAARAQKSGHDIAQYDGRFVWNNYMIEPLIHFRERLDRAHRARLDDGCFLLLAIQGFVGTFKVPLSPASEPTFGASPAASATIATLALISRLSWKRAGTRFNTRGVDDDGNVANFVETETLFSNGNVTFAYDQVRGSVPLFWEQQGLQAFNAKIQITRSRGASQPAFDRHFADLISHYSRIHAINLLGTRDAETVLTSAYAEHMRHSAAEKIAVLPPDESASLKDDVVLDDGSERLGLTNFDFHTVSRNTGGIDGVRSDLRYLGPVQLKRKAFGYSVIDSATGQVLRRQKGIFRTNCLDCLDRTNVIEDMLSRSMLDTMFEAAANRDTSYQAFQDPNHSIWVSHRVLWAENGDALSKIYAGTGALNTSFTRTGRKTLGGLLSDAAKSAGRMYINNFQDKNKQNVIDALLGNMANQKPVTVFDPVLESVTAELNARVDEYSSSRDISIHVGTYNLNGKLPGESLIPWLFPDGEDREPDIFAIGFQEIVQLTPQQILMTDPDKIRTWEAKIMETIARRSGGRSRYVLLRSEQLVGTALVILIKEELINDVRLVEAATRKTGLKGMSGNKGGVAIRMDYFDTAICFVTAHFAAGHSAWEERNADYWTITRGLSFARGKTVGSHDHVIWLGDFNYRIDLTNDAVRSMLAREDLVGLYSRDQLHRSKDAGEVFPGYEEGSITFAPTYKYDNGSDQYDSSEKQRIPAWTDRILFRGLDLRQLSYSRAELRTSDHRPVYASFVGPVRIVDHLKRNEIRKQLLQANKAVIGLAGGGDESSDCSDDESLPDPSDEHQQWWNQSMSMSEGDSSEDESLGLSNPFRQDNAEGPKWTQNSSQVATKSRTTKLSLGSRAGSERAPERISSTPASPTLTSSTNEASPAFAGAPLHKTISTSPTVGRRIVSGPAMLANGRSAPPPIPTKPTTAATSISGSGATLPACSKSSSPAPPELPKRPGMGSRSTSYSSVKSRKSLLDDSD

SEQ ID NO: 4484 - DNA, 2835 bp, Canis familiaris
  CDS (1)..(2835)
atggcgttcagcaaaggatttcggatctatcacaaactggaccccccacctttcagtctcatagtggaaactaggcataaggaggaatgtctcatgttcgagtctggggctgtagctgtgctttcatctgcagaaaaagaggcaatcaagggtacatactccaaagtactggatgcatatggacttttaggtgttttacgattaaatcttggtgataccatgttacattatctggttttagtcactggatgtatgtctgttggaaaaattcaagaatctgaagttttccgagttacttctactgaattcatatcactacgaattgattcttcagaagaggatcgcatttcagaagtgcgaaaagttttgaattcaggaaacttttattttgcatggtctgcatctggaatcagtttagatctaagtcttaatgcacatcgtagcatgcaagaacacacaactgataatagatttttctggaatcagtctttgcatttgcatctcaagcactatggtgtgaattgtgatgactggttattacgcctcatgtgtgggggagtagaaatcagaacaatttatgctgctcataagcaggcaaaggcttgcctcatttccagactcagctgtgaacgagctgggaccaggtttaatgtccgaggaacaaatgatgatggtcacgttgctaattttgtagaaacagaacaggttgtatacttagatgactctgtttcttctttcatacaaatccggggatccgttcctttgttctgggagcaaccagggttgcaggtgggatctcatcgtgttcgtatgtcaaggggatttgaagccaatgcacctgcttttgataggcattttagaacacttaagaatttatatggtaaacaaataatagtaaatttgcttggatctaaggaaggtgaacatatgctaagtaaggctttccagagtcatttgaaagcttctgaacacgttgctgatatccacatggtgaattttgactatcatcaaatggttaaaggaggaaaggcagaaaaattgcatagtgttcttaaacctcaagtccaaaagtttgtagattatggatttttttatttcaatggaagtgaagtccaaagatgccagagtggtactgttcgaacaaactgcttggactgtcttgatagaacaaatagtgtgcaggcattccttggcttagagatgctagctaaacagctggaagctctcggcttggctgaaaagcctcagttggtgactcgctttcaagaagtttttcggtcaatgtggtctgtgaatggtgattccatcagtaagatatacgcagggactggagctcttgaaggaaaggctaaggctggaaagttaaaagatggtgctcgttctgttactagaacgattcagaataacttctttgacagctccaagcaagaggccatagatgttttactactgggaaatactctaaatagtgatttagctgacaaagctcgagcacttctaactacaggaagtttgcgtggtatatcaaatagcaagagactagaagtctacatgtttgtccctggaaacacatcttccaaagtactaaagagcatgtgtgagaatttctacaagtattcaaagcccaagaaaattcgagtatgtgttggaacctggaacgtgaatggtgggaagcagtttcgcagtatagcttttaagaatcagacactcaccgactggcttcttgatgcacctaagttagctggcatccaggaatttcaagataaaagaagtaagccaacagatatatttgcaattggttttgaagaaatggttgagttaaatgctggaaacatcgtgaatgcaagcacaaccaatcagaagctctgggctgtggaactgcagaagaccatctccagagacaacaagtatgtgctgctggcttctgagcagctggtgggcgtctgcctgtttgtttttatcagaccacagcatgctcctttcatcagggatgttgcagttgatactgtgaagactggaatgggaggtgccactggaaataagggagcagttgcaatccgaatgctattccatacaacaagcctctgcttcgtctgtagccactttgctgcagggcaatcacaagtcaaagaaagaaatgaagattttgtagaaattgcacggaagttgagttttccaatgggaaggatgctgttttcccatgactacgtattttggtgtggtgatttcaactatcggattgatctccctaatgaagaagttaaagagctcataagacagcaaaattgggattctcttatagcaggagatcagcttatcaatcaaaaaaatgctggacagatttttagaggatttttagaaggaaaagtgacctttgctccgacatacaaatatgacttgttttctgacgactatgacaccagtgaaaagtgccgcacccctgcttggacagaccgtgtcctctggagaagaaggaagtggccttttgacagatcagctgaagatttagatcttctaaatgctagttttcaagatggaagcaaaatcctgtacacatggactcctggcactttgctgcactatggaagagctgagctgaagacttctgaccataggcctgtcgttgccctgattgatatagatatatttgaagttgaagctgaagagaggcaaaacatttataaagaagtaatcgcagttcagggcccaccagatggtacagtattggtctcaatcaaaagttctgtccaagaaaataattttttcgatgatgctttgattgatgagcttctgcagcagtttacaaattttggtgaagttatcctcataaggtga

SEQ ID NO: 4485 - protein, 944 aa, Canis familiaris
MAFSKGFRIYHKLDPPPFSLIVETRHKEECLMFESGAVAVLSSAEKEAIKGTYSKVLDAYGLLGVLRLNLGDTMLHYLVLVTGCMSVGKIQESEVFRVTSTEFISLRIDSSEEDRISEVRKVLNSGNFYFAWSASGISLDLSLNAHRSMQEHTTDNRFFWNQSLHLHLKHYGVNCDDWLLRLMCGGVEIRTIYAAHKQAKACLISRLSCERAGTRFNVRGTNDDGHVANFVETEQVVYLDDSVSSFIQIRGSVPLFWEQPGLQVGSHRVRMSRGFEANAPAFDRHFRTLKNLYGKQIIVNLLGSKEGEHMLSKAFQSHLKASEHVADIHMVNFDYHQMVKGGKAEKLHSVLKPQVQKFVDYGFFYFNGSEVQRCQSGTVRTNCLDCLDRTNSVQAFLGLEMLAKQLEALGLAEKPQLVTRFQEVFRSMWSVNGDSISKIYAGTGALEGKAKAGKLKDGARSVTRTIQNNFFDSSKQEAIDVLLLGNTLNSDLADKARALLTTGSLRGISNSKRLEVYMFVPGNTSSKVLKSMCENFYKYSKPKKIRVCVGTWNVNGGKQFRSIAFKNQTLTDWLLDAPKLAGIQEFQDKRSKPTDIFAIGFEEMVELNAGNIVNASTTNQKLWAVELQKTISRDNKYVLLASEQLVGVCLFVFIRPQHAPFIRDVAVDTVKTGMGGATGNKGAVAIRMLFHTTSLCFVCSHFAAGQSQVKERNEDFVEIARKLSFPMGRMLFSHDYVFWCGDFNYRIDLPNEEVKELIRQQNWDSLIAGDQLINQKNAGQIFRGFLEGKVTFAPTYKYDLFSDDYDTSEKCRTPAWTDRVLWRRRKWPFDRSAEDLDLLNASFQDGSKILYTWTPGTLLHYGRAELKTSDHRPVVALIDIDIFEVEAEERQNIYKEVIAVQGPPDGTVLVSIKSSVQENNFFDDALIDELLQQFTNFGEVILIR

SEQ ID NO: 4486 - DNA, 3933 bp, Canis familiaris
  CDS (1)..(3933)
atggcgttcagcaaaggatttcggatctatcacaaactggaccccccacctttcagtctcatagtggaaactaggcataaggaggaatgtctcatgttcgagtctggggctgtagctgtgctttcatctgcagaaaaagaggcaatcaagggtacatactccaaagtactggatgcatatggacttttaggtgttttacgattaaatcttggtgataccatgttacattatctggttttagtcactggatgtatgtctgttggaaaaattcaagaatctgaagttttccgagttacttctactgaattcatatcactacgaattgattcttcagaagaggatcgcatttcagaagtgcgaaaagttttgaattcaggaaacttttattttgcatggtctgcatctggaatcagtttagatctaagtcttaatgcacatcgtagcatgcaagaacacacaactgataatagatttttctggaatcagtctttgcatttgcatctcaagcactatggtgtgaattgtgatgactggttattacgcctcatgtgtgggggagtagaaatcagaacaatttatgctgctcataagcaggcaaaggcttgcctcatttccagactcagctgtgaacgagctgggaccaggtttaatgtccgaggaacaaatgatgatggtcacgttgctaattttgtagaaacagaacaggttgtatacttagatgactctgtttcttctttcatacaaatccggggatccgttcctttgttctgggagcaaccagggttgcaggtgggatctcatcgtgttcgtatgtcaaggggatttgaagccaatgcacctgcttttgataggcattttagaacacttaagaatttatatggtaaacaaataatagtaaatttgcttggatctaaggaaggtgaacatatgctaagtaaggctttccagagtcatttgaaagcttctgaacacgttgctgatatccacatggtgaattttgactatcatcaaatggttaaaggaggaaaggcagaaaaattgcatagtgttcttaaacctcaagtccaaaagtttgtagattatggatttttttatttcaatggaagtgaagtccaaagatgccagagtggtactgttcgaacaaactgcttggactgtcttgatagaacaaatagtgtgcaggcattccttggcttagagatgctagctaaacagctggaagctctcggcttggctgaaaagcctcagttggtgactcgctttcaagaagtttttcggtcaatgtggtctgtgaatggtgattccatcagtaagatatacgcagggactggagctcttgaaggaaaggctaagttaaaagatggtgctcgttctgttactagaacgattcagaataacttctttgacagctccaagcaagaggccatagatgttttactactgggaaatactctaaatagtgatttagctgacaaagctcgagcacttctaactacaggaagtttgcgtgtttctgaacagacattacagtcagcatcttccaaagtactaaagagcatgtgtgagaatttctacaagtattcaaagcccaagaaaattcgagtatgtgttggaacctggaacgtgaatggtgggaagcagtttcgcagtatagcttttaagaatcagacactcaccgactggcttcttgatgcacctaagttagctggcatccaggaatttcaagataaaagaagtaagccaacagatatatttgcaattggttttgaagaaatggttgagttaaatgctggaaacatcgtgaatgcaagcacaaccaatcagaagctctgggctgtggaactgcagaagaccatctccagagacaacaagtatgtgctgctggcttctgagcagctggtgggcgtctgcctgtttgtttttatcagaccacagcatgctcctttcatcagggatgttgcagttgatactgtgaagactggaatgggaggtgccactggaaataagggagcagttgcaatccgaatgctattccatacaacaagcctctgcttcgtctgtagccactttgctgcagggcaatcacaagtcaaagaaagaaatgaagattttgtagaaattgcacggaagttgagttttccaatgggaaggatgctgttttcccatgactacgtattttggtgtggtgatttcaactatcggattgatctccctaatgaagaagttaaagagctcataagacagcaaaattgggattctcttatagcaggagatcagcttatcaatcaaaaaaatgctggacagatttttagaggatttttagaaggaaaagtgacctttgctccgacatacaaatatgacttgttttctgacgactatgacaccagtgaaaagtgccgcacccctgcttggacagaccgtgtcctctggagaagaaggaagtggccttttgacagatcagctgaagatttagatcttctaaatgctagttttcaagatggaagcaaaatcctgtacacatggactcctggcactttgctgcactatggaagagctgagctgaagacttctgaccataggcctgtcgttgccctgattgatatagatatatttgaagttgaagctgaagagaggcaaaacatttataaagaagtaatcgcagttcagggcccaccagatggtacagtattggtctcaatcaaaagttctgtccaagaaaataattttttcgatgatgctttgattgatgagcttctgcagcagtttacaaattttggtgaagttatcctcataagatttgtggaagataaaatgtgggtcacatttttggagggaagctctgccttgagtgttctgaacctaaatggtaaagagttattgggtcggactataactattactttaaaaagtccagactggatcaaaaatttggaggaagaaatgagtttagagaaaattaatgttgcattgccatcatcgacaagctccaccctgcttggtgaagatgcggaggtcactgcagattttgatatggaaggtgatgtcgatgactacagtgctgaagtggaggaaattcttccccagcacctccagccatcttcaagttctggcctgggcacttccccaggctcttcaccccggaccagtccctgccagtcaccgaccatatcggagggccctgtaccttcccttcctgtaagaccaagccgagcaccatcaagaactcctgggcacccgagctcacaaagttctcctgtcgacactctcccagcaacacagctacagcaaagagattcccagccccttgagcccaaacggccacctcctccccgcccgattgctccccccgcacgccctgcgcccccccagagaccacctccaccttcaggggctaggagtcctgcacctgctagaaaagaattcggaggtgttggagcccctcccagtcctggggcagctaggcgagagatggaagcacccaaaagccctggaacaacacggaaagatactataggacgcaatcagccttcacctcaagcaggattcacaggcccaggacctgctggatacagtgcagccagaccgactgttccaccccgtgcaggagtgatcagtgccccccagagccatgctcgggcatctgctggaagattgactcctgaaagccaaagcaaaccatcagaagtcccaaaaggtccagttcttcttcctgaaccactgaagcctcaggctgcccttcctgtgcaggcttctctgcccccacctgttcagaagatgcaggagcctcttgtccctgtggcagcacctttgcctcagtctgccccccagccgaacttggaaaccccgccacagccaccccctcggagccggtcgtcccacagcttgccttcagagccttcatcacaaccacagcaggagcaaccatcagggtaa

SEQ ID NO: 4487 - protein, 1310 aa, Canis familiaris
MAFSKGFRIYHKLDPPPFSLIVETRHKEECLMFESGAVAVLSSAEKEAIKGTYSKVLDAYGLLGVLRLNLGDTMLHYLVLVTGCMSVGKIQESEVFRVTSTEFISLRIDSSEEDRISEVRKVLNSGNFYFAWSASGISLDLSLNAHRSMQEHTTDNRFFWNQSLHLHLKHYGVNCDDWLLRLMCGGVEIRTIYAAHKQAKACLISRLSCERAGTRFNVRGTNDDGHVANFVETEQVVYLDDSVSSFIQIRGSVPLFWEQPGLQVGSHRVRMSRGFEANAPAFDRHFRTLKNLYGKQIIVNLLGSKEGEHMLSKAFQSHLKASEHVADIHMVNFDYHQMVKGGKAEKLHSVLKPQVQKFVDYGFFYFNGSEVQRCQSGTVRTNCLDCLDRTNSVQAFLGLEMLAKQLEALGLAEKPQLVTRFQEVFRSMWSVNGDSISKIYAGTGALEGKAKLKDGARSVTRTIQNNFFDSSKQEAIDVLLLGNTLNSDLADKARALLTTGSLRVSEQTLQSASSKVLKSMCENFYKYSKPKKIRVCVGTWNVNGGKQFRSIAFKNQTLTDWLLDAPKLAGIQEFQDKRSKPTDIFAIGFEEMVELNAGNIVNASTTNQKLWAVELQKTISRDNKYVLLASEQLVGVCLFVFIRPQHAPFIRDVAVDTVKTGMGGATGNKGAVAIRMLFHTTSLCFVCSHFAAGQSQVKERNEDFVEIARKLSFPMGRMLFSHDYVFWCGDFNYRIDLPNEEVKELIRQQNWDSLIAGDQLINQKNAGQIFRGFLEGKVTFAPTYKYDLFSDDYDTSEKCRTPAWTDRVLWRRRKWPFDRSAEDLDLLNASFQDGSKILYTWTPGTLLHYGRAELKTSDHRPVVALIDIDIFEVEAEERQNIYKEVIAVQGPPDGTVLVSIKSSVQENNFFDDALIDELLQQFTNFGEVILIRFVEDKMWVTFLEGSSALSVLNLNGKELLGRTITITLKSPDWIKNLEEEMSLEKINVALPSSTSSTLLGEDAEVTADFDMEGDVDDYSAEVEEILPQHLQPSSSSGLGTSPGSSPRTSPCQSPTISEGPVPSLPVRPSRAPSRTPGHPSSQSSPVDTLPATQLQQRDSQPLEPKRPPPPRPIAPPARPAPPQRPPPPSGARSPAPARKEFGGVGAPPSPGAARREMEAPKSPGTTRKDTIGRNQPSPQAGFTGPGPAGYSAARPTVPPRAGVISAPQSHARASAGRLTPESQSKPSEVPKGPVLLPEPLKPQAALPVQASLPPPVQKMQEPLVPVAAPLPQSAPQPNLETPPQPPPRSRSSHSLPSEPSSQPQQEQPSG

SEQ ID NO: 4488 - DNA, 2784 bp, Canis familiaris
  CDS (1)..(2784)
atggcgttcagcaaaggatttcggatctatcacaaactggaccccccacctttcagtctcatagtggaaactaggcataaggaggaatgtctcatgttcgagtctggggctgtagctgtgctttcatctgcagaaaaagaggcaatcaagggtacatactccaaagtactggatgcatatggacttttaggtgttttacgattaaatcttggtgataccatgttacattatctggttttagtcactggatgtatgtctgttggaaaaattcaagaatctgaagttttccgagttacttctactgaattcatatcactacgaattgattcttcagaagaggatcgcatttcagaagtgcgaaaagttttgaattcaggaaacttttattttgcatggtctgcatctggaatcagtttagatctaagtcttaatgcacatcgtagcatgcaagaacacacaactgataatagatttttctggaatcagtctttgcatttgcatctcaagcactatggtgtgaattgtgatgactggttattacgcctcatgtgtgggggagtagaaatcagaacaatttatgctgctcataagcaggcaaaggcttgcctcatttccagactcagctgtgaacgagctgggaccaggtttaatgtccgaggaacaaatgatgatggtcacgttgctaattttgtagaaacagaacaggttgtatacttagatgactctgtttcttctttcatacaaatccggggatccgttcctttgttctgggagcaaccagggttgcaggtgggatctcatcgtgttcgtatgtcaaggggatttgaagccaatgcacctgcttttgataggcattttagaacacttaagaatttatatggtaaacaaataatagtaaatttgcttggatctaaggaaggtgaacatatgctaagtaaggctttccagagtcatttgaaagcttctgaacacgttgctgatatccacatggtgaattttgactatcatcaaatggttaaaggaggaaaggcagaaaaattgcatagtgttcttaaacctcaagtccaaaagtttgtagattatggatttttttatttcaatggaagtgaagtccaaagatgccagagtggtactgttcgaacaaactgcttggactgtcttgatagaacaaatagtgtgcaggcattccttggcttagagatgctagctaaacagctggaagctctcggcttggctgaaaagcctcagttggtgactcgctttcaagaagtttttcggtcaatgtggtctgtgaatggtgattccatcagtaagatatacgcagggactggagctcttgaaggaaaggctaaggctggaaagttaaaagatggtgctcgttctgttactagaacgattcagaataacttctttgacagctccaagcaagaggccatagatgttttactactgggaaatactctaaatagtgatttagctgacaaagctcgagcacttctaactacaggaagtttgcgtgcatcttccaaagtactaaagagcatgtgtgagaatttctacaagtattcaaagcccaagaaaattcgagtatgtgttggaacctggaacgtgaatggtgggaagcagtttcgcagtatagcttttaagaatcagacactcaccgactggcttcttgatgcacctaagttagctggcatccaggaatttcaagataaaagaagtaagccaacagatatatttgcaattggttttgaagaaatggttgagttaaatgctggaaacatcgtgaatgcaagcacaaccaatcagaagctctgggctgtggaactgcagaagaccatctccagagacaacaagtatgtgctgctggcttctgagcagctggtgggcgtctgcctgtttgtttttatcagaccacagcatgctcctttcatcagggatgttgcagttgatactgtgaagactggaatgggaggtgccactggaaataagggagcagttgcaatccgaatgctattccatacaacaagcctctgcttcgtctgtagccactttgctgcagggcaatcacaagtcaaagaaagaaatgaagattttgtagaaattgcacggaagttgagttttccaatgggaaggatgctgttttcccatgactacgtattttggtgtggtgatttcaactatcggattgatctccctaatgaagaagttaaagagctcataagacagcaaaattgggattctcttatagcaggagatcagcttatcaatcaaaaaaatgctggacagatttttagaggatttttagaaggaaaagtgacctttgctccgacatacaaatatgacttgttttctgacgactatgacaccagtgaaaagtgccgcacccctgcttggacagaccgtgtcctctggagaagaaggaagtggccttttgacagatcagctgaagatttagatcttctaaatgctagttttcaagatggaagcaaaatcctgtacacatggactcctggcactttgctgcactatggaagagctgagctgaagacttctgaccataggcctgtcgttgccctgattgatatagatatatttgaagttgaagctgaagagaggcaaaacatttataaagaagtaatcgcagttcagggcccaccagatggtacagtattggtctcaatcaaaagttctgtccaagaaaataattttttcgatgatgctttgattgatgagcttctgcagcagtttacaaattttggtgaagttatcctcataaggtga

SEQ ID NO: 4489 - protein, 927 aa, Canis familiaris
MAFSKGFRIYHKLDPPPFSLIVETRHKEECLMFESGAVAVLSSAEKEAIKGTYSKVLDAYGLLGVLRLNLGDTMLHYLVLVTGCMSVGKIQESEVFRVTSTEFISLRIDSSEEDRISEVRKVLNSGNFYFAWSASGISLDLSLNAHRSMQEHTTDNRFFWNQSLHLHLKHYGVNCDDWLLRLMCGGVEIRTIYAAHKQAKACLISRLSCERAGTRFNVRGTNDDGHVANFVETEQVVYLDDSVSSFIQIRGSVPLFWEQPGLQVGSHRVRMSRGFEANAPAFDRHFRTLKNLYGKQIIVNLLGSKEGEHMLSKAFQSHLKASEHVADIHMVNFDYHQMVKGGKAEKLHSVLKPQVQKFVDYGFFYFNGSEVQRCQSGTVRTNCLDCLDRTNSVQAFLGLEMLAKQLEALGLAEKPQLVTRFQEVFRSMWSVNGDSISKIYAGTGALEGKAKAGKLKDGARSVTRTIQNNFFDSSKQEAIDVLLLGNTLNSDLADKARALLTTGSLRASSKVLKSMCENFYKYSKPKKIRVCVGTWNVNGGKQFRSIAFKNQTLTDWLLDAPKLAGIQEFQDKRSKPTDIFAIGFEEMVELNAGNIVNASTTNQKLWAVELQKTISRDNKYVLLASEQLVGVCLFVFIRPQHAPFIRDVAVDTVKTGMGGATGNKGAVAIRMLFHTTSLCFVCSHFAAGQSQVKERNEDFVEIARKLSFPMGRMLFSHDYVFWCGDFNYRIDLPNEEVKELIRQQNWDSLIAGDQLINQKNAGQIFRGFLEGKVTFAPTYKYDLFSDDYDTSEKCRTPAWTDRVLWRRRKWPFDRSAEDLDLLNASFQDGSKILYTWTPGTLLHYGRAELKTSDHRPVVALIDIDIFEVEAEERQNIYKEVIAVQGPPDGTVLVSIKSSVQENNFFDDALIDELLQQFTNFGEVILIR

SEQ ID NO: 4490 - DNA, 3960 bp, Cryptococcus neoformans var
  CDS (1)..(3960)
atgccgggcgctctataccttcgcccatctcctcgcgccttcttcctcattacagattctcatgccctcgtgttccgacaaccatcctcttccgagtccaaggcgtccagaggcgtggtagtggcagagtttctccctttggaagaagtagactataatgacctcatcaaggtaaaaggaagggcggatggagtattgggagttgtcagcgtacctagcgaacgatctccaatcccagaaatcttcttactccttctgactcattcaatttctcttccgcctctcatcccatcttcttccctccagccttctcggattatctctgttgaattccactctctttcctctcccttctgggaccaacccgaacttaccaacgctgccaggtctcttgattacggctatgacgatgaatatgacgaagtcagtgcgacatatgccgctgctggaggtaattctacccaaatgtcggcagcacaacaagcaggccttcaacatccatgtagcggaatgaaaaagtatctcgaatcaggatccttcttttttgctcaagactgcaaatgggatatttcatctcgtctatcaagctcttccaactgggtcaaagaacaacaatcgagttccggtggtggtcaccctttggaggatttcgacgagaggtttgtctggaacaagagtctgttggaaccgttcctcgactttagaaaaggtctcggcgaagagatgcgccagaacctagacgaccaagccatgctcatacctatcatccagggattctgcgggtcccttccaatccatactgggagatcatccaattctgctctggggatgatcagcaggctcagctggaagcgagctggagcacgattccgtacgagaggaatcgatgacgatggccaagtagccaactttgtggagaccgaagtcctgctagccttggagggcgtgtgtatgagctatgtgcaggtgagaggaagtgtacctcttttctggcaacaacctaatgcagggttgggcacattgcaacaaagagttgagatcaccaggccaccacaagcgactcagccagcattcgacaaacatttcctcgagctattatcagaatacagctccattcacgctatcaaccttctgggccagaaagatgctgaatctatgctatctcaagcatactcctcccatcttacatcgctcaaatgtgctcttgacaaagcacccccagaagaaaaagaacgtatgaacgccgcacctcgtgggacgttagaattgtccccctatgattttcactctgcggtgaggctgggtgggcatgataaagtaagatacgatttggataggagcctgagggaggtggtgagtagtagggagagatttgggtggacggtagtggatatggataatggagatgtagtggaagagcagcaaggtgttttccgggtaaactgtctagactgcctcgacagaacaaattacgtccaagacgtcctttccacactcaccatcacctccttcctctcctccctgtcctcccctcttctctcctccccaaccctctggtccgcccaccgcgagctctgggccgacaacggtgatcgcttatccaaaatctacgccggcacgggcgctatcaacacctctgcgacgaggagtgggaaaaagacttttgctggtttgttaagcgatgcgacgaagagtgtagggagagcgtatataaataattttcaagataaagggaagcaggcggccattgatatgcttttgggaatgatggcgggtcaaagacctgtcattctttttgatcccataagcgagtctgttcaagcggcgttagcaacgagggcgaatgagtattcgtcgactagaaaggtcaccatcttctctggaacgtggaatcttaatggaaaggctcccaatgaggcgctggattcatggctcttccctcctgatacccccgaacccgatatctacatgattgcctttcaagaaattgtcgaactaaccgctggccaaatcttacaaaccgaccccgctaagaaacgtatgtgggaaaaattcatcatggatacgtttgcgatgcggaaaggagggaaagattcggattatgtgctgtttagaggtgatcagctcgtcggcacggctttgatcattgttgtgaaaaagcatcttgttccgcatatacggaatgttgaaagtgctactaaaaagaccggtcttcagggcttaagcggtaacaaaggcggtgtagcaatccggttaaacctgtatgactcaacagtttgttttgtgacttgccatctggcagcaggacattcgaatgtaggtgacagaaatgcggattggaggacggtcgtaggcggtacaaggttcttgagggggaaagttattgaagatcatgactggtgggaggctgatgagcacttgggacataggatcattatttgggcggcagattttaattaccgtgtttcgctccctaatcttgaagtaagagacctcgtaaaggccaacagtttagatgctttgctcggcgcagatcaattgttgaaagccatggacgctggagaggtgtttatggggtacgatgaaggaccgatccggttcccaccaacttacaagtacgataatggaacggacagttatgatacgagtgagaagcagagaatccccgcttggacagatcgagtcttgttcaaaggctccgctctccgtttacatgagtacacccgcgccgaactcatgacgtccgatcaccgccctgtttacgcagtctttgaggcgaccatccgcgagatcgatcgtgcaaaaaaggaggagatcgcaaaagagttggtacatgggctcgtaaagagtggtgcggagaagaagatcgcagcaaaagtaggtgtggagattggaggtggtggagcaagagatttggcgaggggtatggcgaaagtcggcttgtcgccatcgaaaaatcagagatatccgcctcggccgagctcatcggcgtctacaagtgagaagggcagtccaacacttgcagcaggtcgaattcgctctatctcaacactccaacccccatctacctctgccactagttctctcagagctctagccccaagtagatcgtcatccagtctatctcttaaagaaagatccactccaccactacctcctcgtccaaatcttccttccagaccatctcagactctcctgcactcaccttcaaagccgtcgacaaggctccaagcccccccatcattacccccggcttcgcgttcgaggtcgacgtcgcatgcttctgcgaatggaacaggtttggcctcatcagtcacttctgcgtatcctggagccccttcccctgtgacaccgagttctaccggcgattttgttatcattcctcagccttctacctctgacattaatgtttccgccggagcgcgtcttgcgccttctttaccacctcgcgcaatccctgttgcccccaagatctctccatccaaaaatagtatcaaaattgacaatgaacaaaaagccccgactcggcgggaagcacctcctataccacgtaaatcattagacatcaacggatctcctcccaaggggttgatgtcaccggtgactcccgatgttgtgaaagcaaaaaatgtcttgactggagccgcgggtgcgagtgtgtatgctgggacacgtacacgtacgagacctatcccacccaaaccattgaccaagacgtcctcaggttctgtagcagcaatggtggcatcattgaatggaaatgataagaagacgaatgacgatacgaggacgagtaatccgcaggcaactttaacaagcgcggatgccgagcaaagtgcgggatcgggcccggcgatgacggacaaggcggatgtttcgacatctccgaaaagcaaaaagcatgcacctgtggtgcccaaaaagcctgtagcgctgaaaggcgcgggtgcagagcagtaa

SEQ ID NO: 4491 - protein, 1319 aa, Cryptococcus neoformans var
MPGALYLRPSPRAFFLITDSHALVFRQPSSSESKASRGVVVAEFLPLEEVDYNDLIKVKGRADGVLGVVSVPSERSPIPEIFLLLLTHSISLPPLIPSSSLQPSRIISVEFHSLSSPFWDQPELTNAARSLDYGYDDEYDEVSATYAAAGGNSTQMSAAQQAGLQHPCSGMKKYLESGSFFFAQDCKWDISSRLSSSSNWVKEQQSSSGGGHPLEDFDERFVWNKSLLEPFLDFRKGLGEEMRQNLDDQAMLIPIIQGFCGSLPIHTGRSSNSALGMISRLSWKRAGARFRTRGIDDDGQVANFVETEVLLALEGVCMSYVQVRGSVPLFWQQPNAGLGTLQQRVEITRPPQATQPAFDKHFLELLSEYSSIHAINLLGQKDAESMLSQAYSSHLTSLKCALDKAPPEEKERMNAAPRGTLELSPYDFHSAVRLGGHDKVRYDLDRSLREVVSSRERFGWTVVDMDNGDVVEEQQGVFRVNCLDCLDRTNYVQDVLSTLTITSFLSSLSSPLLSSPTLWSAHRELWADNGDRLSKIYAGTGAINTSATRSGKKTFAGLLSDATKSVGRAYINNFQDKGKQAAIDMLLGMMAGQRPVILFDPISESVQAALATRANEYSSTRKVTIFSGTWNLNGKAPNEALDSWLFPPDTPEPDIYMIAFQEIVELTAGQILQTDPAKKRMWEKFIMDTFAMRKGGKDSDYVLFRGDQLVGTALIIVVKKHLVPHIRNVESATKKTGLQGLSGNKGGVAIRLNLYDSTVCFVTCHLAAGHSNVGDRNADWRTVVGGTRFLRGKVIEDHDWWEADEHLGHRIIIWAADFNYRVSLPNLEVRDLVKANSLDALLGADQLLKAMDAGEVFMGYDEGPIRFPPTYKYDNGTDSYDTSEKQRIPAWTDRVLFKGSALRLHEYTRAELMTSDHRPVYAVFEATIREIDRAKKEEIAKELVHGLVKSGAEKKIAAKVGVEIGGGGARDLARGMAKVGLSPSKNQRYPPRPSSSASTSEKGSPTLAAGRIRSISTLQPPSTSATSSLRALAPSRSSSSLSLKERSTPPLPPRPNLPSRPSQTLLHSPSKPSTRLQAPPSLPPASRSRSTSHASANGTGLASSVTSAYPGAPSPVTPSSTGDFVIIPQPSTSDINVSAGARLAPSLPPRAIPVAPKISPSKNSIKIDNEQKAPTRREAPPIPRKSLDINGSPPKGLMSPVTPDVVKAKNVLTGAAGASVYAGTRTRTRPIPPKPLTKTSSGSVAAMVASLNGNDKKTNDDTRTSNPQATLTSADAEQSAGSGPAMTDKADVSTSPKSKKHAPVVPKKPVALKGAGAEQ

SEQ ID NO: 4492 - DNA, 3372 bp, Caenorhabditis briggsae
  CDS (1)..(3372)
atgtcagtccgaggcattcggatatggcggcggaatgatgcacgattccagccgtcgatccttgtcgagaagaatggacttgacggatcacttctgtttcaaggtggagctgttgccaccctagattctgattcaacggaagtcgaacgaaggtcttatcagaaaattgtggatgcatatggtctcttgggagtattagccatcacaaaggatgaatccgttttagtagcagtaactggagtactttcagttggacaactttatggagccgatattctgaaaataacaaatgtcgaattcatatcattacgaactttcggttctgtagaaaatgtagattctaggatagtcgatcttcaacggttactctcttcacaaatgttttatttctcttcacttcaatcctatgatctcactcggtcggctcaacatcgtgattcacatgatggaagtgatgcacgattcttctggaatagaagtcttcacttttcatttcaacgttacggaatagacacggacaattggctactgaaatgcatggctggatcagtactagtccgagtagtttatgttggtgcaaatacaggtcgtgtagctctaatttctcgattgagttgcgaaagagtcggcactcgattcaacgtacgaggcgctaattatcttggaaatgtggccaatttcgtggagacggagcaacttcttctttttgacgataaagagtgctcacttcttcaaattcgtggatctatcccgcttttctgggaacaaccgggagtcaatgtaggatctcataaagttaagctgagagcattcgagacaagccttccggcttatcataggcacatgtcccaacttcaacatcgatatggagaatttgcgattgtgaatttgttgggaagaaaagaaggagaacgagttctcagtgacgctttcaagacacaacacaagaattcacactttgcgccaatcgttgatttcattgactttgattatcatgctcaaatgaaaatatcaaaagaggcaattgtccagctgaagaagaagatgactcctcatatgtctcagcacggattctactattccatggatcataaactcgtcaaacgacaaacgggagtatttcgaaccaattgtctggattgcctagatcgaaccaatgcagttcaaacagccgttggccttcagatgtctcatgatcaagtggcgttcctgaatttaaacgctggaaaagtgaatgtcgaacaacgtgttgaagagattctcaaagatttgtggcagaaaaatggagatcaatgcagtacaatatacgcaggaacaggcgcattagatgggaaaagtaagctgaaagatgcttcgagatcattggcaagaacgattcaaaacaatttgatggacggtgcaaagcaagaatcgtttgacctgttcttaacaggagcagcgtatgatcctcgtctttttgatagagcatgcaatattctgccaccgagtttgattcaagagagctattactatcatgaatatgctgacgcagtatcacagctagttgagcgaagtccggaaatcgctgaacctcaacatataaaaattttcgttggaacgtggaatgtaaatggaggaaaaaacattcacaatgtagcgttccgaaacgaatccagcctgtcccattggattttctccaattcaatgactcgattggtgtctgtggaagaagaacaactggcagacattgtggctattggagttgaggaacttgttgatttgaatgcaagtaatatggtgaaagcaagcaccacaaatcagagaatgtggtgtgaaagtattcggaagacgttggctgagaaggctccatttgttttgattggatctgaacaactagttggagtctgcctatttttattcgctcgaccaaaaatctccccgtatttgaaagactttgctgtgtcttctgtaaagactggtatgggcggagcgactggaaacaagggatcggttgcatttcgaatagttgtattctccacttcgatttgtttcatttgctctcatttcgcagctggacaaaatgaagtgaaagacagaaatgaggattttgcgactactttgaagaaaattcgattcccattagggagagaaattgattcacacgatgttatattttggtttggagacttcaattatcgtatcagtttgtcgggagaagaagtgaaaacagcggttagaaatggagatttttctaaacttgttgagcacgaccaactgacaaacgagaaaataaagggacagacatttattggattcaatgaaggacagctaacgtttgcaccaacctacaaatacgatacattcagtgatgattacgatacaagtgaaaagtgtcgtgctcctgcttggactgatcgagttctttggaaagatcagagaaagaaaggaaaaacgactttgctgagttatgaccgatctgaattgaaaacatcagatcatcgaccagtgggagctgtcttcaaagtggaaacctataaagtggatggaaagaaatgtatagaacttatcgaagatgttgttgaatccatgggtcccccggacggcacgattgtggttaacattgttggaaagccacgattcccaccgcagatgttcccaccgattcatgaaaaactgaaagagcttggagcgatggttcagttgagcaaatttgataatggagacttatggattgttttgaatagtggagaaatggcattggctgcgttgagcatggatggattgaaattgggatcagatcaacttcaagtaaaattgaaatcgcctgattgggcatatgctctaaaaccgcatctctctgatttcgatctggagtcttttgaagtttcacctgaagaagagactctgattaatggtgccgatggtgcagtctttgagtttgctgatgaagacgaggattcgatcagcgttatgagtttgactctgactggatctgctcccgatcgaccacgacctccatcagcacgtagcgaagcaatcaatatggcgaatctggaatggccatctgaaagacaagacgtcctttccacttcaatgcccactcgtgcttcttcagcttctcttgccaacagctcttggtatgagcatgtaccaccacttgctccaccgactactcatccaacacagcaatcaaacaacaataaaagccctccacagcaatcgtgtctcttcaacccattcacccaatctgttccttctccagcagctcctccaccacctaccattccaacacgaggagcttctgttggacctggtccaccagctgttccccttagaaaagcacccccaccaccacctcgccctgtaattccacccagacccaaaaatatgtag

SEQ ID NO: 4493 - protein, 1123 aa, Caenorhabditis briggsae
MSVRGIRIWRRNDARFQPSILVEKNGLDGSLLFQGGAVATLDSDSTEVERRSYQKIVDAYGLLGVLAITKDESVLVAVTGVLSVGQLYGADILKITNVEFISLRTFGSVENVDSRIVDLQRLLSSQMFYFSSLQSYDLTRSAQHRDSHDGSDARFFWNRSLHFSFQRYGIDTDNWLLKCMAGSVLVRVVYVGANTGRVALISRLSCERVGTRFNVRGANYLGNVANFVETEQLLLFDDKECSLLQIRGSIPLFWEQPGVNVGSHKVKLRAFETSLPAYHRHMSQLQHRYGEFAIVNLLGRKEGERVLSDAFKTQHKNSHFAPIVDFIDFDYHAQMKISKEAIVQLKKKMTPHMSQHGFYYSMDHKLVKRQTGVFRTNCLDCLDRTNAVQTAVGLQMSHDQVAFLNLNAGKVNVEQRVEEILKDLWQKNGDQCSTIYAGTGALDGKSKLKDASRSLARTIQNNLMDGAKQESFDLFLTGAAYDPRLFDRACNILPPSLIQESYYYHEYADAVSQLVERSPEIAEPQHIKIFVGTWNVNGGKNIHNVAFRNESSLSHWIFSNSMTRLVSVEEEQLADIVAIGVEELVDLNASNMVKASTTNQRMWCESIRKTLAEKAPFVLIGSEQLVGVCLFLFARPKISPYLKDFAVSSVKTGMGGATGNKGSVAFRIVVFSTSICFICSHFAAGQNEVKDRNEDFATTLKKIRFPLGREIDSHDVIFWFGDFNYRISLSGEEVKTAVRNGDFSKLVEHDQLTNEKIKGQTFIGFNEGQLTFAPTYKYDTFSDDYDTSEKCRAPAWTDRVLWKDQRKKGKTTLLSYDRSELKTSDHRPVGAVFKVETYKVDGKKCIELIEDVVESMGPPDGTIVVNIVGKPRFPPQMFPPIHEKLKELGAMVQLSKFDNGDLWIVLNSGEMALAALSMDGLKLGSDQLQVKLKSPDWAYALKPHLSDFDLESFEVSPEEETLINGADGAVFEFADEDEDSISVMSLTLTGSAPDRPRPPSARSEAINMANLEWPSERQDVLSTSMPTRASSASLANSSWYEHVPPLAPPTTHPTQQSNNNKSPPQQSCLFNPFTQSVPSPAAPPPPTIPTRGASVGPGPPAVPLRKAPPPPPRPVIPPRPKNM

SEQ ID NO: 4494 - DNA, 2244 bp, Candida glabrata
  CDS (1)..(2244)
atgagaatatttgttgggagaaatcccaggtctgtggtgttatcttctgaaagttatagtctaaaatttgaaagactctatgatcgatctaatcaaactcaaggcaatgtgcaagcccaacaaggccaaccaaatcaaataaaagcacccacagtttcgattaaaaacgtcagtgctagtgaattggtcaaagatggctatagagaattgagagcactacgtttgaatggcctactaggtttacttacaatcaatggtgatgtctacgtagtagtagttggtggggtacaaagtatagggtatcctagatggcacttggatgatagctcaaaaatcacaccagagcaatcaattaacaaaatattggaggttgatttcatcagcttagatacagagatttatgatcatttgttttttgaccggtcagagcagaattttgacaagctactgcatgaacatccctgtggtgtctacaaaagactcttcgctgacggttcattttattataccaaagattatgatttgacgaatgctgtgaagtcccctggtcttacccataacttggattatgcgatagataattttgatacatctttcatatggaatgcaaatttaattggtgaaattatcaattggagaggaaggctatcgatgaaagagaagcaggcttttgataacgctccttttttgatgttcgttattaggggcttttgcaaaacatccatagtcaatgaccctgatttaacagctacagtaactgttctatcaagagtttctacagaaggtcacaagtctatatccgattcagaaggtatgcacgaggactcgagagtttccaccattatcgaaactgaaactattgtaacaactgatagttttattctatcatacacacaaattgcagggaatattccactattttacgaaattattgatggacaactactttccggtaaaaagctgaagcttctaaaacaacctggtgaggggcaaaacgagtttaacaagcattttgacacactagaatcaaaatttggtattgtcagtgttgttaatttggttaaatctaggagcgattcacaagaaaccttggcatctatttacaagcaatattcggacaccagaggaataaaaataagcaatattccgtgtggttcacaaacactaaataaatctcctcataaagttttatatagtctgaaacaagacatatatgagtgtggagcttttgcatataatataaaaaagggaatttattttggtaaacaaaccggtgtaataagaattagtgcagcagacccgattgaaaaacctattctcttagaaaaactgataagtaaagaagtgttggaactagctactaaggaactagatgggtttagtataacttctccattgcttgaagtgcatgacaaattgtggtcagaaaatcatttctggttagaaagagtgtatgcgaaaaatcagaaaaattataataaatctgcaaaaatatatttgaaactgttttcatcacatgtaaaattattcgatccagttcatttttatatttcccaatacttgagacaatttaggagcagttttacacatatgaaggatataaaagtatttgcagggacctttaatgtcagcggcaaattgtctaaggatgatatttctcaatggatctttcctaatggtgtaaccacagaagaagactttgcagatgtgtatgtatttggtttagaagaagttgtagagctaactccaggacatatgctggcaatcgatccgtatattaaacaattctgggaaaaaaaattattggataccatcaattattatgataaagattctagctatactaaagtttggagtagtcagttgggtggtgttttattgattttattgatgaaatccagtgaatcactaaaggttaagcatgtcgagggagatgtcaagaaaacaggatttggtggtatcacatctaataaaggcgcagtagctgttagtttcaattactctgcaacaaggttctgtgtcctggtttcgcatttggcagcaggtctggagaatgtggaacagagacataacgactataaaatgatatcgaaaaacataagattctcacgaggtctaagaatcaaagatcatgatgcaattatatggatgggtgactttaactataggatattgatgtctaatgaggaagtacgtaagcttattgctttaaaggattataagagtctatttgaaaaggattag

SEQ ID NO: 4495 - protein, 747 aa, Candida glabrata
MRIFVGRNPRSVVLSSESYSLKFERLYDRSNQTQGNVQAQQGQPNQIKAPTVSIKNVSASELVKDGYRELRALRLNGLLGLLTINGDVYVVVVGGVQSIGYPRWHLDDSSKITPEQSINKILEVDFISLDTEIYDHLFFDRSEQNFDKLLHEHPCGVYKRLFADGSFYYTKDYDLTNAVKSPGLTHNLDYAIDNFDTSFIWNANLIGEIINWRGRLSMKEKQAFDNAPFLMFVIRGFCKTSIVNDPDLTATVTVLSRVSTEGHKSISDSEGMHEDSRVSTIIETETIVTTDSFILSYTQIAGNIPLFYEIIDGQLLSGKKLKLLKQPGEGQNEFNKHFDTLESKFGIVSVVNLVKSRSDSQETLASIYKQYSDTRGIKISNIPCGSQTLNKSPHKVLYSLKQDIYECGAFAYNIKKGIYFGKQTGVIRISAADPIEKPILLEKLISKEVLELATKELDGFSITSPLLEVHDKLWSENHFWLERVYAKNQKNYNKSAKIYLKLFSSHVKLFDPVHFYISQYLRQFRSSFTHMKDIKVFAGTFNVSGKLSKDDISQWIFPNGVTTEEDFADVYVFGLEEVVELTPGHMLAIDPYIKQFWEKKLLDTINYYDKDSSYTKVWSSQLGGVLLILLMKSSESLKVKHVEGDVKKTGFGGITSNKGAVAVSFNYSATRFCVLVSHLAAGLENVEQRHNDYKMISKNIRFSRGLRIKDHDAIIWMGDFNYRILMSNEEVRKLIALKDYKSLFEKD

SEQ ID NO: 4496 - DNA, 4140 bp, Dictyostelium discoideum
  CDS (1)..(4140)
atggcagataatacatttagaatttttataacaacacaaagttttataattaaaagagattctttacatagtaaagcattagtaattaatagaagagatccatctaaaatcgatataatacaaccagatcaaattgatcaatcattaagatctgaaagatcagtttattgtgttttaggtatatttagattagtaaatgaatgttatttagtagttgtaactgaaagtgatatagcggcaaattttcaatttcaaggacaaccaaatgttattagaaagattagatgtacagattttatatcatttcaaactggtagagggcatatatcaataggaggaggtggtggtggaggtggtagtggtaatggagaatcaaaagaagatgatagaccatatgttcaagttatgaatttattgaatagtggacacttttattggacaccaccaaatagtagttttgatataactcgtacttatcaaagtcaatgtttggagccaaaatcggatttaccagtatgggaacgtgttgataagcgattctattggaataaatatttacaaaaggatttcatagcatatagattatacgattggtgtttcccaattatacaaggttttgtagtatccgatcatctcggtcatattcaaggaaagaatgtagtttacacattgatttcgagaagaagtcgttttagagctggtactagattcgttacacgtggtatcgatgatgatggtaatgttgcaaacttttgtgaatctgaacaaatcttatcgattgaaagttatggtgttttggcattcttacaaattagaggttctgtaccagtgttttggaatcaatcatcaccacaaatgtctgatctaaagattaaaatgtcgaatctatcgaaaattggtaaaattagtaaaaagaagattacaatcgctagaaatactcaagcgacaacaccagcttttcaattgcatcttaaagaacaaactaaaaagtatggtaatattgtaatcgttaatttactctcaaaattgaaatcaggtgaatgtgatcttgtaaatgcttatgaagaacaaattagaatattacgttcaccacaagttttctataatcatttcgatttaaatgaacaaaccaaaggtaatagaatggatcctttagattctttaattaattatattgataatcaatcaattagtggtggtggtggtaccactggtggcgttagtgaaaaaattgttggttatttctttcaaaattcaaatggtcaaatcatttcaaaacaaaatggtataattcgtacaaattgtaaagattgtttggatagaactaatattgtacaatcaagagttagttgggtattatttgaaagtcaactaagaaagttaggattatttagaggtcatgattctattggtagttatccacgtgtatcacaaacattaaagacaacatgggcagataatggtgatgcattgtcgattcaatatgcaggttcaggttcattgaaatcaacgttaacacgtgagggtgattatggtataatgggtatgttggcagatggtaaaaaaacaatgactcgtttctatatcaataatttcgaagatccaggtagacaggatgtgttagatctattgttaggtttacataaatcaatggttgtcaataatagtaataatggtaatggtggtaatggtggtaatggtagtggtcatgatgataatattagaaaacaagttcaagatagagttaaagaatattcgaaaaaagaatggaggaatgttttcgttggtacttataatgttggtggtgtacattcatcatactttgatttggtacaatggttaagacctgatggtgccaattgtccaacaccggatttctacgttttaggtctacaagaggtggtggagttaacggctggtcagattttagcaacagattcatccattggtaaacaatgggaggatgcaatcgaacgtgcacttccaaaagtatcacccaatgtaaagtatatcaaattacaatcatcacaattggtaggtttattaatggcaatctatgtacgtgaggatgcaatacactattttagagaggtacaaattcaaaatgtcaaatgtggtatgaatggcttggctggtaataagggtggaattggtgtacgtttattgttcagcgatacctccttcacctttgtcacggctcatttcgctgctggtcaatccaatgttgaagatcgtatttccgatttccgtgagatcgattcaacattggcctttggtcgtcaaggtcaattcaaggtctctgattcagattattcattttggttgggtgatttcaattttagaattgacttacccgatgaagaaattagaagatgtgtctatgatcaacagtttccaaaactttacaactatgatcaacttagaaaatgtatggaagcaggtagagttttcaatggttatagggaggagacaatcgctttccctccaacttataagtatgatttaaatagcactcaatatgatacttctcaaaaacaaagatcaccagcttggactgatagaatcgtttggagtaataaagttcatcatgatttacgtcaactctattatcatagacaagagattttagcttctgatcatagacctgtaagttcttactttcaattggaagtcactaaaatcgataaagataaagaaagaacattacgtcaagaattatacgaacaaaaatcttcacaattcatcactacctctcaaagtaccaataatcttatcaacacaactaatcaaaatggtaaagatggtgcaaatttaatcactaaagaatttgaacaacttacactaattaaacaatctgcttcaactccaaatttacaaaaaggtagatcaaatacaacaaatattcaatatcaaataacttcaaccaatcaaattagtaatactaataataataccattcaacaacaacaacatcaccaagaacttgtaaatgtaactacaactagaaagaattcattaaatagtaataataataataataataataatattaataacagtaataatacacttgttgcaagtggtggtagtaatggtgttcctccaagaaaattatcatcaggacgtccattaccaatgttacctcaaccaattcaaataccaccaacacaacaacaacaacaacaacaacaacaacaacaacaacaacaacaacaagaaacagttaaccttcaaaagatgaccggatccggtggtggaagaaaaatatcttcctctccatcatcctcatttaataatactaatagtattggtagctcatcatcaccatcaggtgctcattcaccaatttttgatgatcaatttgatccaagaaaaggtagatcttcaccagttccacaatcttttaatgaaaataataatagtaatcaatcaaaaatggaattattaataccgaatcaaaattcaactcaatatcaacaacaacaacaacaacaacaacaacaacaacaacaacaacaacaacaacaacaacaacaacaacaacaacaacaacaacaacctcaatataattcaaatctttataatagcggtcctccaccattacaaccaattcatcaaagtaatttaaatccaaattcaaactataatcaacaattacaacaaccaccaccacaaccaattaatcatgatttacaattaatcgattcatggggtaatagtagtaatggttatcaaagtagagagccacctcctttacaaccaattccccaatctgtttatcaatcacaaccaccacctttacaaccaattccccaatctgtttatcaaccaacaaattttgcacttcaacaacctttacaaccaatgatgtctccaccacctttattatatagtaatcaaaaagctgtttataatattccagttccatcaccctataatcagcaacaacaacaaccacaacaaccataccagcaaccatatcaacaaccataccaacaaccatatcaacaaaatttatataaccaaccaccaccattaaataattcctacaataattataataatcaaaataataataataataatcaaaataataataatacctataataatccatatttaggttccattttggattaa

SEQ ID NO: 4497 - protein, 1379 aa, Dictyostelium discoideum
MADNTFRIFITTQSFIIKRDSLHSKALVINRRDPSKIDIIQPDQIDQSLRSERSVYCVLGIFRLVNECYLVVVTESDIAANFQFQGQPNVIRKIRCTDFISFQTGRGHISIGGGGGGGGSGNGESKEDDRPYVQVMNLLNSGHFYWTPPNSSFDITRTYQSQCLEPKSDLPVWERVDKRFYWNKYLQKDFIAYRLYDWCFPIIQGFVVSDHLGHIQGKNVVYTLISRRSRFRAGTRFVTRGIDDDGNVANFCESEQILSIESYGVLAFLQIRGSVPVFWNQSSPQMSDLKIKMSNLSKIGKISKKKITIARNTQATTPAFQLHLKEQTKKYGNIVIVNLLSKLKSGECDLVNAYEEQIRILRSPQVFYNHFDLNEQTKGNRMDPLDSLINYIDNQSISGGGGTTGGVSEKIVGYFFQNSNGQIISKQNGIIRTNCKDCLDRTNIVQSRVSWVLFESQLRKLGLFRGHDSIGSYPRVSQTLKTTWADNGDALSIQYAGSGSLKSTLTREGDYGIMGMLADGKKTMTRFYINNFEDPGRQDVLDLLLGLHKSMVVNNSNNGNGGNGGNGSGHDDNIRKQVQDRVKEYSKKEWRNVFVGTYNVGGVHSSYFDLVQWLRPDGANCPTPDFYVLGLQEVVELTAGQILATDSSIGKQWEDAIERALPKVSPNVKYIKLQSSQLVGLLMAIYVREDAIHYFREVQIQNVKCGMNGLAGNKGGIGVRLLFSDTSFTFVTAHFAAGQSNVEDRISDFREIDSTLAFGRQGQFKVSDSDYSFWLGDFNFRIDLPDEEIRRCVYDQQFPKLYNYDQLRKCMEAGRVFNGYREETIAFPPTYKYDLNSTQYDTSQKQRSPAWTDRIVWSNKVHHDLRQLYYHRQEILASDHRPVSSYFQLEVTKIDKDKERTLRQELYEQKSSQFITTSQSTNNLINTTNQNGKDGANLITKEFEQLTLIKQSASTPNLQKGRSNTTNIQYQITSTNQISNTNNNTIQQQQHHQELVNVTTTRKNSLNSNNNNNNNNINNSNNTLVASGGSNGVPPRKLSSGRPLPMLPQPIQIPPTQQQQQQQQQQQQQQQQETVNLQKMTGSGGGRKISSSPSSSFNNTNSIGSSSSPSGAHSPIFDDQFDPRKGRSSPVPQSFNENNNSNQSKMELLIPNQNSTQYQQQQQQQQQQQQQQQQQQQQQQQQQQQQPQYNSNLYNSGPPPLQPIHQSNLNPNSNYNQQLQQPPPQPINHDLQLIDSWGNSSNGYQSREPPPLQPIPQSVYQSQPPPLQPIPQSVYQPTNFALQQPLQPMMSPPPLLYSNQKAVYNIPVPSPYNQQQQQPQQPYQQPYQQPYQQPYQQNLYNQPPPLNNSYNNYNNQNNNNNNQNNNNTYNNPYLGSILD

SEQ ID NO: 4498 - DNA, 3876 bp, Lampetra fluviatilis
  CDS (1)..(3876)
atggcgttgagtaaaggatttcgagtgctccaaaagaatgaacagaacctctacagtgtgattttggaaagccggaaccgtgaagaatgccttctttttgaatctggagccattgcggtgctgtctgctgctgaagaagaggcggtgaaaggacagtacaaccgccttatggatgcatatggatgtcttggcatgctgcgcctcaacatggatggtaaaggtgaggtgattttgcgctacctggtgctggtgacgggctgcgcatcagtggaccacatcgttgactcggaggtgatgcgtatcacgagcgtcgagatggtgagcctgcaaggagacccgtcggacgaggaccgtgttgcagacctgcgccgcctgctttccactggcaccttctacttctccagcagcggcggcgtcggcaacacatacgacctgagcgtcagggctcagttgcaaggccaaggcgacccggcacaacataacccattctgttggaacgcggcgctgcacgtgccgttgcggcagtgtggcgtgggctgtggggcatggcttctacgggtcgtgtgcggcggcgtgggtgtgcgcacgctgtacgctgcgcaccagcaggccaaggtgtgcgtgctagcgcgggtgagttgtgcccgcgctggcacacgcttcaatgtaaggggtgctgatgactcggggcaggttgccaacttctgcgaaactgagcagataatttttatagatgatgaggtgacttcctttgtccaactccgtggatcggtgcctctattttgggagcagccagggctgcaggtgggatcacatcgtgtgaaaatgtcacggggttacgaagcaaatgccccagctttggacagacattttgcaatgctgaaggagctatatggcaagcagatggtggttaaccttctagggagcaaagagggagaacacatgctaagcaaggcttttcagagccacatgcaggcatctcgccatgccagcgacatccccatgctcaactttgactaccacctgctactcaagggcagcagccaacggtcagagagactccaatctgggttgggaaccaaggtgcgtcccttcctggaacagtgcggcttctactgcttccatgaaggtgtcgtgagcagagtccaaaaagggaccgtgagaacaaattgcttggactgtctggatcggacaaactctgtgcagacccattttgccgtggatatgctgaagaggcagctcgaggacctgggcctggctgagaagccccagatggttgctcggtttgacgaggtcttccgttccctctggtctgcggtcggagacctagtcagcaaaatgtatgctggcactggtgcactcgagggaaaaaccaagctgaaggacggcgcacgttccgtgacgcgcaccatccagaataacttcttcgatggcgccaagcaggaggccatggacctgctccttctgggatgtgtgctcaacagtgaggcggctgacaaggcccgcacgctgatcacgcccaccactcgtggggcagaaaacttcctgcaaacagcgtctgtgcgcttgctgcgctcgttgtgcgagcgtcacggagagtacacgcacccaaaacggcttcgtgtggctatcgccacttggaacgtgaacgggggaaaaaccatgcgcagcattgccttcaagcaccagacgctgtcagactggctgctggacaaccacaagcaagctgccatatctacgtttcaagatgacactcctgtagatgtgtttgcaatcgggttccaagagatggtggagctgaatgcgggaaacatcgtgagtgccagtacagaaaatcagaagcgttggtcagtagagctgcagaagacaatctcacgtgatcacaagtacattctggtgacctccgagcagctggttggggtttgcctcttcgtcttcctgcgccctcaccatgcgcctcacgtccgggatgtggctgtggacacggtgaagacaggaatggggggtgcaactgggaacaagggtggtgtagccatccgcctccagatgtacagcagcagcctttgcttcgtgtgctcacatttcgccgccggacagtcgcacacacgcgagcgtaacgaagactatgcggagatcgctcgcaaaatttccttcccaatgggtcgcggcttgttttcccatgactacgtcttctggtgtggagattttaactaccggatcgacctgtctggggacgaggtgaaggagctcgtgcgacagaagaactgggagaccttgcagcaggccgaccagctggtgcagcagcgcaacttgagcgcggtattccgtgggttccacgaaggccgaacaaactttccacccacttacaagtacgacattttttctgacgactacgacacaagcgagaagtgccgcatcccggcctggacggaccgtgtgctgtggtatcgccacaagtgggccttcgagaagagtgctgacgagctcgacttattaaatctacctgccggaggggagcctcgactgcctcacttgtggaaccccggaacactcatccactacagccgcgctgagctcaagacatccgatcacaggcccgtgatcgctctgattgacgtggatttactggaggtgaccccaggctccatgcagggagtgttgagggcagcaatcgctgcccatggaccaccggatgcaagtgcagtgctgtccctcgactctggcgaggagtttgatgacgcttgcatcgagcagcttctgaggatcttggcgggctatggggatgtcacacttgtccgatttgcaggtaatgacatggtggttactttccgagacagtcgatccgctttagaaattctctgcatcaatggcatacaggttctgcggcacatcctgcacgtgaggctgaagagcccagagtggagcagcatgctggaggaggagctggtgcagagcgccggtgacatgcaggccacaggcgccatgctcacgcacaactccagcctgctggaggatgacgcctctttgcccccggcatactatgcaatcgaggatgaacaggatgatatggcagacgcagaggaaggtgggatgcaggatcagctgacatcaggcatggctgttgacccaagtgtctctccccgtccatctccaaagccgtccccttgcccgtcgccgactcacggtgagggccgagattggcagagctttgggaaacagacaagtgaatccctgagcaagccagctggccctcctgccaaacctccacctccacagagacctccaccccccagtgtcaagagccaacctgctcctggctcaaccattctgcagcccacatctgctcctcgctcccaggacatgcctcgtgttccaagtcgcccaccccccccacttccagcaacccctccacaacacagaagtgcagctgttgcctcttcaagcccggagatcgcaaaatcgagagctcctgtcaacctacccgagccactgctgccctctgctgctgccccctctccacaaaacctatcacagccttctccctcactacctgaacccatgctgccccaattagtacattctaaccaaatacagcagctgctcatacccatgctgccaattcagacgactgccccttccccattgcctgaggccatgctgccttccccagctgcttcgcctcctatgcaggagcccatggtgccctctccttccacacaggctcagttcttagacacacagcctccatccccttccacacagggcctcttgcaggccacgggtacctcctccgcccctcaggctccaccgagaaacaggtctacgcagtccattccacatgctgaagcccctgtccctctgaagcctccagagtaa

SEQ ID NO: 4499 - protein, 1291 aa, Lampetra fluviatilis
MALSKGFRVLQKNEQNLYSVILESRNREECLLFESGAIAVLSAAEEEAVKGQYNRLMDAYGCLGMLRLNMDGKGEVILRYLVLVTGCASVDHIVDSEVMRITSVEMVSLQGDPSDEDRVADLRRLLSTGTFYFSSSGGVGNTYDLSVRAQLQGQGDPAQHNPFCWNAALHVPLRQCGVGCGAWLLRVVCGGVGVRTLYAAHQQAKVCVLARVSCARAGTRFNVRGADDSGQVANFCETEQIIFIDDEVTSFVQLRGSVPLFWEQPGLQVGSHRVKMSRGYEANAPALDRHFAMLKELYGKQMVVNLLGSKEGEHMLSKAFQSHMQASRHASDIPMLNFDYHLLLKGSSQRSERLQSGLGTKVRPFLEQCGFYCFHEGVVSRVQKGTVRTNCLDCLDRTNSVQTHFAVDMLKRQLEDLGLAEKPQMVARFDEVFRSLWSAVGDLVSKMYAGTGALEGKTKLKDGARSVTRTIQNNFFDGAKQEAMDLLLLGCVLNSEAADKARTLITPTTRGAENFLQTASVRLLRSLCERHGEYTHPKRLRVAIATWNVNGGKTMRSIAFKHQTLSDWLLDNHKQAAISTFQDDTPVDVFAIGFQEMVELNAGNIVSASTENQKRWSVELQKTISRDHKYILVTSEQLVGVCLFVFLRPHHAPHVRDVAVDTVKTGMGGATGNKGGVAIRLQMYSSSLCFVCSHFAAGQSHTRERNEDYAEIARKISFPMGRGLFSHDYVFWCGDFNYRIDLSGDEVKELVRQKNWETLQQADQLVQQRNLSAVFRGFHEGRTNFPPTYKYDIFSDDYDTSEKCRIPAWTDRVLWYRHKWAFEKSADELDLLNLPAGGEPRLPHLWNPGTLIHYSRAELKTSDHRPVIALIDVDLLEVTPGSMQGVLRAAIAAHGPPDASAVLSLDSGEEFDDACIEQLLRILAGYGDVTLVRFAGNDMVVTFRDSRSALEILCINGIQVLRHILHVRLKSPEWSSMLEEELVQSAGDMQATGAMLTHNSSLLEDDASLPPAYYAIEDEQDDMADAEEGGMQDQLTSGMAVDPSVSPRPSPKPSPCPSPTHGEGRDWQSFGKQTSESLSKPAGPPAKPPPPQRPPPPSVKSQPAPGSTILQPTSAPRSQDMPRVPSRPPPPLPATPPQHRSAAVASSSPEIAKSRAPVNLPEPLLPSAAAPSPQNLSQPSPSLPEPMLPQLVHSNQIQQLLIPMLPIQTTAPSPLPEAMLPSPAASPPMQEPMVPSPSTQAQFLDTQPPSPSTQGLLQATGTSSAPQAPPRNRSTQSIPHAEAPVPLKPPE

SEQ ID NO: 4500 - DNA, 3231 bp, Schizosaccharomyces pombe
  CDS (1)..(3231)
atgcaatgtctgctgagggaaaagccaagatccttggccttagtcaataaggaccatgctcttatgtttcattcggttcctcagaacaaaaactctttatcagtatgtgttgcagaatttacggcattgtcagaaaagccgttagaaggatttcgaaaaatctccagtcatcgaatttatggtactctaggtctgattgaattagaagggtccaattttttgtgcgtgattagtggagctagtgaggtagcacgtgtgcgagataaagaaagagtttttcgtatcatggaggtctgcttttacagtgttaatcgttcaaactgggatcacattcgacaagaaaattactcgcctgatattccggatggttacgataccgatacccaaggctatgattcttacaagtatgccgctgaaccattcagtagtctcagaaagctattaacaaatggatcattttacttttctctcgattttgacattactacccgactgcaacttcgtacgtctcaaacaatgacggagcctcaatatgatagcatgcatactcaatttatgtggaacgaatttatgcttagacagttgatcaaatttcgctcccatttgaatggggatgaaaagagtgcattggatggatgtcgcttctttacatgtgccatcagaggttttgcgagcaccgaacaatttaagttaggaattcagactattcggctttctttaatatctagactgtcttcgcttcgcgctggtacccgattcttgtcacgtggcgtagatgatgatggaaacgttgctaactttgttgagacggagacaatcctcgattcctctaaatactgtgtaagctattgtcaggtccgtggcagtattccaattttttgggaacaagaaggtgttcaaatgtttggtcaaaaaattgatataactcgctctttagaagcaactcgagctgcttttgaaaaacactttaccagtcttattgaagaatacggaccagtgcacataatcaatcttttagggacaggttcgggagaacgcagtttatctgagcgtctgagacagcatattcaactttctccggaaaaagatttaatacatttaacggagtttgactatcattctcaaattagatcctttgaagatgccaataaaatacgcccaatgatttatagcgatgcagaaactttcgggttttattttgagaacaacgaaggacaatccattgtggtacaagatggtgtttttcgcaccaattgtttggattgcttagaccgaacaaatgttattcagaatcttgtttcaagagtgtttttagaacaagttatgatatatactcggcaaaatgctggttatgatttttggcaagttcattcaacgatttgggcaaataatggtgatgccttagctcgcatttacaccggaacaggagcacttaaatctagtttcactagaaagggaaagttaagtatagcgggtgcacttaatgatctctctaaaagcgtcggcagaatgtatatcaataactttcaagataaggggcgacaagaaacaattgatttgcttcttggcagattaattgaccaacatcctgttattttgtatgatccaattcatgagtatgttaaccatgagctgagaaaaagagaaaacgaattttctgaacataagaatgtcaaaatttttgttgctagttataacttgaatggatgttctgctactacaaagttagaaaactggttatttcccgaaaacacacctttggcagacatctatgtggttggatttcaagaaatagtgcaattaactccgcagcaagtaataagtgctgacccagccaaacgtcgtgaatgggagtcatgtgtcaaacgcttattaaacggtaaatgtacatctggacctggatatgttcaattacgttctggacaactggttggtacagcactaatgatattttgtaaggagtcatgtttgcccagtatcaagaacgtggaaggaacggttaagaaaactggtcttggtggagtttccggaaacaaaggtgctgttgccatccgatttgattacgaagataccggtctttgttttattacttctcatttagcagcgggttacacaaattacgatgaaagagatcatgactatcgaactattgctagtggattaagatttaggcgtggtcgttccatattcaatcacgattatgtggtatggtttggtgactttaattatcgtatttcattgacatatgaagaagtcgtaccttgtatcgcgcaagggaagttaagttacctttttgaatacgatcaattaaataagcagatgcttaccggaaaagtctttccgtttttttcagagttaccgattacctttcctcctacgtacaaatttgacataggaacagacatatatgatacctcggataagcatagagttcctgcctggaccgatcgtattttatatcgtggagaattagttccccatagttatcaatctgtacctttgtactactccgatcatagacccatttatgccacatatgaagcaaacattgttaaagttgatagagagaagaaaaaaatactgtttgaagagctttataatcagagaaagcaggaagttagagatgctagtcagacttcttatactctgattgatattgctgggtctgttgcgggtaaacctaatttaattccccatcttcctgccaatggagttgacaaaattaagcaaccaagtagtgaacgtagtaagtggtggtttgatgatggtctccctgcgaagtcaatagctgctcctccaggcccagaatataggttaaatccgtcgcgtcctatcaatccctttgagcctaccgcagagcccgactggatatccaacacaaaacaatcatttgataagaaatcgtcattaatagacagtatccccgcattaagcccggcaccttcttcgttggccagaagcagtgttagttctcaacgcagctcaacctcaattattcccattaaacccaacaagccaactaaaccagatcatttggttgctccaagggtaaaaccattgcttccacctcggtctggttcttcctcttctggtgtaccggcacccaacttgacacccgttaatgttcctcccactcctcctcctcgcaagtcttctgcttctcaacgaagcggtgatttacttgcttcttcacctgaagaaagcagtatttcttggaaaccgcttgtgtaa

SEQ ID NO: 4501 - protein, 1076 aa, Schizosaccharomyces pombe
MQCLLREKPRSLALVNKDHALMFHSVPQNKNSLSVCVAEFTALSEKPLEGFRKISSHRIYGTLGLIELEGSNFLCVISGASEVARVRDKERVFRIMEVCFYSVNRSNWDHIRQENYSPDIPDGYDTDTQGYDSYKYAAEPFSSLRKLLTNGSFYFSLDFDITTRLQLRTSQTMTEPQYDSMHTQFMWNEFMLRQLIKFRSHLNGDEKSALDGCRFFTCAIRGFASTEQFKLGIQTIRLSLISRLSSLRAGTRFLSRGVDDDGNVANFVETETILDSSKYCVSYCQVRGSIPIFWEQEGVQMFGQKIDITRSLEATRAAFEKHFTSLIEEYGPVHIINLLGTGSGERSLSERLRQHIQLSPEKDLIHLTEFDYHSQIRSFEDANKIRPMIYSDAETFGFYFENNEGQSIVVQDGVFRTNCLDCLDRTNVIQNLVSRVFLEQVMIYTRQNAGYDFWQVHSTIWANNGDALARIYTGTGALKSSFTRKGKLSIAGALNDLSKSVGRMYINNFQDKGRQETIDLLLGRLIDQHPVILYDPIHEYVNHELRKRENEFSEHKNVKIFVASYNLNGCSATTKLENWLFPENTPLADIYVVGFQEIVQLTPQQVISADPAKRREWESCVKRLLNGKCTSGPGYVQLRSGQLVGTALMIFCKESCLPSIKNVEGTVKKTGLGGVSGNKGAVAIRFDYEDTGLCFITSHLAAGYTNYDERDHDYRTIASGLRFRRGRSIFNHDYVVWFGDFNYRISLTYEEVVPCIAQGKLSYLFEYDQLNKQMLTGKVFPFFSELPITFPPTYKFDIGTDIYDTSDKHRVPAWTDRILYRGELVPHSYQSVPLYYSDHRPIYATYEANIVKVDREKKKILFEELYNQRKQEVRDASQTSYTLIDIAGSVAGKPNLIPHLPANGVDKIKQPSSERSKWWFDDGLPAKSIAAPPGPEYRLNPSRPINPFEPTAEPDWISNTKQSFDKKSSLIDSIPALSPAPSSLARSSVSSQRSSTSIIPIKPNKPTKPDHLVAPRVKPLLPPRSGSSSSGVPAPNLTPVNVPPTPPPRKSSASQRSGDLLASSPEESSISWKPLV

SEQ ID NO: 4502 - DNA, 4728 bp, Homo sapiens
  CDS (1)..(4728)
atggcgttcagtaaaggattccggatctatcacaaattggatcccccacctttcagcctcatagtggaaactaggcataaggaagaatgtctcatgttcgagtctggggctgtcgctgtgctctcatctgcagaaaaagaggcaatcaagggtacatactccaaagtactggatgcatatggactcttaggtgttctgcggttaaatcttggtgatactatgttacattatctggtcctagtcactggatgtatgtctgttggaaaaattcaagaatctgaagttttccgagttacttccactgagtttatatcactgcgaatcgattcttcagatgaggatcgcatttcagaagtgcggaaagttttgaattcaggaaacttttattttgcatggtctgcatctggcatcagtttagatttgagtcttaatgcgcatcgtagcatgcaagaacagacaactgataatagatttttctggaatcagtctttgcatttgcatctcaaacactatggcgtgaattgtgatgactggttattacgtcttatgtgtggaggagtagaaatcagaacaatttatgctgctcataaacaggcgaaggcttgcctcatttcaagattaagctgtgaacgagctgggaccaggtttaatgtccggggaacaaatgatgatggtcatgttgccaattttgtagaaacagaacaggttgtgtacttagatgactcagtttcttccttcatacaaatccgaggatctgttccattgttctgggagcaaccagggttgcaagtgggatctcatcgtgtccgtatgtcaaggggatttgaagccaatgcacctgcttttgacaggcattttagaacacttaagaacttatatggtagacaaataatagtaaatttgcttggatctaaggaaggtgaacatatgctaagtaaagctttccagagtcatttgaaagcttctgaacatgctgctgatatccagatggtgaattttgactatcatcaaatggttaagggaggaaaggcagaaaaattacatagtgttcttaaacctcaagtccagaagtttctagattatggatttttttatttcaatggaagtgaagttcaaagatgccagagtggtacagttcgaacaaactgcttggattgtcttgatagaacaaatagtgtgcaggcatttcttggcttagagatgctagctaaacagttggaagctcttggtttagctgaaaagcctcagttggtgactcgctttcaagaagtttttcggtcaatgtggtccgtgaatggtgattcaatcagtaagatatatgcaggaactggagctcttgaagggaaagcgaagttaaaagatggtgctcgctctgttacccgaacaattcagaataacttctttgacagctccaagcaagaggccattgatgttttgctactgggaaatactctgaatagtgatttagctgacaaagctcgagcacttttaactactggaagtttgcgtgtttctgagcagacattacagtcagcatcttctaaagtactaaagagcatgtgtgagaatttctacaaatattcaaagcctaagaaaattcgagtatgtgtcggaacctggaatgtgaatggtgggaagcaatttcgcagcatagcttttaagaatcagacactcactgactggcttcttgatgcacccaagttagctggcatccaggagtttcaagataaaagaagtaagccaactgatatatttgcaattggttttgaagaaatggtagaattgaatgctggaaacattgtgagtgcaagcacaacaaatcagaagctctgggctgtagaacttcagaagacaatctccagagacaacaagtatgtgctgctggcttctgaacagttggtgggcgtctgtttgtttgtttttatcagaccacagcatgctccttttatcagggatgttgcagttgatactgtgaagactggaatgggaggtgcaactggaaataagggagcagttgcaatccgaatgctcttccatacaaccagcctttgcttcgtctgtagccactttgctgcagggcagtcacaagtcaaagaaagaaatgaagattttatagaaatagcacgaaaattgagttttcctatgggaaggatgctattttcccatgactatgtattttggtgtggtgatttcaactatcgaatcgatctccctaacgaagaagttaaagagctcataagacagcaaaattgggattctcttatagcaggagatcaacttatcaatcagaaaaatgctggacaggtttttagaggatttttagaaggaaaggtaacctttgctccgacatataagtatgacttgttttctgacgactatgacaccagtgaaaagtgccgcacccctgcctggacagaccgtgtcctttggagaaggaggaaatggccttttgatagatcagctgaagatctagatcttctaaatgctagttttcaagatgaaagcaaaattctgtacacgtggactccaggcactttgctgcactatggaagagctgagctgaagacttctgaccacaggcctgtcgttgccctgattgatatagatatatttgaagttgaagctgaagagaggcaaaacatttataaagaagtaattgcagttcagggtccaccagatggtacagtattggtctcaatcaaaagttctttaccagaaaataatttttttgatgatgccttgattgatgagcttctgcagcagtttgcaagttttggtgaagttatacttataagatttgtagaagataaaatgtgggttacatttttggagggaagctctgccttgaatgttctgagcctaaatggtaaagagttattgaatcggactataactattgctttaaaaagtccagactggatcaaaaatttggaagaagaaatgagtttagagaaaattagcattgcattgccatcatcaacaagctctaccctgcttggtgaagatgcagaggttgcagcagattttgatatggaaggtgatgttgatgactatagtgctgaagtggaggaacttcttcctcagcatctccagccatcttcaagttccggccttggtacttcccccagctcttcaccccgaactagtccctgccagtcacctacaatatcagagggtcctgtaccttcccttcccatcagaccaagccgagcaccgtcaagaactcctgggcctcccagtgcacagagttctcctattgacgcgcagccagcaacgccgctgccgcagaaagaccccgcccagcccttggagcccaagcggccgccgccgccccgcccggtcgcccctcccacacgcccggctcccccacagagacctcctccgccttcaggggctaggagtcctgcacccactagaaaggaatttggaggtattggagcccctcccagtcctggggtagctaggagagagatggaagcacccaaaagccctggaacaacaaggaaagataatataggacgcagtcagccttcacctcaagcaggacttgcaggcccaggacctgctggatacagtacagccagaccgacgattcctcctcgtgctggagttatcagtgccccacagagccacgcgcgggcatctgctggaagactgactcctgaaagccaaagcaaaacatcagaaacgtcgaaaggttcaactttccttcctgaaccactgaagcctcaggctgcttttcctccgcagtcttctttgcccccgcctgctcaaaggttgcaagagcctcttgtccctgtggcagcacctatgcctcagtctggcccccagccaaatttggaaaccccaccacaaccaccacctcgaagcaggtcatcccatagcttgccttcagaagcttcctcacaaccgcaagtaaaaacaaatggaatctctgatggcaaaagagaatcaccattaaagattgacccatttgaagatctgtcatttaatctgcttgctgtatcaaaggctcagctatctgttcaaacgtcacctgttcccaccccagacccaaagaggttgattcagttgccttctgcaacgcaaagtaatgttaatactttgagttctgtaagttgcatgccaacaatgcctccaattccagctcggagtcaatcccaggaaaatatgcgaagttctccaaacccatttattactggcttgaccaggacaaatcctttcagtgacaggactgctgctcctggaaacccatttagagccaagtctgaagaatcagaggcaacttcatggttctccaaagaagagcccgttactatcagtcctttcccttctctgcagcctcttggtcataacaaaagcagggcttcatcttcacttgatggctttaaggacagttttgatctacagggccagtctacattaaaaattagcaacccgaaaggatgggtaaccttcgaggaagaagaggattttggtgtgaaagggaagtcaaagtcagcttgttcagacttactgggtaatcagccaagttcattttctggctccaacctgacattgaatgatgactggaataaagggacaaatgtctccttctgtgtgttgccgtcaagaagacctcctccacctcctgtccctctgctcccgcccggcaccagccctccagtagatcctttcacgaccttggcctctaaggcttcacccacactggactttacagaaagataa

SEQ ID NO: 4503 - protein, 1575 aa, Homo sapiens
MAFSKGFRIYHKLDPPPFSLIVETRHKEECLMFESGAVAVLSSAEKEAIKGTYSKVLDAYGLLGVLRLNLGDTMLHYLVLVTGCMSVGKIQESEVFRVTSTEFISLRIDSSDEDRISEVRKVLNSGNFYFAWSASGISLDLSLNAHRSMQEQTTDNRFFWNQSLHLHLKHYGVNCDDWLLRLMCGGVEIRTIYAAHKQAKACLISRLSCERAGTRFNVRGTNDDGHVANFVETEQVVYLDDSVSSFIQIRGSVPLFWEQPGLQVGSHRVRMSRGFEANAPAFDRHFRTLKNLYGRQIIVNLLGSKEGEHMLSKAFQSHLKASEHAADIQMVNFDYHQMVKGGKAEKLHSVLKPQVQKFLDYGFFYFNGSEVQRCQSGTVRTNCLDCLDRTNSVQAFLGLEMLAKQLEALGLAEKPQLVTRFQEVFRSMWSVNGDSISKIYAGTGALEGKAKLKDGARSVTRTIQNNFFDSSKQEAIDVLLLGNTLNSDLADKARALLTTGSLRVSEQTLQSASSKVLKSMCENFYKYSKPKKIRVCVGTWNVNGGKQFRSIAFKNQTLTDWLLDAPKLAGIQEFQDKRSKPTDIFAIGFEEMVELNAGNIVSASTTNQKLWAVELQKTISRDNKYVLLASEQLVGVCLFVFIRPQHAPFIRDVAVDTVKTGMGGATGNKGAVAIRMLFHTTSLCFVCSHFAAGQSQVKERNEDFIEIARKLSFPMGRMLFSHDYVFWCGDFNYRIDLPNEEVKELIRQQNWDSLIAGDQLINQKNAGQVFRGFLEGKVTFAPTYKYDLFSDDYDTSEKCRTPAWTDRVLWRRRKWPFDRSAEDLDLLNASFQDESKILYTWTPGTLLHYGRAELKTSDHRPVVALIDIDIFEVEAEERQNIYKEVIAVQGPPDGTVLVSIKSSLPENNFFDDALIDELLQQFASFGEVILIRFVEDKMWVTFLEGSSALNVLSLNGKELLNRTITIALKSPDWIKNLEEEMSLEKISIALPSSTSSTLLGEDAEVAADFDMEGDVDDYSAEVEELLPQHLQPSSSSGLGTSPSSSPRTSPCQSPTISEGPVPSLPIRPSRAPSRTPGPPSAQSSPIDAQPATPLPQKDPAQPLEPKRPPPPRPVAPPTRPAPPQRPPPPSGARSPAPTRKEFGGIGAPPSPGVARREMEAPKSPGTTRKDNIGRSQPSPQAGLAGPGPAGYSTARPTIPPRAGVISAPQSHARASAGRLTPESQSKTSETSKGSTFLPEPLKPQAAFPPQSSLPPPAQRLQEPLVPVAAPMPQSGPQPNLETPPQPPPRSRSSHSLPSEASSQPQVKTNGISDGKRESPLKIDPFEDLSFNLLAVSKAQLSVQTSPVPTPDPKRLIQLPSATQSNVNTLSSVSCMPTMPPIPARSQSQENMRSSPNPFITGLTRTNPFSDRTAAPGNPFRAKSEESEATSWFSKEEPVTISPFPSLQPLGHNKSRASSSLDGFKDSFDLQGQSTLKISNPKGWVTFEEEEDFGVKGKSKSACSDLLGNQPSSFSGSNLTLNDDWNKGTNVSFCVLPSRRPPPPPVPLLPPGTSPPVDPFTTLASKASPTLDFTER

SEQ ID NO: 4504 - DNA, 4491 bp, Homo sapiens
  CDS (1)..(4491)
atggccctgagcaaagggctgcggctgctggggcgcctgggggccgagggggactgtagcgtgctgctggaggcgcgcggccgcgacgactgcctgctgttcgaggccggcacggtggccacgctggctccagaagaaaaggaagtcattaaaggacagtatggcaagctcacggacgcgtacggctgcctgggggagctgaggctgaaatctggtggcacgtctctgagcttcctggtgttggtgacaggctgcacatctgtgggcagaattccagatgctgaaatctacaaaatcactgccactgacttttaccctcttcaggaagaggccaaggaggaggaacgcctcatagctttgaagaaaatcctcagctcgggggtgttctatttctcatggccaaacgatgggtctcgctttgacctgactgtccgcacgcagaagcagggggatgacagctctgaatgggggaactccttcttctggaaccagctgttgcacgtgcccttgaggcagcaccaggtgagctgctgtgactggctgctgaagatcatctgcggggtggtcaccatccgcaccgtgtatgcctcccacaagcaggccaaggcctgcctcgtctctcgcgttagctgtgagcgcacaggcactcgcttccacacccgtggcgtgaacgacgacggccatgtgtccaacttcgtggagacagagcagatgatttacatggacgatggagtgtcatcttttgtccagatcagaggctccgttccgctgttctgggaacagccagggcttcaggttggctcccatcatctgagactccacagaggcctggaagccaatgcccctgctttcgacaggcacatggtgcttctgaaggagcagtacgggcagcaggtggtcgtgaaccttctgggaagcagaggcggagaggaggtgctcaacagagccttcaagaagctgctctgggcttcttgccacgcgggcgacacgcctatgatcaattttgacttccatcagtttgccaaaggtgggaagctagagaaattggagaccctcttgaggccacagttaaagctgcactgggaagacttcgatgtgttcacaaagggggagaacgtcagtccacgttttcagaaaggcactttgcggatgaactgtcttgactgcctggaccgaaccaacactgtgcagagcttcatcgcgctcgaggtcctgcatctgcagctcaagaccctggggctgagttcaaaacccatcgttgaccgctttgtggagtccttcaaagccatgtggtctctgaatggccacagcctgagcaaggtgttcacaggcagcagagccctggaagggaaggccaaggtggggaagctgaaggatggagcccggtccatgtctcgaaccatccagtccaacttcttcgacggggtgaagcaggaggccatcaagctgctgctggttggggacgtctacggcgaggaggtggcagacaaagggggcatgctgctggacagcacggcgctcctggtgactcccaggatcctgaaagctatgactgagcgtcagtccgaattcacaaatttcaagcggatccggattgctatggggacctggaacgtgaacggaggaaagcagttccggagcaacgtgctcaggacggcggagctgacagactggctgctcgactcgccccagctctcgggagctaccgactcccaggatgacagcagcccagctgacatatttgctgtggggtttgaagagatggtggaattgagcgcagggaatattgtcaatgccagtactaccaacaagaagatgtggggtgaacagcttcagaaagccatctcacgctctcatagatacattctgttgacttcggcacagctggtgggcgtctgtctttatatctttgtacgtccataccatgtcccgttcatcagggacgtagccatcgacacagtgaagacgggcatggggggcaaggcggggaacaagggcgccgtcggcatccgcttccagttccacagcaccagcttctgcttcatatgtagtcacctgacggccgggcagtcccaggtgaaggagcggaatgaagactacaaggagatcacccagaaactctgcttcccaatggggagaaatgttttttctcatgattatgtattttggtgtggcgatttcaactaccgcattgatcttacttatgaagaagtcttctattttgttaaacgccaagactggaagaaacttctggaatttgatcaactacagctacagaaatcaagtggaaaaatttttaaggactttcacgaaggagccattaactttggacccacctacaagtatgacgttggctcagccgcctacgatacaagcgacaaatgccgcacccccgcctggacagacagggtgctgtggtggaggaagaaacatccctttgataaaacagctggagaactcaaccttctagacagtgatctagatgttgacaccaaagtcagacacacctggtctcctggtgccctgcagtattatggtcgtgcggagctacaagcgtctgatcacagacctgtgctggcgatcgtggaggtggaagttcaggaagtcgatgtgggtgctcgggagagggttttccaggaagtgtcctccttccagggccccctggatgccactgttgtagtaaaccttcaatcaccgaccttagaagagaaaaacgagtttccagaggacctgcgtactgagctcatgcagaccttggggagttatgggacaattgttcttgtcaggatcaaccaagggcagatgctggtaacttttgcagacagtcactcggctctcagtgtcctggacgtggacggtatgaaggtgaaaggcagagcagtgaagattagaccgaagaccaaggactggctgaaaggtttgcgagaggagatcattcggaaacgagacagcatggcccccgtgtctcccactgccaactcctgtttgctggaggaaaactttgacttcacaagtttggactatgagtcagaaggggatattcttgaagacgatgaagactacttggtggatgaattcaatcagcctggagtctcggacagtgaactcgggggagacgacctctctgatgtccccggccccacagcactggctcctcccagcaagtcacctgctctcaccaaaaagaagcagcatccaacgtacaaagatgacgcggacctggtggagctcaagcgggagctggaagccgtcggggagttccgccaccgttctccgagcaggtctctgtcggtccccaaccggcctcggccacctcaacccccgcagagacccccccctccaaccggtttaatggtgaaaaagtcggcttcagatgcgtccatctcctccggcacccatggacagtattcaattttgcagacggcaagacttctaccaggagcacctcagcaacctcccaaggctcggactggaataagtaaaccttataatgtcaagcagatcaaaaccaccaatgcccaggaggcagaagcagcaatccggtgtctcctggaagccagaggaggtgcctccgaagaagccctaagtgccgtggccccaagggaccttgaagcatcctctgaaccagagcccacaccgggggcagccaaaccagagaccccacaggcgcccccactccttccccgtcggcccccacccagagttcctgccatcaagaagccaaccttgagaaggacaggaaagcccctgtcaccggaagaacagtttgagcaacagactgtccattttacaatcgggcccccggagacaagcgttgaggcccctcctgtcgtgacagcccctcgagtccctcctgttcccaaaccaagaacatttcagcctgggaaagctgcagagaggccaagccacaggaagccagcatcagacgaagcccctcctggggcaggagcctctgtgccaccacctctggaggcgccgcctcttgtgcccaaggtacccccgaggaggaagaagtcagcccccgcagccttccacctgcaggtcctgcagagcaacagccagcttctccagggcctcacttacaatagcagtgacagcccctctgggcacccacctgccgcgggcaccgtcttcccacaaggggactttctcagcacttcatctgctacaagccccgacagcgatggcaccaaagcgatgaagccagaggcagccccacttcttggtgattatcaggaccccttctggaaccttcttcaccaccctaaactgttgaataacacttggctttctaagagctcagaccctttggactcaggaaccaggagccccaaaagagatcccatagacccagtgtcagctggcgcttcagctgccaaggcagagctgccaccagatcatgaacacaaaaccttaggtcactgggtgacaatcagtgaccaagaaaagaggacagcactgcaggtgtttgacccactggcaaaaacatga

SEQ ID NO: 4505 - protein, 1496 aa, Homo sapiens
MALSKGLRLLGRLGAEGDCSVLLEARGRDDCLLFEAGTVATLAPEEKEVIKGQYGKLTDAYGCLGELRLKSGGTSLSFLVLVTGCTSVGRIPDAEIYKITATDFYPLQEEAKEEERLIALKKILSSGVFYFSWPNDGSRFDLTVRTQKQGDDSSEWGNSFFWNQLLHVPLRQHQVSCCDWLLKIICGVVTIRTVYASHKQAKACLVSRVSCERTGTRFHTRGVNDDGHVSNFVETEQMIYMDDGVSSFVQIRGSVPLFWEQPGLQVGSHHLRLHRGLEANAPAFDRHMVLLKEQYGQQVVVNLLGSRGGEEVLNRAFKKLLWASCHAGDTPMINFDFHQFAKGGKLEKLETLLRPQLKLHWEDFDVFTKGENVSPRFQKGTLRMNCLDCLDRTNTVQSFIALEVLHLQLKTLGLSSKPIVDRFVESFKAMWSLNGHSLSKVFTGSRALEGKAKVGKLKDGARSMSRTIQSNFFDGVKQEAIKLLLVGDVYGEEVADKGGMLLDSTALLVTPRILKAMTERQSEFTNFKRIRIAMGTWNVNGGKQFRSNVLRTAELTDWLLDSPQLSGATDSQDDSSPADIFAVGFEEMVELSAGNIVNASTTNKKMWGEQLQKAISRSHRYILLTSAQLVGVCLYIFVRPYHVPFIRDVAIDTVKTGMGGKAGNKGAVGIRFQFHSTSFCFICSHLTAGQSQVKERNEDYKEITQKLCFPMGRNVFSHDYVFWCGDFNYRIDLTYEEVFYFVKRQDWKKLLEFDQLQLQKSSGKIFKDFHEGAINFGPTYKYDVGSAAYDTSDKCRTPAWTDRVLWWRKKHPFDKTAGELNLLDSDLDVDTKVRHTWSPGALQYYGRAELQASDHRPVLAIVEVEVQEVDVGARERVFQEVSSFQGPLDATVVVNLQSPTLEEKNEFPEDLRTELMQTLGSYGTIVLVRINQGQMLVTFADSHSALSVLDVDGMKVKGRAVKIRPKTKDWLKGLREEIIRKRDSMAPVSPTANSCLLEENFDFTSLDYESEGDILEDDEDYLVDEFNQPGVSDSELGGDDLSDVPGPTALAPPSKSPALTKKKQHPTYKDDADLVELKRELEAVGEFRHRSPSRSLSVPNRPRPPQPPQRPPPPTGLMVKKSASDASISSGTHGQYSILQTARLLPGAPQQPPKARTGISKPYNVKQIKTTNAQEAEAAIRCLLEARGGASEEALSAVAPRDLEASSEPEPTPGAAKPETPQAPPLLPRRPPPRVPAIKKPTLRRTGKPLSPEEQFEQQTVHFTIGPPETSVEAPPVVTAPRVPPVPKPRTFQPGKAAERPSHRKPASDEAPPGAGASVPPPLEAPPLVPKVPPRRKKSAPAAFHLQVLQSNSQLLQGLTYNSSDSPSGHPPAAGTVFPQGDFLSTSSATSPDSDGTKAMKPEAAPLLGDYQDPFWNLLHHPKLLNNTWLSKSSDPLDSGTRSPKRDPIDPVSAGASAAKAELPPDHEHKTLGHWVTISDQEKRTALQVFDPLAKT

SEQ ID NO: 4506 - DNA, 4841 bp, Mus musculus
  CDS (49)..(4353)
caccctcgggcgggacctggtccccgctctcctctgctccccgcgcccatggctctaagcaaagggctgcggctgctggcgcggctggaccccactggcccgagcagcgtgctgttggaggcgcggggccgcggcgactgcctgctcttcgaggccggcgcagtggccacgctggctccggaagaaaaggaagtcattaaaggactgtatagcaagctgacggatgcctatggctgcctcggggagctgaggttacaatccggtggcgtccccttgagctttctggtgttggtgacaggctgcatgtcagtgggcagaattccagatgcagagatctacaaaatcactgccactgagttgtaccccctgcaggaagaggccaaggaagaggaccgcctgcccaccttaaagaaaatcctgagctcaggggtgttctatttcgcatggcccaatgatggcgcctgcttcgatctgaccatcagggctcagaaacagggtgatgacggctctgaatgggggacctctttcttctggaaccagctattgcatgtgcctctgcggcagcaccaggtgaactgtcataactggttgctgaaagtcatctgtggggtggtgaccatccgcacagtatatgcctcccacaagcaggccaaggcctgtctcatctctcgcatcagctgtgaacgcgcaggtgctcgcttcctcacccgtggtgtgaacgatgatggccacgtgtccaactttgtggagacagagcagacgatttacatggatgatggagtatcgtcctttgtccagatccgaggctccgttccgctgttctgggagcaaccaggacttcaggttggctcccatcatctgagactgcacagaggcctagaggccaacgctcctgcttttgaaaggcacatggtgcttctgaaggagcaatacggtaagcaggtggttgtgaacctgctgggtagcagaggcggtgaagaggtgctcaacagagccttcaagaagttgctctgggcttcttgccacgcgggtgacacacctatgataaattttgacttccatcagtttgccaaaggtaggaagctagagaaattggagaacctgttgagacctcagttacagctacactgggaagacttcggcgtgtttgcgaagggcgagaatgtaagtccacggtttcagaaaggcactctgcggatgaactgtctcgactgtctggatagaaccaacactgtgcagtgcttcattgctcttgaggtccttcatctgcagcttgagagcttggggctaaattcaaagcccatcattgaccgttttgtggagtccttcaaagccatgtggtctctgaatgggcacagcctgagcaaggtgttcacagggagcagggccctggaaggaaaggccaaggtgggaaagctgaaggatggggcccgatccatgtctcgcaccatccagtccaacttcttcgacggggtgaagcaggaggccatcaagctactgctagtcggagatgtctacaatgaagagtctacagacaaaggacggatgctgctggacaacacggcccttctggcgacccccaggatcttgaaggccatgacagaacgccagtcggaattcacgaatttcaagcgcatccagattgctgtggggacctggaatgtgaacggaggaaagcaattccgtagcaatctcctggggacggctgagctcacggactggctcctagatgctcctcagctgtcaggagcagtggactcccaggatgatggcagtcctgctgacgtatttgccatcgggtttgaggagatggtggaactgagtgcgggaaatattgtcaatgccagcaccaccaacaggaagatgtggggcgagcagcttcagaaagccatctcccgctcccatcggtacatcctcttgacctccgcacagctggtgggcgtctgtctttacatctttgtacgtccgtaccacgtcccgttcatcagagacgtggccatcgacaccgtgaagaccggcatggggggaaaggcggggaataagggtgctgtgggcatccgcttccagctccacagcaccagtttctgcttcgtctgtagccacctgacggctgggcagtctcaggtgaaggagaggaatgaagactaccgggagatcacgcacaaactctccttcccttcggggagaaacatattttcacatgattacgtgttttggtgtggcgatttcaactaccgtattgatcttacttacgaagaagtcttctattttgttaaacgccaagactggaagaaacttatggaattcgatcagttacagttacagaaatcaagtggaaaaatttttaaagactttcatgaaggagccgttaacttcggacccacctacaagtatgacgttggatcagctgcctacgacacaagtgacaagtgccgtaccccagcctggacagacagggtgctgtggtggaggaagaagcatccatatgataaaacagctggtgaactcaaccttctagacagcgatctagacggcgatccccaaatcagacacacctggtctccaggcactctgaaatactacggccgtgcagagctgcaggcgtctgatcacagacctgtgctggccattgtggaggtggaggttcaagaggtggatgtaggagcccgggagagggtcttccaggaagtgtcctctgtccaaggcccgctggatgccaccgttgttgtaaacctccagtctccaaccctagaagagaaaaatgaatttccagaggacctgcgcacagaacttatgcagactttggggaattatgggacgattattctagtcaggatcaaccaagggcagatgctggtgacgtttgcagacagccactcggctctcagtgtgctggatgtggatggtatgaaggtgaaaggcagggccgtgaagattcgaccaaagaccaaagattggctagaaggcctgagagaggagcttctccggaagcgagacagcatggcccctgtgtctcccaccgccaactcctgcttgttggaggagaactttgacttctcgagtctggactatgagtccgaaggggatgttcttgaagaggatgaagactatttagtggatgggtttggccagcctgtagtctcagacagtgagctcggtggagacaactcttccgacaccatgagctccttgacacccgccagcaagtctcccgccctggctaaaaagaagcaacatccaacatacaaagctggcttaatggtgaagaagtcagcctcagacgcgtccatctcttctggcactcatggacaatattccatcttgcagacagcgaaacttctcccaggagcaccccagcaaccacccaaggctagaactggaataagtaaaccttacaacgtcaaacagatcaaaaccaccaacgctcaggaggcagaagcagctatccggtgtctcctggaagctagcggaggggtcccggaatcagccccaggtgccatacccctgagaaaccaagggtcttctaagccagaggccaccctggggcccccagccctgccccgccggcctgctccaagggttcccactatgaagaaaccaactttgaggaggacaggaaagcccatgttaccagaagaaaactttgagccacagcctgtccattttacaatggcttcccaggaaatgaaccttgagacccctcctccaataacagctactcccatcccgcctgttcccaaaccaagaacacttcagcctgggaaaggtgttgaggggaggccaagcagcggtaagccagaaccagatgaagctccttccgtgacaggcactgtggagtcaccacctccagaggcccaggaggccccgtctctggctcccaaggtgcctccgaggaggaagaagtctgcaccagcggccttccacctgcaggtcctgcagaacaacagccaagttctccagggcctcacgtgctccagcagttctccaccctcactgaagcccgacacccacccgctctgtctacaagtggcacttggcacttcatctgccagaagccctgaaacccatggccccagagtgacagagcccgaggcggcctcttttcatggcaactatccagatcccttctggagccttctccaccaccctaagctgttgaacaatacctggctgtccaagagctccgagcctttagacgtggggtccaggaaccctgagaggacacacacagagccggcacaggtcaatgcatcgttggctgagagggggcttccaccagaccatgggggaaaagacttaagtcactgggtgacagctagtaacaaagacaagaggacaacattaggtgtttgacccacaggcatgaaggtgacctgttgcctctgaggatactcttcatttcaaatgttcaccttcctcatgtgggcattgcttgacctggtcaaagggatgtcgatgtaaaaaggcacactgaaaccctttgcttatcgtcactctgtgtagtgtatgagaactgtttgccactctgtacagatattcagccacccaaatgttccattcgagatcatgggtcttaagcttgctctcaggggcctggggagtgtgctgttgaattcagggtatggatttaaaagaaacatatctagattccccaggatgctctcacccacagaattttaaatggttgttcaatctgtgtgtgtgtgccatttgcttgttcgttttgtgtttttacagatttgggataagtggtaggttcataaaagatgacattaaaagcacttgggaccattaaaaaaaaaaaaaaaaaaaaaaaaaaaaaaaaaaaaaaaaaaaaaaag

SEQ ID NO: 4507 - protein, 1434 aa, Mus musculus
MALSKGLRLLARLDPTGPSSVLLEARGRGDCLLFEAGAVATLAPEEKEVIKGLYSKLTDAYGCLGELRLQSGGVPLSFLVLVTGCMSVGRIPDAEIYKITATELYPLQEEAKEEDRLPTLKKILSSGVFYFAWPNDGACFDLTIRAQKQGDDGSEWGTSFFWNQLLHVPLRQHQVNCHNWLLKVICGVVTIRTVYASHKQAKACLISRISCERAGARFLTRGVNDDGHVSNFVETEQTIYMDDGVSSFVQIRGSVPLFWEQPGLQVGSHHLRLHRGLEANAPAFERHMVLLKEQYGKQVVVNLLGSRGGEEVLNRAFKKLLWASCHAGDTPMINFDFHQFAKGRKLEKLENLLRPQLQLHWEDFGVFAKGENVSPRFQKGTLRMNCLDCLDRTNTVQCFIALEVLHLQLESLGLNSKPIIDRFVESFKAMWSLNGHSLSKVFTGSRALEGKAKVGKLKDGARSMSRTIQSNFFDGVKQEAIKLLLVGDVYNEESTDKGRMLLDNTALLATPRILKAMTERQSEFTNFKRIQIAVGTWNVNGGKQFRSNLLGTAELTDWLLDAPQLSGAVDSQDDGSPADVFAIGFEEMVELSAGNIVNASTTNRKMWGEQLQKAISRSHRYILLTSAQLVGVCLYIFVRPYHVPFIRDVAIDTVKTGMGGKAGNKGAVGIRFQLHSTSFCFVCSHLTAGQSQVKERNEDYREITHKLSFPSGRNIFSHDYVFWCGDFNYRIDLTYEEVFYFVKRQDWKKLMEFDQLQLQKSSGKIFKDFHEGAVNFGPTYKYDVGSAAYDTSDKCRTPAWTDRVLWWRKKHPYDKTAGELNLLDSDLDGDPQIRHTWSPGTLKYYGRAELQASDHRPVLAIVEVEVQEVDVGARERVFQEVSSVQGPLDATVVVNLQSPTLEEKNEFPEDLRTELMQTLGNYGTIILVRINQGQMLVTFADSHSALSVLDVDGMKVKGRAVKIRPKTKDWLEGLREELLRKRDSMAPVSPTANSCLLEENFDFSSLDYESEGDVLEEDEDYLVDGFGQPVVSDSELGGDNSSDTMSSLTPASKSPALAKKKQHPTYKAGLMVKKSASDASISSGTHGQYSILQTAKLLPGAPQQPPKARTGISKPYNVKQIKTTNAQEAEAAIRCLLEASGGVPESAPGAIPLRNQGSSKPEATLGPPALPRRPAPRVPTMKKPTLRRTGKPMLPEENFEPQPVHFTMASQEMNLETPPPITATPIPPVPKPRTLQPGKGVEGRPSSGKPEPDEAPSVTGTVESPPPEAQEAPSLAPKVPPRRKKSAPAAFHLQVLQNNSQVLQGLTCSSSSPPSLKPDTHPLCLQVALGTSSARSPETHGPRVTEPEAASFHGNYPDPFWSLLHHPKLLNNTWLSKSSEPLDVGSRNPERTHTEPAQVNASLAERGLPPDHGGKDLSHWVTASNKDKRTTLGV

SEQ ID NO: 4508 - DNA, 4491 bp, Rattus norvegicus
  CDS (1)..(4491)
atggcgctgagcaaagggctgcgactgctggcgcggctggaccccaccggcccgagcagcgtgctgctggaggcgcggggccgcggcgactgtctactctttgaggccggcgcggtggccacgctggctccggaagagaaggaagtcattaaaggactgtatgggaagccgacggatgcctatggctgcctcggggagctgagtttaaaatccggtggcgtccccttgagctttctggtgttggtgacaggctgcacgtcagtgggcagaattccagatgcagagatctacaaaatcactggcactgagttttaccccctgcaggaagaggccaaggaagaggaccgcctgccagccttgaagaaaatcctgagttcaggggtgttctatttcgcatggcccaatgatggcgcctgcttcgatctgaccatcagggctcagaaacagggtgatgactgctctgaatgggggacctccttcttctggaaccagctattgcatgtgcctctgcggcagcaccaggtgaactgtcatgactggttgctgaaagtcatctgtggggtggtgaccatccgcacggtttatgcctcccacaagcaggccaaggcctgtctcatctctcgcatcagctgtgaacgcgcaggtgctcgcttcctcacccggggtgtgaacgacgatggccacgtgtccaactttgtggagacagagcaggcgatttacatggatgatggagtgtcgtcctttgtccagatccgaggctccgttccgctgttctgggagcagccagggctccaggttggctcccatcatctgagactgcacagaggcctagaggccaacgcccctgcttttgaaaggcacatggtgcttctgaaggagcagtacgggcagcaggtggtggtgaacctgctgggaagcagaggcggtgaggaggtgctcaacagagccttcaagaagttgctctgggcttcttgccacgcaggcgacacgcctatgataaattttgacttccatcagtttgccaaaggtaggaagctagagaaattggagaacctgttgagacctcagttaaaactacactgggatgactttggcgtatttgcgaagggcgagaatgtaagtccacggtttcagaaaggcactctgcggatgaactgtctcgactgtctggacagaaccaacactgtacagtgcttcattgctcttgaggtgcttcatctgcagcttgagagcctagggctgaattccaagcccatcactgaccgcttcgtggagtccttcaaagccatgtggtctctgaatgggcatggcctgagcaaggtgttcacagggagcagggccctggaaggaaaggccaaggtggggaagctgaaggatggggctagatccatgtctcgtaccatccagtccaacttcttcgacggggtgaagcaggaggccatcaagctactgctagttggagatgtctacaatgaagagtctacagacaaaggcaggatgctgctggacaacacggcccttctgggtttggggtcaaataaacaaaacagtctttcaggcatgctggatggaaaagcaacacccaggatcctgaaggccatgacagaacgccagtcagaattcacaaatttcaagcggatccagattgctatggggacctggaatgtgaacggaggaaaacaattccgtagcaatctcctggggaccactgaactcactgactggctcctggatgcaccccagctctcaggagcagtggactctcaggacgatggcggtcccgctgacatatttgccgtcgggtttgaggagatggtggagctgagtgcaggaaatattgtcaatgccagcaccaccaacaggaagatgtggggtgagcagctccagaaagccatctcccgatcccatcggtacatcctcttgacctcagcacagctggtgggcgtctgtctttacatctttgtacgtccgtaccacgtcccgttcatcagggatgtggccatcgacaccgtgaagaccggtatggggggaaaggcagggaataagggcgccgtgggtatccgctttcagttccacagcactagcttctgcttcatctgcagtcacctgacggctgggcagtctcaggtgaaggagaggaacgaagactaccgggagatcacgcacaagctctccttcccttcggggagaaacatattttcacacgattatgtgttttggtgtggcgatttcaactaccgcatcgatcttacttacgaagaagtcttctattttgttaaacgccaagactggaagaaacttatggaatttgatcagttacagctacagaaatcaagtgggaaaatttttaaagactttcatgaaggaaccattaacttcggacccacctacaagtatgacgttggatcggctgcctatgacacaagtgacaagtgccggaccccagcctggacagacagggtgctgtggtggaggaagaagcatccgtacgataagacagctggcgaactcaaccttctagacagtgatctagacggtgatgccaacatcagacatacctggtctccgggcactctcaagtactacggccgtgccgagctgcaggcatctgatcacagacctgtgctggccatcgtagaggtggaggttcaagaggtcgatgtgggagcccgggagagagtcttccaggaagtgtcctctgtccaaggcccgctggacgccactgttattgtaaaccttcagtctccaacccttgaagagagaaatgaatttccagaggacctgcgcacagaacttatgcagactttggggaattatgggacgattattctggtcaggatcaaccaagggcagatgctggtgacatttgcagacagccactcagctctcagtgtgctggatgtggatggtatgaaggtgaaaggcagggccgtgaagattcgaccaaagaccaaagattggctagaaggcttgagagaggagctcattcggaagcgggacagcatggcccctgtgtctcccaccgccaactcctgcttgttggaggagaactttgacttcacaagtctggactatgagtcagaaggggatgttcttgaagatgatgaagactacttagcggatgagtttggtcagcctgtagtctcagacagtgagcttggaggagacgactcttctgataccatgagcgcctcgacacctgccagcaagtctcccgcactggctaaaaagaagcaacatccaacgtacaaagacgacgctgacctgatgacgttaaagctggagctggaagttgctgggaattttcgccaccgttctccgagcaggtccctgtctgtccccaataggcctcggccacctcaccctccacaaagacccccccctccaactggcttaatggtgaagaagtctgcctcagatgcgtctatctcctccggaacccacgggcaatattccatcttgcagaccgcgaaacttcttccaggagcacctcagcaaccgcccaaggctcgaactggaataagtaaaccttacaacgtcaaacagatcaaaaccaccaatgctcaggaggcggaagcagctatccggtgtctcctggaagctggcggaggtgtcccagagtcagccccgggtgccacgcccctgagaaaccaagggtcttctaagccagaggcctccctggggcctccagtcctaccgcgccggcctgttccaagggttcccactatgaagaaaccaactttgaggagaacaggaaagcccatgttaccagaagaacagtgtgaacagcagcctgtccattttacaatggcttcccaggaaatgaaccttgagacccctcctccaataacagctcccatcccgcctgttcccaaaccaagaacatttcagcctgggagaggtgttgagaggaggccgagtggtggcaagccagaaccggatgacgctcctcctgtgacaggcgctgtggagttatcgtctccagaggccccagaggccccgtccctggctcccaaggtgcctcctaggaggaagaagtctgcaccagcagccttccacctgcaggtcctgcagagcaacagccaacttctgcagggcctcacatgctccagcagttctccgtccccaccaaagcctgacacccccctgctctatccgcaaatggcacttggcacttcatctgctataagtcccgaaactgatggccccagagtgacggagcccgaggcagcctcttttcatggcgattacccagatcccttctggagccttctccaccaccccaagctgttgaataataatacctggctgtccaagagctctgagcctttagacttggggtccaggacccctgagaggacacacacagactcagcgcaggtcaatgcatcagtggttgagagggggcttccaccagaccatgggggtaaagacttcagtcactggatggccgccagtaacaaagacaagaggacaacattaggcgtttga

SEQ ID NO: 4509 - protein, 1496 aa, Rattus norvegicus
MALSKGLRLLARLDPTGPSSVLLEARGRGDCLLFEAGAVATLAPEEKEVIKGLYGKPTDAYGCLGELSLKSGGVPLSFLVLVTGCTSVGRIPDAEIYKITGTEFYPLQEEAKEEDRLPALKKILSSGVFYFAWPNDGACFDLTIRAQKQGDDCSEWGTSFFWNQLLHVPLRQHQVNCHDWLLKVICGVVTIRTVYASHKQAKACLISRISCERAGARFLTRGVNDDGHVSNFVETEQAIYMDDGVSSFVQIRGSVPLFWEQPGLQVGSHHLRLHRGLEANAPAFERHMVLLKEQYGQQVVVNLLGSRGGEEVLNRAFKKLLWASCHAGDTPMINFDFHQFAKGRKLEKLENLLRPQLKLHWDDFGVFAKGENVSPRFQKGTLRMNCLDCLDRTNTVQCFIALEVLHLQLESLGLNSKPITDRFVESFKAMWSLNGHGLSKVFTGSRALEGKAKVGKLKDGARSMSRTIQSNFFDGVKQEAIKLLLVGDVYNEESTDKGRMLLDNTALLGLGSNKQNSLSGMLDGKATPRILKAMTERQSEFTNFKRIQIAMGTWNVNGGKQFRSNLLGTTELTDWLLDAPQLSGAVDSQDDGGPADIFAVGFEEMVELSAGNIVNASTTNRKMWGEQLQKAISRSHRYILLTSAQLVGVCLYIFVRPYHVPFIRDVAIDTVKTGMGGKAGNKGAVGIRFQFHSTSFCFICSHLTAGQSQVKERNEDYREITHKLSFPSGRNIFSHDYVFWCGDFNYRIDLTYEEVFYFVKRQDWKKLMEFDQLQLQKSSGKIFKDFHEGTINFGPTYKYDVGSAAYDTSDKCRTPAWTDRVLWWRKKHPYDKTAGELNLLDSDLDGDANIRHTWSPGTLKYYGRAELQASDHRPVLAIVEVEVQEVDVGARERVFQEVSSVQGPLDATVIVNLQSPTLEERNEFPEDLRTELMQTLGNYGTIILVRINQGQMLVTFADSHSALSVLDVDGMKVKGRAVKIRPKTKDWLEGLREELIRKRDSMAPVSPTANSCLLEENFDFTSLDYESEGDVLEDDEDYLADEFGQPVVSDSELGGDDSSDTMSASTPASKSPALAKKKQHPTYKDDADLMTLKLELEVAGNFRHRSPSRSLSVPNRPRPPHPPQRPPPPTGLMVKKSASDASISSGTHGQYSILQTAKLLPGAPQQPPKARTGISKPYNVKQIKTTNAQEAEAAIRCLLEAGGGVPESAPGATPLRNQGSSKPEASLGPPVLPRRPVPRVPTMKKPTLRRTGKPMLPEEQCEQQPVHFTMASQEMNLETPPPITAPIPPVPKPRTFQPGRGVERRPSGGKPEPDDAPPVTGAVELSSPEAPEAPSLAPKVPPRRKKSAPAAFHLQVLQSNSQLLQGLTCSSSSPSPPKPDTPLLYPQMALGTSSAISPETDGPRVTEPEAASFHGDYPDPFWSLLHHPKLLNNNTWLSKSSEPLDLGSRTPERTHTDSAQVNASVVERGLPPDHGGKDFSHWMAASNKDKRTTLGV

SEQ ID NO: 4510 - DNA, 3552 bp, Saccharomyces cerevisiae
  CDS (1)..(3552)
atgaaaatactcctatcgaaacagcaaactagaaagatagcaatagtttcagaaacacatggactggtatttaggccaataaacagtaagaactctcgcagatctacatgtgccgtggaattggttccgaaagctgaattaaatggtaatggtttcagaagactatctaaccatgaaatatacggttttattggtctcatagaaattgaaggccttatgttcatagcaaccataacaggtaaatctaaggtggcccagccgatcccaaacaaaacggttaacaaaatatatgctgtggattttttttgcttaaataattctaaatgggatttcatggacatcgattcatccggttatccgattgttactaatgatggagattttgcaataagctcgcctcctagtatttccacacattcttctagatcatcgctacgttcttcttcctctaggagtttgaatgctcaagaacaagctcccaagcatccatgtcatgaactaagaaagctattatcaaatggatctttttattacagcaccgattttgatttaacttgtacattgcagaaacgtggattcacggaacactctttgagttttgatgattttgaccgggagtttatgtggaactcgtttcttatggacgaaatcatcacatacagagacagactagatgtaacggccaaagaactattggatcaacgaggattcctcacgaccgtaatccgagggtttgctgaaacaatttttagctatattaataggttgaaagtaggacttaccattatttccaggcaaagttggaaaagagcaggcacaaggtttaatgcacgtggtatagatgatgatggccatgtcgcaaattttgttgaaacagaaatgattatgtactcttctcagtattgttatgctttcacgcagataagaggaagccttccaattttttgggagcaggatacatctttgattagtccaaagattcaaattaccagatctgttgaagcaacacagcccacgtttgatgaacattttataagactatttaagaagtatgggccagttcatataatcaacctgctgtctactaaatcttcagaaattcaattatcgaggcgatacaaggaacagttgaaaaattctgagaaaatgaaaatcggtagagatgtgttcctaacaagctttgatttccatagagaaacttcgcaagatgggtttgcagctgcaagtaggattatccctaaaataagaaacacaattttggacgccggttacttttcatacgatgtaaaagaagggcgattaatatccgaacaagacggtgtctttagaaccaattgcttggattgtttagatagaacaaatttgatccaacagacgatttcactggccgttttcaaactatttttggaagacttccgattggtaaaacccagtagtttcatcgacgataatgaatttgtgcaaaaggtgaatgctttatgggccgacaacggagatcagatatcacaaatttacactgggacaaatgctctgaaatcgtcctattcaaggaaaggtaaaatgtctttttctggcgccctttctgatgcgacgaagtccgttagtagaatgtacatcaacaattttgtagataaaggaaaacagcaaaatattgacacacttttgggcaaactaccgcaccagcaagttgttgaactttatgatccaatctgcgaatacgtcaatgaaaggctgttagagtcagaggaaaaattcaccactcattctaacataaatttgtttgtcggtacattcaatgttaacggaaactctcgaagagcagatttgtcaaaatggttatttccaatcggcgataaattcaaacctgatgtcgttgtgttagggttgcaggaagttatagagttgaccgcagggtctatcttgaatgcagattatacgaaaagttctttttgggaaactatggttactgactgtttgaatcaatacgaagaaaaatatcttttacttagagtggaacagatgtcctctcttttgatactattttttgcaagatcagatagagcctataacataaaagaggtaggtgggtctaccaaaaagactgggtttggtggtattactggaaacaaaggtgcagtagccattagattcgattatggggcaacttcattctgtttcgttaatacacatttatcagcaggtgcgagtaacattgacgaacgtcgcaatgactacaacaatatctacaggaacataacctttccaagatcaaagacaattccacaccatgattcgttgttttggttgggtgaccttaactacaggataactttgacaaatgatgaagttagaagagaattaagggctcaaaaggatggctatattgatagattgcttcaatatgatcagttgactcaagaaataaatgaaggagtggtatttcagggctttaaagaaccgaccctccaattccgtccgacctataaatatgattatggcacagataattatgatacttctgaaaaggcgagaactccgtcttggactgatagaatcatatataaaggtgaaaacctgcatccattggcatattcggacgcacctttaaaaataagcgatcataaaccagtttatgctgcatatagggcaaatgtgaaatttgttgacgaaaaagagaagcttaacctagttgagaagctgtatgcagaatataagaatacgcatcccgaagcactaactacaggtcctgacgaactttctcatgcaagaatggaaaaacaaaaggaaagtatacccttagatgcaaccgttcaatcagcgggcataaaactaattgacctagatgatacttcctcgtgcgtttcgcctctactttctggtcccagtccccaaccgtctgttgttggccctggaggactcagtaacgtatcacccgataaaagtaagctcaatgtgcttcctccgcctcctcctacctcgaggcacaataaggaaccatcttctaaacttctttcccctaccaaagagatttccattgtcagcgtatcgccgcgtaaaggtgagagcaatcttcctgccttagagagacacagtacacccaaaccactgccgccagtgcccgctttatctttatctaagccagtctctttacagaaaagttcttcagaattacagcatgctaaagagaccatagataatgggaaaattgttcctcgaccttgtcctcctattagaaggaagagcagtactgccccggacgaaatctctacatctaccaaaaattcaggtgtgtccactacagaagatcctgagccagcaaaggcctccacaaaacctgagaagccaccagttgtcaaaaaaccgcattatttaagtgttgctgctaacaagcttaacacctctcaagaacactcaataaaagtttccccgtcgaattcaaaatctgaagaggaactcccttgcaagaaaaagtctaaaccaaaagttcctgcgaagaaccctgaactagagaagctaagcgttcatccattgaagccttgcgaccccaattaa

SEQ ID NO: 4511 - protein, 1183 aa, Saccharomyces cerevisiae [sequence omitted]

SEQ ID NO: 4512 - DNA, 1638 bp, Zea mays
  CDS (1)..(1638)
atggcgtcctcttcctcctccctgacgcggttatttatcccgcctcaccgagcgcaccatgaggcagccatggccgcttcggccggcgcctctctgcgtaacggcggcgggatgcagatgctggatcttgtgatgcagaggtgggccgagatggtgttgtgctgcggcgcggattggaattgcgtgtcgcagctgtggaacagggtggtgctgcgcaagtggctaaacatcggcgcggggtccggggattccgacttcagcgccgacgagcacgatacctcggagggcgagaccgaccgcgaaggcatgtctggtttgaatcatgccctatgtaacgaagaaaggatattaggtggattgggtgcaagcacgactggtgacgaaatgagcaatttaccttactgccttagaatgcacagatcagagatcagtcgtgctcagtatgttgatgttagagaactcaggatttatgtagggacatggaatgttggaggcagatttccacccagtgacttggacattgaagaatggctggctacggaggagccagctgaaatttatgttatcggctttcaagagattgttccactcaatgctgggaatatatttggtgctgaagacaatcgtccagttgcagtatgggagcacatcatccgtgaaactttgaataagaattgttcagataaatcagggtttaagtgccatagtgatcctctttcaccatcaaggtttaatccatcagatgttgttctttccatggaacatggattgcttagtgagtctgacaaggatagtgatggggagcttcatccattgattgaacgagaccagaattgtggacttcaagctaaaacaaatgaaaatcttgaagctttcccagaagataatttagcctgtgatgccatcattgataatagaacaaaaaggaaaaggccagagtttgtacgtataataagcaagcaaatggtcgggatatttctttcgatttgggttcggagaagcctgcggaagcacattaagaatttgagagtatcaacagttggtgtaggcgcaataggttatattggtaacaagggatcaatatcggtcagcatgtctgtacatgagactcctttctgctttgtttgttgccacctgactgctggtgaaaaagatggagatgacctaaaaaggaattcaaatgccgaagaaatacttcgaagaacagtgtttaacccagagaatgttgtaggcatgcctatgagaatatatgaccataagcggattatatggttaggagacctcaactaccggatcaacttatcctatgaaagggcacatgaactaatctccaaacaggactgggatggattgttcgagagggatcagctgaaaagagaaatgaggaaaggatgcacatttgacggttggttcgaaggagttatcagctttgccccaacatacaaatatgagtttgactcagaaaactatgtaagcgatgagagtgaatctgggagaagaactcctgcatggtgtgaccgcattctctcatacgggaagggaatcaggctactttcgtacaagaggggggagcttacactttctgatcaccgccctgtggctgcagtctacgtggcagagattgaagttttccactga

SEQ ID NO: 4513 - protein, 545 aa, Zea mays
MASSSSSLTRLFIPPHRAHHEAAMAASAGASLRNGGGMQMLDLVMQRWAEMVLCCGADWNCVSQLWNRVVLRKWLNIGAGSGDSDFSADEHDTSEGETDREGMSGLNHALCNEERILGGLGASTTGDEMSNLPYCLRMHRSEISRAQYVDVRELRIYVGTWNVGGRFPPSDLDIEEWLATEEPAEIYVIGFQEIVPLNAGNIFGAEDNRPVAVWEHIIRETLNKNCSDKSGFKCHSDPLSPSRFNPSDVVLSMEHGLLSESDKDSDGELHPLIERDQNCGLQAKTNENLEAFPEDNLACDAIIDNRTKRKRPEFVRIISKQMVGIFLSIWVRRSLRKHIKNLRVSTVGVGAIGYIGNKGSISVSMSVHETPFCFVCCHLTAGEKDGDDLKRNSNAEEILRRTVFNPENVVGMPMRIYDHKRIIWLGDLNYRINLSYERAHELISKQDWDGLFERDQLKREMRKGCTFDGWFEGVISFAPTYKYEFDSENYVSDESESGRRTPAWCDRILSYGKGIRLLSYKRGELTLSDHRPVAAVYVAEIEVFH

SEQ ID NO: 4514 - DNA, 25 bp, Artificial sequence
  primer
atgagactcttcatcggtagaagat

SEQ ID NO: 4515 - DNA, 26 bp, Artificial sequence
  primer
ttacctttctataaaaagtggctcat

SEQ ID NO: 4516 - protein, 1153 aa, Artificial sequence
  consensus sequence
  Variant (2)..(30): Xaa in position 2 to 30 is any amino acid
  Variant (31)..(117): Xaa in position 31 to 117 is any or no amino acid
  Variant (119)..(120): Xaa in position 119 to 120 is any amino acid
  Variant (122)..(123): Xaa in position 122 to 123 is any amino acid
  Variant (124)..(187): Xaa in position 124 to 187 is any or no amino acid
  Variant (189)..(190): Xaa in position 189 to 190 is any amino acid
  Variant (192)..(192): Xaa in position 192 is any amino acid
  Variant (195)..(199): Xaa in position 195 to 199 is any amino acid
  Variant (200)..(218): Xaa in position 200 to 218 is any or no amino acid
  Variant (220)..(238): Xaa in position 220 to 238 is any amino acid
  Variant (239)..(254): Xaa in position 239 to 254 is any or no amino acid
  Variant (257)..(271): Xaa in position 257 to 271 is any amino acid
  Variant (272)..(314): Xaa in position 272 to 314 is any or no amino acid
  Variant (316)..(320): Xaa in position 316 to 320 is any amino acid
  Variant (322)..(334): Xaa in position 322 to 334 is any amino acid
  Variant (335)..(353): Xaa in position 335 to 353 is any or no amino acid
  Variant (356)..(357): Xaa in position 356 to 357 is any amino acid
  Variant (359)..(360): Xaa in position 359 to 360 is any amino acid
  Variant (362)..(362): Xaa in position 362 is any amino acid
  Variant (364)..(364): Xaa in position 364 is any amino acid
  Variant (367)..(367): Xaa in position 367 is any amino acid
  Variant (368)..(368): Xaa in position 368 is any or no amino acid
  Variant (371)..(372): Xaa in position 371 to 372 is any amino acid
  Variant (374)..(374): Xaa in position 374 is any amino acid
  Variant (376)..(376): Xaa in position 376 is any amino acid
  Variant (378)..(378): Xaa in position 378 is any amino acid
  Variant (385)..(396): Xaa in position 385 to 396 is any amino acid
  Variant (397)..(401): Xaa in position 397 to 401 is any or no amino acid
  Variant (403)..(403): Xaa in position 403 is any amino acid
  Variant (407)..(407): Xaa in position 407 is any amino acid
  Variant (409)..(409): Xaa in position 409 is any amino acid
  Variant (410)..(412): Xaa in position 410 to 412 is any or no amino acid
  Variant (417)..(426): Xaa in position 417 to 426 is any amino acid
  Variant (427)..(445): Xaa in position 427 to 445 is any or no amino acid
  Variant (447)..(454): Xaa in position 447 to 454 is any amino acid
  Variant (456)..(457): Xaa in position 456 to 457 is any amino acid
  Variant (459)..(461): Xaa in position 459 to 461 is any amino acid
  Variant (463)..(465): Xaa in position 463 to 465 is any amino acid
  Variant (466)..(474): Xaa in position 466 to 474 is any or no amino acid
  Variant (477)..(481): Xaa in position 477 to 481 is any amino acid
  Variant (485)..(485): Xaa in position 485 is any amino acid
  Variant (486)..(538): Xaa in position 486 to 538 is any or no amino acid
  Variant (540)..(543): Xaa in position 540 to 543 is any amino acid
  Variant (544)..(601): Xaa in position 544 to 601 is any or no amino acid
  Variant (603)..(603): Xaa in position 603 is any amino acid
  Variant (605)..(606): Xaa in position 605 to 606 is any amino acid
  Variant (608)..(608): Xaa in position 608 is any amino acid
  Variant (615)..(615): Xaa in position 615 is any amino acid
  Variant (619)..(646): Xaa in position 619 to 646 is any amino acid
  Variant (647)..(660): Xaa in position 647 to 660 is any or no amino acid
  Variant (662)..(663): Xaa in position 662 to 663 is any amino acid
  Variant (666)..(668): Xaa in position 666 to 668 is any amino acid
  Variant (670)..(673): Xaa in position 670 to 673 is any amino acid
  Variant (675)..(685): Xaa in position 675 to 685 is any amino acid
  Variant (686)..(695): Xaa in position 686 to 695 is any or no amino acid
  Variant (697)..(702): Xaa in position 697 to 702 is any amino acid
  Variant (704)..(710): Xaa in position 704 to 710 is any amino acid
  Variant (712)..(714): Xaa in position 712 to 714 is any amino acid
  Variant (716)..(721): Xaa in position 716 to 721 is any amino acid
  Variant (723)..(761): Xaa in position 723 to 761 is any amino acid
  Variant (762)..(788): Xaa in position 762 to 788 is any or no amino acid
  Variant (791)..(791): Xaa in position 791 is any amino acid
  Variant (793)..(793): Xaa in position 793 is any amino acid
  Variant (796)..(798): Xaa in position 796 to 798 is any amino acid
  Variant (799)..(812): Xaa in position 799 to 812 is any or no amino acid
  Variant (815)..(815): Xaa in position 815 is any amino acid
  Variant (816)..(840): Xaa in position 816 to 840 is any or no amino acid
  Variant (842)..(845): Xaa in position 842 to 845 is any amino acid
  Variant (847)..(848): Xaa in position 847 to 848 is any amino acid
  Variant (850)..(850): Xaa in position 850 is any amino acid
  Variant (852)..(852): Xaa in position 852 is any amino acid
  Variant (854)..(868): Xaa in position 854 to 868 is any amino acid
  Variant (870)..(882): Xaa in position 870 to 882 is any amino acid
  Variant (883)..(888): Xaa in position 883 to 888 is any or no amino acid
  Variant (890)..(895): Xaa in position 890 to 895 is any amino acid
  Variant (898)..(898): Xaa in position 898 is any amino acid
  Variant (900)..(901): Xaa in position 900 to 901 is any amino acid
  Variant (903)..(916): Xaa in position 903 to 916 is any amino acid
  Variant (918)..(922): Xaa in position 918 to 922 is any amino acid
  Variant (926)..(926): Xaa in position 926 is any amino acid
  Variant (929)..(931): Xaa in position 929 to 931 is any amino acid
  Variant (935)..(938): Xaa in position 935 to 938 is any amino acid
  Variant (940)..(944): Xaa in position 940 to 944 is any amino acid
  Variant (946)..(947): Xaa in position 946 to 947 is any amino acid
  Variant (950)..(952): Xaa in position 950 to 952 is any amino acid
  Variant (954)..(954): Xaa in position 954 is any amino acid
  Variant (958)..(963): Xaa in position 958 to 963 is any amino acid
  Variant (964)..(965): Xaa in position 964 to 965 is any or no amino acid
  Variant (967)..(968): Xaa in position 967 to 968 is any amino acid
  Variant (970)..(972): Xaa in position 970 to 972 is any amino acid
  Variant (974)..(978): Xaa in position 974 to 978 is any amino acid
  Variant (980)..(987): Xaa in position 980 to 987 is any amino acid
  Variant (988)..(993): Xaa in position 988 to 993 is any or no amino acid
  Variant (996)..(998): Xaa in position 996 to 998 is any amino acid
  Variant (999)..(1009): Xaa in position 999 to 1009 is any or no amino acid
  Variant (1011)..(1011): Xaa in position 1011 is any amino acid
  Variant (1019)..(1024): Xaa in position 1019 to 1024 is any amino acid
  Variant (1026)..(1036): Xaa in position 1026 to 1036 is any amino acid
  Variant (1037)..(1039): Xaa in position 1037 to 1039 is any or no amino acid
  Variant (1041)..(1043): Xaa in position 1041 to 1043 is any amino acid
  Variant (1047)..(1052): Xaa in position 1047 to 1052 is any amino acid
  Variant (1054)..(1055): Xaa in position 1054 to 1055 is any amino acid
  Variant (1057)..(1060): Xaa in position 1057 to 1060 is any amino acid
  Variant (1062)..(1065): Xaa in position 1062 to 1065 is any amino acid
  Variant (1067)..(1067): Xaa in position 1067 is any amino acid
  Variant (1072)..(1072): Xaa in position 1072 is any amino acid
  Variant (1074)..(1078): Xaa in position 1074 to 1078 is any amino acid
  Variant (1083)..(1083): Xaa in position 1083 is any amino acid
  Variant (1085)..(1085): Xaa in position 1085 is any amino acid
  Variant (1086)..(1088): Xaa in position 1086 to 1088 is any or no amino acid
  Variant (1090)..(1090): Xaa in position 1090 is any amino acid
  Variant (1092)..(1092): Xaa in position 1092 is any amino acid
  Variant (1097)..(1097): Xaa in position 1097 is any amino acid
  Variant (1099)..(1115): Xaa in position 1099 to 1115 is any amino acid
  Variant (1116)..(1145): Xaa in position 1116 to 1145 is any or no amino acid
  Variant (1152)..(1152): Xaa in position 1152 is any amino acid
LXXXXXXXXXXXXXXXXXXXXXXXXXXXXXXXXXXXXXXXXXXXXXXXXXXXXXXXXXXXXXXXXXXXXXXXXXXXXXXXXXXXXXXXXXXXXXXXXXXXXXXXXXXXXXXXXXXXXFXXLXXXXXXXXXXXXXXXXXXXXXXXXXXXXXXXXXXXXXXXXXXXXXXXXXXXXXXXXXXXXXXXXXXLXXGXFYXXXXXXXXXXXXXXXXXXXXXXXXDXXXXXXXXXXXXXXXXXXXXXXXXXXXXXXXXXXXWNXXXXXXXXXXXXXXXXXXXXXXXXXXXXXXXXXXXXXXXXXXXXXXXXXXXXXXXXXXLXXXXXGXXXXXXXXXXXXXXXXXXXXXXXXXXXXXXXXISXXSXXRXGXRFXXRGXXDXGXVXNFVETEXXXXXXXXXXXXXXXXXQXRGSXPXXXXFWEQXXXXXXXXXXXXXXXXXXXXXXXXXXXXXRXXXXXXXXFXXHXXXLXXXXXXXXXXXXYGXXXXXNLLXXXXXXXXXXXXXXXXXXXXXXXXXXXXXXXXXXXXXXXXXXXXXXXXXXXXXXDXXXXXXXXXXXXXXXXXXXXXXXXXXXXXXXXXXXXXXXXXXXXXXXXXXXXXXXXXXXXXXQXGXXRXNCLDCLXRTNXXXXXXXXXXXXXXXXXXXXXXXXXXXXXXXXXXXXXXXXXXWXXNGXXXSXXXXGXXXXXXXXXXXXXXXXXXXXXDXXXXXXRXXXXXXXDXXXQXXXXXXLXXXXXXXXXXXXXXXXXXXXXXXXXXXXXXXXXXXXXXXXXXXXXXXXXXXXXXXXXXXXXXXXXXGTXNXNGXXXXXXXXXXXXXXXXXWLXXXXXXXXXXXXXXXXXXXXXXXXXXDXXXXGXXEXVXLXXXXXXXXXXXXXXXWXXXXXXXXXXXXXXXXXXXYXXXXXXQLXGXXLXXXXXXXXXXXXXXVXXXXXKTGXGGXXXNKGXXXXRXXXXXTXXCFXXXHXAAGXXXXXXXXRXXDXXXIXXXXXFXXXXXXXXXXXXXXHDXXXXXXXXXXXXXXWXGDFNYRIXXXXXXVXXXXXXXXXXXXXXLXXXDQLXXXXXXGXXFXXXXEXXXXFXPTYKXDXXXXXYDTSXKXXXXRXPXWTDRXLXXXXXXXXXXXXXXXXXXXXXXXXXXXXXXXXXXXXXXXXXXXXXXXSDHRPVXA

SEQ ID NO: 4517 - DNA, 3105 bp, Saccharomyces cerevisiae
  CDS (1)..(3105)
atgtctgccagaaaacgcaagtttaatagtctcaaaccgctagacaccttgaacagctctcgtgccagctctccaaggtcctctgcttctctaccgcccaaaagatataacacttttcgtaaggatccgaaaatcgttgatcatctaaacaatgcttctacaaaggatttcttaccagttttgagtatgaacagcgagagtaagaggcagatcgaattgtcggataatgatgttgataataatgatgaaggtgaaggcgtcaacagtggctgttcagatcaagattttgaacctttgcaaagctctcctttgaaaagacactcatcactcaaaagcacttccaatggtcttttgttccaaatgtctaataatctggggaatggttcaccggaaccggcagtagcgagcacttctccaaatggctcaattatttccactaaactaaatttgaacggccaattttcttgcgttgattcgaaaacattgcgaatttatcggcataaagcaccatgcataatgacttttgtctcagatcataatcatccgaaattttcattgtattttcaacaatcggtgatctacaattcacaagttaatctgcttgatgatgttgaattgataattttagataagaagaactcttttatggctataattttaaaagatctgaaaaaggtcaagatgatactagacgtgaataactcttcaatcaacattaacacgaacatcttgatatggtccactgcaagctccgcttcaaataaaaaaataaagtctattaaaagattcctgttgatgtcatattcttcgtcgataaaagtcgaaattttagatcataaagagcagattttggaaagactaaaacatctgattcatcctatttcttcgtcatcaccttcattgaacatggaaagggcaataaactccactaaaaatgcattcgactctttaagacttaaaaaaactaaactttctactaatgatgatgaaagtccgcaaattcatactcatttcttatcaaacaaacctcatggtttgcaatccttaacaaaaaggactcgtattgccagccttgggaaaaaagagcattcaatatctgttccaaaatcgaatatttcaccctcagatttctacaacactaacgggacagaaactttacaatcccacgcagtttcacaactaagacgttcaaatagatttaaagatgtttcggatccagcaaactcaaattcaaattcagaatttgatgatgcaactacggaatttgaaacaccagaactgtttaaacctagcctctgttacaaattcaacgatggttcaagctatactataacaaatcaagatttcaagtgtcttttcaataaggattgggttaatgatagcattttggatttttttacaaaattttacattgaatcatctattgaaaagtcaattatcaaaagagagcaagttcacttaatgtcctcttttttttacacgaaactaattagtaatccagcagattattattctaatgtaaaaaagtgggttaacaatactgatttgttttctaaaaagtacgttgttataccaattaacataagttatcattggtttagttgcattataacaaacttggatgcgatcttggattttcatcaaaacaaagataaaaacgatgccatcaactccgatgagatttctataaataatcctctggttaatattttgactttcgactcgttgaggcaaactcattcaagagaaattgatccaataaaagaatttctcatatcctatgcacttgataaatattcaattcaactggataaaacacaaatcaaaatgaaaacgtgtccagttccacaacaacctaatatgagcgattgtggtgttcatgttattttgaatattagaaaattttttgaaaatccggtggaaacaattgatgtatggaagaattctaagattaaaagtaagcacttcaccgcaaaaatgattaataaatattttgataaaaatgaaagaaatagtgcgagaaagaatttaaggcatactctaaaactcttacaactcaattacatcagctatctgaaaaaagaaaatttatatgaagaagttatgcaaatggaggagaaaaaaagcaccaatatcaacaataatgaaaattacgacgatgacgatgaagaaattcaaatcattgaaaatatagatcaaagcagtaaagataataacgcgcagttaacctcggaacctccctgctcacgatcatccagtatttcaacaacagaaagagagccgacagagttgcataattccgtagtacgacagcccaccggtgaaataataactgataatgaagatcccgttcgcgctgcttctccagaaacagcatccgtttctcctcccatacgtcacaatattttaaagagttcatctcctttcatatcagaaagtgcgaatgaaactgaacaagaagaatttacgtcaccatactttggaaggccgtctttaaagacgagggctaagcagtttgaaggcgtttcgtcaccaataaaaaacgatcaagccctgtcatccacccatgatattatgatgccgtcgcctaaacctaaaaggatttacccaagcaaaaaaatcccacaactttcctcgcatgttcaatctctatcgactgattctatggaacgccaatctagtcccaataataccaacattgtaatttcagatacagaacaagattcgaggttaggagtgaattctgaaagtaaaaatactagtggtattgttaacagggatgactcggacgtcaatttaattggtagttcactacctaatgtagcggaaaaaaatcatgacaacactcaggaaagtaatggtaataatgacagtcttggtaaaatacttcaaaatgttgacaaagaactgaacgaaaagttggttgatattgatgatgtggcatttagtagtccaactaggggtattccaagaaccagcgcgacaagcaagggatcaaatgcacaacttctctctaattatggagatgaaaataaccagtctcaagattctgtttgggatgagggcagagataatcctatactcttggaagatgaagacccttga

SEQ ID NO: 4518 - protein, 1034 aa, Saccharomyces cerevisiae
MSARKRKFNSLKPLDTLNSSRASSPRSSASLPPKRYNTFRKDPKIVDHLNNASTKDFLPVLSMNSESKRQIELSDNDVDNNDEGEGVNSGCSDQDFEPLQSSPLKRHSSLKSTSNGLLFQMSNNLGNGSPEPAVASTSPNGSIISTKLNLNGQFSCVDSKTLRIYRHKAPCIMTFVSDHNHPKFSLYFQQSVIYNSQVNLLDDVELIILDKKNSFMAIILKDLKKVKMILDVNNSSININTNILIWSTASSASNKKIKSIKRFLLMSYSSSIKVEILDHKEQILERLKHLIHPISSSSPSLNMERAINSTKNAFDSLRLKKTKLSTNDDESPQIHTHFLSNKPHGLQSLTKRTRIASLGKKEHSISVPKSNISPSDFYNTNGTETLQSHAVSQLRRSNRFKDVSDPANSNSNSEFDDATTEFETPELFKPSLCYKFNDGSSYTITNQDFKCLFNKDWVNDSILDFFTKFYIESSIEKSIIKREQVHLMSSFFYTKLISNPADYYSNVKKWVNNTDLFSKKYVVIPINISYHWFSCIITNLDAILDFHQNKDKNDAINSDEISINNPLVNILTFDSLRQTHSREIDPIKEFLISYALDKYSIQLDKTQIKMKTCPVPQQPNMSDCGVHVILNIRKFFENPVETIDVWKNSKIKSKHFTAKMINKYFDKNERNSARKNLRHTLKLLQLNYISYLKKENLYEEVMQMEEKKSTNINNNENYDDDDEEIQIIENIDQSSKDNNAQLTSEPPCSRSSSISTTEREPTELHNSVVRQPTGEIITDNEDPVRAASPETASVSPPIRHNILKSSSPFISESANETEQEEFTSPYFGRPSLKTRAKQFEGVSSPIKNDQALSSTHDIMMPSPKPKRIYPSKKIPQLSSHVQSLSTDSMERQSSPNNTNIVISDTEQDSRLGVNSESKNTSGIVNRDDSDVNLIGSSLPNVAEKNHDNTQESNGNNDSLGKILQNVDKELNEKLVDIDDVAFSSPTRGIPRTSATSKGSNAQLLSNYGDENNQSQDSVWDEGRDNPILLEDEDP

SEQ ID NO: 4519 - DNA, 2925 bp, Eremothecium gossypii
  CDS (1)..(2925)
atgagcagacaccggcggctggggctgagtcccatggacactttgagcggtacatcgcgggcgggaaagccgactaggcactccggagagcggtaccaggcggggcggcagcgatccggcggggtggtagcaatgctggagggcgaggtgcccgtgcagaagcgccacaagggtagcacgagcgagggcgaggggaacgggctgctgcgggcggcgggcgagggcgacgagggcggactgctcgagggctacctggagctggtcgagaaggagggcatgcggcgcatcgagggcgtccagctggctgttcggggggcggctgggacgctgatgtgcgagctgcagagcgcggcgggccacgatctgtgcctgctggacctgcagcgggacgcccgtgcgttctacttcgacatgcacacgacgtgcgtcgggcttcatctgaaccagaaggtgctgctgctgggcgagcggatggaggctacggcccagctgctcatatggagcacgcggggggaccggtccgacacgcggcttgtcgacatcgagcgcacgctgaaggaagcggggctgccggtgagcgatgcggcgagcaagtccggcattgaggcagcactgcggcgccagctatcctctgttgccgaggagggaaccaagaggcttggtatgctggacaagccgctgagttcactgaacaataccaagaccttcaagagaaagtacgggaagtcgggccaagtgataagttttccccacacggttgaatgtggctcttctgatgaggagcgttgcgactctccgcggtctgagatatcgcccaagtcattttacggttcggatcgctcctcgccttccaagccagacctggccgatcacacgtactcctctggccttcgcaaatcgagcaggctcttagatattaataataagaaacagtttgtggtggaagatgaggacgactatgagaaaccagaagtgttcaagcctactctgcattaccaattttccgacgacacgaagtatacggtgacgaaccaagactttaaatgtctatataaccacgattgggtgaacgataccatccttggctttttcctgaaatactatgtggagtgcacaatcagtgatagtgacttatcgctgagcgacgtgcacatcttttcatctttcttttacacgaagctggtcagtaatccagaacagtattacgctaacgtcaagaaatgggtggccagctcaaacttgctggagaaaaagtatatcgtaatgcctatcaatgtcaactttcactggtttggatgtatcattacaaatcttagcaaactgcttcgtttcttcagggaaggtttccatgaaaggtggttagagcaatcgaattcggactccaatgtgaatgagaaggaacggctactatttcctgtagttacgattttagtctacgattcgctcaggcagacacattcccgtgaagtagagccaataaaagtcttcttaattgactatgtcaaagataagtatggctttgatcttcccaaggcgcaaatccgaatgaagctctgcacggtgcctcgacagccaaacatgagtgactgcggtatccatgttattctgaatacaaagaagttcttcgaaaatccgcagaaggccatcatgctgtggtatcaaaagccatctcatcttttaacaaaagagataaacttgtatttcgaaaagactaaacgtaagacggcaagacaggacctgcgaaatgttctttggggtttgcaaaatgagcaggtattacgtgacggaagcctctgccagtcagatcacgagctggcggaggctgataatcatagtgatttagagattatagaagacaccgaaggtaccaagtgccaacctcctaaagaaaacgatgcaatatcaaagttgtcggaatccaaggtatacgtcacttctacaccagaggagacccgtaataacgcacttatgaaacgaattatagatcatggagagccaaatgcatatataaaggatgcttcaggtggaacttcaggaaatccttttccggaagccgcagtggatgacacgcacactgggaagcaacaggaaatcaaaggtaagccaccaagcgtttgcataattcgttcgtcctcaagagatgttagtcctagagtccggcgtcatctcagtagtagtcctgtgggtgatactttagtcaatgaaaccggtactaaatcaatattttttgtctcttccagttgcaaggaatctgatttagtaccatccgcccaaaagtccgaagaagggtacaataaagtgacggcggctacatcactgcttgcttccgaggaaggccaacatctaaaaacgactgaagatgaagcaggccaagccggattccaggatcacttgactgagggggaaacaagtgataagaactcacccgagcactctaagcacgcaggcagtgaccatcgtccgtttactcacggttatctcaagaaaagatgggtactagatcaatcagtcaatgttgatactggtgatacggtagtttcccgggatgcagaggtcaatttattaggggaaaccgtacattctgccgcaaatttagacttgggaacttataagtctgaaatgaaacgtactagtatgaagcacaaatctatcaaaagtacgtcttccctttcagggactatcactgttacggatgaggaagagatggaacctcaaaggaaccgggaatacgttcagctccaggatgaaataataataccacatactggatcccaaacaccgaaaacagcccaaatatatgtaagtgattcccaggatgttgaggaagcacagaaaaattcaaatgttcaagttcttgaggttcatgaactagttcctgaaggacgcagtcttggtggtgcccctgtagtccagagaaaaaaataa

SEQ ID NO: 4520 - protein, 974 aa, Eremothecium gossypii
MSRHRRLGLSPMDTLSGTSRAGKPTRHSGERYQAGRQRSGGVVAMLEGEVPVQKRHKGSTSEGEGNGLLRAAGEGDEGGLLEGYLELVEKEGMRRIEGVQLAVRGAAGTLMCELQSAAGHDLCLLDLQRDARAFYFDMHTTCVGLHLNQKVLLLGERMEATAQLLIWSTRGDRSDTRLVDIERTLKEAGLPVSDAASKSGIEAALRRQLSSVAEEGTKRLGMLDKPLSSLNNTKTFKRKYGKSGQVISFPHTVECGSSDEERCDSPRSEISPKSFYGSDRSSPSKPDLADHTYSSGLRKSSRLLDINNKKQFVVEDEDDYEKPEVFKPTLHYQFSDDTKYTVTNQDFKCLYNHDWVNDTILGFFLKYYVECTISDSDLSLSDVHIFSSFFYTKLVSNPEQYYANVKKWVASSNLLEKKYIVMPINVNFHWFGCIITNLSKLLRFFREGFHERWLEQSNSDSNVNEKERLLFPVVTILVYDSLRQTHSREVEPIKVFLIDYVKDKYGFDLPKAQIRMKLCTVPRQPNMSDCGIHVILNTKKFFENPQKAIMLWYQKPSHLLTKEINLYFEKTKRKTARQDLRNVLWGLQNEQVLRDGSLCQSDHELAEADNHSDLEIIEDTEGTKCQPPKENDAISKLSESKVYVTSTPEETRNNALMKRIIDHGEPNAYIKDASGGTSGNPFPEAAVDDTHTGKQQEIKGKPPSVCIIRSSSRDVSPRVRRHLSSSPVGDTLVNETGTKSIFFVSSSCKESDLVPSAQKSEEGYNKVTAATSLLASEEGQHLKTTEDEAGQAGFQDHLTEGETSDKNSPEHSKHAGSDHRPFTHGYLKKRWVLDQSVNVDTGDTVVSRDAEVNLLGETVHSAANLDLGTYKSEMKRTSMKHKSIKSTSSLSGTITVTDEEEMEPQRNREYVQLQDEIIIPHTGSQTPKTAQIYVSDSQDVEEAQKNSNVQVLEVHELVPEGRSLGGAPVVQRKK

SEQ ID NO: 4521 - DNA, 2751 bp, Candida glabrata CBS138
  CDS (1)..(2751)
atgtcgcggaggagggcatttcaaggcggtataatgcctgtggacactctttcctcatcgcctgttgcggagacgcaggagaggcggccggtgtccccggtacggtataggaggaagcgtgatccgaaggtcatcgcggagttaaatcagaaaggccatgagatattcagtataggtgatgaagatggtttaccaatgagacacaaggagaaagatgtacagcgtggtgaaggtgaggaaagatcatcaaataggccgacttcaacatcagatggcaattatgagagtcttcgatacgtggtagttgggaaaatgaagctgataacgcttgatcagaaggaggtggatgtggaggaagctgtgctagagttcagtaacaagaaaggtgaacttaacccttctatgaagattaggcctacagacagtagaagcaaagtgaaagatttcaaaatcaagatactccgagattgttctaagatatggttcacagaaagggtagcaaaagtgggtatatttctgaaagagaaattggatgttcccatcgttgatggtagcaatgaggttttgcctattatctgcattgtctgggttagatcacttcaggattcaacaatatttctccgactatcacgaattcagatagtgcttcatgaattagccaaaagtagaaaaacactacatactacactaacagtactcacgaatctaaccgaacttgaattacaaagatgcataaaatccaatatgatcacagaacttcaaaaattgtcaagggctaaaagaagactaatttcttcttcatcagacggtattaacgaccaggatgatgtaccgaacaagggtgtatcaaacacaaacaatgtatcacgtaaaaatgggatcagatctctgatttctaaggccagtaaggccgcatataatacggggaatggtaagtcaatacgaataccttttagcgttaatggcgcaaataatcgcaagatttcttctacaagtcaatcagtagaccctataccttcttcaaatttttactcgagcagtagcccaagtggaaatacacgatctaattcgctcaataagcgtgcaaatgagcataaactctctgatcatttactgtcaaatgttaaaaggactagaaagagtatgattaatgggtctaataacagtatcaaagatccaatgtcgatcgatgacgaagaaatcgcttttgatgaggacaaaagcaatgcggaagacgaattgttttacgaaactccaaaaatatttgaaccaaatctcgtgtataaatttaccgatggttcttattacactattactaatcaggattttaaatgtctctataataaagactggattaacgatagtattctcgattttttcactaaatatttcattgaatcagctataacaaacaataaggtgcggaaagaggatgtacatatcatgtcatctttcttttatacaaaattaactagtactgaagaagaagtatactcaaatgtaaagaaatgggtcaataatacggatttattcaagacaaaatatgtcgttattcctattaataataattttcactggtttggatgcattataactaatttagattctttcttcatatattacaatgagaacaaaatgtctaagaattccaagaatttagcaaacatggatagagaagaagatgatattacagttagtccaccaataattacgatactcacgtttgattcattaaaacaaacgcatagcagagaaattgatccgataaaagaattcctaattgggtatgctaaggacaagtaccaactagatattgataaaagccttataaaaatgaaaacatgtgctgtaccacaacaggcaaactttagtgattgtggtgtccatgtgattttcaatataaaaggattttttgaaaatcctcatcaaacggtagaactttggtattctaaaaaaatgaagaataagcatgatatgcgctatattaacgagtattttaataaatctggaaggaataactccagaaaatttctcagagatattcttttatcattacagaagcaacaggtgcttcataatgctggtatagaagccaatggacaagcattatctaatgtagatgaagatgaggatattgaaataattgaagatttatatgatgccaaagacagtaaactggcccccatagatgtaaaaaaaaatgtcaatgatatagatattggtaggcaatctttatcttctcgcgttggtctgcaatcagagccgccttcgcctactccagaatttcaagaagatcaatcaattcccagttcttcaatcatgaacgttaattcgaaggccgaagaacaaggccatattatatctaacttatcacggtcctcacacatacttgcctcttataaggatagtgagtccaatcaggtctacacatctccgtactttgggaaatcaattttgaaagatagagtagacaactatactgcatcgactgaaaatgctcattctaattctacatattcaaatggacatgaaaaatcaaatgctaataattctggttctcctactatggacataggcgtaggcgaaaattcagaaattagtgccgatgacttttctgaacgatataacgaaagtgacgtaaatttaatacccgaaggagtagcacctaaatcagagcaagacgaggatgctcttgatctgattagggatagcttagcaagggaattaaatgaaaatatcgatactcattag

SEQ ID NO: 4522 - protein, 916 aa, Candida glabrata CBS138
MSRRRAFQGGIMPVDTLSSSPVAETQERRPVSPVRYRRKRDPKVIAELNQKGHEIFSIGDEDGLPMRHKEKDVQRGEGEERSSNRPTSTSDGNYESLRYVVVGKMKLITLDQKEVDVEEAVLEFSNKKGELNPSMKIRPTDSRSKVKDFKIKILRDCSKIWFTERVAKVGIFLKEKLDVPIVDGSNEVLPIICIVWVRSLQDSTIFLRLSRIQIVLHELAKSRKTLHTTLTVLTNLTELELQRCIKSNMITELQKLSRAKRRLISSSSDGINDQDDVPNKGVSNTNNVSRKNGIRSLISKASKAAYNTGNGKSIRIPFSVNGANNRKISSTSQSVDPIPSSNFYSSSSPSGNTRSNSLNKRANEHKLSDHLLSNVKRTRKSMINGSNNSIKDPMSIDDEEIAFDEDKSNAEDELFYETPKIFEPNLVYKFTDGSYYTITNQDFKCLYNKDWINDSILDFFTKYFIESAITNNKVRKEDVHIMSSFFYTKLTSTEEEVYSNVKKWVNNTDLFKTKYVVIPINNNFHWFGCIITNLDSFFIYYNENKMSKNSKNLANMDREEDDITVSPPIITILTFDSLKQTHSREIDPIKEFLIGYAKDKYQLDIDKSLIKMKTCAVPQQANFSDCGVHVIFNIKGFFENPHQTVELWYSKKMKNKHDMRYINEYFNKSGRNNSRKFLRDILLSLQKQQVLHNAGIEANGQALSNVDEDEDIEIIEDLYDAKDSKLAPIDVKKNVNDIDIGRQSLSSRVGLQSEPPSPTPEFQEDQSIPSSSIMNVNSKAEEQGHIISNLSRSSHILASYKDSESNQVYTSPYFGKSILKDRVDNYTASTENAHSNSTYSNGHEKSNANNSGSPTMDIGVGENSEISADDFSERYNESDVNLIPEGVAPKSEQDEDALDLIRDSLARELNENIDTH

SEQ ID NO: 4523 - DNA, 3135 bp, Kluyveromyces lactis NRRL Y-1140
  CDS (1)..(3135)
atgagtagacacaagggcaggtccggaacagtgccgtcaaacacattatcagcatatgataacaatagagctatagtagataattctacttcaaaaaaaatcaataattctaagcctcgtcccataaactatgacctatcaagatttacaatacctaaatccaaagttacgaccatacttgatgacgatgatctcaaagaagagacaactagttctactctgcggaatggagagagcagtaccgctgctaatagatcattgttagagtcacataatgatatgccaggtattcttggtagcaatactcaccaacaaccaaatgaaataacagaaaattttacaacagagggcacagtcaaaattgtcagcaaagcatcaaaagaccctgtcttccagctgactacagcattaagtgttactctttcaaggggcaaagatatgtcaagcccagtgttacttttccaattcatgaagaagtccaaacccatacaagggttctcgtttaccttaaatgatcaaacagtgaggttttggtatggcttcaaaggtgaaggtttcggcgtaatattccccaatgaaaaacaattcttgttgccaaatgtagatagaatcaaaacgagatgtctttcttggatgggttcattaagttcttcagagtctgcaaagtttttacagctcatggaggcctttgaaagagaaatgtgttttacgggtgtagatgtatcgtcagaccgaatattcaaagtcaagaaaagggaaattgatgcaatgcttaatgaatataaggcttctcctagtactggaacaaatcaaatggtcctttttcctgatcggtacaaatcggataaactcttcaataagtgccccaactcgtcactgaactctctacatagaggcaaacgcgggtctgggaatggcacagttatacagcttcccgactacaaaccgctgacttcatatcagaaccaaacgccagacgagacagtatcgcaagagagtttctatgggaatcagtctacctctgaaaaaaccactgaacatccaccattcatttcttacgtttctaatttgaggcgtgtcacaaggtccatatctgataacaaaaaacatggcgatgtacatcatacatctgatgaactcatggaaagtgaaaacccggagttatttgaacccaccttatcttatactttcaatgatggttccaaactctcggtaactaaccaggacttcaaatgtttgtacaataatgattggataaatgatacaattttggactttttcctaaagttttatattgaagaatcgataagcgacaacgtaatatcgcgatccgaagtctacttattttcttctttcttctacactaagcttgtaagtacagaagcaagcaaatatgaaaacgtaaagaaatgggtaattaactcagatctgttttccaagaaatacgtcgtagttccagtgaatatgaattatcattggttcggatgcataattgtaaatttggacaagttgaaggtagccatagaagagcagttaaccaaaaagcttacatcaaaaggaggtaatcttaaatcaccttcgctctcaaaaactgaggatgaccgaaactcaaatatagcaagtgctcctacgaatgtcactgcagataatatcgagttacctactgtattccttttagtctttgattctctacgacaaacgcattcaagattaatggacgctgtgaaagaatttattatttcatacggcagagacgttcataattacgatattcaaagagaaaagctcaaagtaagaacatgccttgtaccacagcaacccaatatgagtgattgtggtgtccatgtgatattaaatactaagaaattttttgaaaaaccgaaagaaacgctcgatttgtggtttgcaaagtcgtcctacaaccactctaaactggtaaacgaattctttgaaaagaaagaacgccgttttgcaaggaaaaccttaagagatgtcttattacttctccaaaagcaacaaatagccgcccatgggatatcattgggccaagaaaagaatgaaagcatagaagagaatcatagtgatttggagattatagaagattttgaggcaaaagagatggaaaccgacactatggaagaaacaggagagaccaatcatccacctaatcataataatatgcaatgcactccaatcgaggcaaatctgaatagcaaagcaaaagcgcctacaccaaatgtcgagacttccatgtacttcttgaaatccacaccatcaatcgaaagatgtactccaaacaatgataataagcatgaggaccaactgattatagttccagaatcatcccaaaatagtgttgcaaataaagatattaatctcggaaataaatctgaaagagatttttatcagtctgcgcttttaagtgatgatgaccatcgaaatgaatcagattcatgtgccgatatgatttcaagtcaaccaccagatagggcaaactttagggatcgatgtcctacggcggaattggatgacattgaagattcaacttctgataatgaaaagtccaaggtttatgacatttcttgttcacaacagagatgtaatgtgccagtttcacctgggaagctgttgaatgagaagctgaaaactttgagtaccaacactgcggttacaagtgatgctaaatattcgaattgtaggaaatatcagaccgtttcttcgttgatcagacagtcacgtgcaattgtggataaaacgagagattctgactctagaattacacgctctgatgatgaaaatgaatgtggcggaaaatctactgactctataaggaaacaactctccaatgaactgcgagaatcaaataccgtgagtttgggtaaatcatcgtcatctgacggtggcaaactacatcaacctaacagctgtagtccttctaaaagctcctctcttccgtcagaggatttggttgaagaaattgtggaagtacaacctattcttgagaaagttcattccaacagaaaggataacaaaaggaaaattgtccatctcttcagcaataaagaaaataaatcttacggcaaaaatcccaaaatacccaaagccagctttttcgatcaatttgcatctaaatag

SEQ ID NO: 4524 - protein, 1044 aa, Kluyveromyces lactis NRRL Y-1140
MSRHKGRSGTVPSNTLSAYDNNRAIVDNSTSKKINNSKPRPINYDLSRFTIPKSKVTTILDDDDLKEETTSSTLRNGESSTAANRSLLESHNDMPGILGSNTHQQPNEITENFTTEGTVKIVSKASKDPVFQLTTALSVTLSRGKDMSSPVLLFQFMKKSKPIQGFSFTLNDQTVRFWYGFKGEGFGVIFPNEKQFLLPNVDRIKTRCLSWMGSLSSSESAKFLQLMEAFEREMCFTGVDVSSDRIFKVKKREIDAMLNEYKASPSTGTNQMVLFPDRYKSDKLFNKCPNSSLNSLHRGKRGSGNGTVIQLPDYKPLTSYQNQTPDETVSQESFYGNQSTSEKTTEHPPFISYVSNLRRVTRSISDNKKHGDVHHTSDELMESENPELFEPTLSYTFNDGSKLSVTNQDFKCLYNNDWINDTILDFFLKFYIEESISDNVISRSEVYLFSSFFYTKLVSTEASKYENVKKWVINSDLFSKKYVVVPVNMNYHWFGCIIVNLDKLKVAIEEQLTKKLTSKGGNLKSPSLSKTEDDRNSNIASAPTNVTADNIELPTVFLLVFDSLRQTHSRLMDAVKEFIISYGRDVHNYDIQREKLKVRTCLVPQQPNMSDCGVHVILNTKKFFEKPKETLDLWFAKSSYNHSKLVNEFFEKKERRFARKTLRDVLLLLQKQQIAAHGISLGQEKNESIEENHSDLEIIEDFEAKEMETDTMEETGETNHPPNHNNMQCTPIEANLNSKAKAPTPNVETSMYFLKSTPSIERCTPNNDNKHEDQLIIVPESSQNSVANKDINLGNKSERDFYQSALLSDDDHRNESDSCADMISSQPPDRANFRDRCPTAELDDIEDSTSDNEKSKVYDISCSQQRCNVPVSPGKLLNEKLKTLSTNTAVTSDAKYSNCRKYQTVSSLIRQSRAIVDKTRDSDSRITRSDDENECGGKSTDSIRKQLSNELRESNTVSLGKSSSSDGGKLHQPNSCSPSKSSSLPSEDLVEEIVEVQPILEKVHSNRKDNKRKIVHLFSNKENKSYGKNPKIPKASFFDQFASK

SEQ ID NO: 4525 - DNA, 2838 bp, Debaryomyces hansenii CBS767
  CDS (1)..(2838)
atgagcggagggcaccgatttaataagaagtttaactcgctagataaacgaggacttggtgggccagttcatcctgtaaatcacttgagaagtggaaatggtaagccagggtccgtgagtcctccatccgggtctagattgtccgttcgaaatcaattgaaggatgtatttggtgatctggtggataattcaaggaatctcaggaagagcctcgagagtaaattgcatgatccagtcgttgaatcagatgattgtgatactggtggtaaggatgaggaaaatatgatacgaattaaaacattatcgggcaaagatgttttcactttcaacggagatatagatgaaaacctgggcgagatgctagtggtcagatcaatgctgattaatggggaatcgatacagcaggccagaccgggagagttaacgtttagaatttccatcaacgatgacttcttacttttcactcaaaagcagaggataataacagcaatatcaaggaatcttgaattcaagagcatacattttagcataaacaaaagagccatactaattgagttaaataattcgggttacatttatttgaaatacatcgaggatgatagtaatattctttcgtacttcttgaagaataagcaatggaatgtcaatacgcctacaagagttgtgaatgacttactacttgaaaaaattagaataataaaacaaaagagaacagagcatttgaacaaaagttcattgtccaagaatacacaagaaacagcaaatcacctaccagtagtatcacccgatgtgatgtatggaagaacaaggtcgtctaatcgtattagtgggtactcgtcgcccatcacaaacggaaatagttcaactactaaatcacgtagcatatatgatgaagatttagtcaaacctaatatggtcccacatctatttgaggtcgagctcaagtatgttttttcagataataaagtattcactataacatattcagattttaaaacgttatacgacaacgattggatcaacgattccttgatagatttttttataaaatatgaaatggataaggcgatttatcaaaagcacctattcaaacaaacagatatatatgcatttaattcatttttcttcacaaaattaatgtctggtgatgaatttaatgatgaaatagattattacggtaatatcaagagatggcttaataaactagatcttatgagttaccctaatattataataccaattaatgaaaacttgcattggtattgctgtgttataaaaggattaccacaattattggaatctgcattaaaaagaaaagaggcattggcatcttcgaatggttatgaagacatacaggaagcagaatgtgacgatagtgctgatattggtgattctgaatctactgtaacatcgactgttctgacatctgaagctagtacaaaggtcaaaaagatttatcaaccggagatttttatttttgattctttgcgtcagaagcatactaatatccattttccattaaaaaagtttattatcgattactgtagagaaaaatatgatgtcgatattggaagaaatgagatacgagtacattctgcaaaggttcctaaacaaaataactttaatgactgcggaatacatgttatttataatgttagaaagtggcttaacaattctgacgaatgtgaaaggatttggaggagttctaatctgagaactgcctctcggctacttttcattgcagaggaaaggaatggtatgcgtagagaattgaggaatgtattattgaacttgaagaagaaacaaaaaagcgaacaaaatgatgcatctaatgatagaaattctcatcacgcagatgatgatatagaagtcttagaatacactcctgttataagcaacagatctaccaagctgcccaaattagatgaagaggagctgagcaataaattagagaaaccgtcaaggaatgccactcccgagcaaaatgaagttcaagaaactagaaccttggaccccaaagctagagacacctctattcatgataatcgaacagatgtgccagatatagcttcaagagattctacagcgaaaagacaacagcaacagacatgggtagaaaatgatatgttgagagactcactttcaggcgctcatttatctatcaccctcaaggaggtactcaatgattacttcttgaagtatgaaaaaatttctgatttacaattgcgaagggtgcttcaattaagagacgaaatcaatgaattggatgatctgaaagattacactttgatcaagaaattcatcactacttttatcaaagagtctaatgatatcaggaacaacgagtatgatagggccatgcggccgaaagatgaagaccttgtgattatgcattgtagtgataacgaggaattgaatcagagtgtcaatgggttatctttatctaatgtttctgatggtagtaaacataatgaaacgcctagcagcaaaagcagacgtggctcaattacggtcatacaaagaaacgaagtacctaccgactctaatgagctcgtaaagaggaatagggactcaattgagatatcatctccttctcaagtcaacatggaaacgaagattttgaatcacaatcctcacagaaacgaagatattgcattatacaagggtagtagcaaaagcccaaatgatgaagaaaaactatcaaaagttcaagggacctgcacgccaaatccggacctgggtttgggttcaccaagtacaccaatgtctgaaccaatattgatcgataatagttctacattgaaaagacgtaaactcgataaggaaaagcataagtag

SEQ ID NO: 4526 - protein, 945 aa, Debaryomyces hansenii CBS767
MSGGHRFNKKFNSLDKRGLGGPVHPVNHLRSGNGKPGSVSPPSGSRLSVRNQLKDVFGDLVDNSRNLRKSLESKLHDPVVESDDCDTGGKDEENMIRIKTLSGKDVFTFNGDIDENLGEMLVVRSMLINGESIQQARPGELTFRISINDDFLLFTQKQRIITAISRNLEFKSIHFSINKRAILIELNNSGYIYLKYIEDDSNILSYFLKNKQWNVNTPTRVVNDLLLEKIRIIKQKRTEHLNKSSLSKNTQETANHLPVVSPDVMYGRTRSSNRISGYSSPITNGNSSTTKSRSIYDEDLVKPNMVPHLFEVELKYVFSDNKVFTITYSDFKTLYDNDWINDSLIDFFIKYEMDKAIYQKHLFKQTDIYAFNSFFFTKLMSGDEFNDEIDYYGNIKRWLNKLDLMSYPNIIIPINENLHWYCCVIKGLPQLLESALKRKEALASSNGYEDIQEAECDDSADIGDSESTVTSTVLTSEASTKVKKIYQPEIFIFDSLRQKHTNIHFPLKKFIIDYCREKYDVDIGRNEIRVHSAKVPKQNNFNDCGIHVIYNVRKWLNNSDECERIWRSSNLRTASRLLFIAEERNGMRRELRNVLLNLKKKQKSEQNDASNDRNSHHADDDIEVLEYTPVISNRSTKLPKLDEEELSNKLEKPSRNATPEQNEVQETRTLDPKARDTSIHDNRTDVPDIASRDSTAKRQQQQTWVENDMLRDSLSGAHLSITLKEVLNDYFLKYEKISDLQLRRVLQLRDEINELDDLKDYTLIKKFITTFIKESNDIRNNEYDRAMRPKDEDLVIMHCSDNEELNQSVNGLSLSNVSDGSKHNETPSSKSRRGSITVIQRNEVPTDSNELVKRNRDSIEISSPSQVNMETKILNHNPHRNEDIALYKGSSKSPNDEEKLSKVQGTCTPNPDLGLGSPSTPMSEPILIDNSSTLKRRKLDKEKHK

SEQ ID NO: 4527 - DNA, 3129 bp, Canis familiaris
  CDS (1)..(3129)
atggcctgcaaaatttctggtgaaaaatttgatgatcttttaatggaacagtgtatagaattcctttccttacttaaacgtttgtttgaattgctaggaaaactcttagggcttatactgctaggagttagtggaaaggagggtggcagctgtgtttataaaagggtagcggaatggtggaaaagaagcctaagaaataaggtcctctctctagaccataaaagtagaaaaggtgtccgtgggcgtcctgtcacttctaagacatcaccagaaaggcaactcaaagttgtgttgacgaatgtcctatggacggatttaggacgaaaattcagaaagaccctacctagaaacgatgctaatttatgtgatgccaacaagttgcaatcagactcattgccttcgacatctgttgacagcctagagacatgtcaaaaattagaacctcttcaccaaagccttaatttatctaaaaggatacccagagttatattgacgaatgtcctgggaacggagttaggaagaaaatacataaagacctcatctgtaactgaggccagtttgggtgatacagacaacttgcaatcagagcatctttcttcatcatctgatggcagcctagaatcttgtcaaattctaaaccctcacaagagctcctttttatctgaaaggggttcccaaccaagtaagacagtagataataattatgcgaagaaggcttcacacactaaagaaaaggaaagagatgatgatggcatttctcttgtaatgtctgatgctcaacctaaagacctcaatagtggaagtagaggttgtgatcatcttgaagaggggagcagaaataaagatgatacattttctgattcaaaaatggaacccgctctgacctccaggaagagaaagaaaaggcttagaagtaatttgccttattctcataattctacttcttccttgtttgaatcagcagaacagataaaaaaacaagaaaatgactcaacagtatctgctgaatttaaaaagtcaagtgaaaactatcaagactcaaaagtgcttgaagaaattacacctgaacctatagaaagcaatattgctaaactatcttcacttaatagtcaggagttggctttgagtgctgctccgaaaagttcctctgttgactgttcaaccactgaaaattttgagaactctgtgtccactgatactgtgggggagtctaccctgcttgagaaggatgagaatgagttgaatgcaatagaaaagcctgttttaagtgaacacagtgaggggaaccagtctttgatatcagtagaaccaattgttgtttctagtgatgaagaaggacctgttgaacataaaagttcagaaattcttaaattacaacctaagcaagaccatgtcatcactaatgaaaatgagagtgcttctgaatcagcattgtcagaactgccattgattacacgtgaatctgtacaggcttcatctgaattatgtccatataagcctgttatggaaaacatttcctgtattacacctagtaatgagatggatctacacctggattttatatttacttctgtttatattggtaaaataaaaggagcttctaaaggttgtgttacattcacaacaaaatatgttaagatcccatttcaagtgtccttgaatgaggtttcattgctagtggataccacacacttaaagaggtttgggttatggaaaaataaggatgacgatcacagtaaaaggagtcatgctatccttttcctctgggtctctgcaaattatcttcaagagattcagacccaactagaaaacttcacgttaagtcagcagtcaaaatccagtgaattcattttccttgagttacacagtcctatttcacaaagagaagaattgaaattgaaagatattatgacagaaataagtacagccagtggagaattagagctttcttatccattgtcttgggttcaggcacttcctttatttcagaacctctcttcaaaagaaagttcttttattcattactattgtgcttcgacttgttcttttcctgctgctgctgctgaagaaatgaagatgaaatcaatatctcagccttcaaatacagaaatagccaagcctacttacaccttcctgcagaagcaaagtagtggttgctactcactttctattacatctaatccagatgaagaatggcgagaagtcaggcacactggacctgttcaaaagttgattgtgtatcctccaccacctactaaagggggattgggagtgactaatgaagatctggagtgcttagaagaaggagagtttcttaatgatgtaatcattgatttctacctgaagtatcttatattggagaaggcatcagatgaacttgttgaacgaagtcacatttttagtagctttttctataaatgcttaacaagaaaggaaaataatttaacagaagataatccaaatctttcaatggcacagagaagacataaaagagtaagaacatggactcgtcatataaacatctttaacaaagattacatttttgtgcctgtaaatgagtcgtctcactggtatcttgcagtcatttgttttccatggttagaagaagctatatatgaagattttccacagggctcccaggttcagcagtctcaacatgacaacaaaacaatagataatgatcaacatactacttcaggactgtctttggatacagaggagtcccaaagtactgagacgaatacatcagtaccaaagaaaatgtgtaaaaggccatgcattctcatactagattccttgaaagctgcttctatacaaaacacagttcagaatttacgagagtatttagaggtagagtgggaagttaaacgaaaaactcatcgggaattcagcaaaacaaacatggtggacctatgccctaaggttcctaaacaagataatagcagtgattgtggagtatatttactgcagtatgtggagagcttctttaaggatcctattgttaattttgaacttccaattcatttggagaaatggtttcctcgtcatgtaataaagaccaaacgggaagatattcgagagctcattttaaaacttcatttacagcaacagaagggcagcagtagctag

SEQ ID NO: 4528 - protein, 1042 aa, Canis familiaris
MACKISGEKFDDLLMEQCIEFLSLLKRLFELLGKLLGLILLGVSGKEGGSCVYKRVAEWWKRSLRNKVLSLDHKSRKGVRGRPVTSKTSPERQLKVVLTNVLWTDLGRKFRKTLPRNDANLCDANKLQSDSLPSTSVDSLETCQKLEPLHQSLNLSKRIPRVILTNVLGTELGRKYIKTSSVTEASLGDTDNLQSEHLSSSSDGSLESCQILNPHKSSFLSERGSQPSKTVDNNYAKKASHTKEKERDDDGISLVMSDAQPKDLNSGSRGCDHLEEGSRNKDDTFSDSKMEPALTSRKRKKRLRSNLPYSHNSTSSLFESAEQIKKQENDSTVSAEFKKSSENYQDSKVLEEITPEPIESNIAKLSSLNSQELALSAAPKSSSVDCSTTENFENSVSTDTVGESTLLEKDENELNAIEKPVLSEHSEGNQSLISVEPIVVSSDEEGPVEHKSSEILKLQPKQDHVITNENESASESALSELPLITRESVQASSELCPYKPVMENISCITPSNEMDLHLDFIFTSVYIGKIKGASKGCVTFTTKYVKIPFQVSLNEVSLLVDTTHLKRFGLWKNKDDDHSKRSHAILFLWVSANYLQEIQTQLENFTLSQQSKSSEFIFLELHSPISQREELKLKDIMTEISTASGELELSYPLSWVQALPLFQNLSSKESSFIHYYCASTCSFPAAAAEEMKMKSISQPSNTEIAKPTYTFLQKQSSGCYSLSITSNPDEEWREVRHTGPVQKLIVYPPPPTKGGLGVTNEDLECLEEGEFLNDVIIDFYLKYLILEKASDELVERSHIFSSFFYKCLTRKENNLTEDNPNLSMAQRRHKRVRTWTRHINIFNKDYIFVPVNESSHWYLAVICFPWLEEAIYEDFPQGSQVQQSQHDNKTIDNDQHTTSGLSLDTEESQSTETNTSVPKKMCKRPCILILDSLKAASIQNTVQNLREYLEVEWEVKRKTHREFSKTNMVDLCPKVPKQDNSSDCGVYLLQYVESFFKDPIVNFELPIHLEKWFPRHVIKTKREDIRELILKLHLQQQKGSSS

SEQ ID NO: 4529 - DNA, 2643 bp, Candida albicans SC5314
  CDS (1)..(2643): transl_table=12
atggatacgtttacctctatgacatttgtaaacaatatttttttcttggtaccatctcagagatcaacagaattcaaaacacacatagcgtatacaaaaaaaaaaaatctcaaatgctcacacaatccaaccatagtttacaaacaagaaccatttttctgcaaaacctcggtttacatgtcaagtctaaaagataaagagtatccttctctaaaaagaaagggtctatccattggttcgggtagttacaagccagtaaacacattaggtgctgcccctcgaaatgaactacccaattctaataacgtatctgaagaaacatttctatccaacataacaatgaaagagagttacgcccctggaaatgatcccagcttttcattggaacgtgccaaagaacgtcgacatagattaaatggattaagccagtctttgaaaaccaaccactcacctgtggacgtgacagaatttcaaataacggattgttttggcagttctgtcaatgtttcggctaaagacttgagagatgagccggcggtgtcaatcaatctaaaatcatttcataaagttggaggagcgtattacaggagcatgagtcgccgacagcatttactaaatatatctaagaatggggactacatttgcatttttgaaagtgattatccgaaatcaaactttctcatcaacatagacacacaactaaaatctctatcgtttgcaccagaggctcttgttatggaactaaatgaagggcatgagactattattgcatcacattatggaagagataatgaggtacgagagtatttccagaacaatccaacgactaaagtcgatcccagcaaaacattgtcggggactgcattgcaccgacttgagaagacagtacagctagataacgataacgataacgatttggacgctaccgaaaggagtgtttctcggactcgtccaatccgagtacgaacacggcaagcatccaaggcgttttggtctctggttgctgaagaaaataaggaagatcctttggacatagtgaagattacagatgattcacctattgagagcgtttttgttgaggatgactatattccgtatgaaaagccagcgccatttgaacctgacttgcagtatacttttcctgataacaagatatttcgaatcacagctaaagattttgccacattgtataacaacgattggatcaacgacgctgtgatggacttttgcatacgctacgacatagaagaggcaattaaccaaggagtcgttaatcgagaagacgtttatgcgtttaattcgtttttctacacaaaattaacatctggtaaaaccgaagactactataataaagtgaaacgatgggtacacaaaatagatttaatgtctttttcccatattataatgcctattaatgaaaaacaccattggtattgttgtattattcgaggattgcccactttgttggaaatgatcaaactgcaaaaagaaaaatccaacaatgccgattctcccgattctgaagaaatgtttaaacgatggggagttgaaatatttgtgtttgattcgttgggtttacggagagataatgtgaagaaacccctaaaggcgtttttgattgattattgcaaagacaaatacaattatgacgtaaataccgaccaaatcagggttacggcagccaaagttccacgtcagaacaattacaatgattgtggcttacatgtgatttacaatgtgaagaaatggcttttgaatatcgaggcctgtgagtcgttttggagaaagtggcaacgaggagctgcgagaaccatttttctagccgacgagcgaaacaagatgagaaggtattggattgagaccttattaaagttgcatagtgagcaggcgccagcaatcaagaggagttcccatgccaatgaggaagaggatgatgacgatattgtggaaatagtggacactaaaactattgtgcctccccctacagaccagcccaatctctcgccaccatctaaccaaaaatcaaatgctgtatttgacaatagttttctaaatcaggaatttggtaatgaacacattccgagatttgttgttgaaactttaaacaagattttccccaagaggagtttgcacataccagatgaaatgaaaaaacttgtttcagcgtttatcaaagattcacagagcaacgtttcgtcagaacaagaactcaaagaagtatttataaggaaccacgaagtgataaaaaaagagattgaaaatcagaacagaccgaaaaacaaaactattagaattacagatgctgtttcaaatttacgaatagatccaggtacgtttttttgtccaacccataaagagattagcagtggattaagaaaagatcaattacttgaggagatcgatgccagaccaataatcaaggcaatacgcacaccacaagagtccgaccaaaattctaatgaaaaggatgcggaggatcacgccacatctgattctgaacacgtccaggtagaagaggttaatttagaagaggaccgcaactctcgtcaacggttcactagatctcgccaacgggcaaagcaaaatattatggatcttgcaatttttgataacattgatagaaaacgaagaaagtgtgaatag

SEQ ID NO: 4530 - protein, 880 aa, Candida albicans SC5314
MDTFTSMTFVNNIFFLVPSQRSTEFKTHIAYTKKKNLKCSHNPTIVYKQEPFFCKTSVYMSSLKDKEYPSLKRKGLSIGSGSYKPVNTLGAAPRNELPNSNNVSEETFLSNITMKESYAPGNDPSFSLERAKERRHRLNGLSQSLKTNHSPVDVTEFQITDCFGSSVNVSAKDLRDEPAVSINLKSFHKVGGAYYRSMSRRQHLLNISKNGDYICIFESDYPKSNFLINIDTQLKSLSFAPEALVMELNEGHETIIASHYGRDNEVREYFQNNPTTKVDPSKTLSGTALHRLEKTVQLDNDNDNDLDATERSVSRTRPIRVRTRQASKAFWSSVAEENKEDPLDIVKITDDSPIESVFVEDDYIPYEKPAPFEPDLQYTFPDNKIFRITAKDFATLYNNDWINDAVMDFCIRYDIEEAINQGVVNREDVYAFNSFFYTKLTSGKTEDYYNKVKRWVHKIDLMSFSHIIMPINEKHHWYCCIIRGLPTLLEMIKSQKEKSNNADSPDSEEMFKRWGVEIFVFDSLGLRRDNVKKPLKAFLIDYCKDKYNYDVNTDQIRVTAAKVPRQNNYNDCGLHVIYNVKKWLLNIEACESFWRKWQRGAARTIFLADERNKMRRYWIETLLKLHSEQAPAIKRSSHANEEEDDDDIVEIVDTKTIVPPPTDQPNLSPPSNQKSNAVFDNSFLNQEFGNEHIPRFVVETLNKIFPKRSLHIPDEMKKLVSAFIKDSQSNVSSEQELKEVFIRNHEVIKKEIENQNRPKNKTIRITDAVSNLRIDPGTFFCPTHKEISSGLRKDQLLEEIDARPIIKAIRTPQESDQNSNEKDAEDHATSDSEHVQVEEVNLEEDRNSRQRFTRSRQRAKQNIMDLAIFDNIDRKRRKCE

SEQ ID NO: 4531 - DNA, 2661 bp, Homo sapiens
  CDS (1)..(2661)
atgttaaatgcaaaaccagaggatgtccatgttcaatcaccactgtccaaattcagaagctcagaacgctggactctccctttgcagtgggaaagaagcctaaggaataaagtcatctctctagaccataaaaataaaaaacatatccgagggtgtcctgttacttccaagtcatcaccagaaaggggctcacaacgaagtaagacagtagatgacaattctgcaaagcagactgcgcacaataaagaaaaacgaagaaaggatgatggcatttctcttttaatatctgatactcagcctgaagaccttaacagtggaagtagaggttgtgatcatctcgaacaggaaagcagaaacaaggatgttaaatattctgattcaaaagtggaactcactctgatttccaggaagacaaagagaaggcttagaaataatttacctgattctcaatattgtacttctttggataagtcaacagaacagacaaaaaaacaagaagatgactcaacaatatccactgagtttgaaaagccaagtgaaaactatcatcaggatccaaaactgcctgaagaaattacaactaaacctacaaaaagtgattttactaaactatcctcacttaacagtcaggagttgactttgagtaatgccaccaaaagtgcctctgccggttcaaccactgaaactgttgagaactctaattccattgatattgtggggatttcttccctggttgagaaggatgagaatgagttgaataccatagaaaagcctattctaagaggacataatgaagggaaccaatcactgatctcagctgaaccaattgttgtttccagtgatgaagaaggacctgttgaacataaaagttcagaaattcttaagttacaatctaagcaagaccgtgagacaactaatgaaaatgagagtacttctgaatcagcattgttagaactaccattgattacatgtgaatctgtacagatgtcatctgagttatgcccatataatcctgtcatggagaacatttccagtattatgcctagtaatgagatggatctacaactggattttatatttacttctgtttatattggtaaaataaaaggagcttctaaaggttgtgttacaatcacaaaaaaatatattaagatcccatttcaagtgtccctgaatgagatttcattgctagtggataccacacatttaaagcggtttgggttatggaaaagtaaggatgataatcacagtaaaaggagtcatgctattcttttcttctgggtctcttcagattatcttcaagagattcagacccaattagaacactctgtattaagccagcaatcaaaatctagtgaattcattttccttgaactacacaatcctgtttcacaaagagaagaattgaagctgaaagatattatgacggaaataagtataatcagtggagaattagagctttcttacccgttgtcttgggttcaggcatttcctttgtttcagaacctctcttcaaaagaaagttcttttattcattattactgtgtttcaacttgttctttccctgctggtgttgctgttgctgaagaaatgaagctgaaatcagtatctcagccctcaaacacagatgcggccaagcctacttacaccttcctgcagaagcaaagtagcggttgctactccctttctattacatctaatccagatgaagaatggcgagaagtcaggcacactggacttgttcagaagttgattgtatatcctccaccacctactaaggggggattaggagtaactaatgaagatctggagtgtttagaagaaggagagtttcttaatgatgtaatcattgatttttaccttaagtatcttatattggagaaggcatcagatgaacttgttgaacgaagtcacatttttagtagctttttctataaatgcttgacaagaaaggaaaataatttaacagaagataatccaaatctttcaatggcacagagaagacataaaagagtaagaacatggactcgtcacataaacatttttaataaagattacatctttgtacctgtaaatgagtcgtctcactggtatctcgcagtcatttgttttccatggttagaagaagctgtgtatgaagattttccacaaactgtatcccagcagtcccaggctcagcagtcccaaaatgacaacaaaacaatagataatgatctacgtactacttcgacactgtctttgagtgcagaggattcccaaagtaccgagtcgaatatgtcagtaccaaagaaaatgtgtaaaaggccatgtattcttatactagactccttgaaagctgcttctgtacaaaacacagttcagaatttacgagagtatttagaggtagagtgggaagttaaactaaaaactcatcgtcaattcagcaaaacaaacatggtggatctatgccctaaagttcctaaacaggacaatagcagtgattgtggagtatatttattgcagtatgtggaaagcttcttcaaggatcctattgttaactttgaacttccaattcatttggagaagtggtttcctcgtcatgtaataaagaccaaacgggaagatattcgagagctcatcttgaaacttcatttacagcaacagaagggcagcagtagctag

SEQ ID NO: 4532 - protein, 886 aa, Homo sapiens
MLNAKPEDVHVQSPLSKFRSSERWTLPLQWERSLRNKVISLDHKNKKHIRGCPVTSKSSPERGSQRSKTVDDNSAKQTAHNKEKRRKDDGISLLISDTQPEDLNSGSRGCDHLEQESRNKDVKYSDSKVELTLISRKTKRRLRNNLPDSQYCTSLDKSTEQTKKQEDDSTISTEFEKPSENYHQDPKLPEEITTKPTKSDFTKLSSLNSQELTLSNATKSASAGSTTETVENSNSIDIVGISSLVEKDENELNTIEKPILRGHNEGNQSLISAEPIVVSSDEEGPVEHKSSEILKLQSKQDRETTNENESTSESALLELPLITCESVQMSSELCPYNPVMENISSIMPSNEMDLQLDFIFTSVYIGKIKGASKGCVTITKKYIKIPFQVSLNEISLLVDTTHLKRFGLWKSKDDNHSKRSHAILFFWVSSDYLQEIQTQLEHSVLSQQSKSSEFIFLELHNPVSQREELKLKDIMTEISIISGELELSYPLSWVQAFPLFQNLSSKESSFIHYYCVSTCSFPAGVAVAEEMKLKSVSQPSNTDAAKPTYTFLQKQSSGCYSLSITSNPDEEWREVRHTGLVQKLIVYPPPPTKGGLGVTNEDLECLEEGEFLNDVIIDFYLKYLILEKASDELVERSHIFSSFFYKCLTRKENNLTEDNPNLSMAQRRHKRVRTWTRHINIFNKDYIFVPVNESSHWYLAVICFPWLEEAVYEDFPQTVSQQSQAQQSQNDNKTIDNDLRTTSTLSLSAEDSQSTESNMSVPKKMCKRPCILILDSLKAASVQNTVQNLREYLEVEWEVKLKTHRQFSKTNMVDLCPKVPKQDNSSDCGVYLLQYVESFFKDPIVNFELPIHLEKWFPRHVIKTKREDIRELILKLHLQQQKGSSS

SEQ ID NO: 4533 - DNA, 25 bp, Artificial sequence
  primer
atgtctgccagaaaacgcaagttta

SEQ ID NO: 4534 - DNA, 24 bp, Artificial sequence
  primer
tcaagggtcttcatcttccaagag

SEQ ID NO: 4535 - protein, 248 aa, Artificial sequence
  consensus sequence
  Variant (2)..(23): Xaa in position 2 to 23 is any amino acid
  Variant (24)..(26): Xaa in position 24 to 26 is any or no amino acid
  Variant (28)..(32): Xaa in position 28 to 32 is any amino acid
  Variant (34)..(116): Xaa in position 34 to 116 is any amino acid
  Variant (117)..(153): Xaa in position 117 to 153 is any or no amino acid
  Variant (155)..(236): Xaa in position 155 to 236 is any amino acid
  Variant (237)..(243): Xaa in position 237 to 243 is any or no amino acid
  Variant (245)..(247): Xaa in position 245 to 247 is any amino acid
FXXXXXXXXXXXXXXXXXXXXXXXXXSXXXXXLXXXXXXXXXXXXXXXXXXXXXXXXXXXXXXXXXXXXXXXXXXXXXXXXXXXXXXXXXXXXXXXXXXXXXXXXXXXXXXXXXXXXXXXXXXXXXXXXXXXXXXXXXXXXXXXXXXXXXXXXHXXXXXXXXXXXXXXXXXXXXXXXXXXXXXXXXXXXXXXXXXXXXXXXXXXXXXXXXXXXXXXXXXXXXXXXXXXXXXXXXXXXXXXXXXRXXXR

SEQ ID NO: 4536 - DNA, 1080 bp, Saccharomyces cerevisiae
  CDS (1)..(1080)
atgcagcgtcttcaatgggataaagatattctatttttaatttttaaggtgatcttaattttttgttggttctttttcagttttttgtcaagcgaaaaactacagtttctacagaaaaacacgtcaagctacagtataagaacggattgtgaagaactcggtggagaacatagaaacagacaaaaaatcatggattactttaatatcaagcagaattactacacggggaacttcgtgcaatgtttgcaggaaatagagaagtttagcaaggtcacagataacaccttattattctacaaggcgaaaacccttttagctctaggccaatatcaatcacaagatcctacctctaagcttggcaaggtactagacttgtacgtccagttcttagatacaaaaaacattgaagaattagaaaatttgttaaaggataaacagaattcaccatatgaattatatctgttagccacggctcaagctatcttgggtgacttagataaaagtttggagacatgtgtagaagggattgacaatgacgaagcagaagggactacagaattattgctgcttgccatcgaagtcgctttgttaaacaacaacgtttcgaccgcgtccaccatctttgataactacactaatgctattgaggatactgtttccggtgacaacgaaatgattttaaacctggctgaatcgtacattaaatttgccacaaacaaagaaacggcaacatccaacttttactactatgaagagctatctcaaacctttcctacttggaaaactcaattgggattgctcaatttgcatttacagcaaagaaacatagctgaagctcagggtattgtcgagctattactatctgactactatagcgtcgaacaaaaagaaaacgccgtattgtacaaacctactttcttagcaaaccaaattacgcttgctcttatgcaaggtcttgatactgaagatttaacaaatcaattggttaaattggatcacgaacatgcattcatcaagcatcaccaagaaattgacgcaaaattcgatgaattagtgaggaaatatgatacgtccaactga

SEQ ID NO: 4537 - protein, 359 aa, Saccharomyces cerevisiae
MQRLQWDKDILFLIFKVILIFCWFFFSFLSSEKLQFLQKNTSSYSIRTDCEELGGEHRNRQKIMDYFNIKQNYYTGNFVQCLQEIEKFSKVTDNTLLFYKAKTLLALGQYQSQDPTSKLGKVLDLYVQFLDTKNIEELENLLKDKQNSPYELYLLATAQAILGDLDKSLETCVEGIDNDEAEGTTELLLLAIEVALLNNNVSTASTIFDNYTNAIEDTVSGDNEMILNLAESYIKFATNKETATSNFYYYEELSQTFPTWKTQLGLLNLHLQQRNIAEAQGIVELLLSDYYSVEQKENAVLYKPTFLANQITLALMQGLDTEDLTNQLVKLDHEHAFIKHHQEIDAKFDELVRKYDTSN

SEQ ID NO: 4538 - DNA, 903 bp, Danio rerio
  CDS (1)..(903)
atggcgtctcagcaaagcgaagtggatgagctgttcgatgtgaaaaacgcgttttacataggcagttatcaacactgcattaacgaagctcagaaagtaaagacttcagggccagaaaaggaatcagagaagaacattttcctttacagagcttatattgcccagaggaagtatggtgtggtactggatgacataaagcccagttctactgaggagctgcaggctgtccgaatgtttgccgagtacctgtccagtgaagggaagagggatgcaatagtagcagacctggataaaaagatatctaagagtgtcgatgtttccaacaccaccttcctgctgatggcggcttccatctacttgcatgaaatgaacacagatgcggcattacgtactctgcatcagggagagagtctggagtgcatggccatgactgtccagattctactaaagttggacagagttgatatggcaagaaaagagctaaagaagatgcaagaccaagatgaagatgctactttgactcaactcgctacagcctgggtcaaccttgcgattggtggagaaaagttgcaggatgcattttatatcttccaggaaatgtcagacaagtactcgcccacactgcttctgctaaacggtcaggctgccagtcacatggctcagaacaagtgggatgaggcggagtcagttctacaggatgctctggacaaagacagtggccatccggagacactcattaacctcattgtgttgacacaacatatgggcaaaccatttgaggttacaaatcgatatttgtctcaactgaaagatgcacacaagtcgcatccttttattaaggattatcttgctaagaagaatgaatttgacaggcttgtcatgcagtacgcccccagcgcctga

SEQ ID NO: 4539 - protein, 300 aa, Danio rerio
MASQQSEVDELFDVKNAFYIGSYQHCINEAQKVKTSGPEKESEKNIFLYRAYIAQRKYGVVLDDIKPSSTEELQAVRMFAEYLSSEGKRDAIVADLDKKISKSVDVSNTTFLLMAASIYLHEMNTDAALRTLHQGESLECMAMTVQILLKLDRVDMARKELKKMQDQDEDATLTQLATAWVNLAIGGEKLQDAFYIFQEMSDKYSPTLLLLNGQAASHMAQNKWDEAESVLQDALDKDSGHPETLINLIVLTQHMGKPFEVTNRYLSQLKDAHKSHPFIKDYLAKKNEFDRLVMQYAPSA

SEQ ID NO: 4540 - DNA, 927 bp, Homo sapiens
  CDS (1)..(927)
atggcgcctccggcccccggcccggcctccggcggctccggggaggtagacgagctgttcgacgtaaagaacgccttctacatcggcagctaccagcagtgcataaacgaggcgcagcgggtgaagctatcaagcccagagagagacgtggagagggacgtcttcctgtatagagcgtacctggcgcagaggaagttcggtgtggtcctggatgagatcaagccctcctcggcccctgagctccaggccgtgcgcatgtttgctgactacctcgcccacgagagtcggagggacagcatcgtggccgagctggaccgagagatgagcaggagcgtggacgtgaccaacaccaccttcctgctcatggccgcctccatctatctccacgaccagaacccggatgccgccctgcgtgcgctgcaccagggggacagcctggagtgcacagccatgacagtgcagatcctgctgaagctggaccgcctggacctcgcccggaaggagctgaagagaatgcaggacctggacgaggatgccaccctcacccagctcgccactgcctgggtcagcctggccacgggtggtgagaagctgcaggatgcctactacatcttccaggagatggctgacaagtgctcgcccaccctgctgctgctcaatgggcaggcggcctgccacatggcccagggccgctgggaggccgctgagggcctgctgcaggaggcgctagacaaggatagtggctacccagagacgctggtcaacctcatcgtcctgtcccagcacctgggcaagccccctgaggtgacaaaccgatacctgtcccagctgaaggatgcccacaggtcccatcccttcatcaaggagtaccaggccaaggagaacgactttgacaggctggtgctacagtacgctcccagcgcctga

SEQ ID NO: 4541 - protein, 308 aa, Homo sapiens
MAPPAPGPASGGSGEVDELFDVKNAFYIGSYQQCINEAQRVKLSSPERDVERDVFLYRAYLAQRKFGVVLDEIKPSSAPELQAVRMFADYLAHESRRDSIVAELDREMSRSVDVTNTTFLLMAASIYLHDQNPDAALRALHQGDSLECTAMTVQILLKLDRLDLARKELKRMQDLDEDATLTQLATAWVSLATGGEKLQDAYYIFQEMADKCSPTLLLLNGQAACHMAQGRWEAAEGLLQEALDKDSGYPETLVNLIVLSQHLGKPPEVTNRYLSQLKDAHRSHPFIKEYQAKENDFDRLVLQYAPSA

SEQ ID NO: 4542 - DNA, 927 bp, Mus musculus
  CDS (1)..(927)
atggctcctccggttcctggcgcggtctctggcggctccggagaggtagatgagctgttcgacgtgaagaacgctttctacatcggcagctaccagcagtgcatcaacgaggctcagcgcgtgaagctctccagtcctgagcgggaagtagagagggatgtcttcctatacagagcatacctcgcacagaggaagtatggcgtggtcctggatgagatcaaaccctcctcggccccagaactccaggctgtgcgcatgtttgctgagtaccttgccagtgagaaccagagggacagcatcgtgctggagctggatcgggagatgagcaggagtgtggatgtgaccaataccactttcctgctcatggctgcctccatctacttccacgaccagaacccggatgcagccctgcgaaccctgcaccagggcgacggccttgagtgcatggccatgacgattcagatcctcctcaagctggacaggctggacctagcccggaaggagctgaagaagatgcaggaccaagatgaggacgccacccttacccagctagccactgcctgggtcaacctggctgtgggtggtgagaagctacaagaagcctactacatattccaagagctggccgacaagtgctcccccacactgctgctgctcaatggccaggcagcctgccactcagcacagggccgctgggagactgcagagggtgtgctgcaagaggcactggacaaggacagcggccaccctgagaccctcatcaatctcattgtactgtcacagcacctgggcaagccccctgaggtgacaaaccgatacttgtcacagctgaaggatgcacacagggcccaccccttcatcaaggagtaccaggccaaggagaacgatttcgatcgcctggcaatgcagtatgcgcccagtgcttaa

SEQ ID NO: 4543 - protein, 308 aa, Mus musculus
MAPPVPGAVSGGSGEVDELFDVKNAFYIGSYQQCINEAQRVKLSSPEREVERDVFLYRAYLAQRKYGVVLDEIKPSSAPELQAVRMFAEYLASENQRDSIVLELDREMSRSVDVTNTTFLLMAASIYFHDQNPDAALRTLHQGDGLECMAMTIQILLKLDRLDLARKELKKMQDQDEDATLTQLATAWVNLAVGGEKLQEAYYIFQELADKCSPTLLLLNGQAACHSAQGRWETAEGVLQEALDKDSGHPETLINLIVLSQHLGKPPEVTNRYLSQLKDAHRAHPFIKEYQAKENDFDRLAMQYAPSA

SEQ ID NO: 4544 - DNA, 927 bp, Bos taurus
  CDS (1)..(927)
atggctcctccggctcctggtccggcttctggcggctccggggaggtggacgagctgttcgacgtgaagaacgccttctacattggcagctaccagcagtgcatcaacgaggcgcagcgggtgaagccatccagcccggagagagatgtggagcgggatgtcttcctgtacagagcatacctggcccagaggaagtacggcgtggtgctggacgagatcaagccctcctccgccccggagctgcaggccgtgcgcatgtttgctgagtacctggccagccacagccggcgggatgcgatcgtggccgagctggaccgggagatgagccggagcgtggatgtgaccaacaccaccttcctgctcatggctgcctccatctatttctacgaccagaacccagatgcagccctgcgcacccttcaccagggggacagcctggagtgcatggccatgacagtgcagatcctgctgaagcttgaccgcctggaccttgcccggaaggagctgaagaagatgcaggaccaggacgaggacgctacgctcacccagctggccaccgcctgggtcagcctggctgcgggaggtgagaagctccaggacgcctactacatcttccaggagatggccgacaagtgttcgccgaccctgctgctgctcaatgggcaggcagcctgccacatggcgcagggccgctgggaggctgctgagggcgtactgcaggaggcactggacaaggacagcggccaccctgagacgctgataaacctcgttgtcctgtcccaacacctgggcaagcctcctgaggtgacaaaccgctacctgtcccagctgaaggacgcccacaggtcgcaccccttcatcaaggagtaccgggccaaggagaacgactttgaccggctggtgctgcagtatgcccccagcgcctga

SEQ ID NO: 4545 - protein, 308 aa, Bos taurus
MAPPAPGPASGGSGEVDELFDVKNAFYIGSYQQCINEAQRVKPSSPERDVERDVFLYRAYLAQRKYGVVLDEIKPSSAPELQAVRMFAEYLASHSRRDAIVAELDREMSRSVDVTNTTFLLMAASIYFYDQNPDAALRTLHQGDSLECMAMTVQILLKLDRLDLARKELKKMQDQDEDATLTQLATAWVSLAAGGEKLQDAYYIFQEMADKCSPTLLLLNGQAACHMAQGRWEAAEGVLQEALDKDSGHPETLINLVVLSQHLGKPPEVTNRYLSQLKDAHRSHPFIKEYRAKENDFDRLVLQYAPSA

SEQ ID NO: 4546 - DNA, 864 bp, Eremothecium gossypii
  CDS (1)..(864)
atggactacttctcggtcaagcaacagttctacacgggcaattacaggcaggctctgcaggaggccgaaaagcacaagacggatgacgacacggtggtgtactataagagtatggcgcaactggcgctaaaagagtactctaagggcagcggcaatgcaggactacaggcggtgtttgacgcttacgtggactgcagagagtcgggggcgctggacaagctcaagcaggcggccgaggcgcacccgggaccatacagcgcgaacctggtggcgtgcgcgcaggcggccggcggcgactacgagggggcgctggcgacctgcaaggacggcgacgccgcggaactggtgctgacggcggtgcaggccgcgctcctggccgggcagcaggcggcggcagccgcgctgtttgaggcgtacgtggcggcacacgaacaggcaggcgaggacgagatagtgctgaacacggccgaggcgtacctgaactttgcgcgcagccgcgaggccatgggctcgaacttttacttcttcgaggagttgtgtcagacgttcccgagctggcgctcgcagctcgggctcctgaacctgcacctgcagcaggcgcacctgccagaggcccgggcaatcatcgacctgctggaggacgagtactatggcgcgatggctggcgcggcggcgttccgcgcagatcttctggcatgcaagatcacatacgcggccatgaatggcgacgagaccgcggcgctgcgcgcagagctgcaggagctggacgcagcgcacccgctgatccagaagcacctggagaacgacgcgagctttgacgccattgtggagaagtactcgtcgtctatacaggacgctaagtag

SEQ ID NO: 4547 - protein, 287 aa, Eremothecium gossypii
MDYFSVKQQFYTGNYRQALQEAEKHKTDDDTVVYYKSMAQLALKEYSKGSGNAGLQAVFDAYVDCRESGALDKLKQAAEAHPGPYSANLVACAQAAGGDYEGALATCKDGDAAELVLTAVQAALLAGQQAAAAALFEAYVAAHEQAGEDEIVLNTAEAYLNFARSREAMGSNFYFFEELCQTFPSWRSQLGLLNLHLQQAHLPEARAIIDLLEDEYYGAMAGAAAFRADLLACKITYAAMNGDETAALRAELQELDAAHPLIQKHLENDASFDAIVEKYSSSIQDAK

SEQ ID NO: 4548 - DNA, 885 bp, Gibberella zeae PH-1
  CDS (1)..(885)
atggacccttactctaccgaaggcgaattgatcaacatccacaactacttccaccagggccagtaccaggaagttgtcgacttcgatacctcgtccttctcccctgacaacgccctgcccgttcgcgtcctagtcctccgagctcgactggctcttggccaagctgaagatgtcctcgacgaagtgaagggtgaatccgagcccgagttccaggctcttggtgctcttgctgagctgaacttgggcaagaccgattccgcagtccagacgatcgagaagcttgtgtcttcggccgccgacaacacaacggttcaggttattggaggaacagttcttcaagctgctggaaaatctgaggaggctcttgctctccttacccaacatcagggaagcctcgacgccgtctcccttatcgttcagattcacttgcaacaaaaccgaaccgacctcgctctgaaggaagtctccgctgctcgacgatgggcccaggatagtctcttggttaacttggccgagtcttgggttggactgagagtgggtggtgagaagtaccagcaggctttctacgtctatgaggagcttgcccaagctccctcgacttcatcagtacgcagtcttgtctcgcaagctgtctgcgaattgcaccttggacgaacagaagaggcacaggctgccctggaccaggctttggaaaaggatgccaacaacgccgatgccattgccaacttgctcgtcctcaatgtcatctctggcaacaagtccgatgagtttacacagaaacttcagagcgccaagcctgatcaccagtacctagccgacttggaagagaagagcgccctgttcgacagagctgccacgaagtacagccccaaggtttcagcataa

SEQ ID NO: 4549 - protein, 294 aa, Gibberella zeae PH-1
MDPYSTEGELINIHNYFHQGQYQEVVDFDTSSFSPDNALPVRVLVLRARLALGQAEDVLDEVKGESEPEFQALGALAELNLGKTDSAVQTIEKLVSSAADNTTVQVIGGTVLQAAGKSEEALALLTQHQGSLDAVSLIVQIHLQQNRTDLALKEVSAARRWAQDSLLVNLAESWVGLRVGGEKYQQAFYVYEELAQAPSTSSVRSLVSQAVCELHLGRTEEAQAALDQALEKDANNADAIANLLVLNVISGNKSDEFTQKLQSAKPDHQYLADLEEKSALFDRAATKYSPKVSA

SEQ ID NO: 4550 - DNA, 888 bp, Candida glabrata CBS138
  CDS (1)..(888)
atggattattttacggttaagcagagcttttacaatggcttatatgagaaagtactggaagaagcttccaagctgggcaaagtagaggatgtcacaatcaagtactaccaattgagaagcgagctggccttgggtcaattgaaggctggtggtgacgattctttgtcgcaggcttttgctctatatgaaaccttcttgaaggattcgaagcatgatctaagcaagttggagtcccatgtgaaaggtaagaattgtttgtaccacttgaacttgttggccagtgcacaagctattaaaggtgatgttgaagagagtctaaagacatgtgttgaaggtattgactcaggcaacgaagttggtgttccagacctattgcttctggccattgaagtggctctcttgaacaataaggcatctactgcatctacaatgttcgaaaactataccagtacgaatgctgacagtttgtcgagcgaagatgaattgataataaatctagccgaatcttatattaagttcgccacaaatgtagacacttctagttccaacttttatcatttcgaagagttagcacaaactttcccaacttggaaatctcaattgggattgttgaacttgcagttgcaacaaggtaatactactgaagcccaatcaattgtcgatctattagaatctgaatattatagtaagaacctagaagctgtccagctgtataaaggtaatttcctggcaaacaaaattacattagccattatggaaggtgagaaatctaaggctgaggaattgagatctgaactaaagcaattcgttccaaaccatggtttcaacaaaagccacgaagaactgacatcgaaatttgatgaaatagtggttaaatataagaattag

SEQ ID NO: 4551 - protein, 295 aa, Candida glabrata CBS138
MDYFTVKQSFYNGLYEKVLEEASKLGKVEDVTIKYYQLRSELALGQLKAGGDDSLSQAFALYETFLKDSKHDLSKLESHVKGKNCLYHLNLLASAQAIKGDVEESLKTCVEGIDSGNEVGVPDLLLLAIEVALLNNKASTASTMFENYTSTNADSLSSEDELIINLAESYIKFATNVDTSSSNFYHFEELAQTFPTWKSQLGLLNLQLQQGNTTEAQSIVDLLESEYYSKNLEAVQLYKGNFLANKITLAIMEGEKSKAEELRSELKQFVPNHGFNKSHEELTSKFDEIVVKYKN

SEQ ID NO: 4552 - DNA, 882 bp, Kluyveromyces lactis NRRL Y-1140
  CDS (1)..(882)
atggactattttactgtaaaacagcagttttatactggtaactatgaagaagcgttgaacgaagtttctaagtttaacaaaactgaagatgaggcgttgacttactacagaaatagatcattgattgcattgtcccagttcagtgagggtagtgctgattctggctcacttgggcctgtatttgaggcttactataaatttttaagcaaacctacaggctcaatcactgcactagaacaaaccgttgaaaaggcgggcagatctccatttgcattgaacttattagcaagtgcattgactataaagggcgagtttaaaactgctttggaggttgccgttgaaggaattgactccgatgaaacaagaggaaccccggaactactgttaacggccatccaaataactttgttggataatcaaccaaccattgcctcgactatgtttgaaaatttccaagcacttcaggagcaatcgaacgacgatgaaataattttgaatcttgcagagtcatacatcaacttcaaccagggtaaagagatcactggatccaatttctatttctttgaagagttgtctcaaactttcccaagttggaagactcaattaggcctattgaatttacacctccaacaatcgcatttgcctgaatccaaagcaatcatcgacctcttagaaagcgagttctacgatatcaaacaagaagcacaaacgtacaagcctgatctacttgcaaataagattacgtacaccatcttatctggtggaaatgcaaacgaattgagatcggaattgcaacaattgaaaccatctcacccactatgtgttgccgaccttgaaaataacaagactttcgatcaaattgtggcaaagtacacagcctaa

SEQ ID NO: 4553 - protein, 293 aa, Kluyveromyces lactis NRRL Y-1140
MDYFTVKQQFYTGNYEEALNEVSKFNKTEDEALTYYRNRSLIALSQFSEGSADSGSLGPVFEAYYKFLSKPTGSITALEQTVEKAGRSPFALNLLASALTIKGEFKTALEVAVEGIDSDETRGTPELLLTAIQITLLDNQPTIASTMFENFQALQEQSNDDEIILNLAESYINFNQGKEITGSNFYFFEELSQTFPSWKTQLGLLNLHLQQSHLPESKAIIDLLESEFYDIKQEAQTYKPDLLANKITYTILSGGNANELRSELQQLKPSHPLCVADLENNKTFDQIVAKYTA

SEQ ID NO: 4554 - DNA, 939 bp, Debaryomyces hansenii CBS767
  CDS (1)..(939)
atggattcatttggcgactcgggtgaattatataccattagaaaccaattttttactaatcaacaccaaaaggttatatcatatgacttggatcaattttctcctgaaggtcaattgaaagtattagaatatcaagtcagatctacaattgctttacagaaagatgcatctaatctaattgataatggaaagagctcattcccagataatgaacagcttttcttattattaagtgcctggaatgatttgaaatcgttcggaaccgatgattcaacatattttgaagacattactcaagccgagtttgaattgcaagcgatattgacagctatatacttggtaaacttcaagaaagatattgatcaagctatcgtattattgactaattatatcgattcgggtaacttgaatcctgatgagttagagtcgttcttagttttggtgcagttgtacttgattaagggcaatttcaatgctgctaataaaatcttgctcaatttcaagaactttccagattctgcaagagatagtataatttatcaagtcttggaatcgtggttattatctgttaaaggtgaatctgataatataagtaattcgtactatttttatgatgaattattatcggtagactttgacgacgattctcaaggtagattcaagatcttaaatgttttgttcgtcttaactttacaattgaagcattatcctgaagcacaagaattattagctcaaatgaagacattagaaggtaagactgatggcgactttctcgctaaccaaattacaatggattatttacttaataatggtgagaatgttgaggaattattaaaagaattatcgaaggctgatgaagaacatcaacttgtgaaagacgtcaacgaaacgaactctaagttcgacgaaatcgttggaaagtataaggctgctgtttaa

SEQ ID NO: 4555 - protein, 312 aa, Debaryomyces hansenii CBS767
MDSFGDSGELYTIRNQFFTNQHQKVISYDLDQFSPEGQLKVLEYQVRSTIALQKDASNLIDNGKSSFPDNEQLFLLLSAWNDLKSFGTDDSTYFEDITQAEFELQAILTAIYLVNFKKDIDQAIVLLTNYIDSGNLNPDELESFLVLVQLYLIKGNFNAANKILLNFKNFPDSARDSIIYQVLESWLLSVKGESDNISNSYYFYDELLSVDFDDDSQGRFKILNVLFVLTLQLKHYPEAQELLAQMKTLEGKTDGDFLANQITMDYLLNNGENVEELLKELSKADEEHQLVKDVNETNSKFDEIVGKYKAAV

SEQ ID NO: 4556 - DNA, 921 bp, Cryptococcus neoformans var. neoformans JEC21
  CDS (1)..(921)
atggaggcagaccccttataccacgtcaagcagctcttctaccaggcgtcataccaagcctgtatctctgaagcctcagaatacccccacacaccttcagacgacccttcatcactccaccgtgctctctatattgctcgctctcatcttgcgcttccgtctccatccccctcatctgcccacgctatcctcgcacccttcctttcgctctcacccgtacctctttctgcgcgtgcagttgacgcgttcgcctctatccatgaagcggaggaagatgccagagaggaaaaggtagaagaggttagggacttggtattggaatgtgaaggtggaaacgatgaggaggaggagaagaccgtaagagccattgctgctagcgtgtttatccttgtgggagagaacgaagaggctgtggctactttgacagagggcgcggctaaggatgatctggagtgtattgccatccttgtccagcttcttctttctctcaatcgccgagatcttgcgcaagctacttacaactccgccaagaaattcgggagtgactctatgcttattcaggctatggaagcttggattgggctcaagactggatctcaacctcttcatcaatcctactacttttacgaagagctttatcagcttcccaatggtcgcaccgctcctgttttagcttcgcacgctgccgcacaccttctcttaggtcacgtcgatgaggccaaggccgacattgtggaagcatcccagagtaaggcagggcagagtagcagcgatgttctggctgttggcgcttcggttggcgctgagggctttgcggagaagctggttacgaccgcaaagcaacacccctatgccctcgatctcattgagaagaataagctgttcgatgaagctgctgccaaatatgcggtatccgcatag

SEQ ID NO: 4557 - protein, 306 aa, Cryptococcus neoformans var. neoformans JEC21
MEADPLYHVKQLFYQASYQACISEASEYPHTPSDDPSSLHRALYIARSHLALPSPSPSSAHAILAPFLSLSPVPLSARAVDAFASIHEAEEDAREEKVEEVRDLVLECEGGNDEEEEKTVRAIAASVFILVGENEEAVATLTEGAAKDDLECIAILVQLLLSLNRRDLAQATYNSAKKFGSDSMLIQAMEAWIGLKTGSQPLHQSYYFYEELYQLPNGRTAPVLASHAAAHLLLGHVDEAKADIVEASQSKAGQSSSDVLAVGASVGAEGFAEKLVTTAKQHPYALDLIEKNKLFDEAAAKYAVSA

SEQ ID NO: 4558 - DNA, 936 bp, Candida albicans SC5314
  CDS (1)..(936): transl_table=12
atggacgcatttagtgattcaggagagttgtataccattaggaaccagttttatactaatcagcacaataaggtcaaggcgtactcgcttgatgagttttcacccgaaaatcaattgaaggtgttggagtttcaaatcagatcgacaattgcgttggaacaggatgcctccaagatgattgaggatgggaaaaccaggttccctgagaacgagccattatttcagttgttgagtgcatggaacgacctaaaagattttggcgttgacgattcgacatattttgaggatgtgaagaaagcaagttttgagttacaggcggtgttgacagcattgtatttggtgaagtttgataaagatattgatcaggcaatcacgtttttgagtgattatattgataatgtgaattcgttggccaagtataacgagttggagccgtttttggtgttggtgcagttgtacttgatcaagggcaatctcactggtgccaccaaagttttacagaatttaaaccagtttcccgaatctgctcgagacaatattgtttaccaggtgttggagtcgtggatattatcggttactggaggatcagacaatatcaacaatagctactacttttacgatgagattttatcgagcgattttgatcaagacattcagggcaagttcaagattttgaatgtgttgtttgcgttgacgttgcagttgaaacatttccctgaagcccaagaattgttggagcaaatcaaggggttgggtgttgttgatgccaactttattgccaaccagattacttttgatcagttacagaacgatggtgccaacactgcagagttgttgagcgagttgaaacgattggacgcttcacacgagttgttgaaagagcaagatctcaaaacaagtatatttgacgacattgttacaaaatattctatttag

SEQ ID NO: 4559 - protein, 311 aa, Candida albicans SC5314
MDAFSDSGELYTIRNQFYTNQHNKVKAYSLDEFSPENQLKVLEFQIRSTIALEQDASKMIEDGKTRFPENEPLFQLLSAWNDLKDFGVDDSTYFEDVKKASFELQAVLTALYLVKFDKDIDQAITFLSDYIDNVNSLAKYNELEPFLVLVQLYLIKGNLTGATKVLQNLNQFPESARDNIVYQVLESWILSVTGGSDNINNSYYFYDEILSSDFDQDIQGKFKILNVLFALTLQLKHFPEAQELLEQIKGLGVVDANFIANQITFDQLQNDGANTAELLSELKRLDASHELLKEQDLKTSIFDDIVTKYSI

SEQ ID NO: 4560 - DNA, 927 bp, Homo sapiens
  CDS (1)..(927)
atggcgcctccggcccccggcccggcctccggcggctccggggaggtagacgagctgttcgacgtaaagaacgccttctacatcggcagctaccagcagtgcataaacgaggcgcagcgggtgaagctatcaagcccagagagagacgtggagagggacgtcttcctgtatagagcgtacctggcgcagaggaagttcggtgtggtcctggatgagatcaagccctcctcggcccctgagctccaggccgtgcgcatgtttgctgactacctcgcccacgagagtcggagggacagcatcgtggccgagctggaccgagagatgagcaggagcgtggacgtgaccaacaccaccttcctgctcatggccgcctccatctatctccacgaccagaacccggatgccgccctgcgtgcgctgcaccagggggacagcctggagtgcacagccatgacagtgcagatcctgctgaagctggaccgcctggacctcgcccggaaggagctgaagagaatgcaggacctggacgaggatgccaccctcacccagctcgccactgcctgggtcagcctggccacgggtggtgagaagctgcaggatgcctactacatcttccaggagatggctgacaagtgctcgcccaccctgctgctgctcaatgggcaggcggcctgccacatggcccagggccgctgggaggccgctgagggcctgctgcaggaggcgctagacaaggatagttgctacccagagacgctggtcaacctcatcgtcctgtcccagcacctgggcaagccccctgaggtgacaaaccgatacctgtcccagctgaaggatgcccacaggtcccatcccttcatcaaggagtaccaggccaaggagaacgactttgacaggctggtgctacagtacgctcccagcgcctga

SEQ ID NO: 4561 - protein, 308 aa, Homo sapiens
MAPPAPGPASGGSGEVDELFDVKNAFYIGSYQQCINEAQRVKLSSPERDVERDVFLYRAYLAQRKFGVVLDEIKPSSAPELQAVRMFADYLAHESRRDSIVAELDREMSRSVDVTNTTFLLMAASIYLHDQNPDAALRALHQGDSLECTAMTVQILLKLDRLDLARKELKRMQDLDEDATLTQLATAWVSLATGGEKLQDAYYIFQEMADKCSPTLLLLNGQAACHMAQGRWEAAEGLLQEALDKDSCYPETLVNLIVLSQHLGKPPEVTNRYLSQLKDAHRSHPFIKEYQAKENDFDRLVLQYAPSA

SEQ ID NO: 4562 - DNA, 927 bp, Pongo pygmaeus
  CDS (1)..(927)
atggcgcctccggcccccggcccgacctccggcggctccggggaggtagacgagctgttcgacgtgaagaacgccttctacatcggcagctaccagcagtgcataaacgaggcgcagcgggtgaagttgtcaagcccagagacagatgtggagagggacgtcttcctgtatagagcgtaccttgcgcagaggaagttcggcgtggtcctggacgagatcaagccctcctcggcccctgagctccaggctgtgcgcatgttcgctgactacctcgcccatgagagccggagggacagcattgtggccgagctggaccgagagatgagcaggagcgtggacgtgaccaacaccaccttcctcctcatggccgcttccatctatctccacgaccagaacccagatgccgccctgcgtgcgctgcaccagggggacagcctggagtgcacagccatgacagtacagatcctgctgaagctagaccgcctggacctcgcccggaaggagctgaagagaatgcaggacctggacgaggatgccaccctcacccagctcgccactgcctgggtcagcctggccacgggcggtgagaagctgcaggatgcctactacatcttccaggagatggctgacaagtgctcgcccaccctgctgctgctcaatgggcaggcagcctgccacatggcccagggccgctgggaggccgccgagggcctgctgcaggaggcgctagacaaggatagtggctacccggagacgctggtcaacctcatcgtcctgtcccagcacctgggcaagccccctgaggtgacaaaccgatacctgtcccagctgaaggacgcccacaggtcccatcccttcatcaaggagtaccaggccaaggagaacgactttgacaggctggtgctacagtacgctcccagcgcctga

SEQ ID NO: 4563 - protein, 308 aa, Pongo pygmaeus
MAPPAPGPTSGGSGEVDELFDVKNAFYIGSYQQCINEAQRVKLSSPETDVERDVFLYRAYLAQRKFGVVLDEIKPSSAPELQAVRMFADYLAHESRRDSIVAELDREMSRSVDVTNTTFLLMAASIYLHDQNPDAALRALHQGDSLECTAMTVQILLKLDRLDLARKELKRMQDLDEDATLTQLATAWVSLATGGEKLQDAYYIFQEMADKCSPTLLLLNGQAACHMAQGRWEAAEGLLQEALDKDSGYPETLVNLIVLSQHLGKPPEVTNRYLSQLKDAHRSHPFIKEYQAKENDFDRLVLQYAPSA

SEQ ID NO: 4564 - DNA, 900 bp, Xenopus laevis
  CDS (1)..(900)
atggctacacagggagaagtggacgagttgtttgatgttaagaattctttctatattggaagttatcagcagtgcattaatgaagcgcaaagggtcaagccttcaaatgcagagaaggaagtggaaagggatgttttcctgttcagagcatatatagcccagcgcaaatatggggtagtgcttgatgaaattcgtccaaatgccaaccctgaactgcaggctgtaagaatgtttgctgagtacctgtccaatgagagccgcagagatgctatagtctcagatctcgacaaaaagatggcaaaaagtgttgatataactaacacaacattcctgctaatggcagcttcaatttatttccatgatggcaacacagatgcagccttgcgagccctacaccaaggagacagcctggaatgcatggccataataatccaagtactgctgaaacttgacagactcgatctggctcggaaagaactaaagaagatggtggaagtggatgaggatgcaacattaacacagttggcaaccgcttgggtcaatattgctgtgggtggagacaagttgcaagatgccttctacatcttccaggaaatgtctgacaaatattcatctactcttctactgctaaatggacaagccacctgttacatgggtcagagcaagtgggaagatgcagagggtgttttgcaggaagcactggataaggatagcagccacccagaaaccttgattaattttattgtcttgacccagcacattggaaaaccacctgaggtcaccaaccgttatctgtctcaactaaaggatggacacagaaatcacccatttattaaggaataccaagcaaaggaaaatgactttgaccggttggtcctgcagtatgcacccagtgcatga

SEQ ID NO: 4565 - protein, 299 aa, Xenopus laevis
MATQGEVDELFDVKNSFYIGSYQQCINEAQRVKPSNAEKEVERDVFLFRAYIAQRKYGVVLDEIRPNANPELQAVRMFAEYLSNESRRDAIVSDLDKKMAKSVDITNTTFLLMAASIYFHDGNTDAALRALHQGDSLECMAIIIQVLLKLDRLDLARKELKKMVEVDEDATLTQLATAWVNIAVGGDKLQDAFYIFQEMSDKYSSTLLLLNGQATCYMGQSKWEDAEGVLQEALDKDSSHPETLINFIVLTQHIGKPPEVTNRYLSQLKDGHRNHPFIKEYQAKENDFDRLVLQYAPSA

SEQ ID NO: 4566 - DNA, 924 bp, Homo sapiens
  CDS (1)..(924)
atggcgcctccggccccggccggcctccggggctccggggaggtagacgagctgttcgacgtaaagaacgccttctacatcggcagctaccagcagtgcataaacgaggcgcacggggtgaagctatcaagcccagagagagacgtggagagggacgtcttcctgtatagagcgtacctggcgcagaggaagttcggtgtggtcctggatgagatcaagccctcctcggcccctgagctccaggccgtgcgcatgtttgctgactacctcgcccacgagagtcggagggacagcatcgtggccgagctggaccgagagatgagcaggagcgtggacgtgaccaacaccaccttcctgctcatggccgcctccatctatctccacgaccagaacccggatgccgccctgcgtgcgctgcaccagggggatagcctggagtgcacagccatgacagtgcagatcctgctgaagcttgaccgcctggacctcgcccggaaggagctgaagagaatgcaggacctggacgaggatgccaccctcacccagctcgccactgcctgggtcagcctggccacgggtggtgagaagctgcaggatgcctactacatcttccaggagatggctgacaagtgctcgcccaccctgctgctgctcaatgggcaggcggcctgccacattgcccagggccgctgggaggccgctgagggcctgctgcaggaggcgctagacaaggatagtggctacccggagacgctggtcaacctcatcgtcctgtcccagcaccttggcaagccccctgaggtgacaaaccgatacctgtcccagctgaaggatgcccacaggtcccatcccttcatcaaggagtaccaggccaaggagaacgactttgacaggctggtgctacagtacgctcccagcgcctga

SEQ ID NO: 4567 - protein, 307 aa, Homo sapiens [sequence omitted]

SEQ ID NO: 4568 - DNA, 1050 bp, Mus musculus
  CDS (40)..(966)
gacgtgtcccagaagaaggttggttagaggtgcggtgacatggctcctccggtgtctggcgcggtctctggcggctccggagaggtagatgagctgttcgacgtgaagaacgctttctacatcggcagctaccagcagtgcatcaacgaggctcagcgcgtgaagctctccagtcctgagcgggaagtagagagggatgtcttcctatacagagcatacctcgcacagaggaagtatggcgtggtcctggatgagatcaaaccctcctcggccccagaactccaggctgtgcgcatgtttgctgagtaccttgccagtgagaaccagagggacagcatcgtgctggagctggatcgggagatgagcaggagtgtggatgtgaccaataccactttcctgctcatggctgcctccatctacttccacgaccagaacccggatgcagccctgcgaaccctgcaccagggcgacggccttgagtgcatggccatgacgattcagatcctcctcaagctggacaggctggacctagcccggaaggagctgaagaagatgcaggaccaagatgaggacgccacccttacccagctagccactgcctgggtcaacctggctgtgggtggtgagaagctacaagaagcctactacatattccaagagctggccgacaagtgctcccccacactgctgctgctcaatggccaggcagcctgccactcagcacagggccgctgggagactgcagagggtgtgctgcaagaggcactggacaaggacagcggccaccctgagaccctcatcaatctcattgtactgtcacagcacctgggcaagccccctgaggtgacaaaccgatacttgtcacagctgaaggatgcacacagggcccaccccttcatcaaggagtaccaggccaaggagaacgatttcgatcgcctggcaatgcagtatgcgcccagtgcttaaagtggagatgccctggtgaccccaactgtgtgccgcgggatgctgtcctccctttgtgtctgccaataaagtctatccattatc

SEQ ID NO: 4569 - protein, 308 aa, Mus musculus
MAPPVSGAVSGGSGEVDELFDVKNAFYIGSYQQCINEAQRVKLSSPEREVERDVFLYRAYLAQRKYGVVLDEIKPSSAPELQAVRMFAEYLASENQRDSIVLELDREMSRSVDVTNTTFLLMAASIYFHDQNPDAALRTLHQGDGLECMAMTIQILLKLDRLDLARKELKKMQDQDEDATLTQLATAWVNLAVGGEKLQEAYYIFQELADKCSPTLLLLNGQAACHSAQGRWETAEGVLQEALDKDSGHPETLINLIVLSQHLGKPPEVTNRYLSQLKDAHRAHPFIKEYQAKENDFDRLAMQYAPSA

SEQ ID NO: 4570 - DNA, 927 bp, Bos taurus
  CDS (1)..(927)
atggctcctccggctcctggtccggcttctggcggctccggggaggtggacgagctgttcgacgtgaagaacgccttctacattggcagctaccagcagtgcatcaacgaggcgcagcgggtgaagccatccagcccggagagagatgtggagcgggatgtcttcctgtacagagcatacctggcccagaggaagtacggcgtggtgctggacgagatcaagccctcctccgccccggagctgcaggccgtgcgcatgtttgctgagtacctggccagcgacagccggcgggatgcgatcgtggccgagctggaccgggagatgagccggagcgtggatgtgaccaacaccaccttcctgctcatggctgcctccatctatttctacgaccagaacccagatgcagccctgcgcacccttcaccagggggacagcctggagtgcatggccatgacagtgcagatcctgctgaagcttgaccgcctggaccttgcccggaaggagctgaagaagatgcaggaccaggacgaggacgctacgctcacccagctggccaccgcctgggtcagcctggctgcgggaggtgagaagctccaggacgcctactacatcttccaggagatggccgacaagtgttcgccgaccctgctgctgctcaatgggcaggcagcctgccacatggcgcagggccgctgggaggctgctgagggcgtactgcaggaggcactggacaaggacagcggccaccctgagacgctgataaacctcgttgtcctgtcccaacacctgggcaagcctcctgaggtgacaaaccgctacctgtcccagctgaaggacgcccacaggtcgcaccccttcatcaaggagtaccgggccaaggagaacgactttgaccggctggtgctgcagtatgcccccagcgcctga

SEQ ID NO: 4571 - protein, 308 aa, Bos taurus
MAPPAPGPASGGSGEVDELFDVKNAFYIGSYQQCINEAQRVKPSSPERDVERDVFLYRAYLAQRKYGVVLDEIKPSSAPELQAVRMFAEYLASDSRRDAIVAELDREMSRSVDVTNTTFLLMAASIYFYDQNPDAALRTLHQGDSLECMAMTVQILLKLDRLDLARKELKKMQDQDEDATLTQLATAWVSLAAGGEKLQDAYYIFQEMADKCSPTLLLLNGQAACHMAQGRWEAAEGVLQEALDKDSGHPETLINLVVLSQHLGKPPEVTNRYLSQLKDAHRSHPFIKEYRAKENDFDRLVLQYAPSA

SEQ ID NO: 4572 - DNA, 927 bp, Homo sapiens
  CDS (1)..(927)
atggcgcctccggcccccggcccggcctccggcggctccggggaggtagacgagctgttcgacgtaaagaacgccttctacatcggcagctaccagcagtgcataaacgaggcgcagcgggtgaagctatcaagcccagagagagacgtggagagggacgtcttcctgtatagagcgtacctggcgcagaggaagttcggtgtggtcctggatgagatcaagccctcctcggcccctgagctccaggccgtgcgcatgtttgctgactacctcgcccacgagagtcggagggacagcatcgtggccgagctggaccgagagatgagcaggagcgtggacgtgaccaacatcaccttcctgctcatggccgcctccatctatctccacgaccagaacccggatgccgccctgcgtgcgctgcaccagggggacagcctggagtgcacagccatgacagtgcagatcctgctgaagctggaccgcctggacctcgcccggaaggagctgaagagaatgcaggacctggacgaggatgccaccctcacccagctcgccactgcctgggtcagcctggccacgggtggtgagaagctgcaggatgcctactacatcttccaggagatggctgacaagtgctcgcccaccctgctgctgctcaatgggcaggcggcctgccacatggcccagggccgctgggaggccgctgagggcctgctgcaggaggcgctagacaaggatagtggctacccagagacgctggtcaacctcatcgtcctgtcccagcacctgggcaagccccctgaggtgacaaaccgatacctgtcccagctgaaggatgcccacaggtcccatcccttcatcaaggagtaccaggccaaggagaacgactttgacaggctggtgctacagtacgctcccagcgcctga

SEQ ID NO: 4573 - protein, 308 aa, Homo sapiens
MAPPAPGPASGGSGEVDELFDVKNAFYIGSYQQCINEAQRVKLSSPERDVERDVFLYRAYLAQRKFGVVLDEIKPSSAPELQAVRMFADYLAHESRRDSIVAELDREMSRSVDVTNITFLLMAASIYLHDQNPDAALRALHQGDSLECTAMTVQILLKLDRLDLARKELKRMQDLDEDATLTQLATAWVSLATGGEKLQDAYYIFQEMADKCSPTLLLLNGQAACHMAQGRWEAAEGLLQEALDKDSGYPETLVNLIVLSQHLGKPPEVTNRYLSQLKDAHRSHPFIKEYQAKENDFDRLVLQYAPSA

SEQ ID NO: 4574 - DNA, 1140 bp, Bos taurus
  CDS (28)..(954)
gaattccgcgggtgagagggcagcgatatggctcctccggctcctggtccggcttctggcggctccggggaggtggacgagctgttcgacgtgaagaacgccttctacattggcagctaccagcagtgcatcaacgaggcgcagcgggtgaagccatccagcccggagagagatgtggagcgggatgtcttcctgtacagagcatacctggcccagaggaagtacggcgtggtgctggacgagatcaagccctcctccgccccggagctgcaggccgtgcgcatgtttgctgagtacctggccagccacagccggcgggatgcgatcgtggccgagctggaccgggagatgagccggagcgtggatgtgaccaacaccaccttcctgctcatggctgcctccatctatttctacgaccagaacccagatgcagccctgcgcacccttcaccagggggacagcctggagtgcatggccatgacagtgcagatcctgctgaagcttgaccgcctggaccttgcccggaaggagctgaagaagatgcaggaccaggacgaggacgctacgctcacccagctggccaccgcctgggtcagcctggctgcgggaggtgagaagctccaggacgcctactacatcttccaggagatggccgacaagtgttcgccgaccctgctgctgctcaatgggcaggcagcctgccacatggcgcagggccgctgggaggctgctgagggcgtactgcaggaggcactggacaaggacagcggccaccctgagacgctgataaacctcgttgtcctgtcccaacacctgggcaagcctcctgaggtgacaaaccgctacctgtcccagctgaaggacgcccacaggtcgcaccccttcatcaaggagtaccgggccaaggagaacgactttgaccggctggtgctgcagtatgcccccagcgcctgaggcctgccccagatgcacttccggaggagccgtgggaatgcgaggccagggctctgctgccctctctgctgggcacttgccctttggctagaagtacaggctggaagcccatcccagcctgccgtttttcaataaatgtctccattccaggaattccaaaaaaaaaaaaaaaaaaaaaaaaaaaaa

SEQ ID NO: 4575 - protein, 308 aa, Bos taurus; identical to SEQ ID NO: 4545

SEQ ID NO: 4576 - DNA, 1049 bp, Cricetulus griseus
  CDS (40)..(966)
gtgtctcccaggaagagcactgtatactggcatagcgacatggcgcctccggctcccggcgcggcctctggcggctccggagaggtagacgagctgttcgatgtgaagaacgctttctacatcggcagctaccagcagtgcatcaacgaggcgcagcgagtgaagctgtccagtcccgacagggaagtggagagggatgtctttctgtatagagcatacatcgcacagaggaagtatggtgtggtcctggacgagatcaagccctcctcggccccagagctccaggctgtgcgcatgtttgctgactaccttgccactgagaaccggagggatgccatcgtggtggagctggaccgtgagatgagcaggagtgtggatgtgaccaataccactttcctgctcatggctgcctctgtctacttccatgaccaaaacccagatgcagccctgcgcaccctgcaccagggcgacagcctcgagtgcatggccatgacgattcagatcctcctcaagctggacaggctggacctagcccggaaggagctgaagaagatgcaggaccaagatgaggatgccactctcacccagctagccactgcctgggtcaacctggctgtgggtggtgagaagctgcaagaagcctactacatcttccaggagctggctgacaagtgctctcccacgctgctgctgctcaatggccaggcagcctgccactcagcgcaaggccgctgggagactgccgagggtgtgctgcaggaggcactggacaaggacagtggccaccccgagaccctcatcaacctcattgtactgtcacagcacctaggcaagccccctgaggtgacaaaccgatacctgtcacagctgaaggatgcacacaggacccatcccttcatcaaggagtatcaggccaaggagaacgactttgaccgccttgcactgcaatatgcgcccagcgcctgaggtggagatacccctggtgaccccagcttcgtgccagacgtcgtcctcacttccttgtctgtcaataaagtctgtccatcttc

SEQ ID NO: 4577 - protein, 308 aa, Cricetulus griseus
MAPPAPGAASGGSGEVDELFDVKNAFYIGSYQQCINEAQRVKLSSPDREVERDVFLYRAYIAQRKYGVVLDEIKPSSAPELQAVRMFADYLATENRRDAIVVELDREMSRSVDVTNTTFLLMAASVYFHDQNPDAALRTLHQGDSLECMAMTIQILLKLDRLDLARKELKKMQDQDEDATLTQLATAWVNLAVGGEKLQEAYYIFQELADKCSPTLLLLNGQAACHSAQGRWETAEGVLQEALDKDSGHPETLINLIVLSQHLGKPPEVTNRYLSQLKDAHRTHPFIKEYQAKENDFDRLALQYAPSA

SEQ ID NO: 4578 - DNA, 1208 bp, Homo sapiens
  CDS (20)..(946)
ctggtgagaagacagcgaaatggcgcctccggcccccggcccggcctccggcggctccggggaggtagacgagctgttcgacgtaaagaacgccttctacatcggcagctaccagcagtgcataaacgaggcgcagcgggtgaagctgtcaagcccagagagagacgtggagagggacgtcttcctgtatagagcgtacctggcgcagaggaagttcggtgtggtcctggatgagatcaagccctcctcggcccctgagctccaggccgtgcgcatgtttgctgactacctcgcccacgagagtcggagggacagcatcgtggccgagctggaccgagagatgagcaggagcgtggacgtgaccaacaccaccttcctgctcatggccgcctccatctatctccacgaccagaacccggatgccgccctgcgtgcgctgcaccagggggacagcctggagtgcacagccatgacagtgcagatcctgctgaagctggaccgcctggacctcgcccggaaggagctgaagagaatgcaggacctggacgaggatgccaccctcacccagctcgccactgcctgggtcagcctggccacgggtggtgagaagctgcaggatgcctactacatcttccaggagatggctgacaagtgctcgcccaccctgctgctgctcaatgggcaggcggcctgccacatggcccagggccgctgggaggccgctgagggcctgctgcaggaggcgctagacaaggatagtggctacccggagacgctggtcaacctcatcgtcctgtcccagcacctgggcaagccccctgaggtgacaaaccgatacctgtcccagctgaaggatgcccacaggtcccatcccttcatcaaggagtaccaggccaaggagaacgactttgacaggctggtgctacagtacgctcccagcgcctgaggctggcccagagctgtcaggaccatgaagccaggacagaggccaggagccagccctgcagccctccccacccggcatccacctgcatcccctctgggggcaggagcccacccccagcacccccatctgttaataaatatctcaactccagggtgttccacctgaaaaaaaaaaaaaaaaaaaaaaaaaaaaaaaaaaaaaaaaaaaaaaaaaaaaaaaaaaaaaaaaaaaaaaaaaaaaaaaaaaaaaaaaaaaaaaaaaa

SEQ ID NO: 4579 - protein, 308 aa, Homo sapiens; identical to SEQ ID NO: 4541

SEQ ID NO: 4580 - DNA, 1056 bp, Mus musculus
  CDS (31)..(957)
cagaagaaggtttgttagaggtgcggtgacatggctcctccggttcctggcgcggtctctggcggctccggagaggtagatgagctgttcgacgtgaagaacgctttctacatcggcagctaccagcagtgcatcaacgaggctcagcgcgtgaagctctccagtcctgagcgggaagtagagagggatgtcttcctatacagagcatacctcgcacagaggaagtatggcgtggtcctggatgagatcaaaccctcctcggccccagaactccaggctgtgcgcatgtttgctgagtaccttgccagtgagaaccagagggacagcatcgtgctggagctggatcgggagatgagcaggagtgtggatgtgaccaataccactttcctgctcatggctgcctccatctacttccacgaccagaacccggatgcagccctgcgaaccctgcaccagggtgacggccttgagtgcatggccatgacgattcagatcctcctcaagctggacaggctggacctagcccggaaggagctgaagaagatgcaggaccaagatgaggacgccacccttacccagctagccactgcctgggtcaacctggctgtgggtggtgagaagctacaagaagcctactacatattccaagagctggccgacaagtgctcccccacactgctgctgctcaatggccaggcagcctgccactcggcacagggccgctgggagactgcagagggtgtgctgcaagaggcactggacaaggacagcggccaccctgagaccctcatcaatctcattgtactgtcacagcacctgggcaagccccctgaggtgacaaaccgatacttgtcacagctgaaggatgcacacagggcccaccccttcatcaaggagtaccaggccaaggagaacgatttcgatcgcctggcaatgcagtatgcgcccagtgcttaaagtggagatgccctggtgaccccaactgtgtgccgcgggatgctgtcctccctttgtgtgtggcaataaagtctatccattatcaaaaaaaaaaaaaaa

SEQ ID NO: 4581 - protein, 308 aa, Mus musculus; identical to SEQ ID NO: 4543

SEQ ID NO: 4582 - DNA, 891 bp, Saccharomyces cerevisiae
  CDS (1)..(891)
atggattactttaatatcaagcagaattactacacggggaacttcgtgcaatgtttgcaggaaatagagaagtttagcaaggtcacagataacaccttattattctacaaggcgaaaacccttttagctctaggccaatatcaatcacaagatcctacctctaagcttggcaaggtactagacttgtacgtccagttcttagatacaaaaaacattgaagaattagaaaatttgttaaaggataaacagaattcaccatatgaattatatctgttagccacggctcaagctatcttgggtgacttagataaaagtttggagacatgtgtagaagggattgacaatgacgaagcagaagggactacagaattattgctgcttgccatcgaagtcgctttgttaaacaacaacgtttcgaccgcgtccaccatctttgataactacactaatgctattgaggatactgtttccggtgacaacgaaatgattttaaacctggctgaatcgtacattaaatttgccacaaacaaagaaacggcaacatccaacttttactactatgaagagctatctcaaacctttcctacttggaaaactcaattgggattgctcaatttgcatttacagcaaagaaacatagctgaagctcagggtattgtcgagctattactatctgactactatagcgtcgaacaaaaagaaaacgccgtattgtacaaacctactttcttagcaaaccaaattacgcttgctcttatgcaaggtcttgatactgaagatttaacaaatcaattggttaaattggatcacgaacatgcattcatcaagcatcaccaagaaattgacgcaaaattcgatgaattagtgaggaaatatgatacgtccaactga

SEQ ID NO: 4583 - protein, 296 aa, Saccharomyces cerevisiae
MDYFNIKQNYYTGNFVQCLQEIEKFSKVTDNTLLFYKAKTLLALGQYQSQDPTSKLGKVLDLYVQFLDTKNIEELENLLKDKQNSPYELYLLATAQAILGDLDKSLETCVEGIDNDEAEGTTELLLLAIEVALLNNNVSTASTIFDNYTNAIEDTVSGDNEMILNLAESYIKFATNKETATSNFYYYEELSQTFPTWKTQLGLLNLHLQQRNIAEAQGIVELLLSDYYSVEQKENAVLYKPTFLANQITLALMQGLDTEDLTNQLVKLDHEHAFIKHHQEIDAKFDELVRKYDTSN

SEQ ID NO: 4584 - DNA, 24 bp, Artificial sequence
  primer
atgcagcgtcttcaatgggataaa

SEQ ID NO: 4585 - DNA, 25 bp, Artificial sequence
  primer
tcagttggacgtatcatatttcctc

SEQ ID NO: 4586 - protein, 328 aa, Artificial sequence
  consensus sequence
  Variant (2)..(3): Xaa in position 2 to 3 is any amino acid
  Variant (5)..(6): Xaa in position 5 to 6 is any amino acid
  Variant (9)..(9): Xaa in position 9 is any amino acid
  Variant (11)..(11): Xaa in position 11 is any amino acid
  Variant (13)..(34): Xaa in position 13 to 34 is any amino acid
  Variant (35)..(40): Xaa in position 35 to 40 is any or no amino acid
  Variant (42)..(44): Xaa in position 42 to 44 is any amino acid
  Variant (46)..(63): Xaa in position 46 to 63 is any amino acid
  Variant (64)..(76): Xaa in position 64 to 76 is any or no amino acid
  Variant (78)..(88): Xaa in position 78 to 88 is any amino acid
  Variant (89)..(90): Xaa in position 89 to 90 is any or no amino acid
  Variant (92)..(105): Xaa in position 92 to 105 is any amino acid
  Variant (106)..(116): Xaa in position 106 to 116 is any or no amino acid
  Variant (118)..(120): Xaa in position 118 to 120 is any amino acid
  Variant (122)..(141): Xaa in position 122 to 141 is any amino acid
  Variant (142)..(148): Xaa in position 142 to 148 is any or no amino acid
  Variant (150)..(155): Xaa in position 150 to 155 is any amino acid
  Variant (157)..(158): Xaa in position 157 to 158 is any amino acid
  Variant (160)..(166): Xaa in position 160 to 166 is any amino acid
  Variant (168)..(178): Xaa in position 168 to 178 is any amino acid
  Variant (181)..(185): Xaa in position 181 to 185 is any amino acid
  Variant (186)..(191): Xaa in position 186 to 191 is any or no amino acid
  Variant (194)..(201): Xaa in position 194 to 201 is any amino acid
  Variant (203)..(210): Xaa in position 203 to 210 is any amino acid
  Variant (211)..(211): Xaa in position 211 is any or no amino acid
  Variant (213)..(215): Xaa in position 213 to 215 is any amino acid
  Variant (217)..(228): Xaa in position 217 to 228 is any amino acid
  Variant (229)..(234): Xaa in position 229 to 234 is any or no amino acid
  Variant (236)..(242): Xaa in position 236 to 242 is any amino acid
  Variant (244)..(248): Xaa in position 244 to 248 is any amino acid
  Variant (250)..(264): Xaa in position 250 to 264 is any amino acid
  Variant (265)..(276): Xaa in position 265 to 276 is any or no amino acid
  Variant (278)..(278): Xaa in position 278 is any amino acid
  Variant (280)..(287): Xaa in position 280 to 287 is any amino acid
  Variant (289)..(295): Xaa in position 289 to 295 is any amino acid
  Variant (296)..(300): Xaa in position 296 to 300 is any or no amino acid
  Variant (302)..(307): Xaa in position 302 to 307 is any amino acid
  Variant (309)..(311): Xaa in position 309 to 311 is any amino acid
  Variant (313)..(320): Xaa in position 313 to 320 is any amino acid
  Variant (323)..(327): Xaa in position 323 to 327 is any amino acid
FXXKXXFYXGXYXXXXXXXXXXXXXXXXXXXXXXXXXXXXRXXXAXXXXXXXXXXXXXXXXXXXXXXXXXXXXXXXYXXXXXXXXXXXXXLXXXXXXXXXXXXXXXXXXXXXXXXXLXXXAXXXXXXXXXXXXXXXXXXXXXXXXXXXEXXXXXXQXXLXXXXXXXAXXXXXXXXXXXEDXXXXXXXXXXXLAXXXXXXXXGXXXXXXXXXYXXXEXXXXXXXXXXXXXXXXXXGXXXXXXXQXXXXXAXXXXXXXXXXXXXXXXXXXXXXXXXXXLXNXXXXXXXXGXXXXXXXXXXXXLXXXXXXHXXXKXXXXXXXXFDXXXXXY

SEQ ID NO: 4587 - DNA, 963 bp, Saccharomyces cerevisiae
  CDS (1)..(963)
atgttgggaaaagaagaagaacagcaatatggccagaatggtaagggaatggaaaatgaactaccctttatgaagaggccttggtttaaaaaggcttatgaaaatgctattgaatttcatgaaaaagacgaattgctggatgcaagagacaggctggagttatcgaaggcctatagatccattgctaaagctgagatgtggggtggttggcttgggttttcagctgtatttttaactccatttgcctatcgttactacaagaccaaggctattaaaggtgttaaggtgccgaggaattttgtcttgggtgtaatggctttattttttgctacaaattttgctggtaggtccatgtatacacgacagttgaacgaacgtgaccccacaggtgttttgaaggataactattccaacaaatatggtgacaacgactttggagcctttcaacatgatcaaacaaaagaaattccgagaaatcaaaggcagtacaatatgatgcgcttattagattcaggctccccctcaaggtggtcgatgtacttttacataacgtaccaaaatccggagagaagattgccagacccgaaagtcaaactgcagcaaatgaaaaaaggcggagtttttaacggctcgccctttatgaaccaaagggatcctataggattgtatcgtaataagggtagaaaatctcctgacccaattgaaggagagcaaaacgacagtcctgttctgtcttcctgggaaaaaatcaggaacggcgacaacagttcgtcttcatcatgggaaaatataaggaacaccagtagagatcagtcgcaggaatcagatgcttcagtggatcatgaatccgatatatttatctcaggattttctgacgatggtaatgctaccgataattcctcttctgatgacaaatatcagcgtttactgcagagcgggagatatggtgggaaccgctcctag

SEQ ID NO: 4588 - protein, 320 aa, Saccharomyces cerevisiae
MLGKEEEQQYGQNGKGMENELPFMKRPWFKKAYENAIEFHEKDELLDARDRLELSKAYRSIAKAEMWGGWLGFSAVFLTPFAYRYYKTKAIKGVKVPRNFVLGVMALFFATNFAGRSMYTRQLNERDPTGVLKDNYSNKYGDNDFGAFQHDQTKEIPRNQRQYNMMRLLDSGSPSRWSMYFYITYQNPERRLPDPKVKLQQMKKGGVFNGSPFMNQRDPIGLYRNKGRKSPDPIEGEQNDSPVLSSWEKIRNGDNSSSSSWENIRNTSRDQSQESDASVDHESDIFISGFSDDGNATDNSSSDDKYQRLLQSGRYGGNRS

SEQ ID NO: 4589 - DNA, 981 bp, Eremothecium gossypii
  CDS (1)..(981)
atggcaccaggcgatggtatagacggtggcggaggcggcgatgagtatatccctcgacagggaagccccaacgacaaggcactgggcagtttcacaggctacgggacgcagcagcaagcgtggtacaagtcagcgaagcgcttttacgagaaggatagcgtgctggaacctgctgaccgggagtggttaggccagacgtaccagtcggtcgcgcgggcacacttgtggggaaggctggtgggctttgccgcagggttcggggcggactttgcgtaccaggcaatgcggctgcgcagccggcagggagtcaatctgtcacggagcttcctgtttggggtggcgggcacggtggtgggaacgtaccagtgcgggctgtatgcttactggcgggcgctcgaaagcgtggcgccggtagagcgctacgacgacctcgaggaggatggcggcgcggcggcgcggcggcggcggcatgaggtgctgcagttgctgcgcgacagcatgcctgcggtgtgggcagactacttcaacaaaacggcgcgcgatccgtcgctgcgcatgccggacccacatgtgctctggcaggggattttgcgcggcgagcggccgaacatgccgatgtataggcacgagtcgctggcgcagtcgccaatggcgcggctgacatcgccaccagacctgcgacctgtgcagcatcctgcgggccccgcgcccgtggaagcgagcgcccggcctgcgaacgaagacccattttctgcggagattacggagcccagcaactcgctgtcggcgtgggaccgggtgcgccagcagaattcgatacctcagacatcaggcgacagctgggatcaggtacggaggcggtcgatgggcggcttttccgggcctgcaccgccaaacacagatagagagcagaatgagttcgatgagctgctcaacgccgagcggcgcggtatttgggacgagatagatggtcctaagtag

SEQ ID NO: 4590 - protein, 326 aa, Eremothecium gossypii
MAPGDGIDGGGGGDEYIPRQGSPNDKALGSFTGYGTQQQAWYKSAKRFYEKDSVLEPADREWLGQTYQSVARAHLWGRLVGFAAGFGADFAYQAMRLRSRQGVNLSRSFLFGVAGTVVGTYQCGLYAYWRALESVAPVERYDDLEEDGGAAARRRRHEVLQLLRDSMPAVWADYFNKTARDPSLRMPDPHVLWQGILRGERPNMPMYRHESLAQSPMARLTSPPDLRPVQHPAGPAPVEASARPANEDPFSAEITEPSNSLSAWDRVRQQNSIPQTSGDSWDQVRRRSMGGFSGPAPPNTDREQNEFDELLNAERRGIWDEIDGPK

SEQ ID NO: 4591 - DNA, 636 bp, Candida glabrata CBS138
  CDS (1)..(636)
atgtcagacagcagggaaataaaaaaaccatggtggttcaaaaaggccaaggaatgggctgatgagttctatacaagggatcagaaactagaagactctgatcgccgtgatctatccaaaaaatacgctactatcagtaaagctagcgtagttggcgcagcaacaggtctatcagctggtctgggaggtccctacgcatacaggtactataccactggtgcgctgaaaggtgttaaactgcctaggacaatcttactgggtgtagtctctatggttattatgagaaatgttgcggcaaagatagcctgggacaaagagttaaagaaactggatcctagcggtgaattgaagcaaaactacaaaagtgctcataagacagttgatgacgtctccttgtcagacaacagcacttctgttcaaaagaaatatggtatgatgaaattcttgaaatacaggacggcaccaaggtgggctatgtattttgaaggtacttatcaacaccccgacagaaagtttccaaacccagaccagatggtgcaggatctcaaaggtagccgcagagcatttccaccgtttttctcaaaggctgataaattttggcaccaaatagaccgtaaggataatgatcatacatag

SEQ ID NO: 4592 - protein, 211 aa, Candida glabrata CBS138
MSDSREIKKPWWFKKAKEWADEFYTRDQKLEDSDRRDLSKKYATISKASVVGAATGLSAGLGGPYAYRYYTTGALKGVKLPRTILLGVVSMVIMRNVAAKIAWDKELKKLDPSGELKQNYKSAHKTVDDVSLSDNSTSVQKKYGMMKFLKYRTAPRWAMYFEGTYQHPDRKFPNPDQMVQDLKGSRRAFPPFFSKADKFWHQIDRKDNDHT

SEQ ID NO: 4593 - DNA, 1020 bp, Candida glabrata CBS138
  CDS (1)..(1020)
atggcagacaataaaggtgatgtcaaggcaccaccttcctggctaaactctccagcatttcaggaatcctatcagaaagccatagagttttacgagaaagacgaagtcttagatgctcgagatcggttagagttatcaaagaaatatacctcaattgctagagcgcaatttataggtggatgggctggtttcagtgcagtatttatcaccccatttgcataccgttattacaagacaggtgctatcagaggagttaaagttcctagaaattttgtatttggcctagttgccatggttgtaagtacccagctttctggaagcatgatgtacaaaaaaaaattacaggaattggatcctacaggcgagcttgccgccaaatacgagtcaaaaattaacaaaaataaacaaagaaatcaatatggagattttgaagcggatgtacctactttaatagatgagaaccagaaccaaaatccaccttcgaggtaccagaaggaattcgatatgatgaacttattgaaaaatgggtctgctcccaaatgggctatgtatttctacacaacttaccaaaaccctagaagacgcttccctaatcctgtagagatgatggatgagctaaagaaagcacaaagacaaccattggcaccatttttacatcagcgcgatccatttggattatttaaggaccagaatgagaaaaacgatgaaaaaaacgatgcctatcctaacccgacaaaaaatgcgaaacctgctgataataaccaactaccactagaaccaccaaaaccagaactatcatggaataaagttcgccaacaaaattccggtaaagctaccactgcatgggacagaataagaaatggggaacacttaaatgacaataatgatggatttgatgatgatctggatccgtttgaggagtcaaaaagcaatgtagggccgacaatcaataaaccgaccaaagaggaattcaagaatcttgttgagcaagaaagaaatgggggttcgggcctattttaa

SEQ ID NO: 4594 - protein, 339 aa, Candida glabrata CBS138
MADNKGDVKAPPSWLNSPAFQESYQKAIEFYEKDEVLDARDRLELSKKYTSIARAQFIGGWAGFSAVFITPFAYRYYKTGAIRGVKVPRNFVFGLVAMVVSTQLSGSMMYKKKLQELDPTGELAAKYESKINKNKQRNQYGDFEADVPTLIDENQNQNPPSRYQKEFDMMNLLKNGSAPKWAMYFYTTYQNPRRRFPNPVEMMDELKKAQRQPLAPFLHQRDPFGLFKDQNEKNDEKNDAYPNPTKNAKPADNNQLPLEPPKPELSWNKVRQQNSGKATTAWDRIRNGEHLNDNNDGFDDDLDPFEESKSNVGPTINKPTKEEFKNLVEQERNGGSGLF

SEQ ID NO: 4595 - DNA, 894 bp, Kluyveromyces lactis NRRL Y-1140
  CDS (1)..(894)
atgcagggagataacgcagaaacgcaacaaaactcacagagatcattcccaatgggatttggtgtagataaagcgatgcaaaacccagctgttgtgaattcaccatggtttaaaaaagcgtatgacaatgcgttggaattttacgagaaggacaaagtattggatcctaaggatcgattggaactatctaagacctatctttcagtagcaagggcccaattatggtctgggtggggtgcatttgcaatagttactggtattcctttcgttaatcaatacatgaaaactggagctataaaagggacaaaagttactagagcttttgctctaggattcttatctatgtttattggcacacaagctggtggctccttggcgtacaaatctaaacttaaggctgctaaaccagacatactggaagatgatccgcatttgccaaaaagtagtcgacagaagcagtacgaaattctaaagctattaaacatgggaatgcctaccagatgggcgaactattattacatgacatataagaatccagaaagaagaattcctgatcccagacttgtaatggacaaattgaaggaaggcaattctggcgtgagaaactcctcagttttattcgacaacaaggacccaatggggctatatacaggacctcaatacgataagaaggaaggtgtgccaaagactggtgtctctcaaactaccccaccttctcaggtgactccgagggatgattatgatccattcaatgacacagagacacaggaacccactctgtcatcgtgggacaaaattagaaaggagaacaccgctgtagacacaaagaatggtaaatcatgggaagaaattagaaaacatgattatgataacagcgataccaattataaataa

SEQ ID NO: 4596 - protein, 297 aa, Kluyveromyces lactis NRRL Y-1140
MQGDNAETQQNSQRSFPMGFGVDKAMQNPAVVNSPWFKKAYDNALEFYEKDKVLDPKDRLELSKTYLSVARAQLWSGWGAFAIVTGIPFVNQYMKTGAIKGTKVTRAFALGFLSMFIGTQAGGSLAYKSKLKAAKPDILEDDPHLPKSSRQKQYEILKLLNMGMPTRWANYYYMTYKNPERRIPDPRLVMDKLKEGNSGVRNSSVLFDNKDPMGLYTGPQYDKKEGVPKTGVSQTTPPSQVTPRDDYDPFNDTETQEPTLSSWDKIRKENTAVDTKNGKSWEEIRKHDYDNSDTNYK

SEQ ID NO: 4597 - DNA, 25 bp, Artificial sequence
  primer
atgttgggaaaagaagaagaacagc

SEQ ID NO: 4598 - DNA, 22 bp, Artificial sequence
  primer
ctaggagcggttcccaccatat

SEQ ID NO: 4599 - protein, 217 aa, Artificial sequence
  consensus sequence
  Variant (2)..(4): Xaa in position 2 to 4 is any amino acid
  Variant (6)..(7): Xaa in position 6 to 7 is any amino acid
  Variant (9)..(9): Xaa in position 9 is any amino acid
  Variant (16)..(17): Xaa in position 16 to 17 is any amino acid
  Variant (19)..(21): Xaa in position 19 to 21 is any amino acid
  Variant (24)..(25): Xaa in position 24 to 25 is any amino acid
  Variant (29)..(29): Xaa in position 29 is any amino acid
  Variant (31)..(31): Xaa in position 31 is any amino acid
  Variant (33)..(33): Xaa in position 33 is any amino acid
  Variant (35)..(35): Xaa in position 35 is any amino acid
  Variant (37)..(39): Xaa in position 37 to 39 is any amino acid
  Variant (41)..(43): Xaa in position 41 to 43 is any amino acid
  Variant (46)..(46): Xaa in position 46 is any amino acid
  Variant (48)..(51): Xaa in position 48 to 51 is any amino acid
  Variant (56)..(56): Xaa in position 56 is any amino acid
  Variant (58)..(59): Xaa in position 58 to 59 is any amino acid
  Variant (61)..(61): Xaa in position 61 is any amino acid
  Variant (63)..(64): Xaa in position 63 to 64 is any amino acid
  Variant (68)..(69): Xaa in position 68 to 69 is any amino acid
  Variant (71)..(71): Xaa in position 71 is any amino acid
  Variant (73)..(74): Xaa in position 73 to 74 is any amino acid
  Variant (76)..(82): Xaa in position 76 to 82 is any amino acid
  Variant (84)..(86): Xaa in position 84 to 86 is any amino acid
  Variant (88)..(90): Xaa in position 88 to 90 is any amino acid
  Variant (92)..(94): Xaa in position 92 to 94 is any amino acid
  Variant (96)..(99): Xaa in position 96 to 99 is any amino acid
  Variant (101)..(114): Xaa in position 101 to 114 is any amino acid
  Variant (115)..(144): Xaa in position 115 to 144 is any or no amino acid
  Variant (146)..(152): Xaa in position 146 to 152 is any amino acid
  Variant (155)..(161): Xaa in position 155 to 161 is any amino acid
  Variant (164)..(164): Xaa in position 164 is any amino acid
  Variant (167)..(168): Xaa in position 167 to 168 is any amino acid
  Variant (171)..(172): Xaa in position 171 to 172 is any amino acid
  Variant (174)..(174): Xaa in position 174 is any amino acid
  Variant (177)..(177): Xaa in position 177 is any amino acid
  Variant (179)..(179): Xaa in position 179 is any amino acid
  Variant (181)..(187): Xaa in position 181 to 187 is any amino acid
  Variant (189)..(195): Xaa in position 189 to 195 is any amino acid
  Variant (196)..(206): Xaa in position 196 to 206 is any or no amino acid
  Variant (208)..(212): Xaa in position 208 to 212 is any amino acid
  Variant (215)..(216): Xaa in position 215 to 216 is any amino acid
FXXXYXXAXEFYEKDXXLXXXDRXXLSKXYXSXAXAXXXGXXXGFXAXXXXPFAYXYXXTXAXXGVKXXRXFXXGXXXXXXXTXXXGXXXYXXXLXXXXPXXXXXXXXXXXXXXXXXXXXXXXXXXXXXXXXXXXXXXXXXXXXQXXXXXXXLLXXXXXXXWAXYFXXTYXXPXRRXPXPXXXXXXXKXXXXXXXXXXXXXXXXXXPXXXXXDPXXL

SEQ ID NO: 4600 - DNA, 1629 bp, Saccharomyces cerevisiae
  CDS (1)..(1629)
atggcaggagcaacatcaagtataattcgggaaaatgattttgaggacgagcttgcggagagtatgcagtcatataatagagaaactgcagacaaattggctttgactaggaccgagagtgtaaagccagaaccggagataaccgctccgcctcactcacgcttttcccgttctttcaagacagttttaatagctcagtgcgctttcactgggtttttctccacaatagcaggtgccatctactatccagttctgagcgttatagaaagaaaattcgatattgacgaggaattggtgaatgtcactgttgtagtatattttgtatttcagggtcttgcccccacattcatgggcgggtttgccgattcactgggcaggagaccggtggtgcttgtcgcaatcgtcatttattttggtgcctgcatcggtcttgcttgtgctcaaacgtatgctcagatcattgtgctaagatgtctacaagccgccggtatttcacccgtgattgcgattaacagcggaataatgggagatgttactactagagccgagcgcggcgggtacgttggatatgttgctggatttcaagttctaggttctgcgttcggagcccttatcggtgccggattatcatctagatggggatggagagccatcttttggttcttagcaattggatctggcatttgcttcctagcctcgtttttaattttgccagaaacaaagaggaacatatccgggaatggttctgtcaccccaaaatcatacttaaatagagctcccattcttgttttgccaacagtaagaaaatcattgcatttggataatccagattacgaaacattggaactgcccacgcaactaaatctactggcgcccttcaagattttgaaagcttatgaaatttgtatacttatgctagtcgctggattacaatttgccatgtatactacgcaccttacggcgttatccacagctttgagtaaacaatatcacttgactgttgcaaaggtaggattatgctaccttccctccggtatctgcacattatgtagtattgtcattgctggaagatatttgaattggaattacaggcgcagattaaaatattaccaaaattggttgggcaagaagagatcaaagcttttagaagaacacgacaacgaccttaatttggtgcaacgtatcatagaaaatgatcccaaatacacctttaatatcttcaaggcgaggttgcaacccgcatttgttaccttgcttttaagcagtagcggattttgtgcgtacggatggtgcattactgtcaaagcccctttagcggccgttctttgcatgagtggatttgcgtcgctgttttccaattgcattttgactttttcaacaactctaatagttgatctttttcccacgaagacatctacggctacgggatgtttaaaccttttcagatgcattctatctgctgtgtttatagctgcattgagtaaaatggtagaaaaaatgaaattcggaggtgtttttacatttttgggggctttaacctcctcgtcatcgatcctcttatttattctcttgagaaaaggtaaagaattagcctttaagaggaaaaagcaagaactgggagtaaattaa

SEQ ID NO: 4601 - protein, 542 aa, Saccharomyces cerevisiae
MAGATSSIIRENDFEDELAESMQSYNRETADKLALTRTESVKPEPEITAPPHSRFSRSFKTVLIAQCAFTGFFSTIAGAIYYPVLSVIERKFDIDEELVNVTVVVYFVFQGLAPTFMGGFADSLGRRPVVLVAIVIYFGACIGLACAQTYAQIIVLRCLQAAGISPVIAINSGIMGDVTTRAERGGYVGYVAGFQVLGSAFGALIGAGLSSRWGWRAIFWFLAIGSGICFLASFLILPETKRNISGNGSVTPKSYLNRAPILVLPTVRKSLHLDNPDYETLELPTQLNLLAPFKILKAYEICILMLVAGLQFAMYTTHLTALSTALSKQYHLTVAKVGLCYLPSGICTLCSIVIAGRYLNWNYRRRLKYYQNWLGKKRSKLLEEHDNDLNLVQRIIENDPKYTFNIFKARLQPAFVTLLLSSSGFCAYGWCITVKAPLAAVLCMSGFASLFSNCILTFSTTLIVDLFPTKTSTATGCLNLFRCILSAVFIAALSKMVEKMKFGGVFTFLGALTSSSSILLFILLRKGKELAFKRKKQELGVN

SEQ ID NO: 4602 - DNA, 1458 bp, Schizosaccharomyces pombe 972h-
  CDS (1)..(1458)
atgaaagaagagtcaattttaaaaaaatgcgattcaagttccataaaacacgtgccatcaacccctctagagacaaactgtccagacaaatataaccctaaaacatggcctattcgtttaaaggtacgaaatgtcattgttatttcatcaatgacttttttgaatcaatacggtgatagtgtctttgcgccaagtatttccaatattgcagagcaatttcatgcttcgcgaaccttggtcactctaggagccacactttatacattagggatattatttggaaatttaatatttgctccacttagtgaacagtttggaagaagacctatatatttaattggttatagcgtatttgcacttcttcagattcccattgctctgtcagtaaatttggcaatgtttttagtatttcgttttttttctggacttttcggatccgttggtttatcaaatggatctggctcactggctgatctgtttgaaaaaaaagatcgaggaaaatatatggtgatttattttaccgttctctcgattggaccaggaattgcgcctataatttctgggtttattagccaaagttcaattggttggcaatgggagttttggattctattaattttatcagggttcaatttattttgggcctttttattactaaaggaaacatatccccctgttctcaatcgcaagaaatttgaaaaatacggcgaaataggagaaaatgaaccagtagcgttgcgtctcacaggtaagcaactgcttataaaattgttaattttattgagtatgaaaaagccaatttctattttactttcccaacccattttaatatgtgtagcctgtaccattggttctatatatggaatgataaacttggtgcttatagctttttccgaagtttggaaatcttcatatgatttcagtcctgggattagtggtttgatgtacatatccattacccttggacttttttcagcagttttcattgccatgcctatcaaccaaaagttttattcatatctggtaaagcgaaatggtggtgaaggtgaacctgaatttcgacttcctatgggttttattggaatcacactttttgaaataggaattttacttttcggttggactgcaagatataagattttttggtttgtgccaacaattggatcagccattatgggtggtgggtacattatgacttccaatcccttaaacatgtatgtggtagattcatatggaatttactcagccagtgcgtcagcgggtgtaaaaatatttcaactattattaggagccatctttccattatttgctgaaagtctatttcgtcgactgaactacggatgggggtgtactttacttgcctttattttattagcttgtggctgtagtcttccaatcttattcaagtatggaaaacaaattagaaatctacgaccatttgacccctcaaaatactag

SEQ ID NO: 4603 - protein, 485 aa, Schizosaccharomyces pombe 972h-
MKEESILKKCDSSSIKHVPSTPLETNCPDKYNPKTWPIRLKVRNVIVISSMTFLNQYGDSVFAPSISNIAEQFHASRTLVTLGATLYTLGILFGNLIFAPLSEQFGRRPIYLIGYSVFALLQIPIALSVNLAMFLVFRFFSGLFGSVGLSNGSGSLADLFEKKDRGKYMVIYFTVLSIGPGIAPIISGFISQSSIGWQWEFWILLILSGFNLFWAFLLLKETYPPVLNRKKFEKYGEIGENEPVALRLTGKQLLIKLLILLSMKKPISILLSQPILICVACTIGSIYGMINLVLIAFSEVWKSSYDFSPGISGLMYISITLGLFSAVFIAMPINQKFYSYLVKRNGGEGEPEFRLPMGFIGITLFEIGILLFGWTARYKIFWFVPTIGSAIMGGGYIMTSNPLNMYVVDSYGIYSASASAGVKIFQLLLGAIFPLFAESLFRRLNYGWGCTLLAFILLACGCSLPILFKYGKQIRNLRPFDPSKY

SEQ ID NO: 4604 - DNA, 1722 bp, Bradyrhizobium japonicum USDA 110
  CDS (1)..(1722): transl_table=11
gtgttcgggatgacccggcggcgggatgcacccatgcgccgcggtgcctgcctgggaagaactttgctgtctacattggactgcatagaacgaatccttcgcggcgttgcgccgcctcaacggcttccgatcgagatgaacaagttcgaccggcagagcagttctgccgacatccaggcgttgcccgacgacattgccgaagagctgtcccgccttccgagcgaggtcatcagcgtcgatgacgcgccgtccatcgcgccgccggtgccgctgacctccgacgaggtccgcaccatcgtgatcagcctgatgctgacgatgtttctggcagccctcgaccagaccatcgtcgcgaccgcgctgccgaccatcgggcgccagttcaacgacgtctccaatctgtcctgggtcatcacggcctatctgctcgcctcgaccgcggtcgcaccggtgttcggcacgctgagcgacatctacggccgccgcgtcatgatcatcatctcgctcagcctgttcgtcgccggctcggtgctgtgcgcgatcgcgccgaacatgccgatgctgatcctggcgcgcggtctccagggactgggtggcggcggcatcatgcctgtcgtgcagacggtgatctccgacgtcgtgagcccgcgcgagcgcggccagtaccaggcctatttctccagcgtctggatggtgggcggcatcctcggcccggtcatcggaggcgtgttcgccgagcatctgcactggtcgatgatcttctggatcaatctgccgctcgccgccgcggcgatcgcgatgctgctgccgaagatgaagaagattccggtgttccaccgcaagcgcaaggtcgactggctcggcggcattctgctgatggcctccgcggtcgtcttcatgctggtgctgacctggggcggcacgcgctatccgtggctctcgccgaccgtgcttgcgatggtgggcggcgctgtcgcgctcgcggtcaccttcgtctggcacgcgcgccgcgccgacgagccgttcctgccgctgaagctgctgacgggatcggtggcgccgttcgcgctgacggccggcggctgcgggctcggcgcgatcacgggcctcaccgtgcagctcccgctctattacgagtcggtctaccatctcagcgccagcgaggcggggcttgcgctgattccgctcgcggcggtctcgacctgcggcgcagcaatcgccggccgcaccatggcgcgcgccaagcactacaagcgcgtcgccattgtcggcacgtcctgggccgcgatttgcgcgctgggcctgacgctcaccaccttgccgctctggggcctgctgacgctgatggccgcgttcgcgctcgggctcggcacgaccttcccggtctgcgtggtctcgctgcagaattcggtcgcgcgtccgcaggtcggcaccatcaccggcgcgatgaacttcttccgctcgctgatgtcctcgttcacggtcgcggccttcgccgccatcctgctgatcgcgctcggcaccgacattccgctcgcgggcgagcatcacgcggccggcggcatccccgcgatccccgccgacgacatgcggcacgcgttccgctacgtcttcggcgccgcgaccgcgctgatgaccaccgcctcgctctgcctgatcatgatggaggagcggccgctggccggcccgaccgtcacgcagcaggtggagatggcggagtag

SEQ ID NO: 4605 - protein, 573 aa, Bradyrhizobium japonicum USDA 110
MFGMTRRRDAPMRRGACLGRTLLSTLDCIERILRGVAPPQRLPIEMNKFDRQSSSADIQALPDDIAEELSRLPSEVISVDDAPSIAPPVPLTSDEVRTIVISLMLTMFLAALDQTIVATALPTIGRQFNDVSNLSWVITAYLLASTAVAPVFGTLSDIYGRRVMIIISLSLFVAGSVLCAIAPNMPMLILARGLQGLGGGGIMPVVQTVISDVVSPRERGQYQAYFSSVWMVGGILGPVIGGVFAEHLHWSMIFWINLPLAAAAIAMLLPKMKKIPVFHRKRKVDWLGGILLMASAVVFMLVLTWGGTRYPWLSPTVLAMVGGAVALAVTFVWHARRADEPFLPLKLLTGSVAPFALTAGGCGLGAITGLTVQLPLYYESVYHLSASEAGLALIPLAAVSTCGAAIAGRTMARAKHYKRVAIVGTSWAAICALGLTLTTLPLWGLLTLMAAFALGLGTTFPVCVVSLQNSVARPQVGTITGAMNFFRSLMSSFTVAAFAAILLIALGTDIPLAGEHHAAGGIPAIPADDMRHAFRYVFGAATALMTTASLCLIMMEERPLAGPTVTQQVEMAE

SEQ ID NO: 4606 - DNA, 1605 bp, Eremothecium gossypii
  CDS (1)..(1605)
atgttgacgaggatttcgagcacagattcttcgccgagggccaaggaagacgttccacagctgaaactgttgaaagaggccgatgatggactggtagacagttcttccagctccccagagcccgatgagaagatcggggaagcatgtgtatcaacttctgaaatcagcaaaattccgcactcgatgcttcgatactcgcagaagtggatgatggtagccctgctgacatcagcaggattttggtcatcgctgggctcaccggcggtatatccagcgctgcgaaacctacagagggaattcggggtaagcgaagacttggtgaatattgcagtggttgtttatttgcttttccagggggttgcaccgaccgtatgcagtggattggcggacacgtacggtcggcgcccggtgattttgatgggaatgctaatattcattgtttcctcaataggcatcgcatgctcgaactctttcgccttggtgatcgcgcttcgctgcatccaaagttccggcatctccccaataatagctatcaactccggggttgtcggcgattttacactaaaatcggagagaggaacgtttattggcgctgtctctgggttaacgctactaggacaagcatttggttccctaataggagcatcattgacagcagcctacaactggagagcagttttttggttcatgactatcggctgtggagtatgctttctggcaaacttcctcttccttccggaaacgcaccgttgtattgttgggaacctctcgctgaaacccaaaaggaatattaacttctcgcctgtgttactgcttcctgtgatacgaagacaattcagcttacagcatccacattattctagcctcgatgataccgtggcaggcctcgacattgtcgccgccttaaaaatcattgcatgtcccgagatcctgctcaccctattaccagcaggactgcaattttctctctggactctttccctcacatcgctatcgcaggccttgcagagtgatccgtataactatccgctcacgactgtaggcctatgttacttgccatccggaatctgcggcctactgggatctttcctgactggcaagttgatagacatctggtatagatactttgccgataggtttcagcgccgtagcgcaaattctagtggccccagcgcaccgtttaatgtccttgaggccagaatagtggctggattgcctcagaattttatttcggtcatggctttcattatattcggctggtccattcagggcggctggcacatctcagtccctttggtcgcatccggtgttggtacgttctgcgttatgagtacactcagcacttcgagtacgctgctcattgacttgtatccgaatagagcttcgactgcctcaagttgttacaactttattaggtgcacgctaagtgccttattcctggcagtctttgcaagaatgaaagcgtcaatgactattggtggtacatttacctttctgtgcagtctaatatttgttggtaattgcgctttgattttcccgatgaaatatggaatgacttggcgtgataggcggttgcggcgcgcagctgaagcgtcctgtaattaa

SEQ ID NO: 4607 - protein, 534 aa, Eremothecium gossypii
MLTRISSTDSSPRAKEDVPQLKLLKEADDGLVDSSSSSPEPDEKIGEACVSTSEISKIPHSMLRYSQKWMMVALLTSAGFWSSLGSPAVYPALRNLQREFGVSEDLVNIAVVVYLLFQGVAPTVCSGLADTYGRRPVILMGMLIFIVSSIGIACSNSFALVIALRCIQSSGISPIIAINSGVVGDFTLKSERGTFIGAVSGLTLLGQAFGSLIGASLTAAYNWRAVFWFMTIGCGVCFLANFLFLPETHRCIVGNLSLKPKRNINFSPVLLLPVIRRQFSLQHPHYSSLDDTVAGLDIVAALKIIACPEILLTLLPAGLQFSLWTLSLTSLSQALQSDPYNYPLTTVGLCYLPSGICGLLGSFLTGKLIDIWYRYFADRFQRRSANSSGPSAPFNVLEARIVAGLPQNFISVMAFIIFGWSIQGGWHISVPLVASGVGTFCVMSTLSTSSTLLIDLYPNRASTASSCYNFIRCTLSALFLAVFARMKASMTIGGTFTFLCSLIFVGNCALIFPMKYGMTWRDRRLRRAAEASCN

SEQ ID NO: 4608 - DNA, 1854 bp, Neurospora crassa
  CDS (1)..(1854)
atggcggagccagatttgaaagaccaggtcgcggactcgcggaggtccacgtcgacggccgctgccacggatacgctcactcaagactcagcgcgtacttcaatgcaggcgaatcaccaggagaatcaacatcagtttgacgctggacaaggagcgagccatgattatagtgagaagcagcaagagcaagccggacaagcttcacaaccagtcaccgaactcacgccagctgtaccgatttccgccgaacccgtgtccctcctgaccggcgaacccccgagcgaagcacctgtcgtcgagcagcctcccaagtactcgattcacccagcatgggccaagcgcctcatcatcttcggcgcctccatctccgccttcttctcgcccctcaccgctcagatctacctcccagctctgcctaccgtagctgacgacttccatgttaccgcgtccaaggcgaccctgacggtgacaacctacatgatcttccaaggcatcacgcccatgtttcttggtggattggcagattcagcgggccgtcgacctgcctacgtcatctgctttgtcatatacatcggggccaatatcggtctggcgctgtgcaagaactttacgagtctcttgattctccgcatgctgcagagtgcagggtcgagcaccaccattgctctttgccaagccacgctggcagatatcaccaccagtgcggaacgaggacaatacgtcggtatcacggcgcttcctcaagtcttggctccgagtctcggtccagtggtaggcggtctgttgaccaactatctcggctggcgctggatcttctggctgctaaccatcatggctggcgttaaccttttgggcttgctcatgttcttccccgagacttgccgcaagatcgtaggcgatggcagtggtcgcaaggattcgcactggatatactggactggctggcagctactccgcgacaaccttgcccgtcgcgaacgccgcagggagcggaagcgtcgcgaggctgaactttccaaggaagacccgtccaaccacaacaatggcctccacctaaccgtctcaactgcttctgccccccgtcagaagatcaagctcagccttaccacacctaatatcctccagtctctcacacttctcttccgttccaaacagctcgccatcctcctctcctactcagccatcgtcttctccggcttctacgccatcggaaccgccatgcctaaccagctctcgaccctttacgggcttaacgacatcgaaatcggcctcatgtacctacccatggccggtggttccattgtcacagcctttgttattggcagggttatcacatggaactttcaccgccatgccaggcgcctgggtatggtaatcgacagaagccggcagacggatctgagtgccttccccattgagcgagcgagactggaggtgggactgccgctgttggcgctgaccagtgctgtggtgatctcatggggctgggccatgcagagcaagaccagtctggcggcgccgtgtgttttgctgttccttctgggagtgggcatgattggattcaacaacacggtcagcaccctggttgcggatatctacccgggcaaggccggagcggcgacggcagcaaataacttgacgagatgtttgcttggagcggcaagcagtgcggtgatcctgccgatggtcgaaggaataggaagtggatgggcgtataccatctttggaggattgtatgtgttctttgcgccgttgttgctggtgcttatgagcaggggaatgaggtggagggcggaggagaagtggaaggaggaggccaaggaggagaagagaaagcaagaacagaaagcgtga

SEQ ID NO: 4609 - protein, 617 aa, Neurospora crassa
MAEPDLKDQVADSRRSTSTAAATDTLTQDSARTSMQANHQENQHQFDAGQGASHDYSEKQQEQAGQASQPVTELTPAVPISAEPVSLLTGEPPSEAPVVEQPPKYSIHPAWAKRLIIFGASISAFFSPLTAQIYLPALPTVADDFHVTASKATLTVTTYMIFQGITPMFLGGLADSAGRRPAYVICFVIYIGANIGLALCKNFTSLLILRMLQSAGSSTTIALCQATLADITTSAERGQYVGITALPQVLAPSLGPVVGGLLTNYLGWRWIFWLLTIMAGVNLLGLLMFFPETCRKIVGDGSGRKDSHWIYWTGWQLLRDNLARRERRRERKRREAELSKEDPSNHNNGLHLTVSTASAPRQKIKLSLTTPNILQSLTLLFRSKQLAILLSYSAIVFSGFYAIGTAMPNQLSTLYGLNDIEIGLMYLPMAGGSIVTAFVIGRVITWNFHRHARRLGMVIDRSRQTDLSAFPIERARLEVGLPLLALTSAVVISWGWAMQSKTSLAAPCVLLFLLGVGMIGFNNTVSTLVADIYPGKAGAATAANNLTRCLLGAASSAVILPMVEGIGSGWAYTIFGGLYVFFAPLLLVLMSRGMRWRAEEKWKEEAKEEKRKQEQKA

SEQ ID NO: 4610 - DNA, 1728 bp, Neurospora crassa
  CDS (1)..(1728)
atggacgaacgacatccacaaaaagaatccccaaggccagtggctctcaccaatgcacaggaaaccctcaccggaggagtggaagagaagaagggcgtgaaggagcaagtgacttcttcaagttctgataccgacggacctgaagttgtcgacagctccgatcatgaaccagggccagaacaggacaagcctcatcctggtggcgactccgccttgtctcagccctatcgcactctttcttcgtcccgggtccatacggcttgtgttgtcgcaagggcggatcgtagggggctcttggctagcttcgctttcattcccgaggttgagcgtcctgttgagtacaagaacaagacaaaatggatgatcacgaccatagttgccctcgcagctgctggcgccccttttggcagtggcatctttcttcctgctcttgaactgatggctgatgacctacatacatcgccaactatcaccaacttggccgttgccttgtacatgctagctatgtcaatatttcccctctggtggtcatcattctcggaaacgttaggccgacggacgatttacattgcctctttcacgttgtttgttgtcttttcggtcctgagtgctgtcagcgtaaatactgccatgcttgtgataatgcgccttcttgctggaggagcatcagcatccgtacaagccgtcggcgctggcactatcgccgacatttggaagccagcagagcgcggacgagccatgggaatcttctatctcggccccctaatcggccctctgttgtcccccatcatcggcggagcactttcccaggggttcgggtggcgatcaaccatgtggttcctcgccatctacggcagctgcactttgatcctgatcatcttcgccctacccgagacgctcaccaagcgcaagccccttccaccgccgcccgctgagaacaacgagctcaagcgtgtctcgacacgccagtctgtcgccgaacactctaaacgcgttggcgctatcactaggcgcttcatcatcgaacctctcgaggtactcctttacctgcgatatcccccagttctggtgtctgtttactctgccgccatagcgttcggtgctctcttcatcctcaatatctctattcagacaaccttccattcagcaccctacggttactccaccattatcgtcggcctcttgtatttgccatcttctctcggctacattgttgcctcacttttcggtggacgatggaccgacaagattatgatgcgtgaagcccgcaatgctggccgctacgatgctgatggcaaccccatcttcctgcccgaggaccgcatgcgtgagaacatctggttagctgccagtatgtatcccgccgccatggtttggttcggttggacggcgcagcacggtgtctattggatcgtgccctgtgttgccaacttcttcttcgggtgcgggtccatgctcgtctttggtgccgtcacgaccatgttgaccgaattcatgccgcaccggagcagcagcggtgtggccgtgaacaactttgtgagaaatattttctcgtgcgtgggcacaatcgtcgctcagccgctcatcaacgccatggggattgggtggttgtgcaccatgatcgggttgtttgcgtgggttactggcaacctggcaatttggctgttgaagaggaacgcggctaagtggagggagagtatggataacgcgttgaacacgaagacttga

SEQ ID NO: 4611 - protein, 575 aa, Neurospora crassa
MDERHPQKESPRPVALTNAQETLTGGVEEKKGVKEQVTSSSSDTDGPEVVDSSDHEPGPEQDKPHPGGDSALSQPYRTLSSSRVHTACVVARADRRGLLASFAFIPEVERPVEYKNKTKWMITTIVALAAAGAPFGSGIFLPALELMADDLHTSPTITNLAVALYMLAMSIFPLWWSSFSETLGRRTIYIASFTLFVVFSVLSAVSVNTAMLVIMRLLAGGASASVQAVGAGTIADIWKPAERGRAMGIFYLGPLIGPLLSPIIGGALSQGFGWRSTMWFLAIYGSCTLILIIFALPETLTKRKPLPPPPAENNELKRVSTRQSVAEHSKRVGAITRRFIIEPLEVLLYLRYPPVLVSVYSAAIAFGALFILNISIQTTFHSAPYGYSTIIVGLLYLPSSLGYIVASLFGGRWTDKIMMREARNAGRYDADGNPIFLPEDRMRENIWLAASMYPAAMVWFGWTAQHGVYWIVPCVANFFFGCGSMLVFGAVTTMLTEFMPHRSSSGVAVNNFVRNIFSCVGTIVAQPLINAMGIGWLCTMIGLFAWVTGNLAIWLLKRNAAKWRESMDNALNTKT

SEQ ID NO: 4612 - DNA, 1659 bp, Magnaporthe grisea 70-15
  CDS (1)..(1659)
atggcgaacaatggtgaagcaccccccgagtctacatctcagacgtcactcgacgactctgccaaggctctgcaagccagtcctgtaggtgggccgggcgtctggagcacttccggcacatcgacaccaaagacggacgacccgtcacagtctgacgatgggccgcccacagaccttgaaggtctgcatcgagagtcgaccggtcccgtgtatagcactttcagcacgctgaacaaaaaatggataatcggcatggtctccttctccagcttcatctccccgatgactgcaaacatctacttcccatccatcacccctatagccaacgagttgggcgtttcaatcgggctgatgaaccttaccatcacgacctacatgatcatgcaggggctctcgcccaccatcatcggagacctgggtgacatgaccggcagaaggccagcctttatcattgccttcaccatctacatagtcgccaacatcggtctcgccctgcaaagcaactatgctgccctcctggtgcttcgatgcgtccaaggtgctggcagcagcgggaccttggcactgggctttgcggtcgtcgccgacttggctgtgagcgctgagaggggcaaatacatgggctttgtaggtgctggtattcaagtcggaccgtccatcggtcctgtgataggaggagcccttagcgagtatcttggatggcgttccatcttttggttctgtgcaatcctcaccatcgtttggttgatcccctttatcctagcggtacccgagacatgccgcaaggtcgttggcaatggttccgtccctccccaaggctggaacaggactttggtcgactacatccaggagcggcgacacccgactgatcgtccagagacccccaagaggaagttctacttcccaaatccgttcaagacgcttgcggtcgtctttgagaaggaccttgggcttcttttgatgctcaacgcgtccgtctacctcatgttcatgttgatcctcgccaccatgtcgccgcagctacatagcatatacaatctgaacgagtttcaggttggtctctgctatctcccatatggttttggctgcttcttttcggccatcgtccaaggatatctcctcgactggaactatagacgaaccgctcgaaaggtcggcatgaagatcgacatgaagcgcggcgacgacctcacaaagttccccatcgaaaaggccaggatccagcttattgcgccaatgttagggatagggatcatttccactatctgctacagctggattatgcagaccgaacaggccctcggcttggtgttgtttttcggcttcctcatcggcgtcaccgtcaacggatccttctccatgatgaacacgctcattgtggacctgtacacagatgcccccgcgacggctgtggcggctaacaacctattccgctgctccttgggcgccatctgcatgtccttcatcgagaacatggtccaaacgatgggcaggggctggtgctatactttttgggcactgctaacggcctccctaatgcctattctttggctcttggtgcagcgcgggccacgatggagagaagagcgtcgattgcgtaaggagaaaatagcgcaaaaagaattggcgcaacaggatgcagagaagagtgggaaatga

SEQ ID NO: 4613 - protein, 552 aa, Magnaporthe grisea 70-15
MANNGEAPPESTSQTSLDDSAKALQASPVGGPGVWSTSGTSTPKTDDPSQSDDGPPTDLEGLHRESTGPVYSTFSTLNKKWIIGMVSFSSFISPMTANIYFPSITPIANELGVSIGLMNLTITTYMIMQGLSPTIIGDLGDMTGRRPAFIIAFTIYIVANIGLALQSNYAALLVLRCVQGAGSSGTLALGFAVVADLAVSAERGKYMGFVGAGIQVGPSIGPVIGGALSEYLGWRSIFWFCAILTIVWLIPFILAVPETCRKVVGNGSVPPQGWNRTLVDYIQERRHPTDRPETPKRKFYFPNPFKTLAVVFEKDLGLLLMLNASVYLMFMLILATMSPQLHSIYNLNEFQVGLCYLPYGFGCFFSAIVQGYLLDWNYRRTARKVGMKIDMKRGDDLTKFPIEKARIQLIAPMLGIGIISTICYSWIMQTEQALGLVLFFGFLIGVTVNGSFSMMNTLIVDLYTDAPATAVAANNLFRCSLGAICMSFIENMVQTMGRGWCYTFWALLTASLMPILWLLVQRGPRWREERRLRKEKIAQKELAQQDAEKSGK

SEQ ID NO: 4614 - DNA, 1698 bp, Magnaporthe grisea 70-15
  CDS (1)..(1698)
atggagaagtctggtgaaaaggcagcccttgactccttgggccggccctctagcgtcggggcatcacagcctgcaaatgtcgaatatgacacctcgacgcccgagggatccgtgaatgaaaagtcgcgtcggtcttcgagggaatgggcagaagaatcttctgaatcccaccaagccaacggtgaagaagtcggagagggatctgacgctgagcctcaaacctctgcgaccgcacctcgagcggcatcgcgtgcgtcttcggcgaggtcgagagcgctcagtgtggtccctacgagcaggaggcgcggcttgtttgcacgctttgccgtctttgtaccagaagtttatcggccattcgattactcaaacaagacgaagtggaccattacgttcattgttgccttggctgcctcggctgctcccatggggtctggtattctttaccctgtacttacagatgtttcggttgatctcaagacgtcaccgactatcgtaaacttgacagtcgctgtatacgctcttgctatggctattttcccaatatggtggtcttctttttcagaaacctttggtcgtcgaactgtatatattgtttcttttggccttggcgtagtcttttcaatattgagtgccgttagtagcaacatcgcaatgcttattgtgatgcgaatgctcggcggaggcgcctcggcgtcggtccaggccgtgggggctggtacgattgctgacatctgggagatcagagagagaggaaaggccatgggaatgttttatctcggtccattgatgggtcctctgcttgctcccattgtcggaggtgccctcgcacagaaatggaattggagaagtaccatgtggaggaaagagcccgagcagttgccacgaacagtcgaccgcaactccacagaagatcagccgcagctctctcgtgcgacgacacgacagtctatcgcgaagagcaccaagcactcggtcaagacagttaagcgctatgttttcgaccctctgaaagtgctagggacccttcggtttcttcccatcgccgtcacggtttttatcgcagccgtcacattcggctcgctgttcatattgaacatatcaattcagtcatcctactccaaagcgccctatggcttctccacactcatagtcggtcttttgtacatccccagctcgctgggttacgtcatcagctccatctttggcggacgttggatcgactacataatggcgcgtgaggcgcgcaaggcagagcggtacgatgcagacggaaagctcatctacctacccgaagaccgcatgtgcgagaacgcatggctggcggccgcgctctaccccagcgcactcatcatgtttggctggaccatcgacaagggcctgcactgggcggtgccgagcgtcgccagttttctgttcggcctgagcagcatgctgatcttttcagccgcaaccacgatgctcacagagtttatgccgtccaagtcgtcaagcggcatcgccgtcaataattttgtcagaaacatcttttcctgcgtggggaccatcgtcacgcagccgctcatcgacgcaatgggaataggatggctgtgtaccatgattgggctcttggccctgatattgggtttgggtagtgtgtattcgctcaagaagtttgggcctaaatggagaaaagagatggaccggaagctggccatataa

SEQ ID NO: 4615 - protein, 565 aa, Magnaporthe grisea 70-15
MEKSGEKAALDSLGRPSSVGASQPANVEYDTSTPEGSVNEKSRRSSREWAEESSESHQANGEEVGEGSDAEPQTSATAPRAASRASSARSRALSVVPTSRRRGLFARFAVFVPEVYRPFDYSNKTKWTITFIVALAASAAPMGSGILYPVLTDVSVDLKTSPTIVNLTVAVYALAMAIFPIWWSSFSETFGRRTVYIVSFGLGVVFSILSAVSSNIAMLIVMRMLGGGASASVQAVGAGTIADIWEIRERGKAMGMFYLGPLMGPLLAPIVGGALAQKWNWRSTMWRKEPEQLPRTVDRNSTEDQPQLSRATTRQSIAKSTKHSVKTVKRYVFDPLKVLGTLRFLPIAVTVFIAAVTFGSLFILNISIQSSYSKAPYGFSTLIVGLLYIPSSLGYVISSIFGGRWIDYIMAREARKAERYDADGKLIYLPEDRMCENAWLAAALYPSALIMFGWTIDKGLHWAVPSVASFLFGLSSMLIFSAATTMLTEFMPSKSSSGIAVNNFVRNIFSCVGTIVTQPLIDAMGIGWLCTMIGLLALILGLGSVYSLKKFGPKWRKEMDRKLAI

SEQ ID NO: 4616 - DNA, 1503 bp, Magnaporthe grisea 70-15
  CDS (1)..(1503)
atgtcggcagatccagctgccacggcacaaaagacggagccaggcagtctgccagaccagccaaaattggaatcacccacaaacgaagcaacagcgaccgacgacgaaccatggtcgatctggtctagccgcggcaagcgcgccatcctgctcggggcgtcctttgcagcgatgctctcacccctcgcgagcaacatatactttccggccctcgagcccatcgcacacgacctcggcgtctcggcgtcgctcgtcaacatgtccatctcgacctttatcctgctgcagggcatcgcgccaatctttaccgcgcagctggcagatacggccgggaggcgcccggtctatctggtgtgcatagtcgtctttctggccgcaaacgtgggcctcggggtgcaaaactcgtacacggccctgctggtcctccgctgcgtgcagagcgccggcagctccggggtccaggcgctctccaatgccgtcgccgccgacatcgccacgcccgccgagcgcgggagctacgtctcgtttgccgccgcagcgcccatattggccacgaccctaggccccatcgtcggtggcttgctggcgcagtttgcgggctggcactcggtcttttggttcctggccgctgtcgcgggcgttttgctcctgccgatggcggcgtttttccccgagacgtgccgcaacgtcgtcggcaacgggtcgatcccgccgccaaagtggagcaggtgctacaccaactcgcgccgcgagctgcgaggcaggggcgggccgcagacggagccgccgcggatcaaggtcggattccccaacccgctgcggcccgtcatgctcctgtttgaccgcgagtgctgctggccgctgctctacagcgccatcgtcgcgagccccttttactcgacgctggcgctgatcccctcgacctttacgcgcatctacggctacgacgagctgcagatctcgctgtgctacctgccgtttggcgtgggcgcgctggccggcgcgctggccgtgggccgcgtcatggactcgaacttccagcggcacgcggcgcggctgggcatcgcggtggacaagacgcggcgcatggatctggggaggcacgggtcgttcccgacggcgcgggcgcggctcgaggtggcggtgccgacggtggtgctcagcacggggttcagcgtggcctttggctggatgctgcagcgccgcgtgcacgtggccggcccgctcgtcgtgctcttcctcgtcggcttctgcgccgtcgccagcctcaactgcatcgccgccctgctgctcgacctcaaccccaccagggccggcaccgtcaccgcctccaacaacctgctcaggtgcctcctcggcaccgccgtcaccagcgccaccgtgcccctggtccaggccgtcggcgtcggttggaccctgaccgtctttggtgggctgaatgcgctttttatgccgctgctgtggcatatcatgaggcaaggctcaggccgtcgcgttacttga

SEQ ID NO: 4617 - protein, 500 aa, Magnaporthe grisea 70-15
MSADPAATAQKTEPGSLPDQPKLESPTNEATATDDEPWSIWSSRGKRAILLGASFAAMLSPLASNIYFPALEPIAHDLGVSASLVNMSISTFILLQGIAPIFTAQLADTAGRRPVYLVCIVVFLAANVGLGVQNSYTALLVLRCVQSAGSSGVQALSNAVAADIATPAERGSYVSFAAAAPILATTLGPIVGGLLAQFAGWHSVFWFLAAVAGVLLLPMAAFFPETCRNVVGNGSIPPPKWSRCYTNSRRELRGRGGPQTEPPRIKVGFPNPLRPVMLLFDRECCWPLLYSAIVASPFYSTLALIPSTFTRIYGYDELQISLCYLPFGVGALAGALAVGRVMDSNFQRHAARLGIAVDKTRRMDLGRHGSFPTARARLEVAVPTVVLSTGFSVAFGWMLQRRVHVAGPLVVLFLVGFCAVASLNCIAALLLDLNPTRAGTVTASNNLLRCLLGTAVTSATVPLVQAVGVGWTLTVFGGLNALFMPLLWHIMRQGSGRRVT

SEQ ID NO: 4618 - DNA, 2010 bp, Magnaporthe grisea 70-15
  CDS (1)..(2010)
atgattagtggagctcattcgtctatggaccttgtaaggtttctaagtctatttattctaggtctaaaatacggtaatcctgcccttcctgagttctttgggctgaaagcggcccagcttttccgtcgacgaagcttgtgcaaggctagaaggagtaaagtatatactgccgaggctgcctctttccgttacctaaagctcacctcagaacttgcaaagtactcttacccaagaacggctggcaagcttgctcccgccgagggcatgaacgggaaacacagtaatgaaaagtccgccgaggacgctcagcctccaaaacaggggccgccagcaccgccgaaccacctcaccgacgatgaggtgagcaaccgggaaggaactggtgccaacaaggacccggcggggaacctcgacccggagtctgccgccgcttcgatgacatcgaggcgccacagcaggggggacgcgcactccacaacctcgtcgaaccacaacagcgaccacgaccacgaccacgatgacgacgatggactgtctcgcgtgtcgacgcacgcctcgatgggccccgacagcgcagccgaagtggagcagttcagctccttcgtcgaggtgcccgacgaggtgtacgaccgcttctcgcggcgccgcaagctgctcatcgtggcggtcctgtcgtactgctccttcctggcgccgatatcgagcacgactgtgctttcagccgtcccagaggtcgcggccgagtacgccaccacggggacggtcatcaacttgagcaatgcgctttacatgttgttcatgggtctgtcacccatgttttggggccccctgagccaggtgtatggacgtcgcatcatcaacttgacgacagccgccctgtttttcgtctgcagcatcggaacagcgcttgcgcccaacctggtggcctttttcatctttcgcatcttgactgcatttgaggggacatctttcatcctcgtgggatctacttgcatcagcgacatataccgccctacagagcgcgcaacgggcatgggatggttcctgtcaggaacccttatcggtccagccctcggccccttcgtgggcggcatcatagtcaccttccagtcctggcgcgtcatattctggctgcagacggcgctggcgggtaccgccgtgatcctcgtcttcttcttcctgcccgagacggcgcaccacaaaaagatcgacgaccttgtcggctactcgggcgcgcgcaaggcacgggtactggcctccatgatcaacccgctgcgcgtcatccggctgtacgtgtacccgaacctcatggtgacgggactggcggcgtcggcactgctcttcaacatgtacagcctcctgactccgatccggtacgtgctcaacccgcgcttcgggctgactacaccgctccagggtgggctcttctacctcgctccgggctgcggctacctcgtcggcacctttgtcggtggccgctacgcagactacacggtgcgccggtacatgggcaagaagggcgggcagcgcgtgcccgaggaccgcctccggtccgctctgcccttcataggcatcgtcatccccgcctgcacgctggcgtacggatggggcgtcgagcgcaacagcggcgggatccccctcgccgtcatcgcgcttttccttcagggggtagcgcagctgttttgcttcccgagtttaaacacctactgcctcgacgtgatgcagagccgcgcgccagaggtcgtcgcgggtaactacatgatgcggtacctgtttgcgtgcctgggaacggccgtggtcctgcccgcgatccagggaatcggcgtcgggtggtttagcacaatcagcgcggcgtttacaatgtttggcgcggcgggcctggtcgcgagcgtggcgtggggcaagcggtggcgagaagggatcgatgcggagaggaggaggaagaggagcgagaagagcaagcgcagggccaaggtggcggatggaggtgaatcgggcgtcgtgccgtag

SEQ ID NO: 4619 - protein, 669 aa, Magnaporthe grisea 70-15
MISGAHSSMDLVRFLSLFILGLKYGNPALPEFFGLKAAQLFRRRSLCKARRSKVYTAEAASFRYLKLTSELAKYSYPRTAGKLAPAEGMNGKHSNEKSAEDAQPPKQGPPAPPNHLTDDEVSNREGTGANKDPAGNLDPESAAASMTSRRHSRGDAHSTTSSNHNSDHDHDHDDDDGLSRVSTHASMGPDSAAEVEQFSSFVEVPDEVYDRFSRRRKLLIVAVLSYCSFLAPISSTTVLSAVPEVAAEYATTGTVINLSNALYMLFMGLSPMFWGPLSQVYGRRIINLTTAALFFVCSIGTALAPNLVAFFIFRILTAFEGTSFILVGSTCISDIYRPTERATGMGWFLSGTLIGPALGPFVGGIIVTFQSWRVIFWLQTALAGTAVILVFFFLPETAHHKKIDDLVGYSGARKARVLASMINPLRVIRLYVYPNLMVTGLAASALLFNMYSLLTPIRYVLNPRFGLTTPLQGGLFYLAPGCGYLVGTFVGGRYADYTVRRYMGKKGGQRVPEDRLRSALPFIGIVIPACTLAYGWGVERNSGGIPLAVIALFLQGVAQLFCFPSLNTYCLDVMQSRAPEVVAGNYMMRYLFACLGTAVVLPAIQGIGVGWFSTISAAFTMFGAAGLVASVAWGKRWREGIDAERRRKRSEKSKRRAKVADGGESGVVP

SEQ ID NO: 4620 - DNA, 1536 bp, Gibberella zeae PH-1
  CDS (1)..(1536)
atggtacatataaacacgatcgaagagctcacacgcgccgagtctctaaccaaagtccctggcgaggatttgaagcgagaaagggacctggaggagggttcaacttcagtcgaattcgacgatgtcgttgagaatgaccccaatatcgtcaactgggatggccctgacgatccggctaatccccagaactggtcaatggggaaaaagactattacagtgataattgtttcatctgtgacattcgtcacaccactggcttcctctatcttcgcacctagtatcgaacaagttatgaccgagttccactctacgaattcgcaggtggcatctttcattgtctcggtgtaccttcttggatattgtttcggcccgttggtgatcgctcctctatccgagatgtacggtcgacttccgctctaccacatttgcaatgttctctttgtcattttcaatgtggcttgcgcgttggctccgaatctaggtggtctcatcgccttccgtcttcttgctggacttgcgggctcctgtccactgaccattggagctggatctttggccgatgtgatctctagggaaaggcgcggagctgctatgtcttcatgggctcttgggcctctttttggaccagtaattggaccagtcgctggcggatacctctcgcaagccaagagctggcgatggtctttctgggttgtctctattctggccggtgcaatcacaataatggcattcgtgtttatgagagagacatacgcgtatactattctcgataacaagaccaagaagcttcgcaaggaaacaggaaaccctaaacttcgctctgctctcgccaaagaaatcaccacaaaggaactctttagcatggccatggtgcggccaacaaagatgctcctgtttgcgcccatcgttactctcctatcgctttacatggcccttgtttacggttatctctatctcctctttacatccatgcccaccttgtttgtaaaagagtatcatttctccagtggctctgttggtcttgcttacctgggacttggcatgggatccttgataggacttgtcatttccggggcgacatcagaccccttggtcaattacttgaccaagaagaacgggggagagcgtaaaccagagtatcgactgccactcatggctgcagcttgtcttatggtcccagccggtctatttatatttggatggaccgccgagaaaagaacccactggattgtccctatcattggcacctcttttttggggctcggtatgatcatcgtgtttatgtgcatctcggtttacctagttgatgcctacatcgaatacgctgcgtctgctattgctgcgagtaccgtactccggtcactattcggagcactattgcccttggctggaggaagtatgtacaagagcctaggttacggttggggcacttcggtgctgggctttgttgctgctgctgcaattccgttaccgctggtcttctataaatacggagagagaatccgaagccgaaatctattcgatgtcaacctttga

SEQ ID NO: 4621 - protein, 511 aa, Gibberella zeae PH-1
MVHINTIEELTRAESLTKVPGEDLKRERDLEEGSTSVEFDDVVENDPNIVNWDGPDDPANPQNWSMGKKTITVIIVSSVTFVTPLASSIFAPSIEQVMTEFHSTNSQVASFIVSVYLLGYCFGPLVIAPLSEMYGRLPLYHICNVLFVIFNVACALAPNLGGLIAFRLLAGLAGSCPLTIGAGSLADVISRERRGAAMSSWALGPLFGPVIGPVAGGYLSQAKSWRWSFWVVSILAGAITIMAFVFMRETYAYTILDNKTKKLRKETGNPKLRSALAKEITTKELFSMAMVRPTKMLLFAPIVTLLSLYMALVYGYLYLLFTSMPTLFVKEYHFSSGSVGLAYLGLGMGSLIGLVISGATSDPLVNYLTKKNGGERKPEYRLPLMAAACLMVPAGLFIFGWTAEKRTHWIVPIIGTSFLGLGMIIVFMCISVYLVDAYIEYAASAIAASTVLRSLFGALLPLAGGSMYKSLGYGWGTSVLGFVAAAAIPLPLVFYKYGERIRSRNLFDVNL

SEQ ID NO: 4622 - DNA, 1551 bp, Gibberella zeae PH-1
  CDS (1)..(1551)
atggcagagaaagacgaaaaccggccttcgcccgactactcgggctctcacagacacgacatcgacgctatcagtgtacagagcagcctatctgacgccccaactgctcgagatacaacttctgaaaagcttggcgaatctatgaacaatggaatctcggctcaagttgacgaagggattttgggtgaccctgagaacatgaccagagtctccagcggaccagcatacagtactttctctaataacaccaaacgatggatcttggccttggtcactgccgctagtttcgtctctcctatgactgccaatatctatttccctgcgctgaacccaattgccgacgacctgaacatctccatttcactcatcaacctcaccttgacatcttatatgatctttcaggggctatcccctaccatatttggtgattttggtgacatggcaggacgtcggccagcttacatcgtcgccttttctatctacataggcgccaacatagggctggccctgcagcggaactttgttgcactcttgatcttacggtgtgtccaaagcgctggcagtagtggcaccctggctctcggttacgctgttgtggccgacatctcatcaacaggcgagagaggaaaatatatggggattgtcggagcaggaattaatatcggccctgctcttggccccttgcttggaggtatattgagtcaatacctaggatggcctgccatcttttggttttgcgccatcttctctgctgcctggatgatccctttcatcctctccgcccccgagacatgccgcaacgtcgttggaaacgggtcaatagcgccccagaaatggaacagaacactactcgacatctacagccatagaggggatgttccagaccaaaatgtcccgaaacgaaagctcaagtttccaaaccccttgaagacgttgtatatcgtcttcgataaggagatggccattatcctatgcattaacgcaatcatctatgtggctttcatcctgacggcggcgactttgtcgacgcttttcaaagagatttatgggtataatgaccttcaggttggtctttgctatttgccctatggttttggttgtgcctttgctgttgttgctcaagggcgagtcttggactggaactatcgacgaattgcgaaagcgattggttttactattgacagaaaacgaggaaacgacctggcaaagttcccaatcgaaacagcacgaatccaggctatatatcctatactgcttgctggcattgtcacactcatcgggtatggctgggctctgcaagtcgagactagcgttgctgttccacttgttctagtattcctcattggcatgttcgtaccaacttctttcagtgttctcaatactctgattgtcgacctaaaccccaatgcacccgctacagcaactgctgccaataatcttgtacgttgcatgtttggagctgcgtctactgcggctattgatcatatgatcgagggaatgggaagagaggtatgggatggagagccgcaaaagccaagcgagaagcattga

SEQ ID NO: 4623 - protein, 516 aa, Gibberella zeae PH-1
MAEKDENRPSPDYSGSHRHDIDAISVQSSLSDAPTARDTTSEKLGESMNNGISAQVDEGILGDPENMTRVSSGPAYSTFSNNTKRWILALVTAASFVSPMTANIYFPALNPIADDLNISISLINLTLTSYMIFQGLSPTIFGDFGDMAGRRPAYIVAFSIYIGANIGLALQRNFVALLILRCVQSAGSSGTLALGYAVVADISSTGERGKYMGIVGAGINIGPALGPLLGGILSQYLGWPAIFWFCAIFSAAWMIPFILSAPETCRNVVGNGSIAPQKWNRTLLDIYSHRGDVPDQNVPKRKLKFPNPLKTLYIVFDKEMAIILCINAIIYVAFILTAATLSTLFKEIYGYNDLQVGLCYLPYGFGCAFAVVAQGRVLDWNYRRIAKAIGFTIDRKRGNDLAKFPIETARIQAIYPILLAGIVTLIGYGWALQVETSVAVPLVLVFLIGMFVPTSFSVLNTLIVDLNPNAPATATAANNLVRCMFGAASTAAIDHMIEGMGREVWDGEPQKPSEKH

SEQ ID NO: 4624 - DNA, 1554 bp, Gibberella zeae PH-1
  CDS (1)..(1554)
atgaagacatcactagaagattctcatgacaaagcatcgtccatctcatcagccatgggcgatacagaagcctcactacagatcatggcatcgaacccgaatcaagctatagaaaccatcaatcgagcaacgtcacacatctctggtcccgatgctttcgagccagctgccacgattgagaccccagaaggcgatgagccttaccgggaggctggcgacgagatctttggcaaggtgtctcgaggacgaaagatagctatagttgcagtcttgtcgtttggggcgttcctatcgcccatatcgagtacctccgtgttggcggcaacaccagaggttgcggcaacctacaacacgtccggaagtgtcatcaatctgagcaacgcagcatatatgattgtcatggccttgtctcctttgttctggggccccatgagtcaagtccatggaagacgtattgtagctttatactcatcagccatgttcttcctgctgagtttggcaaccgcactggctccaaacctcgcgtcgttcattgtcttccgagccgcttctgcgtttggtggaacggcgtttatccttattggcccagcatgtattggtgatatctaccgccctacagagcgtggtgcagccatgggttggtttctgacaggaacccttgttggtcctgcttttgggccgtttttaggtggtatcatagtgacgtactcgtcctggagaaccatcttttggttacagacagcactggctgcagctggatttctgggcgtctatttcgttgtgaccgaaacagcccaccacctcaagattgatgatctgaaaactctttcgggcaagaagagggcacttacgatcctgagcatgatcagcccgatgcgagtactgcggctgtttcagtatcccaatattgccttggtggctggcggcagcgcatccttgacatggaacatgtacagccttctaacacctattcgatacgtgttgaacccacgtttcaaactcgagtccccgttgctctcgggtctcttttacctggcgccaggcttcggttatctggctggaacatttgtggggggtcgttgggcggactacaccgtgaagcgatggatcaagaagcgtggtgttcgtgttcctgaggaccgacttcgatctacggtgccttttatgggtgcaataatcccgggaagcatgctggtctatggctggactgtggaccaagaggctggaggtatcccggttcctgtcattgccatgtttgtacagggcgttgcgcagttgttttgtttcccgtcgtacaacacgtactgtctcgatgtgatgcccggacaaggagctgaagtggccgcaacaaacttctttgcaagatacctggtcggatgcgtagcatcagcggtagttctaccagctatcgaggcagtcggcattggatggttttccatcatatcagtagcgtacctgatagtctcagctctagcgaccatggctgcaattcgatggggaaagtgctggagagaaagaatggaggctaagcttgagaattcaagggagaaatag

SEQ ID NO: 4625 - protein, 517 aa, Gibberella zeae PH-1
MKTSLEDSHDKASSISSAMGDTEASLQIMASNPNQAIETINRATSHISGPDAFEPAATIETPEGDEPYREAGDEIFGKVSRGRKIAIVAVLSFGAFLSPISSTSVLAATPEVAATYNTSGSVINLSNAAYMIVMALSPLFWGPMSQVHGRRIVALYSSAMFFLLSLATALAPNLASFIVFRAASAFGGTAFILIGPACIGDIYRPTERGAAMGWFLTGTLVGPAFGPFLGGIIVTYSSWRTIFWLQTALAAAGFLGVYFVVTETAHHLKIDDLKTLSGKKRALTILSMISPMRVLRLFQYPNIALVAGGSASLTWNMYSLLTPIRYVLNPRFKLESPLLSGLFYLAPGFGYLAGTFVGGRWADYTVKRWIKKRGVRVPEDRLRSTVPFMGAIIPGSMLVYGWTVDQEAGGIPVPVIAMFVQGVAQLFCFPSYNTYCLDVMPGQGAEVAATNFFARYLVGCVASAVVLPAIEAVGIGWFSIISVAYLIVSALATMAAIRWGKCWRERMEAKLENSREK

SEQ ID NO: 4626 - DNA, 1680 bp, Gibberella zeae PH-1
  CDS (1)..(1680)
atgaagtctgaatccgaacaagagaaaaggcgggaggataagaaagaggttgacaatggggatgaaaagaccagcctcggaccagatgaggaatcccaacgccctcctacctctggatcaacctctagtaaatccgaacatcatgttcaacaagacaccatcgaacctgttatgctaggcgaacccctgggccatatagatactcgaccgtctgttaagcgtgctcagtctagagcttcttctgcgcaatccaaaactcgttctgtcgttcccaggtcacaaagacgtggtctgcttgcgaggttcactttggttccagagattgagtatcctcctgactacaagaactcaacgaaatggtgcctcactgccattgttgctttggctactgctgctgcccccctaggatctactgttgtatatcctgctcttcctatcctggttgacgagttcaacactaccgagacaatcaccaatctttcagtcgctctctacatgatctccatggccatcttcccgctttggtggtcctccttctccgaagaattcggtcgtcggactatctatctcatctctttcagtctctttgtcatcttttccatcctctcagccatcagcaagaacatcaccatgctcatcatcttccgcatgtgtgccggcggcgcctcagcaagcgcccactccacaggcgcaggttccatagccgacatgttcgaagtgtttgagcgcggaagagccatgagtatcttctacctcggtcctctgctgggacccatgatagcccccgttgttggcggtgcgctgacacaggagatcgggtggcaggcaactatgtggtttctcgccatctacggtcttgtcgtgcttctcatgattctcttctttcttccagagacgttgcaacgtaaacctgaagctgtcttgccgaccgcagacactcaagagctcagtcgaatgcgtaccatggattctgcaaaaatcaagaccagaaatttcgccaagtctgcacgaagattcctcatcgatcctcttggagtacttctctatcttcgcttcccgcctgttctcatcacagtactccttgctgctattgctttcggatctctctatgttgttaacattgccatccagcaaaagttctcccgcgaaccgtacaactttggtcagctttctataggcctcatgtatatccccggaggtttgggttacatcgttggctccttatctggagggcgttggatcgacaagattatggccagagaagcccgtaaagctggtcgttatgacgaagacgggaagttgatatatctccctgaagatcgtatgagggagaacgcttgggttatgacaaccatgtacccactcgcattgctaatgtttggttgggtccttcgatacggcttacatcccgcggtgccatgtgtcgccctcttcttatttggaatttcatccatgcttgttttttctgttgccacaaccatgcttacagagctcattcgcaaaagaagttcttcgggcgtcgcagttaacaactttgttcgtaatacactcagttgtaccggggctattgttgctgccccatggatcaatgccataggtactggttatatatgtatctttctactgagaaagaatgcgaccaagtggaggaaggccatggataaggccctgggtcagtaa

SEQ ID NO: 4627 - protein, 559 aa, Gibberella zeae PH-1
MKSESEQEKRREDKKEVDNGDEKTSLGPDEESQRPPTSGSTSSKSEHHVQQDTIEPVMLGEPLGHIDTRPSVKRAQSRASSAQSKTRSVVPRSQRRGLLARFTLVPEIEYPPDYKNSTKWCLTAIVALATAAAPLGSTVVYPALPILVDEFNTTETITNLSVALYMISMAIFPLWWSSFSEEFGRRTIYLISFSLFVIFSILSAISKNITMLIIFRMCAGGASASAHSTGAGSIADMFEVFERGRAMSIFYLGPLLGPMIAPVVGGALTQEIGWQATMWFLAIYGLVVLLMILFFLPETLQRKPEAVLPTADTQELSRMRTMDSAKIKTRNFAKSARRFLIDPLGVLLYLRFPPVLITVLLAAIAFGSLYVVNIAIQQKFSREPYNFGQLSIGLMYIPGGLGYIVGSLSGGRWIDKIMAREARKAGRYDEDGKLIYLPEDRMRENAWVMTTMYPLALLMFGWVLRYGLHPAVPCVALFLFGISSMLVFSVATTMLTELIRKRSSSGVAVNNFVRNTLSCTGAIVAAPWINAIGTGYICIFLLRKNATKWRKAMDKALGQ

SEQ ID NO: 4628 - DNA, 1557 bp, Gibberella zeae PH-1
  CDS (1)..(1557)
atgttggtggcgtcaaagcagccaacaccaactattgatcaaggaccgcacgcccgcactcgcctttgtactgttttctcacaaactccggcaaacaagaggaagtctgaacaacaacaagttacggaaaatagcgatgtggaatttgcaacgactacatttctccctccatatacaactttcggtaggaagcaatctatactgatcctttatcttgcatcatatgccgcatctttctccccgctctcatcgttcatcttctttccagcaatagatgatatatccgagggtctgcacgtatcggtgtcgcgtatcaatcttactatcacctcctacatgatagtggccggcctcgccccagcgattctcggagatctcgctgataaggttggtcgtcgtattgtccatatcttcatgatgacgatctactgcgcggcgaatattggcttggcattccagagtaactggacagctctctttgtactccgaatggtacagagtgcaggaagcgctgctaccattgcactcggatatggtgtcgtctcagacattgctccgccctctgaacgtggctccttggtttcgattatggtgttgggactcaatattgcgaccgcagttggcccaatcataggtgctgcgctaaccagctatctcacttggcgctggattttctggttacttgccgttctatcaggcacttgccttctcatgctagctttcttccttctggagacagcgcgctcaattgttggtgatggctcgggccgagtctctggtctgcggcgaacgatcctgtcgtatctgcagagtttatcgaaatcattgtcccatgataaaagagacgaacacagaaacgaccccattaccccaaacgaagggcccactggtacaattgtcagatcactcaacccattgggtagtttgaagctactttgggctaaagacacgttgttgatcacgttgatctttggaattttctatatgaacctgagcgctctgcaggcttccacatcaacgctgttcgtcagtgtatatggtgtatcgggtctccagctaggtttgatctatcttccatcggggatgggatactgtctcggggcatatggtgccggtcgtcttttagaccacgactatcgtctgatagcaagaaagcatgacataaacgtcaatgtcagggctggtgatgatcttgacagctttccgataggagaagccaggtttcggagcatctggtatcttatcagtgttggagctgtttccttgatcggttacggttgggcaattcatttccaagcaaacatggcagttcctttagtgcttcactttcttataggatgttccaccgctatcattttcaatatgtgtggtacactgctggtagacgtccacccaaagtcaccatcatcagcgcaagcagcaaatagcatcgtgcgagcatttctcgctgggggtagtacgggtcttgtccaggtctttatagatgcaatgggtgtcggatggacatttgctctatttggtgtgaatggaggtgcggtcagggctggagagaagtga

SEQ ID NO: 4629 - protein, 518 aa, Gibberella zeae PH-1
MLVASKQPTPTIDQGPHARTRLCTVFSQTPANKRKSEQQQVTENSDVEFATTTFLPPYTTFGRKQSILILYLASYAASFSPLSSFIFFPAIDDISEGLHVSVSRINLTITSYMIVAGLAPAILGDLADKVGRRIVHIFMMTIYCAANIGLAFQSNWTALFVLRMVQSAGSAATIALGYGVVSDIAPPSERGSLVSIMVLGLNIATAVGPIIGAALTSYLTWRWIFWLLAVLSGTCLLMLAFFLLETARSIVGDGSGRVSGLRRTILSYLQSLSKSLSHDKRDEHRNDPITPNEGPTGTIVRSLNPLGSLKLLWAKDTLLITLIFGIFYMNLSALQASTSTLFVSVYGVSGLQLGLIYLPSGMGYCLGAYGAGRLLDHDYRLIARKHDINVNVRAGDDLDSFPIGEARFRSIWYLISVGAVSLIGYGWAIHFQANMAVPLVLHFLIGCSTAIIFNMCGTLLVDVHPKSPSSAQAANSIVRAFLAGGSTGLVQVFIDAMGVGWTFALFGVNGGAVRAGEK

SEQ ID NO: 4630 - DNA, 1950 bp, Ustilago maydis 521
  CDS (1)..(1950)
atggatcggattcgtgattcagcgattcgtgctgtgtacgctagtccactcgcactcgcactgactcacgacttgcttctactaggtgctgctagtgcatcgctctgtggctttgggactgttgctcacgcacagccgataatcacgaatggcatttcttcggacacttcggatttgcgaaatagcgcacaaacaaggaagcgtcgtacaatcgtgaatcacaaaggtgaattgacagtttatcgcactcgtttgcgtagctttgctggctttaagctcaagctcgacgtaagcatcgacgttgatatgctaccaccaccatcatcatcatcatcatcaaccacacacatctgcactcgaatcgacaaacgtttgacatacgtcttggctatgagtggctccgctgacatgttgacatgctctcacgcagcatcaacacccgacgccaacagccgcagtatccaccaagtcgaaatggaccaagccgatcattccggcgtcccagacgacgctgcgctcgaggaggcgcccaatacagtaccgattcaagaaaagagcgcacagcctcacgacacgcagccgtactgtgcattcacgaagcggtccaagctgtttatcgtcctcaccgtctctcttgccggctttttttcgccgtttgccatcaacatttacatccctgccctgccccagatcgccggtatgctgcatacctctgaagccgctaccaacgtcacggtgaccgtctacatgattgcacagggactttcaccggttatctgggctcctctctcggatgtgtttgggcgccgaccgatctacatcttgacgtttttcatctttttcattgccaacctcgggctgtcgttcaccaacgtctactggctcttggtggtgctgcgtatggtgcaggctgcaggcgcgtgcagtgcgattgcgattggcgctggtacgattggcgacgttactgagcgcaaggaacgaggaagttacatgggctactatgcgcttgcgcaatacacgggccccgccatcggaccggttgtcggtggcgcgctttcgcagagatgggactaccatgctacgtttttcttcttgacggcgatctcgggtccgtttttgttgttcatgcttctctttctcgttgaaacgcttcgagtcattgttggcaacggcagtgcaaaaacgtcgggcatctatcgccccttggtggagcccaagctgcaacgctcgatcgccaatgcgcctcggcctggcatcaagaacccactgcatggcacgctcgatttcggcttccaccgtccgtttttggtgtttgcgcgccccgagaccagcctagccatcctggctttttcgatggtatatgcgagctactacttgtcatctggttcgctgccgtatctgttcaagcaggtgtacggtctggacgagctcctgatcggcgtatgctttgttccgagcggtgtggggtgtgcggtgggcacagtgctcgccggcaagatcctcgactgggactatcgtcgtgcgttggacaagagcaagcttggtgtcaaggtgacgcgcgcaaggttgcagtcggcgtggatctacctgccgtgctactgcgcttcgcttctggcgtacggatggtgtgttcgtgcgcatacgcatatcgccgctccgatcgtgtttcagtttacactgggcatgttttcgaccatgtactttaccaatgtcaatacgctcattgtcgacctgtatcctggcaaagcggccagcgcaaccgcagcggtcaacgtcggacggtgcttgctcggcgcagtagcagtcgccgtggtccagcccatgatcgacgcaatgggcgccggctggacttttacgctcggcgcactactcacactgatcgtcggtctcatctgccaagttctcatctacctctacggcgaaatgtgggcagctcgcaaacactcgtga

SEQ ID NO: 4631 - protein, 649 aa, Ustilago maydis 521
MDRIRDSAIRAVYASPLALALTHDLLLLGAASASLCGFGTVAHAQPIITNGISSDTSDLRNSAQTRKRRTIVNHKGELTVYRTRLRSFAGFKLKLDVSIDVDMLPPPSSSSSSTTHICTRIDKRLTYVLAMSGSADMLTCSHAASTPDANSRSIHQVEMDQADHSGVPDDAALEEAPNTVPIQEKSAQPHDTQPYCAFTKRSKLFIVLTVSLAGFFSPFAINIYIPALPQIAGMLHTSEAATNVTVTVYMIAQGLSPVIWAPLSDVFGRRPIYILTFFIFFIANLGLSFTNVYWLLVVLRMVQAAGACSAIAIGAGTIGDVTERKERGSYMGYYALAQYTGPAIGPVVGGALSQRWDYHATFFFLTAISGPFLLFMLLFLVETLRVIVGNGSAKTSGIYRPLVEPKLQRSIANAPRPGIKNPLHGTLDFGFHRPFLVFARPETSLAILAFSMVYASYYLSSGSLPYLFKQVYGLDELLIGVCFVPSGVGCAVGTVLAGKILDWDYRRALDKSKLGVKVTRARLQSAWIYLPCYCASLLAYGWCVRAHTHIAAPIVFQFTLGMFSTMYFTNVNTLIVDLYPGKAASATAAVNVGRCLLGAVAVAVVQPMIDAMGAGWTFTLGALLTLIVGLICQVLIYLYGEMWAARKHS

SEQ ID NO: 4632 - DNA, 1464 bp, Aspergillus nidulans FGSC A4
  CDS (1)..(1464)
atgtcgtccgcaacgctggcaaccgaggtcgaccgcgccgagaaaggagaaaatgggccgagtgagaacagcgacgagaaggtcgactgggacggccctgacgaccccgccaacccgatgaactggtcgaccagcaaaaagactgcgcagctggttttgatggccgcaaacacctttatcacccctctcgcctcgtccatgttcgcgcctgggataaaaggcgtcatgatggaattccactcgagtgatacaatgctggcctccttcgtcgtttccgtatttgtcctggggtacgtggtcggcccgttcgtcatcgcgccgctctcagaactatacggccgcgtcccgctctaccacgcctgtaacgtgatgtttctggtgttcaccatcgcctgcgccgtcgccaaaacgctgccacagttgatcgtctttcgattgtttgctggcgttgccggcgtttgtccgatcacgatcggatcaggcacaattgccgatatgactctgcaggagaagcgcgccggcatcatggccatatgggcactggggcctatcctcggccccgtcgttgggcccgtcgctggagggttcctgtccgaggcggagggctggcgatgggtgttttgggttatcgcaatcacgaccggcgtaatcagcattggtgcgcttatcgcctaccgcgagtcatacgcgcccgtcctgcttgcccgcaaggctgcccgactgcgcaaggagacagggaacccgtccctgcggtccgtccacgataccggccggaccccgaagcaggtctttgtcgacgccttcacgcgtccgatcaagttcctcttcctgtcgcccattgtcttcctcttttcgctcttttccaccatctcctatgggtacctgtacctcatgttcaccaccatcaccagtatcttcgagggccagtacggctgggctccttcaatcgcaggccttgcgtatctgggattcggtatcggtagtatggtcggcctcatcgttagcggtgcaatcgggaacaagatcgcggccgatcatacggccaagggtatattcaaaccggagtcccgtctgccgccgatgatctttgggtcgctggccatcccgatcgggcttttttggtacggctggagcgccgaggctaagacgcactggatcgtgccgattatcggtacgggcgtgttcgctgtgggattgatggttgtgttcatggttgccaacacgtatctcgtcgactcgtacctgctgcatgcggcctcggtcacggccgcgaacaccgcgctgcggtcgctcggcggtgcgctgctgccgctggcggggccagacatgtatgatgccctcggtctgggatgggggaactcgttgttggcgtttattgcattggcgatgtgtgcgtgtccggtgttattctggaagtacggagagatgattcgcacgcatccccggtttcagatccggttgtag

SEQ ID NO: 4633 - protein, 487 aa, Aspergillus nidulans FGSC A4
MSSATLATEVDRAEKGENGPSENSDEKVDWDGPDDPANPMNWSTSKKTAQLVLMAANTFITPLASSMFAPGIKGVMMEFHSSDTMLASFVVSVFVLGYVVGPFVIAPLSELYGRVPLYHACNVMFLVFTIACAVAKTLPQLIVFRLFAGVAGVCPITIGSGTIADMTLQEKRAGIMAIWALGPILGPVVGPVAGGFLSEAEGWRWVFWVIAITTGVISIGALIAYRESYAPVLLARKAARLRKETGNPSLRSVHDTGRTPKQVFVDAFTRPIKFLFLSPIVFLFSLFSTISYGYLYLMFTTITSIFEGQYGWAPSIAGLAYLGFGIGSMVGLIVSGAIGNKIAADHTAKGIFKPESRLPPMIFGSLAIPIGLFWYGWSAEAKTHWIVPIIGTGVFAVGLMVVFMVANTYLVDSYLLHAASVTAANTALRSLGGALLPLAGPDMYDALGLGWGNSLLAFIALAMCACPVLFWKYGEMIRTHPRFQIRL

SEQ ID NO: 4634 - DNA, 1554 bp, Aspergillus nidulans FGSC A4
  CDS (1)..(1554)
atgacatatctatatctaactccaagtcgcgaaaatgtcagttcactccaggagagcgagcagcgctccgttgcacccactgagggcagctttttgattcccctcttcgctgatgagccgagattggctcacgagagaataaaggtgacctggtcttcgccccatgaccccgagaacccattgaactggagccatgggcggaaatggtcagccactctgctggtctcgtgcttcacctttatctcgcctgtatcgtcgacaatggtcgcaccggccctgcctgagatcgccgacgaattcaatatcagatccgatattgaacgttacctggtcatgtctattttcctgcttgcctatgcggtgggacccttcatccttgcaccgctgtcagagatgtatggaagggtcgtgatactgcagtcagccaatatggtttacttgatcttcaacacggtctgtggctttgccacatcacgcgagcagatgcttgcttttcggttcctgagcggtctcggtgggagcgcaccccaagcgatcggtggcggtgtattgagcgactgttggaggaagaacgagcgaggagcagccagcgccgtgtacgccgtgatgccattcattggaccagccgtgggcccaatcgccggtggttacctgacgcaatacatgtcctggcggtggatcttctgggttgtctccatggccgacgcactggtccagatcctggccttcctcttcctccgcgaaacatacgcgcccaagatcctgatgacgaggaaaaagaggctggagcgtgaaaccgggaattcattgctgtatacagagtatgacgagccggatcgcacttttccccagctcctaaggaagaatctcatccggccattccgaatgctgttcactcagcccgccatccaggcaatcgcactttaccgagggtatcaatacgggctgatgtatctagtacttgcttctttcccaactgtctgggaggggaggtacgatcaagaaaaaggaatcgccagcttgaactacctctcccttggagtcgggttcgttcttggactgcagttctgcggccggctcattgactatgtttacgagcgtctctccaaatactacggcgataccgggcgtcccgagtaccgcgtacctttgatgatccctggaggtctgatagtcccaatcggcctcttcgtctacggttggacagcagagtacaaaacacactggatcgtccccaacattggggctgcattattcgcgattgggctcatcgtctgcttccagtgctgtcagacttatgtgatcgacgcctacactcggtacgcagcaagtgccacgggcgtcacggcgtttgttcggacgatggcgggcttcggcttccccctctttgcagatgggctgtaccgggcattaggactgggatggggcaatagcctcttgggttttgtgagcctgggcatgggcctcgtggctccagtgctactttggttctggggagagtggatgcgggccaagagcccctactgtgctggagacgagacgagtcggctctga

SEQ ID NO: 4635 - protein, 517 aa, Aspergillus nidulans FGSC A4
MTYLYLTPSRENVSSLQESEQRSVAPTEGSFLIPLFADEPRLAHERIKVTWSSPHDPENPLNWSHGRKWSATLLVSCFTFISPVSSTMVAPALPEIADEFNIRSDIERYLVMSIFLLAYAVGPFILAPLSEMYGRVVILQSANMVYLIFNTVCGFATSREQMLAFRFLSGLGGSAPQAIGGGVLSDCWRKNERGAASAVYAVMPFIGPAVGPIAGGYLTQYMSWRWIFWVVSMADALVQILAFLFLRETYAPKILMTRKKRLERETGNSLLYTEYDEPDRTFPQLLRKNLIRPFRMLFTQPAIQAIALYRGYQYGLMYLVLASFPTVWEGRYDQEKGIASLNYLSLGVGFVLGLQFCGRLIDYVYERLSKYYGDTGRPEYRVPLMIPGGLIVPIGLFVYGWTAEYKTHWIVPNIGAALFAIGLIVCFQCCQTYVIDAYTRYAASATGVTAFVRTMAGFGFPLFADGLYRALGLGWGNSLLGFVSLGMGLVAPVLLWFWGEWMRAKSPYCAGDETSRL

SEQ ID NO: 4636 - DNA, 1752 bp, Candida glabrata CBS138
  CDS (1)..(1752)
atgatggaggatcagcaatcactgcatagtttcatatcggactatgatcaacggtcgcatgcggttgagaagtatgatggtcctgatctatctgaagttgacagtgaagacaatgataaaatgatcaagacgaatgaggacgaggctgtcaaagaacctatttacagaaccaggtccaaccagacagagcctgatatcgcaaatgcgccaccttattcgaggtttgacgctaaatataagatggctctggttttgcaatgtgcttacacgggtttattttcaacaatggcaggcgctatttactacccagtgctaagtgttattgagaaacagttccacattactgaagaattagtgaacataactgtggttgtttactttattttccaaggtattgcgccaactcttatgggtggactagccgattccttgggtcggagacctgtagttctgtttgctgtgacagtttactttggtgcatgcattggtttagcctgtgcccaaacctacgcacagattgttgtgctgaggtgtctacaggcagctggtatctctcctgtcattgccatcaatagtggtattattggagatgtgacgaccagggccgaaagaggggggtatgtcggatacatatcgggtttccaagttttaggtagtgcgtttggtgctctaattggtgccggtttgtcttcaaggtggggatggagatctatcttttggtttttagctataggctcgggtgtatgcttggtcttttcaataattatgctaccggaaaccaagagaaccattgtcggcaacggatcagttactcctcgtaactatcttaacagggctcctctactcatgtttcctctaatacgtaggaaattgcacttagacgatccagagtatgaaacactagaaccacgcacacaacttagccttttggcacctctttcaattttgaaagtcaaagagattagtattttgttggttactgctggtattcaatttgctacgtggtctactcatcaaacagctttgtcaacagttttaagtaaaaactatcatttatcagttgccaagattggtctatgttatttaccaactggtatttgtactttgataagtatcgtgacctctggtagatacttgaattggagttacagaaggagattcgctaaacacaaagtttggctaaaggaacaagaagaaattttagtgaaagaaaatggctacagtagagaggaagttcaaaacattattaataatgatccaaagtatgtctttaacctggtacaaactaggcttcacgctgctttcgttactctgttattgagtagtagtggatttgtcgcatttggatggtgcatcgatgttaaggcacctcttgcttcagtattggtaatgagtgggtttgcgtcgttgttttctaattgtatcttgactttctctacaacactcattgttgatattttcccttcaaagacatcaactgcaacaggatgtctgaacttattcagatgtttgctatctgctttgtttatcggctgtttgagtaaaatggctaccagtatgacctatggtggtgtttttacatttttgggtgctctaacagctctgtcggcttgtcctttattctacttgttgaagaatggtcgtgaaattactctcaagagaaagaggaaagaagatgctagcagagcatttgcattatctgtggcaaatgagaaggctgaggccgaaggaaaagccgaagaaagcagataa

SEQ ID NO: 4637 - protein, 583 aa, Candida glabrata CBS138
MMEDQQSLHSFISDYDQRSHAVEKYDGPDLSEVDSEDNDKMIKTNEDEAVKEPIYRTRSNQTEPDIANAPPYSRFDAKYKMALVLQCAYTGLFSTMAGAIYYPVLSVIEKQFHITEELVNITVVVYFIFQGIAPTLMGGLADSLGRRPVVLFAVTVYFGACIGLACAQTYAQIVVLRCLQAAGISPVIAINSGIIGDVTTRAERGGYVGYISGFQVLGSAFGALIGAGLSSRWGWRSIFWFLAIGSGVCLVFSIIMLPETKRTIVGNGSVTPRNYLNRAPLLMFPLIRRKLHLDDPEYETLEPRTQLSLLAPLSILKVKEISILLVTAGIQFATWSTHQTALSTVLSKNYHLSVAKIGLCYLPTGICTLISIVTSGRYLNWSYRRRFAKHKVWLKEQEEILVKENGYSREEVQNIINNDPKYVFNLVQTRLHAAFVTLLLSSSGFVAFGWCIDVKAPLASVLVMSGFASLFSNCILTFSTTLIVDIFPSKTSTATGCLNLFRCLLSALFIGCLSKMATSMTYGGVFTFLGALTALSACPLFYLLKNGREITLKRKRKEDASRAFALSVANEKAEAEGKAEESR

SEQ ID NO: 4638 - DNA, 1779 bp, Candida glabrata CBS138
  CDS (1)..(1779)
atggtggaaagtggtccacattcaattaatgatgatttgtcaacgaacgaatacatagaacaacctaaattctatcacgatgaccacgctagtgatagtaatagcctgtcagatatagacgacgacaataagaagcatggcggattgtatggaacagtctccagaactaccacaagagagctaccagaagacctggagtctgagatttcttcaactcactcacaagatgctaaagaggacttggagatacagcacaacgcggctccatactccctgctgaactacagagataaatggtgtatggttgccctacttacagcatgtgggttctggtcttctttgggttccccaatttattatccagctctgaaacagttagaaaaacagttcgacatcgatgaaaatatggtcaatatcacagttgtggtgtatctattattccaaggtttggccccaacttgtagtggtggtctagctgataagttcggccgtagacctgttctacttatcggtatgctgatctacgtggttgcctccattggtctggcttgtgctccatcatatggtgttattgttttcctaagatgtgtacagagtattggtatctcaccaagtatcgctatcagctcaggtgtcgttggtgatttcactgtcaaatctgaaagaggcacattcgttggtgctacttctggctttgtgcttttaggtcaagcatttggttccctaattggtgccgctctggcagctgcatgggattggagagccatcttttggttcctaactattggttgtggtgcatcatttgctatctgctttgcgctacttccagagacaaagagatccattgtcggtaacttgtctatcagaccaaagaatccattaaatatcgccccagtcaccttgctaccagccgcaagaagaaagttaaagtacgataaccctgattatgagacactagacaagaccaagccggtttttgatttgacatctgctttcaaaatttgtgccctgcctgaaatcttcttatctctactaccaccaggtttagcctttgccatgtggacactaatgttgtctgctatttcatctgaattgtcagctgctccatacaactataagttaacgatcatcggtgtttgctacctgccagccggtattggtggtctgattggttcctttgctactggtaagattatagatttccaatataagaagaagttgaaggtatttgaagagaaaaaggctgctggaattattccagaagatgagaaattcaatatcatgggtgctagattgcaatctgttcttccacagaactttttgtgtgttgtcacatatatccttttcggatggagttgtgacaaaggctggaagattccttcgatcttaattacctcttgtgttagctccttctgtgcaatgagtactctttctgctatgagcacacttttggttgatctttacccagggaagtcatctacggctagtagttgtttcaacttcatgagatgtagtttaagtgccattctgatgggttgttttgccaagatgaagcattccttaacagtaggtggtacattcactctgttggctggtctagttttcgtcggtaacttcctaatgttcattccaatgaagcacggaatgagatggagagaagaaagagaacaaagagctgctcttaaggcgaaaagcatggatcaagctaatgagaacggctacaagttgttcagcaagataaagttctcttcgccattcaaatctgaagaaaaagtatga

SEQ ID NO: 4639 - protein, 592 aa, Candida glabrata CBS138
MVESGPHSINDDLSTNEYIEQPKFYHDDHASDSNSLSDIDDDNKKHGGLYGTVSRTTTRELPEDLESEISSTHSQDAKEDLEIQHNAAPYSLLNYRDKWCMVALLTACGFWSSLGSPIYYPALKQLEKQFDIDENMVNITVVVYLLFQGLAPTCSGGLADKFGRRPVLLIGMLIYVVASIGLACAPSYGVIVFLRCVQSIGISPSIAISSGVVGDFTVKSERGTFVGATSGFVLLGQAFGSLIGAALAAAWDWRAIFWFLTIGCGASFAICFALLPETKRSIVGNLSIRPKNPLNIAPVTLLPAARRKLKYDNPDYETLDKTKPVFDLTSAFKICALPEIFLSLLPPGLAFAMWTLMLSAISSELSAAPYNYKLTIIGVCYLPAGIGGLIGSFATGKIIDFQYKKKLKVFEEKKAAGIIPEDEKFNIMGARLQSVLPQNFLCVVTYILFGWSCDKGWKIPSILITSCVSSFCAMSTLSAMSTLLVDLYPGKSSTASSCFNFMRCSLSAILMGCFAKMKHSLTVGGTFTLLAGLVFVGNFLMFIPMKHGMRWREEREQRAALKAKSMDQANENGYKLFSKIKFSSPFKSEEKV

SEQ ID NO: 4640 - DNA, 1992 bp, Kluyveromyces lactis NRRL Y-1140
  CDS (1)..(1992)
atgagggatccaacagagttacaacctgtgcattcattgccatctttacgatccggtactaaatcaatagcaagcgatgaggcatctgagcctaaacaattacattcagatagcaggattaactgtggtgatgtcgctgatcctgatatacagtatattggacctaatacagaaaaggtagagtccttgagtcagaaaatttcaaagataagcagtctccgagataagtcccttgttgttcccagatcagaaagaagaggattgcttgcgaacctagcgataatcccggaatataaagactctagagagtatccacgacacttgaagtcatttatcgtacttatcattgcatatggagctgtcatgggtcccatgggaacttctattattttccctgcaattggtcctttagtagcggatttcgatacatcgacgataatggtcgatgtctctgttggtatctatttattgagccttggtatatttccaatatggtggtcatctttatccgaaatagagggcagacgtactgtatatgtactttcttttactttattgaccgcattcactatcggtagcgcattgtcccctaacatctccgcatttattgtattccgaatgttacaaggcgcatcaagtgcaagtgttcaaagtgttggtgcaggaactatatcagacttatttatcccagaggaaaggggtaagaatttgggttactattatcttgggaccttgatggctcctttgctatccccaattattggtgctttattggtcaatagatggtcgtggagatctacacagtggtttatggtcatacttgcggttgttaacgtcctattatttaccttactattgccggagactttgagaagacaggatacgtctgcagccatagctattatgttagcagagcgtaaacagaagcttaataccagtgatattgaaaacaataatggaacaacaatagatgcagaagcggagttacctgatcaaaaccaagttgatgatgctagattcttggaggaagcagcctcccaatacgagtcccaggaagaattaaagaagattcggtctcatactagtacgatatgtaccaatataccggagaataacgatgctgtttatgatactcatgttccacagctttctaagatacgaacacatgatacaaaaatcgaagaaagaatccgtcaaaatgacttgttgagagtccagacacaactgcaaaatgaagttgaaaagattgaatcgtcaaagcacaccactagtgatcgatggaaagaggaactctatgtatatttggtaaagccattgaaatcattacatttcttggcatacccaccagtcacattggcaatcatatttagtgctatctcatttgccattctttatgtggtgaatatgaccatcgaatactgttacacgcgtcctccctacaatttcaaaccactttacattgggttactctatattccgaactcagtgacgtatattattgcatccatctatggtggtaggtgggtcgataatctattgaaaaagtataaggaaatgcatggaattatatcacctgaggctcgtattggttggaatgtcgttgttgctgttgtaactttcccaataggattactagtctttggatggtgtttggataagaaagaacactgggtgacacccctcgtaggtactgcaatatttggttttgcatctatgatgactattggtgcaacagtttcatacttggtcgattctttgcccggaagaggtgccactggagttgcactcaacaacctaatcagaatgattctcgcagctacctcggttttcataacgacgccaatgttaaagggaatgggagttggatggactttcacgatgcttgctatactagttgttgtaagtagcggagtccttgttattttgaagtggaagggtgactacttccgtgacaattatgacttgcaaaaactttatgataagctcgaatga

SEQ ID NO: 4641 - protein, 663 aa, Kluyveromyces lactis NRRL Y-1140
MRDPTELQPVHSLPSLRSGTKSIASDEASEPKQLHSDSRINCGDVADPDIQYIGPNTEKVESLSQKISKISSLRDKSLVVPRSERRGLLANLAIIPEYKDSREYPRHLKSFIVLIIAYGAVMGPMGTSIIFPAIGPLVADFDTSTIMVDVSVGIYLLSLGIFPIWWSSLSEIEGRRTVYVLSFTLLTAFTIGSALSPNISAFIVFRMLQGASSASVQSVGAGTISDLFIPEERGKNLGYYYLGTLMAPLLSPIIGALLVNRWSWRSTQWFMVILAVVNVLLFTLLLPETLRRQDTSAAIAIMLAERKQKLNTSDIENNNGTTIDAEAELPDQNQVDDARFLEEAASQYESQEELKKIRSHTSTICTNIPENNDAVYDTHVPQLSKIRTHDTKIEERIRQNDLLRVQTQLQNEVEKIESSKHTTSDRWKEELYVYLVKPLKSLHFLAYPPVTLAIIFSAISFAILYVVNMTIEYCYTRPPYNFKPLYIGLLYIPNSVTYIIASIYGGRWVDNLLKKYKEMHGIISPEARIGWNVVVAVVTFPIGLLVFGWCLDKKEHWVTPLVGTAIFGFASMMTIGATVSYLVDSLPGRGATGVALNNLIRMILAATSVFITTPMLKGMGVGWTFTMLAILVVVSSGVLVILKWKGDYFRDNYDLQKLYDKLE

SEQ ID NO: 4642 - DNA, 1728 bp, Kluyveromyces lactis NRRL Y-1140
  CDS (1)..(1728)
atgggcgtgaatcgaagtaacagtattctatcatcagggtctcacaacagcaagacaattcaaaatatcgaaaaaaaaatggaaggcttaccatcgccgttgattacagcctctaatatatcgataaacccaaatgagaatcgtttagaaaaagagtctgatatgacagatatcagtgaaataaaagacacagattttgatagtgacaagtcgaaggaagagcaaagttctatagtacgcaacgagaaacatccagaaacggctttcacagctctagaacctgaaattgcatataatccaccatatagtgcgttttcaaactatcaggttgtgagcatactattaattataatttacattgggttcttaggacccgtgacaggtaacatttacattcccgcactacctattcttcaatccgaatttaatactagcacaactgctatcaatggtacagttgctgcatttatgggtgtttttgcagtaggacccttcttgtgggcagtacatgctgattttggaggtaggaaattcttgtacattttctccttaatgattgcacttattgccaacgttcttcttgcagcggttcctaagcatttggccgctctttacatcttaagagtgtttcaagccattggaactagtgctgtaattccgttaggggttggaactgtcagtgaccttatatctccaatgaatagagccaaaggtgtctcatatttcatgttaggaccaaatatgggcccaattcttgggcccatatttggagggttaatattaatgaatggtaatcaatggagatggttattcgggttcacttctattactactggcgtggggttaattctaatagtaacgtttttgccggaaactcttcgatgtatcgttgggaatggtgatccacggtggaaggaagattcagaatttccagcttcgttaagtatagaggaatcttcacaaacaaaggaagagtccgttgtcaagccacacatgcaattattccgtgacttgggcctacagaaaccagtcaacgacactccagtatttgccaaattgtacccaaggccacctaagccaacatggcgttcatattatctgacatttcttgagttgagagtcattatatgttccatttcaacagcaatcctattctcctcatactactgtttcagtgttattttatcgcatgagctccattcgagattcggtttcaacaacctccaaattggtgcttgttacgtgtgtcctggtattggattactatgtggttcattaagtggaggtcacctatcagattttttcaaggcaaaatcaaagaaatggattccagagtataggctctggtttcaaatttggggtctagcgattagcatggccggttgctgcggttttggctgggccattgaaaaggaactacatatagtcgttatattggttttttctttcttgttggcattcggtatgacgtggtgctcaaatgctacgatgacatttttgacagaactggataggaaaaagacagcaaccctggtttctatcagtagttttttcagaaacgcagccgcagcagtagcatcagcaatagttttcaaattaatcgaggcaatgggggctggatggtgtttcactggtcttgcattctgtgactgtgctacgatcgctggaatcgtgtatctaatgatcaaaggtaaaaaacgtagacagtcttcgcaaagtgacgtatga

SEQ ID NO: 4643 - protein, 575 aa, Kluyveromyces lactis NRRL Y-1140
MGVNRSNSILSSGSHNSKTIQNIEKKMEGLPSPLITASNISINPNENRLEKESDMTDISEIKDTDFDSDKSKEEQSSIVRNEKHPETAFTALEPEIAYNPPYSAFSNYQVVSILLIIIYIGFLGPVTGNIYIPALPILQSEFNTSTTAINGTVAAFMGVFAVGPFLWAVHADFGGRKFLYIFSLMIALIANVLLAAVPKHLAALYILRVFQAIGTSAVIPLGVGTVSDLISPMNRAKGVSYFMLGPNMGPILGPIFGGLILMNGNQWRWLFGFTSITTGVGLILIVTFLPETLRCIVGNGDPRWKEDSEFPASLSIEESSQTKEESVVKPHMQLFRDLGLQKPVNDTPVFAKLYPRPPKPTWRSYYLTFLELRVIICSISTAILFSSYYCFSVILSHELHSRFGFNNLQIGACYVCPGIGLLCGSLSGGHLSDFFKAKSKKWIPEYRLWFQIWGLAISMAGCCGFGWAIEKELHIVVILVFSFLLAFGMTWCSNATMTFLTELDRKKTATLVSISSFFRNAAAAVASAIVFKLIEAMGAGWCFTGLAFCDCATIAGIVYLMIKGKKRRQSSQSDV

SEQ ID NO: 4644 - DNA, 1629 bp, Kluyveromyces lactis NRRL Y-1140
  CDS (1)..(1629)
atgagaagagctagtatcagaggaacggaccttcaggcagatactgaaacgaaaaagaagaactgcgataacacaggatctgaaagctctgtcttcaggactgtaacaagagaactgcgagatgacactgatgatgttgtgacgcatgaaatatatgatgaggaatctttccctgatggttcaaaacaggaacaactctcagaagaggatgtgccgtatacccttttaacgtaccgtcagaaatggtttatggtcgcattattgacttctgcaggcttctggtcctccttagggtcgccgatttactatccagcgttgaaagagttggaagcagagtttgatgttaatgaagaacttattaatatcactgttgtcgtatacttactttttcaaggtatagccccaaccatcagcggtggtttagcggatgtgtacggaagaagacctattattttgttaggaatgttaatatatgtgattgcatctataggtcttgcatgttctaagtcgtatggtgcggttgtgttcttacgttgcctgcaaagtgcaggtatatctcctatcattgccataaattctggtgttgcaggagatttcacagtaaaatctgaacgtgggacttttgtcggcgctgtttctgggtttactttaatgggccaggcgttcggctctttgattggtgcagccttgacagcggcatatgactggcgagcaattttttggttccttgtaattggatgtgggacttgtatgattattctgtgtttcttgctaattgaaaccaaacgtaccattgtggggaacttatctattagaccaaaaagttggataaatatagccccaataactcgtttgcctgcaataaggaagcaattcaaatatgataatccagattattcatcaagagacttatcagaagtgaagttcgatatcacctcagcaatgagaattcttatattgccagaaatcatcttatcacttctccccgctgcattccaattttccttatggactctttctcttgcttctcttccagcggaacttgcattagatccatacgactactcattgactatgattggtgtatgctatttaccctctggtatcggtggcttgttaggatctttctgtacaggaaaaattattgatgtgtattataaaaggtcccataaaaagttcttggagaagaaagaggcaggtcttatcgataaagatgcaagatttaatacctttaaggctagattaatttctggtgctcctcaaaatgtttgcgctgctgtggttttcactctattcggatgggcactgaagcaaaggtggcacattgcagttgttttagttacatccttcatcggctcgttttgtgctatgagtactctttctacttcaagtacgcttttggtcgatttatacccaagtaaatcctcaacagcaacaagctgttacaatttcatgcgttgcgtattgtctgcaattttcatggcatgtttctcaaaaatgaaatcatcgatgaacgttggtgggacattcacctgcatcagtggaatggttttcgttgggaactttttaattcttattcccatgaaatatggtatgaagtggagatatgaaagaggaatgaagctttga

SEQ ID NO: 4645 - protein, 542 aa, Kluyveromyces lactis NRRL Y-1140
MRRASIRGTDLQADTETKKKNCDNTGSESSVFRTVTRELRDDTDDVVTHEIYDEESFPDGSKQEQLSEEDVPYTLLTYRQKWFMVALLTSAGFWSSLGSPIYYPALKELEAEFDVNEELINITVVVYLLFQGIAPTISGGLADVYGRRPIILLGMLIYVIASIGLACSKSYGAVVFLRCLQSAGISPIIAINSGVAGDFTVKSERGTFVGAVSGFTLMGQAFGSLIGAALTAAYDWRAIFWFLVIGCGTCMIILCFLLIETKRTIVGNLSIRPKSWINIAPITRLPAIRKQFKYDNPDYSSRDLSEVKFDITSAMRILILPEIILSLLPAAFQFSLWTLSLASLPAELALDPYDYSLTMIGVCYLPSGIGGLLGSFCTGKIIDVYYKRSHKKFLEKKEAGLIDKDARFNTFKARLISGAPQNVCAAVVFTLFGWALKQRWHIAVVLVTSFIGSFCAMSTLSTSSTLLVDLYPSKSSTATSCYNFMRCVLSAIFMACFSKMKSSMNVGGTFTCISGMVFVGNFLILIPMKYGMKWRYERGMKL

SEQ ID NO: 4646 - DNA, 1644 bp, Debaryomyces hansenii CBS767
  CDS (1)..(1644)
atgtctagtcgttcgacatcactgttagaactggctgaagaatcatttcacgaatcacaacctaatgtgttcaatgagactatccctttggagttaaccagcgtcactgatgaagcagttcatcgactgatctccaggatacaatctaggaggtctagtaactcaaggttacctggacaagatgaagaccaacgcatagaacaacatgtttccccataccgagatatagaaaaagctttgggcgatgagaaaagcaatggctcagatatagatgcgacatccaaggataccaaaactgagagatttagtaatagaacaaaaaagatctgcattttcattgcagccgtgtcagggtttttatcgcctttgtcctccttagcatttttgccagcaattcctgagatggctaaagaatataataccactggtgaaatcatcaatgtctccagtgccgtctactgtgtgtttatgtcgttatctccatgtgtgttttcgcctttttcagatatctatggtagaaggttttcgtttttggtttgttcctgccttttctcagtatgctctattctagtagcagtttctcctcaccttgcaatgtttttcgtattcagatcactaactgcattggttggtactgcgtttttcagtattggtgcccacatcgttggtgatttatatattcccacagaaagaggtacgtatatgagcattattataatgggagctcaatttggtacggcactaggaagtgttggtggtgggataattgttaattttacatcctggcgtgttattttctttgtattagcaggaattggatttgttgtgatggcaatggcgtttgttttcttaccagaaacatcgctagaaacaaagcatcaaatagtgcttcgagaggctaggaaagataaccccaataaaaaatttgtttttatcacctataatcctttacgaattatgacggcattaaaatatccaaatttatctatagatgggtttattacaatttcagttgtcttcacaatgtattcattattaacaccaatcagatatgtcatggatcccagattcgacttgacttcgcctatcttgagtgctcttttttatctacctcctggtcttggatatctagttggaagcttatttggtggacgatgggcagactacacagtcaagaaatatattaaaatcaaaggaagaagagttcccgaagatagattaagaacgatcctcatacctattggcgttgtctatcccgcttgtatgatcatatacggctggtctgtggaaaaagagaaaggtggtatcgccgttcccgtcattttcatgtttatcagtggagttgcacaaacctgtatattcccggctgcaaatacttactgtgtggattcgatgcctgaattgggaggtgatggtattggaagcagctacttctctcgttatattgcagcagccgtcgcatctgcaacatgccttagaagcattgacaatataggtgtgggttggagctgtacaatcagtgcatttgtattgtgggttggagcaatatgcggaatagtgctaatttattttggcgagagtatgagaaagaaagctctaattaagtacggattgagaactcctgaaagcttcaacaccaattaa

SEQ ID NO: 4647 - protein, 547 aa, Debaryomyces hansenii CBS767
MSSRSTSLLELAEESFHESQPNVFNETIPLELTSVTDEAVHRLISRIQSRRSSNSRLPGQDEDQRIEQHVSPYRDIEKALGDEKSNGSDIDATSKDTKTERFSNRTKKICIFIAAVSGFLSPLSSLAFLPAIPEMAKEYNTTGEIINVSSAVYCVFMSLSPCVFSPFSDIYGRRFSFLVCSCLFSVCSILVAVSPHLAMFFVFRSLTALVGTAFFSIGAHIVGDLYIPTERGTYMSIIIMGAQFGTALGSVGGGIIVNFTSWRVIFFVLAGIGFVVMAMAFVFLPETSLETKHQIVLREARKDNPNKKFVFITYNPLRIMTALKYPNLSIDGFITISVVFTMYSLLTPIRYVMDPRFDLTSPILSALFYLPPGLGYLVGSLFGGRWADYTVKKYIKIKGRRVPEDRLRTILIPIGVVYPACMIIYGWSVEKEKGGIAVPVIFMFISGVAQTCIFPAANTYCVDSMPELGGDGIGSSYFSRYIAAAVASATCLRSIDNIGVGWSCTISAFVLWVGAICGIVLIYFGESMRKKALIKYGLRTPESFNTN

SEQ ID NO: 4648 - DNA, 1383 bp, Debaryomyces hansenii CBS767
  CDS (1)..(1383)
atgagagctagactaaatggggaaaataaggattccaagactgagagatttagtattaaaacgaaaaagatctgcattttcatagcagccgtgtcagggtttttatcgcctttgtcctccttagcatttttgccagcaattcctgaggtggctaaagaatataataccactggtgaaatcatcaatgtctccagtgccgtctactgtgtgtttatgtcgttatctccatgtgtgttttcgcctttttcagatatctatggtagaaggttttcgtttttggtttgttcctgccttttctcagtatgctctattctagtagcagtttctcctcaccttgcaatgtttttcgtattcagatcactaactgcattggttggtactgcgtttttcagtattggtgcccacatcgttggtgatttatatattcccacagaaagaggtacgtatatgagcattattataatgggagctcaatttggtacggcactaggaagtgttggtggtgggataattgttaattttacatcctggcgtgttattttctttgtattagcaggaattggatttgttgtgatggcaatggcgtttgttttcttaccagaaacatcgctagaaacaaagcatcaaatagtgcttcgagaggctaggaaagataaccccaataaaaaatttgtttttatcacctataatcctttacgaattatgacggcattaaaatatccaaatttatctatagatgggtttattacaatttcagttgtcttcacaatgtattcattattaacaccaatcagatatgtcatggatcccagattcgacttgacttcgcctatcttgagtgctcttttttatctacctcctggtcttggatatctagttggaagcttatttgggggccgtttggcagattatacagtcaagaaatatattaaaatcaaaggaagaagagttcccgaagatagattaagaacgatcctcatacctattggcattgtctatcccgcttgtatgatcatatatggctggtctgtggaaaaagagaaaggtggtatcgccgttcccgtcattttcatgtttatcagtggagttgcacaaacctgtatattcccggctgcaaatacttactgtgtggattcgatgcctgaattgggaggtgatggtattggaagcagctacttctctcgttatattgcagcagccgtcgcatctgcgacatgccttagaagcattgataatataggtgtgggttggagctgtacaatcagtgcatttgtattgtgggttggagcaatatgcggaatagtgctaatttattttggcgagaatatgagaaagaaaactttaattagatatggattacgcacacatgagagctttgactag

SEQ ID NO: 4649 - protein, 460 aa, Debaryomyces hansenii CBS767
MRARLNGENKDSKTERFSIKTKKICIFIAAVSGFLSPLSSLAFLPAIPEVAKEYNTTGEIINVSSAVYCVFMSLSPCVFSPFSDIYGRRFSFLVCSCLFSVCSILVAVSPHLAMFFVFRSLTALVGTAFFSIGAHIVGDLYIPTERGTYMSIIIMGAQFGTALGSVGGGIIVNFTSWRVIFFVLAGIGFVVMAMAFVFLPETSLETKHQIVLREARKDNPNKKFVFITYNPLRIMTALKYPNLSIDGFITISVVFTMYSLLTPIRYVMDPRFDLTSPILSALFYLPPGLGYLVGSLFGGRLADYTVKKYIKIKGRRVPEDRLRTILIPIGIVYPACMIIYGWSVEKEKGGIAVPVIFMFISGVAQTCIFPAANTYCVDSMPELGGDGIGSSYFSRYIAAAVASATCLRSIDNIGVGWSCTISAFVLWVGAICGIVLIYFGENMRKKTLIRYGLRTHESFD

SEQ ID NO: 4650 - DNA, 1527 bp, Debaryomyces hansenii CBS767
  CDS (1)..(1527)
atgaacaaggatatagaaaaacaaatcccttcaaatacgggatctgagaggcatattttgaaaattgatgagaataagctgaataaagaggaaagcttagaaatagggaagggcagagagatacgatactctattcttaccaaagcagagaagtatgggatatcagtactattaagctcgaatggtatatggtccagtgtgtcactgtcaatttttttcccggccttaccgtctttgacaagggaattcgacattactcaagatgtagcgaacttgtcgattgtgggatacttgatatttcagggaatttcacctaccatattagcattcttttctgacacttacggcagaagaccatgtattttattttgtgtgataggttaccttgcagtatgcatagctctttcgcagacaaatgtattttggttgatgggggtactaaggtgtgctcaggctgccgctattgcacctatggttgcaatatctacaggatctgtaggagactttagcaaaatatcagagagaggtaaatttgtggggttagtacaaggaattcaactagtgggacaggggtttggcgcagtaataggggctgctcttatcaatagctatagctggagaggaatattcgtatttttggcaatcggtagtggaagtgtggccattattagttttattatattaccagaaactaatagggctatagtaggaaatatgtctgttccagctaaaagaatgattaataaactgcctatcgcttcactcccctgcttcaaagcgagattgaccaatgatactgaaactttgcttacacgtaatttatcatttagtctgatacttgtaccgttcaaaataatcatcagaaaagaggtattggtagccttgattcctgctgggttccaatataccgtgtggacgatgactcttacgtctctttcaacaactctagaaacgaaatacaagtactcaatgatacacattggaatatgttatattccttctggtattgcaacagtaatgggatcaatagttgcaggaagagtattagattggaattataaaagaagaaaaactgcacacgatgctaaatacgctcatttggacgataatgaaagacctatgtttaatatcaggaaagtaagattggaactctgcgtatttaccacagtatcgttaatttgtttttcaattatatttggatggtgtttgcaatatagggttaacattgcaccaatattaatagcggcatttgtaatttcgttctgcagtgtcgcacaattatctgcaataactaccttacttgttgatatgtatcctggtcaagcatcggccctgaccagctgtgttaactttgtcagatgtatcctagctgcggttggtattggtgttttgcagaatatggttaacgccatgggcgaaggagggacatacacattaatggcaggcttctgcttgatagctgaagctgtgctttattatactgcatatcttgccaggaagaaactggaagagacaagcataaattag

SEQ ID NO: 4651 - protein, 508 aa, Debaryomyces hansenii CBS767
MNKDIEKQIPSNTGSERHILKIDENKLNKEESLEIGKGREIRYSILTKAEKYGISVLLSSNGIWSSVSLSIFFPALPSLTREFDITQDVANLSIVGYLIFQGISPTILAFFSDTYGRRPCILFCVIGYLAVCIALSQTNVFWLMGVLRCAQAAAIAPMVAISTGSVGDFSKISERGKFVGLVQGIQLVGQGFGAVIGAALINSYSWRGIFVFLAIGSGSVAIISFIILPETNRAIVGNMSVPAKRMINKLPIASLPCFKARLTNDTETLLTRNLSFSLILVPFKIIIRKEVLVALIPAGFQYTVWTMTLTSLSTTLETKYKYSMIHIGICYIPSGIATVMGSIVAGRVLDWNYKRRKTAHDAKYAHLDDNERPMFNIRKVRLELCVFTTVSLICFSIIFGWCLQYRVNIAPILIAAFVISFCSVAQLSAITTLLVDMYPGQASALTSCVNFVRCILAAVGIGVLQNMVNAMGEGGTYTLMAGFCLIAEAVLYYTAYLARKKLEETSIN

SEQ ID NO: 4652 - DNA, 1551 bp, Yarrowia lipolytica CLIB99
  CDS (1)..(1551)
atgagagcccttctgaacaaggcagacgaaacgttcgcgtccactggcggctccattgacattgagctggacagcattgaccaaaagctacccagagtttctgtgtcctccgacttgggaagcgggagtgacacggcgggagagggagatggaccggtgtcggcaaacactgacgacagcaacacaaacacgctggacgtggaagctctccctgccacagcccccgatgacgatgtcaagttcaaccggttcactctgtcgcaaaagcggatcatgaccgcagttctggccttttgtttcttccagcccttcctcgtcacctacgccatgttgcctgccgtgcctctgattgccgagcagttcgacgtcagtggcaccattgtcactgtaggtaacgctatcttcttcctcatcaccggtttctcgtcctgcttctttggacccttcagtgatgcctacggacgaaaggccgccctcatcacctgttgcataatctttattgtctccaatattggtattgctgcctctcccaacctcgtttcctactacatcttccgagccactaccgccatgggaggtacggcgtttttctcggtttcgggctctgccattgccgatatttggcggcctgagcaccgaggcaaggctgtgggcgcctgccttctcggctctcaatctggaatgaccattggtcccattatcggtggctggatcgtcaccaagacttcctggagagtcatcttctggatgcaggccggagttgccctggcaaacctgctactcgtcacctttgtgctccgggagcccatggccaccaccaagcaccaaatgctatgcgctgagcaaaacaagcggtttgtctggatctggatcaaccccttcaaggttctcatgggtctccgaaacatgcatcttctgctggcaggtctctccattgttccaatcatgtacggcatggactgtctgctgactcccctttctctggttgtcgagccccgtttcgatatcaagtctcctgtcgtcgcagctctcttctacctgcctcagggtgtgggtttcctcattggatgctactttggaggcatgtacgcggacaagactgttcagcgatggaccaagatccgtggccgacgagtttgcgaggaccgacttcgatcccagctcccttttgttggcatcttgctccccgtctgtatgctcatctacggatggtctctggagaaggagtttggaggagtggctgttccggtggtgaccatgttcctggttggctttggactgtccatgtactttccgtcgctcaacgcctactgtgccgactccagtcctgagctcggaactgctgctgctatttccggcaattacgccattcgaaactgcggcagtgccattgctgctgcctccaccctcaaggccgtggagaacattggcattggttggacgtcgactgtggctgcctttggcttcattgccagcactattcccgtcttcatcctgctgtggaagggcgaggacatgcgtcagaaggcggtccgacgaatgatgagatga

SEQ ID NO: 4653 - protein, 516 aa, Yarrowia lipolytica CLIB99
MRALLNKADETFASTGGSIDIELDSIDQKLPRVSVSSDLGSGSDTAGEGDGPVSANTDDSNTNTLDVEALPATAPDDDVKFNRFTLSQKRIMTAVLAFCFFQPFLVTYAMLPAVPLIAEQFDVSGTIVTVGNAIFFLITGFSSCFFGPFSDAYGRKAALITCCIIFIVSNIGIAASPNLVSYYIFRATTAMGGTAFFSVSGSAIADIWRPEHRGKAVGACLLGSQSGMTIGPIIGGWIVTKTSWRVIFWMQAGVALANLLLVTFVLREPMATTKHQMLCAEQNKRFVWIWINPFKVLMGLRNMHLLLAGLSIVPIMYGMDCLLTPLSLVVEPRFDIKSPVVAALFYLPQGVGFLIGCYFGGMYADKTVQRWTKIRGRRVCEDRLRSQLPFVGILLPVCMLIYGWSLEKEFGGVAVPVVTMFLVGFGLSMYFPSLNAYCADSSPELGTAAAISGNYAIRNCGSAIAAASTLKAVENIGIGWTSTVAAFGFIASTIPVFILLWKGEDMRQKAVRRMMR

SEQ ID NO: 4654 - DNA, 1731 bp, Yarrowia lipolytica CLIB99
  CDS (1)..(1731)
atgaatcatctttcggatctcgaaaagggtctggaggacggtcttcagctcgacaaagacccgctggtggagatggtggatgaggagaaccacaagcaggaggaggagatacccgaaaagtcatatggaaagtcatatgacaaatcatgtgaccacgaccctcaggaggactacagccatcacaaactcgcgtccaaatcccaatcgcccgacccggacagcataagtaatcacagtacagtggctccgccatacaccatctttgacggcagtgatacattcattttgatttccgtggcgtgtgcagcggccttcttttcgtcgctttcaagcccaatctatcttcctgccatgcccattctcgaaaagaagatgcatgtcagtactgagctcatcaacttgacggtggttgtatacaacttgtttcagggtctagggcctgtggtttggggagctcttgccgatggatatggacggcggcctgtttattttggctgcttgattgtctacattggagcctgcgtcggcctggctctagtcaactcctatggagtcatgatgtttctgcgatgtcttcaggccgcaggtatagctgcaactgtgagtctaggagccggggtagttggtgatatcaccacccgaaccaaccgcggaaagattatgggcatctttcagggctgggcgctgctaggaggcggattcggacctctgattggaggagggttgaccgaggggctaggatggagaagcattttctggtttctggtgattgccagcagctgcactctgctggctgtctatttgcttctgtctgagacgagacgatcgtttgtgggaaatggcacaatctatcccgagtactggatccatcgatctccctggatgagagtgtctcctcgattgaggaaaagaatccataaagacggaggaggagacatggatacactacagccacggactaagcctcagtatctctcctttctgctcattttgaaagaaccagacgttttactcattctgtttgcggcgtctcttcattatgctgcctggttcatgttgactacagctctggcttcgtctctggccgacgtgtaccatttcaattcgctgcaaatcggtctgggcttcatttctaacggaatgggctccattgtgggctcctttgtatccggaatcatgatgaacttttactatcgcaaaaagttggaaaagtatagacaggagtgtctgggcaaatggagacaggaggaggttgtcaagagaggattgcaagacgaatctgaggtcgacgactcgacctttgaactcgacgaatcgaaattcgacattcatggagccagactcactctctgcctgcccatgtcggccattctggcagtaggaatcattgtctacggatggaccattgagtacgaggtgcaatacgtgtgtcccttggtcttcaccttttttgtctcttttggcgccatttcctatctcaactttgcctccactcttttggtcgacatttatcctgaaaaggccgcttctgctatgagttgtgtcaactttgtgcggtgcattattgccgctggaatgattgcagcggtggaccggatgattcagagcctgggacagggaggctgtttcacactcattggcggcatctgcctgcttagtaatggttgcactatggctgtgcatagatggggacctcggtgggtggccaagagaaatgcaaagaaggcgtga

SEQ ID NO: 4655 - protein, 576 aa, Yarrowia lipolytica CLIB99
MNHLSDLEKGLEDGLQLDKDPLVEMVDEENHKQEEEIPEKSYGKSYDKSCDHDPQEDYSHHKLASKSQSPDPDSISNHSTVAPPYTIFDGSDTFILISVACAAAFFSSLSSPIYLPAMPILEKKMHVSTELINLTVVVYNLFQGLGPVVWGALADGYGRRPVYFGCLIVYIGACVGLALVNSYGVMMFLRCLQAAGIAATVSLGAGVVGDITTRTNRGKIMGIFQGWALLGGGFGPLIGGGLTEGLGWRSIFWFLVIASSCTLLAVYLLLSETRRSFVGNGTIYPEYWIHRSPWMRVSPRLRKRIHKDGGGDMDTLQPRTKPQYLSFLLILKEPDVLLILFAASLHYAAWFMLTTALASSLADVYHFNSLQIGLGFISNGMGSIVGSFVSGIMMNFYYRKKLEKYRQECLGKWRQEEVVKRGLQDESEVDDSTFELDESKFDIHGARLTLCLPMSAILAVGIIVYGWTIEYEVQYVCPLVFTFFVSFGAISYLNFASTLLVDIYPEKAASAMSCVNFVRCIIAAGMIAAVDRMIQSLGQGGCFTLIGGICLLSNGCTMAVHRWGPRWVAKRNAKKA

SEQ ID NO: 4656 - DNA, 1923 bp, Cryptococcus neoformans var. neoformans JEC21
  CDS (1)..(1923)
atggcggtggataacatgaagacagccagcagctctagctcgacacccatggagctatcgacaccatcagtcaccttgacacacgataggatggaggaacaaaatagctcatccgaaactcttggtcctgattctagcccctcaatatcatgttcaaatatggaagaaattgcattggacaagaagaatcttcgtggaaaaccaccggataaagaaggagatggcagttgtgcgaagtttttggtggatactccgcaaagcgacaaagaaggggtttcagaagtcgagacgattgatggaagaccaaaagatgtatatgatcgcttttccaagagacagaagaacgttatcgttgcggttatatcatactccgctttcattgctcccatgacctcatctatcttccttccttcaataccgacgatggctgtcgacctacattcctcagctgaggtcatcaactatactgtcgcgatatttttggtcactatcggtgttgccagtgtcttttggtctccttactctggattttacggacgaagaccggtgtatctggctagtatgccgatcatggtaatagctagcataggagtcgctcaatcgaagaacatcggggctatcattggcacccgtatcttgcagggtataggaagctcctgtgtgctcagtgtaggggcgggaaccattggagatatcttcagacctactgaaagaagtcgaggtatggcgacttactatatgggatcatcggcttacattatcaccactagtgtccttatcgggcctgccttgagtccaatactaggcgggatctttaccgagtatacttcacaaacttggcgtagtgcccaatactttctggctgggtgtggtgcgttatcggttgtcctcacctttttctttctgcctgagacattccacccgcctaccgtgcacgagcgtctgaaaaaggagagagggaagaagtttgtgatgtattgggtgaatcctttcaggtcagtgatgctgttgagatggccaaacatagcgatggctaaagatagatataacatccacaacactgctattgcaggttgcttattcctcgtgaatggtgcaggtaacatcatctcgagtaggattgccggaccatatgccgaccgcattgtgaagaagtacatgggaaaacgaggatacagaaggccagaggacagactgaaggctagcttctggggcactctgattctgatgccaatatcggtcttgatatacgggtggttgctgaagtttggcaaaggaggaatggctccacctttaatcatggtgttcctcaacggcatctctttaatgctctgccttacgcctctcaatacttatttggtagactgtatgcagtcgcgaagtgctgaggtcgtggctataaacaattgtattcgatacatcttttcggcggccgcctctgctttcgtccttccactagccaacgcgatcggttggggctggaccatgacaatgtgcgctttcgttagcgtaagtcataatatctgttctgtggctccaaggaaatcgctgaaaaccgctcagtggctggcagccggatcattgtttattctgtgtcgttacggagaacgctggcgggaagccgcaaatatccgttatggcatcaccgaagtcgaagctcaagaagagcgcgttgacgggggcaaagatgaagaagctgctgttgttgagaataatacaatcgaagacaggagggcctccgatggatacggggaataccttgaaggaccggtaccgatggagaaaaacttttctaggacaaagtcaagaacaaagaccgtggataggcaaattagtagaaaagagggcgaattgcctcttgtggaagaagtgttgaagagacaagtgtctttttctggcccttcaatccatggcgggggttaa

SEQ ID NO: 4657 - protein, 640 aa, Cryptococcus neoformans var. neoformans JEC21
MAVDNMKTASSSSSTPMELSTPSVTLTHDRMEEQNSSSETLGPDSSPSISCSNMEEIALDKKNLRGKPPDKEGDGSCAKFLVDTPQSDKEGVSEVETIDGRPKDVYDRFSKRQKNVIVAVISYSAFIAPMTSSIFLPSIPTMAVDLHSSAEVINYTVAIFLVTIGVASVFWSPYSGFYGRRPVYLASMPIMVIASIGVAQSKNIGAIIGTRILQGIGSSCVLSVGAGTIGDIFRPTERSRGMATYYMGSSAYIITTSVLIGPALSPILGGIFTEYTSQTWRSAQYFLAGCGALSVVLTFFFLPETFHPPTVHERLKKERGKKFVMYWVNPFRSVMLLRWPNIAMAKDRYNIHNTAIAGCLFLVNGAGNIISSRIAGPYADRIVKKYMGKRGYRRPEDRLKASFWGTLILMPISVLIYGWLLKFGKGGMAPPLIMVFLNGISLMLCLTPLNTYLVDCMQSRSAEVVAINNCIRYIFSAAASAFVLPLANAIGWGWTMTMCAFVSVSHNICSVAPRKSLKTAQWLAAGSLFILCRYGERWREAANIRYGITEVEAQEERVDGGKDEEAAVVENNTIEDRRASDGYGEYLEGPVPMEKNFSRTKSRTKTVDRQISRKEGELPLVEEVLKRQVSFSGPSIHGGG

SEQ ID NO: 4658 - DNA, 1569 bp, Aspergillus nidulans FGSC A4
  CDS (1)..(1569)
atggcatccccccaaaccccttccaaagaaggcgacacgggcctgaaagggggactcgatgtggtcgccacaaacaccaccggcgaggttccatattcggtcttcaccaaggctcagaaaagatacatcgtcttctttgcatcatgggctggcttcttctcgcccgtctcgtcacagatctacttccctgcactgaacagcattgcagatgatctcggtgtgaccagcgccctaatcaatctcacgctgacgagctacatgatctttcagggtgtctctcccatgttcgttggcgactttgcagataaagctggccgtcggcctgcatacatggtctgcttcctgatctatatcgctgccaacatcgggctggcgctgcaggacaatttcgccgcattgttcgtcctgcgatgcctgcaaagtgcagggagcagcacaacaattgccctctctgctggcgttgtctcagatatcgccatcgccgctgagcgcgggtcctatatgggcttcgtaacggcaggttctctcctcggaccagcgatgggcccggtcatcggcggtcttctatcgcagtatctcggctggcgctcggttttctggttcctcaccatttttgccggtgctttcttggttccttttgttctgctatttccagaaactgctcgcgcaatcgtggggaatggatctatcccgccgcccaagtggaatatccccttgctcactttgtttcaagctcgaaaggagccccagcccgaagattttgattggccaaagcttcgattccccaatcccattcggaccctctcgatcgtattccagaaagatatcgcgatcattctcatcgccaacgcaatcctctttgccggcttttacgatgtcacagcggcgatcccttctatatacaatgagctgtacggcttagacgacctctatattggactatgctatgtcccctttggtctcggcgcgaccgtagcatcaatagcaacaggaaagcttctagacttcaactaccgccggctggcaaaacaacttaacgttcctcttcaagaaactcgcgcccggaatctcacccacttcccaattgaattcgcccgtttacaggtcgcgctcccgctgctgacgctaggcgcattcacaatcatcgcgttcggatggtgtctcaattacggcgtacatctcgccgcgccaacaaccatcctctttctcatgggtctcacgttgacaggagcattcaacacggtctcaactctgctggtagatttctatcccagcaatgcatctgctgctactgcatcaaataaccttgatgacgtcagccgccttgagtcgcagtacagactctgccttgctaccacgattgacaactgtagccactggatgctaccttctcatgtagtgggaaagtcgactgcgatgggtgtcggaacgagaaccctgtcaccaagtacattcacagccctatgcgccaaccatggcttgcagctagagaacagtgacgaacctgcgtatatgcattccattgaaattacacctcttctcggttgcttggagttagctttcgagtga

SEQ ID NO: 4659 - protein, 522 aa, Aspergillus nidulans FGSC A4
MASPQTPSKEGDTGLKGGLDVVATNTTGEVPYSVFTKAQKRYIVFFASWAGFFSPVSSQIYFPALNSIADDLGVTSALINLTLTSYMIFQGVSPMFVGDFADKAGRRPAYMVCFLIYIAANIGLALQDNFAALFVLRCLQSAGSSTTIALSAGVVSDIAIAAERGSYMGFVTAGSLLGPAMGPVIGGLLSQYLGWRSVFWFLTIFAGAFLVPFVLLFPETARAIVGNGSIPPPKWNIPLLTLFQARKEPQPEDFDWPKLRFPNPIRTLSIVFQKDIAIILIANAILFAGFYDVTAAIPSIYNELYGLDDLYIGLCYVPFGLGATVASIATGKLLDFNYRRLAKQLNVPLQETRARNLTHFPIEFARLQVALPLLTLGAFTIIAFGWCLNYGVHLAAPTTILFLMGLTLTGAFNTVSTLLVDFYPSNASAATASNNLDDVSRLESQYRLCLATTIDNCSHWMLPSHVVGKSTAMGVGTRTLSPSTFTALCANHGLQLENSDEPAYMHSIEITPLLGCLELAFE

SEQ ID NO: 4660 - DNA, 2091 bp, Candida albicans SC5314
  CDS (1)..(2091): transl_table=12
atgagtcacagtccaaatttatcacctcaaatcagtaatgacaatatagatgctgatactacatctttagcttcaacagaaactcaacaaaatattcaacatagtcaaatacatcctataggtcatcatggacgagagcaactggaagagccacagaataccaccaaaacaaccaccaccaccaacaaaatccacacaaccacacctctcgtagaccctgatttgggaccattaagggaattagaacaagatctatcatcattagaatcacaacaagaacaatatctaagtcaaaaacctacatctacatcaattaaaaccaataaagtcccattaagagaacgaagaggtttacttgcacaaattgttttgattccagaatatgaagatgccagagattatcccaataaaataaaatatctaattgttttcataattgcttttgcatcattagcaggaccatttggaacttcagtaatgttacctgccattgatgatattgttaatgatttaaatactaatgtatcgacagtgaatgtatccgttggtatttatttattatcattaggtatatttcctctttggtggtcatcatttagtgaacgatttggtcgaagaagtgtttatatggtatcatttactttatttgtggcgttttctattgggacggcattatctcccaatattgctgctttgattgtattaagagtgcttcaaggtggttcatctgctagtgttcaagctgttggagcaggtactattgctgatttatttattcctcaagaacgtggacaagctatgggattatattatttgggccctttggcaggaccgtttttggccccaattttgggtggagctgtatctcaagcttgggggtggagagctactcaatggttattaatgataatttctgcttgtagttttgttctaattacatttttcctaccagaaacattaagaagagttgatactatacaagttgctaaagatttgatgaaaaaactggacaataatggtctgcaaaatgaaaaaattcatgatgattttgccggtgcggacaattctagcgtacacgatatagatggaaaccccattcctggtactgaattacatcaagtggtttcaaatttgagtagaagatcatcaaatgctcgttctattgtaacttatatggaagaacaagaaaatgaaggtccaataattgatccagtgatgcctagtatatctcggttaacaacaaatagatcagcttattctcaaagaatacatcaaaattacgtaactgatgaattaaggaaaacaacatctaatttaactcaatccaaccatccacaatataataataacaacaacaacgacaatgataaatggtcatcagtgaaaaccaattgttatgatttaataatccgtccattacattcaataatattattaaaacatccacctgttgtccttgtcatttcattttcagccatttcctttgctgcaatttattttttcaacatggcgatttcttatgaatacgcacgttcaccatataatttctcatcagtgattcttggattaatgtatatccccaattccgtgacatatttcatggcttctataattggaggtaaatggaatgatcgattattaaatcgatatgctcaaaaacatggagaattggttcctgaaagtagattatcttggaatatcgtcgtggcaataattttatatcccatggcttgtttgatttttggttggacaattaaatatcgtgaattttgggtcataccattaatcggtaccgcattatttggatttgcttctatgcttgttataggtgctaccgtgacttatttggtcgattcattacctgggaaaggtgctactggtgtggcgttgaataatttaattagacaaattttggcggctattgcgacttttatagttgaaccgttattaagagcgattggagcaggtgttttatttagtattattgctgggatattattggtttcttcattggttttgttatatttgaagaaacgaggagcttttttcagagaacattatgatgtcatggatttatatgccaagttgtaa

SEQ ID NO: 4661 - protein, 696 aa, Candida albicans SC5314
MSHSPNLSPQISNDNIDADTTSLASTETQQNIQHSQIHPIGHHGREQSEEPQNTTKTTTTTNKIHTTTPLVDPDLGPLRELEQDLSSLESQQEQYLSQKPTSTSIKTNKVPLRERRGLLAQIVLIPEYEDARDYPNKIKYLIVFIIAFASLAGPFGTSVMLPAIDDIVNDLNTNVSTVNVSVGIYLLSLGIFPLWWSSFSERFGRRSVYMVSFTLFVAFSIGTALSPNIAALIVLRVLQGGSSASVQAVGAGTIADLFIPQERGQAMGLYYLGPLAGPFLAPILGGAVSQAWGWRATQWLLMIISACSFVLITFFLPETLRRVDTIQVAKDLMKKSDNNGSQNEKIHDDFAGADNSSVHDIDGNPIPGTELHQVVSNLSRRSSNARSIVTYMEEQENEGPIIDPVMPSISRLTTNRSAYSQRIHQNYVTDELRKTTSNLTQSNHPQYNNNNNNDNDKWSSVKTNCYDLIIRPLHSIILLKHPPVVLVISFSAISFAAIYFFNMAISYEYARSPYNFSSVILGLMYIPNSVTYFMASIIGGKWNDRLLNRYAQKHGELVPESRLSWNIVVAIILYPMACLIFGWTIKYREFWVIPLIGTALFGFASMLVIGATVTYLVDSLPGKGATGVALNNLIRQILAAIATFIVEPLLRAIGAGVLFSIIAGILLVSSLVLLYLKKRGAFFREHYDVMDLYAKL

SEQ ID NO: 4662 - DNA, 2094 bp, Candida albicans SC5314
  CDS (1)..(2094): transl_table=12
atgagtcacagtccaaatttatcacctcaaatcagtaatgacattatagatgctgatactacatctttagcttcaacagaaactcaacaaaatattcaacatagtcaaatacatcctataggtcatcatggacgagagcaactggaagagccacagaataccaccaaaacaaccaccaccaccaccaacaaaatccacacaaccacacctctggtagaccctgatttgggaccattaagggaattagaacaagatctatcatcattagaatcacaacaagaacaatatctaagtcaaaaacctacatctacatcaattaaaaccaataaagtcccattaagagaacgaagaggtttacttgcacaaattgttttgattccagaatatgaagatgccagagattatcccaataaaataaaatatctaattgttttcataattgcttttgcatcattagcaggaccatttggaacttcagtaatgttacctgccattgatgatattgttaatgatttaaatactaatgtatcgacagtgaatgtatccgttggtatttatttattatcattaggtatatttcctctttggtggtcatcatttagtgaacgatttggtcgaagaagtgtttatatggtatcatttactttatttgtggcgttttctattggtacggcattatctcccaatattgctgctttgattgtattaagagtgcttcaaggtggttcatctgctagtgttcaagctgttggagcaggtactattgctgatttatttattcctcaagaacgtggacaagctatgggattatattatttgggccctttggcaggaccgtttttggccccaattttgggtggagctgtatctcaagcttgggggtggagagctactcaatggttattaatgataatttctgcttgtagttttgttctaattacatttttcctaccagaaacattaagaagagttgatactatacaagttgctaaagatttgatgaaaaaactggacaataatggtctgcaaaatgaaaaaattcatgatgattttgccggtgcggacaattctagcgtacacgatatagatggaaaccccattcctggtactgaattacatcaagtggtttcaaatttgagtagaagatcatcaaatgctcgttctattgtaacttatatggaagaacaagaaaatgaaggtccaataattgatccagtgatgcctagtatatctcggttaacaacaaatagatcagcttattctcaaagaatacatcaaaattacgtaactgatgaattaaggaaaacaacatctaatttaactcaatccaaccatccacaatataataataacaacaacaacgacaatgataaatggtcatcagtgaaaaccaattgttatgatttaataatccgtccattacattcaataatattattaaaacatccacctgttgtccttgtcatttcattttcagccatttcctttgctgcaatttattttttcaacatggcgatttcttatgaatacgcacgttcaccatataatttctcatcagtgattcttggattaatgtatatccccaattccgtgacatatttcatggcttctataattggaggtaaatggaatgatcgattattaaatcgatatgctcaaaaacatggagaattggttcctgaaagtagattatcttggaatatcgtcgtggcaataattttatatcccatggcttgtttgatttttggttggacaattaaatatcgtgaattttgggtcataccattaatcggtaccgcattatttggatttgcttctatgcttgttataggtgctaccgtgacttatttggtcgattcattacctgggaaaggtgctactggtgtggcgttgaataatttaattagacaaattttggcggctattgcgacttttatagttgaaccgttattaagagcgattggagcaggtgttttatttagtattattgctgggatattattggtttcttcattggttttgttatatttgaagaaacgaggagcttttttcagagaacattatgatgtcatggatttatatgccaagttgtaa

SEQ ID NO: 4663 - protein, 697 aa, Candida albicans SC5314
MSHSPNLSPQISNDIIDADTTSLASTETQQNIQHSQIHPIGHHGREQSEEPQNTTKTTTTTTNKIHTTTPSVDPDLGPLRELEQDLSSLESQQEQYLSQKPTSTSIKTNKVPLRERRGLLAQIVLIPEYEDARDYPNKIKYLIVFIIAFASLAGPFGTSVMLPAIDDIVNDLNTNVSTVNVSVGIYLLSLGIFPLWWSSFSERFGRRSVYMVSFTLFVAFSIGTALSPNIAALIVLRVLQGGSSASVQAVGAGTIADLFIPQERGQAMGLYYLGPLAGPFLAPILGGAVSQAWGWRATQWLLMIISACSFVLITFFLPETLRRVDTIQVAKDLMKKSDNNGSQNEKIHDDFAGADNSSVHDIDGNPIPGTELHQVVSNLSRRSSNARSIVTYMEEQENEGPIIDPVMPSISRLTTNRSAYSQRIHQNYVTDELRKTTSNLTQSNHPQYNNNNNNDNDKWSSVKTNCYDLIIRPLHSIILLKHPPVVLVISFSAISFAAIYFFNMAISYEYARSPYNFSSVILGLMYIPNSVTYFMASIIGGKWNDRLLNRYAQKHGELVPESRLSWNIVVAIILYPMACLIFGWTIKYREFWVIPLIGTALFGFASMLVIGATVTYLVDSLPGKGATGVALNNLIRQILAAIATFIVEPLLRAIGAGVLFSIIAGILLVSSLVLLYLKKRGAFFREHYDVMDLYAKL

SEQ ID NO: 4664 - DNA, 1515 bp, Candida albicans SC5314
  CDS (1)..(1515): transl_table=12
atgctatcaacaacacaatcagtcacagaacccactgaggtaacactgaaaaaagttgaagacattgaaaaagaaaatgacgaagaaactccctattcaatattcacttcctacgatagattagtattgatagtaattctttcattaattggattttggagtacgatatcaagtccaatttatttcccagcattacctacattaacatcatatttccacacaagttcatcaatcatgaatatatcagttgtggcatatttgattttccaaggcatcgctccgacaatctcatctaatttagcagacacatttggcagaagaccagtgatactagcgagtataatagtattctgtgcctcttgtgtcgccatttcacaaacaaatgtttattggctactagcggtattacgatgcattcaagctgcagggatagcagcagtcatttctataagttcaggtgtagcaggtgatgtgtgtactagagccaatcgtggaagtatggttggagcagttgctggtttacaattagttggcaatggaattggtggattggtgggtgcagctttgatcagttcattcaatagttggagatcaatatttatatttttaactattggaggtggtgtcacatttatattggcgatttttatattaccagaaacatcaaggaaattagttggaaatggatcagttgtacctaaaaacattttaaacaaatcaccatatatttaccttccacatttcaagaaaagaatgaataatgacataactacaatagtaccggcaactaggtttgatttattaggtcctttgaaaatttttttccaaaaaaatgtcttttgcacactattacctgtgggaatacattttgcagcatggacgatggttttgacttcattgtctactgagttagagtctaggtatcattacagtgtcatgcatgtaggcttgatttatctccctcaagggattgcttgtattgctggttctttggtagtagggaaatctttggattggtattaccgatacagaaagacaatatatgaccaagaagttgaatgtttaccattggacgaaagaccacaatttaatatcgtggctactcgattaaccctaagtgttgttcctgccttgttaatgatcattggattggtgatatttggttggtgcattcaatataaacgacatataatatccattataatttctactattttagtatccttttctgcatcagtctttatagctatttgcacaaccatgttggttgatttatatcctaataatggaagcggatctactagttgtcttaatttgatgagatgttggttagcagctttgggagccggggttttagatagtatgatcaatgcaatgaatgttggaggaacatacactgtcgttgctgggttttgcattttatttgatctagcattgatttacgttttacataatgccaaaaagaagtttagtaatagtgggccaaccaccacgaaatccccacccaaacaatag

SEQ ID NO: 4665 - protein, 504 aa, Candida albicans SC5314
MLSTTQSVTEPTEVTSKKVEDIEKENDEETPYSIFTSYDRLVLIVILSLIGFWSTISSPIYFPALPTLTSYFHTSSSIMNISVVAYLIFQGIAPTISSNLADTFGRRPVILASIIVFCASCVAISQTNVYWLLAVLRCIQAAGIAAVISISSGVAGDVCTRANRGSMVGAVAGLQLVGNGIGGLVGAALISSFNSWRSIFIFLTIGGGVTFILAIFILPETSRKLVGNGSVVPKNILNKSPYIYLPHFKKRMNNDITTIVPATRFDLLGPLKIFFQKNVFCTLLPVGIHFAAWTMVLTSLSTELESRYHYSVMHVGLIYLPQGIACIAGSLVVGKSLDWYYRYRKTIYDQEVECLPLDERPQFNIVATRLTLSVVPALLMIIGLVIFGWCIQYKRHIISIIISTILVSFSASVFIAICTTMLVDLYPNNGSGSTSCLNLMRCWLAALGAGVLDSMINAMNVGGTYTVVAGFCILFDLALIYVLHNAKKKFSNSGPTTTKSPPKQ

SEQ ID NO: 4666 - DNA, 1530 bp, Candida albicans SC5314
  CDS (1)..(1530): transl_table=12
atgccaggaaaccgagaagaatttgatatcgaaaaggtattaaagtccaagaaattagaagctattgaaacttcaactgaaaaaaaagcaccatataccgtgtttgaaagcacagataaactactactaattatagttttatctttggttggattctggagtgctatttctagtccaatatatttcccagctttaccaacgctaacaaaatatttcaataccacaccttcagtgatgaatatatcggttgttgcttacttgattttccaaggtattgcaccaacaatttcatccaacttggccgatacatttggccgaagaccagtaatattagggagtattattgttttctgtgccgtgtgcattgctatatcacaaacaaatgtgtactggctattggcattattgcgttgttttcaagctgctggcattgctccagtatttgcaataagttctggtgttgctggtgatatctgcaccccagctaaccgtggcggtatggttggtgcagtttctggtttgcaattagctgggaacggaataggtgggttggttggtgcagcattgatttcagggttccatacttggagagctatatttatatttttggctatcggtggaggagtcacttttatttttgcctttttagttttagcagaaacatcacggagaatagtggggaatgggtccataaggcccaaaaatgtgttgaacaaagcagtgttgatttaccttccacattttaaaaacaagataacaaatgattactcaacattgcaaccaaagggaccatttgatattttgggaccttttaaaatatttttccaaaaggaggtgttctgtactttattgccactgggtatgcattttgccgcatggacagtatccttaacttccctttctactgaattagaatcagcaaaatataactattcggtaatgaaagttggtttagtgtatttgcctcaaggtatcgcctgcttcattggctctttaatagctggtcgctgtttgaattggtactatcgctacagaaagaatttgtatgataaacaaatgaatgacgttcctttgaatgatcgcccaccttttaatttggttgcatctagactaacattgactatcgtgcccttagccatgatggttattggtctttcagcatttggttggtgtctcgaatataaaaaacctattatatcaattatcatttccaccattttgatttccttttctgcttctgtcatgatgtctatttgtacaacaatgttagttgacttgtatcctaaacagagtggtgcatctgcttcgtgcgtcaatttaatgagatgttggttagcagcattgtttactggtgttcttgacaaaataataagtgcattgggtttaggaggcacatacacacttttgactggaatttgtttactcacggatcttggtttggtttatgttttatacacagccaatcaaagatttgtaaactatgttctgccaaatcaaactgcagtaaattctgatgccgaagactactaa

SEQ ID NO: 4667 - protein, 509 aa, Candida albicans SC5314
MPGNREEFDIEKVLKSKKLEAIETSTEKKAPYTVFESTDKLLLIIVLSLVGFWSAISSPIYFPALPTLTKYFNTTPSVMNISVVAYLIFQGIAPTISSNLADTFGRRPVILGSIIVFCAVCIAISQTNVYWLLALLRCFQAAGIAPVFAISSGVAGDICTPANRGGMVGAVSGLQLAGNGIGGLVGAALISGFHTWRAIFIFLAIGGGVTFIFAFLVLAETSRRIVGNGSIRPKNVLNKAVLIYLPHFKNKITNDYSTLQPKGPFDILGPFKIFFQKEVFCTLLPSGMHFAAWTVSLTSLSTELESAKYNYSVMKVGLVYLPQGIACFIGSLIAGRCLNWYYRYRKNLYDKQMNDVPLNDRPPFNLVASRLTLTIVPLAMMVIGLSAFGWCLEYKKPIISIIISTILISFSASVMMSICTTMLVDLYPKQSGASASCVNLMRCWLAALFTGVLDKIISALGLGGTYTLLTGICLLTDLGLVYVLYTANQRFVNYVSPNQTAVNSDAEDY

SEQ ID NO: 4668 - DNA, 1827 bp, Aspergillus fumigatus Af293
  CDS (1)..(1827)
atgactcaagatgaagacaagaagactgaaaatagtagatcgcgatcgacctcagtaaatagcacggatgacagtcagcacctgtcacccacaagttcaagggaatcagaacgttcgcggagcttgagagtcctatctataacgagaacaaggtcggaatctaggcctagaagggggaatctcgacagagtgtattctggcaggcatctggacgatcaatcggtctaccatagcgacgatgacgtccctaaagcccacgcagcaagcttacctcgggaggacgatgacgagaagcagggaagcgccgtgcttgaagttcggggagggatcttgaacgaacgcgacactgacttggaagagggtactcgtgaccagagtgcgctagaaaagtcacgaacggccaagtctgatagatcgcggcgggatcctaaactggtaacatgggatggccccgatgaccccgagaaccccaagaactggccaaacaagaagaaatgggctgctattatcacggtttcccttttcacttttatctccccagtatcatcatccatggttgctcctgcgttgccgtcgattgcaagtgattttcatatcgaggaccaggtctcttctcagcttactctgtccattttcgtattggcctatgccgtcggccccctgtttctgggaccgctttctgagatctacggaagagttattgttctgcaattgtccaacctattctatctcgtgttcaacatcgcatgcggtgtctcgcgaaccaaggggcagatgatcgcttttcggtttctttctggccttggaggcagtgctcctttagcggtgggtggaggtgtgctttcggactgttttaaaccagaagagcgtggaaaaagtgttgcaatctacagtcttgctccgcttctgggtccagctgtcggtcctatagtcggtggcttcatttctcaagacaccacctggcgatgggttttttatgccacctccattgctgacggagctatccaaatcggcgggctattcttcctccgtgaaacatatgcacccaagatcctgaaacggagagcagagcggatccgaaaagagacgggtgattcggcgtaccagactgaaaccgagcgacagaacaaaaccctttcacaaacaatgcagacggcgctcgtgaggccgttccgcctcttgtccacccagcccatcgttcaagtcttggccctgtacatggcttttatctatggcacgatgtacctcgtcctttcgacgttcagctctctgtggactcgtgtctacaacgaatctacgggcattggtggtctgaactacatctcccttgggttgggattctggttgggctctcagctctgcgctccactgaatgaccgcatttatcgccgactcaaagcccgtaacaacaatatcggcaggcccgaattccgagtacctctcctggtggtgggcgcattcctcaccccagtgggtctctttatctacggctggaccgctcagtttcgccgtcattggattgctcccaacattggtgcctgcctcttcggtgctgggaacatcatcgcctttcagtgcatccagacctacatggtggatacatacacgagatttgctgccagcgccctagccgcggtggctttcttacgttgcatatgtggattcgcctttccgctatttgcaccgtacatgtacaacgccctgcactacggatggggcaatagtttattggcctttgtgtctattggtttgggaataccggcaccgatattcctctggaagtacggagagattctgcgtaagcgcagtccatatgcggcgggttag

SEQ ID NO: 4669 - protein, 608 aa, Aspergillus fumigatus Af293
MTQDEDKKTENSRSRSTSVNSTDDSQHLSPTSSRESERSRSLRVLSITRTRSESRPRRGNLDRVYSGRHLDDQSVYHSDDDVPKAHAASLPREDDDEKQGSAVLEVRGGILNERDTDLEEGTRDQSALEKSRTAKSDRSRRDPKLVTWDGPDDPENPKNWPNKKKWAAIITVSLFTFISPVSSSMVAPALPSIASDFHIEDQVSSQLTLSIFVLAYAVGPLFLGPLSEIYGRVIVLQLSNLFYLVFNIACGVSRTKGQMIAFRFLSGLGGSAPLAVGGGVLSDCFKPEERGKSVAIYSLAPLLGPAVGPIVGGFISQDTTWRWVFYATSIADGAIQIGGLFFLRETYAPKILKRRAERIRKETGDSAYQTETERQNKTLSQTMQTALVRPFRLLSTQPIVQVLALYMAFIYGTMYLVLSTFSSLWTRVYNESTGIGGLNYISLGLGFWLGSQLCAPLNDRIYRRLKARNNNIGRPEFRVPLLVVGAFLTPVGLFIYGWTAQFRRHWIAPNIGACLFGAGNIIAFQCIQTYMVDTYTRFAASALAAVAFLRCICGFAFPLFAPYMYNALHYGWGNSLLAFVSIGLGIPAPIFLWKYGEILRKRSPYAAG

SEQ ID NO: 4670 - DNA, 1719 bp, Aspergillus fumigatus Af293
  CDS (1)..(1719)
atgaatgagaagtgtggcctgcccggtaaccaaggcgattccgctgctgaacatccaggtaactgcacacgcgctgaaccagacgaaggcagacaaaagaaactggaagatgaaatcggtacaactatcaaagttgctgctgaacggcaagagagaactgcagagaatccacatcttgtaccagagactgtcaaggttactggtgaacacgcttccgcggctgcagcaacagggccaccatactgcatcctgtccgaacgcaaaaagatcttcgtcatactcttggtctcattcgcagccatcatctcccccatctccagcagcatctattttccggctctgaacagtctcgcaaaggacttgaatgtctccgtctcgctcatcaacataacgatcacaacctatctgatattccaaggaattgcgccgtcattcatagcgaactttgcagacacccatgggcgacgccccgcctacctgatttgcttcaccatctacctagctgccaatatcggtctcgcggtccaggatagctatgcgtcactcttggtcctgcgctgcctgcaaagctcaggcagcagtgggacgattgcgctaggaagcgcagtcgtcgccgatctatcaacccgagcagagcgaggcaagtatatcggatacgccagtctaggcgtgaccctcggccccgccttgggaccaatcatagggggtttactggaccattaccttggctggcgggcggtcttttggttcctggtgatcttaagcagtgtcctcgggaccgtcattgctatcatcttgcccgaaacctgccgcgcggtggtgggaaacggctctgtccctgctgccaagtggaatcggcctgcatggcagatactgcggcagaaccggagggctcaaaggcaaacgccaacgccggactatcacaccatcgagaaaaggcgtcgacgcgccaatccgatcgcatctgccctgattgccaccgacaaggaagcactcatcattctgatctacggctcgctcttgttctccggctacatggccgtcttgagcaccttgacttcccagctgcaaagtagattccacttcaactccattcaagtcggactctgctacctgcccattgggatcggcagtctgagttcccgatggacagtcgggcggattctagactggaacttccgccgagaagcccgacggcagggcctcgccatcgaaaagaaccgacagcaagatatccgccatttcaacatcgaggctgcccgcttggcggtgacgattcccctagtctactgcgcctgtctgtgtatcgtagcctacggctgggtcatggagtttaagactgcgcttgccggcccggtggtgatgctcttcttcatggggcatctgacctccggggcgttcagctcgctgagtacattgattgtggacctgaaccgacagagccctgccactgcagtcgctgcgaacaatctgttccggtgtctgttgggtgccggagtcgttgcggctgcggatccagtgatccagcacatagggatcggctggacagccacgctgattgcgtttctgtgggtgcttttgagcccgcttatgtgggctgtatctcgatgggggcatggatggagagagaagcgtattagcaacgaaaaggaggcgagcccagccgaagagctttcccgacctgtgggggaagttccaacggccaaggagggtgtttga

SEQ ID NO: 4671 - protein, 572 aa, Aspergillus fumigatus Af293
MNEKCGLPGNQGDSAAEHPGNCTRAEPDEGRQKKLEDEIGTTIKVAAERQERTAENPHLVPETVKVTGEHASAAAATGPPYCILSERKKIFVILLVSFAAIISPISSSIYFPALNSLAKDLNVSVSLINITITTYLIFQGIAPSFIANFADTHGRRPAYLICFTIYLAANIGLAVQDSYASLLVLRCLQSSGSSGTIALGSAVVADLSTRAERGKYIGYASLGVTLGPALGPIIGGLLDHYLGWRAVFWFLVILSSVLGTVIAIILPETCRAVVGNGSVPAAKWNRPAWQILRQNRRAQRQTPTPDYHTIEKRRRRANPIASALIATDKEALIILIYGSLLFSGYMAVLSTLTSQLQSRFHFNSIQVGLCYLPIGIGSLSSRWTVGRILDWNFRREARRQGLAIEKNRQQDIRHFNIEAARLAVTIPLVYCACLCIVAYGWVMEFKTALAGPVVMLFFMGHLTSGAFSSLSTLIVDLNRQSPATAVAANNLFRCLLGAGVVAAADPVIQHIGIGWTATLIAFLWVLLSPLMWAVSRWGHGWREKRISNEKEASPAEELSRPVGEVPTAKEGV

SEQ ID NO: 4672 - DNA, 1533 bp, Aspergillus fumigatus Af293
  CDS (1)..(1533)
atgtcttctacgggcggtaaaacccctacatccaacacgaaaactcatccaactgttatgaccgacccgccctacagcatcttcgatacacgccaaaaatggctgatcatcatcattgtctcgacggccgcgacgttttcgggctttgcttccaatatatacttccccgcgctgccaaccattgcgattgatctcaatgtatccctcgaactcgtcaaccttaccgtcacatcgtatcttatcttccagggcctagcaccaagtttctggggcccagtctccgacgtaaagggccggcgcaccgcctacatctgcacatttatcgtctttttctgcgcgtgcattggccttgcggagactaagaactatacgacgttgatcgttgtgcggtgccttcagagtgccggtagcgccagcacgatcgcgattggatctggcgtgattggcgacatcaccactcgtgctgaccgcggcgggtatatgggtgttttccaggcagggcttcttgtcccagtggctgtcggaccagttatcggaggggcaatcgcaggctccctgggatggaaggctatcttctggttcctggctatctacagtggtgttttcttgtgtctgctgactctcgtgctgcctgaaacacttcggtccattgttggcaatggttctcgaaagccttcccatccagtactcaggtacccactgaacctttatcagaagtcaagcaagatgccatggcagcagcctcaggatggcttgtccacagcggaagcaaagaagaagattgaccttctgggcccgcttcgcatgctgctgagtaaccacgcagcgccgatcatcctcttcctggcggtctactatgcagtctggcagatgagcattaccgcaatgtcttcactcttcaaaagccgctacggactgtctgagctccagatcggcctaacctttatcgccaacggggttggctcaatggtcgggaccctcgtgacgggcaaaatcctcgatgccgattaccgtcgcgtcaagacaaagtatgaggcttcattcgacaacgagcatcgagatgcaatgtcccagactgctcgagaggagaattttcccctagagagcgcgcgtctccgccttgtacccatcttctccatcacccagtgcgtttccatcattctgtttgggtggacaatccagtaccccgataaagtccacatcgcagtgcctattgtttcaacctttatcacagggtggaccgcggtctccacgcagtctctgatcatgacatatctggttgacctcttccctgataggagcgccgccgcaagcgctagcctgaacctggcgagatgtctgtttgctgctggcggtaccagtttcatcatgcctatgatcaatggggtgggcgttggagtggcatttacgatctgcgttgctgtacagatggtggcgttgattggtcctctgattcagtggagattcgctgctggatggagaaggaaagagagggaggaagctgcaaaaagggaggggcagggtgaatgttga

SEQ ID NO: 4673 - protein, 510 aa, Aspergillus fumigatus Af293
MSSTGGKTPTSNTKTHPTVMTDPPYSIFDTRQKWLIIIIVSTAATFSGFASNIYFPALPTIAIDLNVSLELVNLTVTSYLIFQGLAPSFWGPVSDVKGRRTAYICTFIVFFCACIGLAETKNYTTLIVVRCLQSAGSASTIAIGSGVIGDITTRADRGGYMGVFQAGLLVPVAVGPVIGGAIAGSLGWKAIFWFLAIYSGVFLCLLTLVLPETLRSIVGNGSRKPSHPVLRYPLNLYQKSSKMPWQQPQDGLSTAEAKKKIDLLGPLRMLLSNHAAPIILFLAVYYAVWQMSITAMSSLFKSRYGLSELQIGLTFIANGVGSMVGTLVTGKILDADYRRVKTKYEASFDNEHRDAMSQTAREENFPLESARLRLVPIFSITQCVSIILFGWTIQYPDKVHIAVPIVSTFITGWTAVSTQSLIMTYLVDLFPDRSAAASASLNLARCLFAAGGTSFIMPMINGVGVGVAFTICVAVQMVALIGPLIQWRFAAGWRRKEREEAAKREGQGEC

SEQ ID NO: 4674 - DNA, 1725 bp, Aspergillus fumigatus Af293
  CDS (1)..(1725)
atgtctggtggagtgcgcgaaatccaggaggaaggagtcgcgccctcctgttcttccaacggcggcgggaatgttattcaataccatgtcgagaagccggcagaggcatcctcaggctcagatccttctgctctggaagctcagaaggccatgacccttgaggcagacggggaaaccgatggtggagctcattcggcctttagcaagaaggagaagcgcttcatcgtcttcatgatctccatggcgtcgttcttttctcctctttctgcccagatctatttccctgtcatgccaacgcttgtggaaaattaccatcttactacggccttgatcaatctcaccatcactacgtacctgatcttgcaaggtctggctccgagcttcattggcacttttgccgactcgggaggtcgtcgtccggcatacattcttgctttcactgtctacctggctgctaacattggcctcgcattgcagaatagctacgtggcgctgatggttcttcgctgcatccaaagcgcgggtagcagtggcaccattgcctttggctatggagttgtagcggacattgcaacggcggcggagagaggaagcttcatcggacctgtgtctgcgggcgttatggtggcgccggctctcgggcctgtcattgggggtattttggccaagtttctcggttggagaagtgttttctggttcctcgttatcatcagtggtggctacctggtggtgttcatgaccacaatgccagagaccaatcgcaatatcgtcgggaatggcagcgtccctcccgatcaatggtggaggatgtctgtcattcagtacttggccgcacgtcgccgactacagaagatgacaaccgaagaacgcattgcccatcaacagcagagagcgaatctcaaccaagcacgtgggcatcagaagctttcgtttcccaatccactcaaggctttcgttatcttgctggagaaagatgcattcatcgtggtctcttatgtcggactggccatgttggctaacactgcgctcttgacgagtacacccaatctctttggcaagctgtatggctttaacgaccttcagattggtctttgctacattcctctcggagtgggttcatgcatcgcagccattctcaacggcaagctgctggatttcaactatcgccgtattgctcataaaatgggcatgccagtggatcgaaaaaagggtgacgatttgcggggcttccctatcgagaaggctcgtcttcaggctttctttcccctcatggctctcggtgtagctgccttcatcccgtacggctgggtccttcagcagggagcgccgctggcagtaccccttgtcctgcagttcatcatcggattcagcttcatcgcctccctcaacactctgagcacgctcatggtggatctgttcccagaccgagcgtctaccgcgtctgcagcatctaacctcgttcgatgctggctgggagctgtcggtgccgcggtgattgaccatatgcttaacgctatgggctggggctggtgcttcgtcttctggggcctgttgatgctggttggtctaggcctgctattggtggagtatcatcgtggcatgcaatggcgtctggcaagactcgccaagctggatcagagacaagtggagaaggagactcagaaggccgcaagtgagaacaaggaggcacacggagatgagaacgaggctaattcggatacctga

SEQ ID NO: 4675 - protein, 574 aa, Aspergillus fumigatus Af293
MSGGVREIQEEGVAPSCSSNGGGNVIQYHVEKPAEASSGSDPSALEAQKAMTLEADGETDGGAHSAFSKKEKRFIVFMISMASFFSPLSAQIYFPVMPTLVENYHLTTALINLTITTYLILQGLAPSFIGTFADSGGRRPAYILAFTVYLAANIGLALQNSYVALMVLRCIQSAGSSGTIAFGYGVVADIATAAERGSFIGPVSAGVMVAPALGPVIGGILAKFLGWRSVFWFLVIISGGYLVVFMTTMPETNRNIVGNGSVPPDQWWRMSVIQYLAARRRLQKMTTEERIAHQQQRANLNQARGHQKLSFPNPLKAFVILLEKDAFIVVSYVGLAMLANTALLTSTPNLFGKLYGFNDLQIGLCYIPLGVGSCIAAILNGKLLDFNYRRIAHKMGMPVDRKKGDDLRGFPIEKARLQAFFPLMALGVAAFIPYGWVLQQGAPLAVPLVLQFIIGFSFIASLNTLSTLMVDLFPDRASTASAASNLVRCWLGAVGAAVIDHMLNAMGWGWCFVFWGLLMLVGLGLLLVEYHRGMQWRLARLAKLDQRQVEKETQKAASENKEAHGDENEANSDT

SEQ ID NO: 4676 - DNA, 1581 bp, Aspergillus fumigatus Af293
  CDS (1)..(1581)
atgacagggcgatcgagtatctctcaaccaccagccacggactcaacacctctgctctcctctcatgcagcatcacagcggttttcagtcttcacaaatggacagaaacgcctcatcattcttgcagctgctctagcctcgagcttctcacctttctcggccaacatctactatccctctctcaattccatcgcggcagatctacatgtcacgagttctcagatcaacctgacaattactacctacatgatatgtcaaggcctcgctccctccttcatgagttccttcgcggaccaagccggccgacgcccagcatacatcgtctgctttgtcatctacatcatcggcaacattgccctcgcgctccaacacaactatatcgctcttctagccctccgcgccgtacagagctgtggaagcagcggcactgtcgcactcgcctctgccgtggcagcggacgtcatcacatctgccgagcgaggcatgtacatggggatcacctcgcttggcaatatcctcgctccatccctaggcccaattctaggcggtttcctgagtcagtacctaggctggcaggctatattctggcttcttgccttcgccgcagtaaccttcttcataccactagtcatcttctttccggagacttgtcgcacgattgtcggagacgggtcaatcccagctacaggatggaatcagtcagtctggaaccggtggcacaaacaacagaccattgctacttccaactctgaccccgaaggcacccgagacacctgccgcgactcccatccacggcttcaaaaaacaaacatcgccatcccaaatcccctgtccaccatcagcctcctcttccaactccccacaggccccctcgtccttgccaacggcatagtcttcgcaagctactactccgtcacagccggcattccctcccaattcaaagcaacctacggactaagcgacttaggcatcggcctcagcttcattccagcaggcctaggttccctcctcagcgcaaccttgaacggcctaatcgttgactggaactacatccgcctccgtcgcaaaacaggcgacatcatctctaaagaccagaagcaagaccatggtgcatttcccatcgagaggacacggttgcagatcgggcttcctatgacggtacgttgcgttgcaccttctgacctcctatacttcaccagggttgtagtcgcagcagcactttcagttgcctggtacggcgcactgatagaaagcaaacccccactgaacattgcgctggcccttgtgctcctcatctcattctgcatcacggctgcatacaacgtgatgaacgtcctcatcgtggatctgtactacaccacgccggcgaccgccatggcggccaataacctcgtgcgatgcttcctgggcgcagccgccacggccgtcatccacccgatgatactaaaatggggtaatcggactacgtacttggctgtggcgggagcgatgttgagtgtgagtccgttgctggggatggtctattggaaaggactggtatggagacgcaggaggattgcaggaattgcaattgctggatga

SEQ ID NO: 4677 - protein, 526 aa, Aspergillus fumigatus Af293
MTGRSSISQPPATDSTPLLSSHAASQRFSVFTNGQKRLIILAAALASSFSPFSANIYYPSLNSIAADLHVTSSQINLTITTYMICQGLAPSFMSSFADQAGRRPAYIVCFVIYIIGNIALALQHNYIALLALRAVQSCGSSGTVALASAVAADVITSAERGMYMGITSLGNILAPSLGPILGGFLSQYLGWQAIFWLLAFAAVTFFIPLVIFFPETCRTIVGDGSIPATGWNQSVWNRWHKQQTIATSNSDPEGTRDTCRDSHPRLQKTNIAIPNPLSTISLLFQLPTGPLVLANGIVFASYYSVTAGIPSQFKATYGLSDLGIGLSFIPAGLGSLLSATLNGLIVDWNYIRLRRKTGDIISKDQKQDHGAFPIERTRLQIGLPMTVRCVAPSDLLYFTRVVVAAALSVAWYGALIESKPPLNIALALVLLISFCITAAYNVMNVLIVDLYYTTPATAMAANNLVRCFLGAAATAVIHPMILKWGNRTTYLAVAGAMLSVSPLLGMVYWKGLVWRRRRIAGIAIAG

SEQ ID NO: 4678 - DNA, 1140 bp, Bacillus anthracis str. A2012
  CDS (1)..(1140)
atgagtgccctactcggttccttcgctcaaaatatttacacacctatcttaccgatgattcaaaattcttttcacacttctctttatcttgtaaatgtaacagtttcacttttcacatttgttcttgcgattatgcagctcatatatggacctttaattgatacaaaaggaagaaagtctgtccttatccctagtttaattattagtacaattggttcaataggatgtgctttttcggcaaacatttatttatttctcttttttagagctgttcaagctataggaatagcggctatacctgtagtcgcagcaacgattattggcgatttatttgaaggaaaagaacgaggagaagcaatgagcctttatcaaatgttacttgctcttgcacctgcgattggccccctcattggtggttatctcggtagtataaacggccatgtatccgtatttctctttttatctatacttggcattctcttattaacgataaacatttcactacttccagaaacaaaaccaactgtaagtcagcaaccgcaatcaaaaaagaatcactggtttatcttaaaaaataaaactggattttctattactcttattggcttcattcaattttgtatttacttttgtttcctcgtttttttaccgagcatttcaacaaatttatttcacttaactgcaagtgaaattggtcttatgtttgtacctatgtccctttctattatgttaggaagttattgcttcaaacttttgcaaaaacgcttcacaacaaaacaagctttattcattacaagtttcttcaatattatatgtgtcactttattttctttcacatatagcatcaatattccattcatcattatcgttacatctttgtacggttttagcatgggactttctatgccaacccacactactttattaacggaggaattcgtacaagaacgcgcaaccgctatcggtatgtataacttcatccgctatctcggtatgggaacagtaccacttgtaggtggatttcttgtatttaatcaaaattacttttggattttcttcttaggagcaattatgtttctactcataatcttatatgcgatgaaaatgctacgcttccctaccacacaaaaagtaaaatag

SEQ ID NO: 4679 - protein, 379 aa, Bacillus anthracis str. A2012
MSALLGSFAQNIYTPILPMIQNSFHTSLYLVNVTVSLFTFVLAIMQLIYGPLIDTKGRKSVLIPSLIISTIGSIGCAFSANIYLFLFFRAVQAIGIAAIPVVAATIIGDLFEGKERGEAMSLYQMLLALAPAIGPLIGGYLGSINGHVSVFLFLSILGILLLTINISLLPETKPTVSQQPQSKKNHWFILKNKTGFSITLIGFIQFCIYFCFLVFLPSISTNLFHLTASEIGLMFVPMSLSIMLGSYCFKLLQKRFTTKQALFITSFFNIICVTLFSFTYSINIPFIIIVTSLYGFSMGLSMPTHTTLLTEEFVQERATAIGMYNFIRYLGMGTVPLVGGFLVFNQNYFWIFFLGAIMFLLIILYAMKMLRFPTTQKVK

SEQ ID NO: 4680 - DNA, 1902 bp, Cryptococcus neoformans var
  CDS (1)..(1902)
atgggagaacaaaatcaaataccatcaagtacaaagcaaatcgactctgtcgacaacaagacacgccactcgtccgacacaagcagcgaagatgagaccttgcaggacgagctacacagcaaggtaaagcatggcgagaaggtggctgaagaagagagaaacggtcacaatgaaggtacccttgtccatccagatcccatcaccgataacatggaatcagcaccttcatcaggccccgaacgtcaaatacaaaactcgcaagatgctctcagtccccaatcgagcagagtccacaatcccccatcaacaccatttgcgtctcttcaacccacacgttcccaacgcccttactctgccttctccaaatccacaaagcttcttctagtcgttttaggcggcatcgctgccatcttttctcccatctcctctaacatctttgttccggctatccccactctggcagatgctttcaaccgttcagagtctgacatatcccaagcagtcactgtctatctggtattccaggctattacaccttcattcttcgggtctatgtctgattcctttggcagacgacctttatatatcgccacactcattgtttacctcggcgccaatatcggtctggcactaatgcctactaccaaatactggcttctgctcttcttacgagcactacaatcaacgggtgggagtgcggttattagcattggatatggttgcatttcggatgtagcggagccaagagagaggggcaaatatgccgctgcattccaaatgggtgcaatggcaggccctgcgtttggcccattaataggaggtattctgacgcaaggtctagggtggagaagtattttctggtttttggccattgcggacggtgtcgtcctgatacctttaatattcttcttgcccgaaaccttgcgatccctcgtaggagatggctccattccacctccttccctcagcgcttctcccgtcgagctctaccaacgccgaaagttggccaaaaagatggcggagacgggcgaagagctggaacctgtccatcgtcctccgcccaaaccctatcgaccattctcgacctttgctattctccttgtaccagaaatcttcttggcgttcttctttgcctcattactttacctccagttctacgctagcttgacgctcttctcgaccgctttgaaaaattcttacggtctctctgaactcaagatcggtctttgctacctcccatcgggtataggcagtatcatctcttcgcagctgaacggccgtcaactcgactattactttcatcgagaagaacgtcgtgtcgggggcgattaccgagccaaaccagaagagtttgatatagagaaaacacgaatcaggtgtttgtttccttttgcagtctgttcttgtttagccaccgtggcacaaggctggtgtcttcaggcaaaggccaatcttggagctacactggtgatgaattttctggtgggcttgggatcaggaacgattgggagcgtcactgtatatggacaagatatcaagagcaacaaaggcggagcagtatctgctgctctcaaccttgtaagatgtatttttggagccattggtgtcgcgtccattcaatcaatgtacaacacattgggtgcagggtggacttttgtccttcttacaggcttggttgtgattgcctctcctcttcctatcatcgttatcaagaaaggacgaggctggcgggataagaggaaagagaagaaagaagcgaagaatgaagaaaagaaagcgaagaaagaggccaaagcggaaatgacggagaagcaagtaaacacttcggatgcagaaacaggggtaaaaggtcaaatcgtcaacaagacagatgtagaagcaggagtcgggacaaaggtatga

SEQ ID NO: 4681 - protein, 633 aa, Cryptococcus neoformans var
MGEQNQIPSSTKQIDSVDNKTRHSSDTSSEDETLQDELHSKVKHGEKVAEEERNGHNEGTLVHPDPITDNMESAPSSGPERQIQNSQDALSPQSSRVHNPPSTPFASLQPTRSQRPYSAFSKSTKLLLVVLGGIAAIFSPISSNIFVPAIPTLADAFNRSESDISQAVTVYLVFQAITPSFFGSMSDSFGRRPLYIATLIVYLGANIGLALMPTTKYWLLLFLRALQSTGGSAVISIGYGCISDVAEPRERGKYAAAFQMGAMAGPAFGPLIGGILTQGLGWRSIFWFLAIADGVVLIPLIFFLPETLRSLVGDGSIPPPSLSASPVELYQRRKLAKKMAETGEELEPVHRPPPKPYRPFSTFAILLVPEIFLAFFFASLLYLQFYASLTLFSTALKNSYGLSELKIGLCYLPSGIGSIISSQLNGRQLDYYFHREERRVGGDYRAKPEEFDIEKTRIRCLFPFAVCSCLATVAQGWCLQAKANLGATLVMNFLVGLGSGTIGSVTVYGQDIKSNKGGAVSAALNLVRCIFGAIGVASIQSMYNTLGAGWTFVLLTGLVVIASPLPIIVIKKGRGWRDKRKEKKEAKNEEKKAKKEAKAEMTEKQVNTSDAETGVKGQIVNKTDVEAGVGTKV

SEQ ID NO: 4682 - DNA, 1401 bp, Cryptococcus neoformans var
  CDS (1)..(1401)
atggcggagccgccttatactaccttcaccaaatggcaaaagctgtcgctcgtcgtcgttgcatctctctcagcctccttcagcggctttgcatctaatatatatttccctgctattccagtcatggctacctcccttggcacctctattgaaaacattaatttgacggtgacgtcgtatatgatcttccaagctatcactccgacattttggggtgccatttctgacgcttatggcagacgactggtcctcatatccacacttacggtattcttctctgcttgcattggccttgcgttagtcaagcactattaccagcttgtcatcctgcggtgtttgcaaagtaccggaagcgcaagtaccattgcaatcggctcaggcatcattggagatgtggcagacaggaaagagcggggaagctatatgggcttctttcaaacaggtcttctacttccattagctattggacctgttttaggcggtatttttgctcaaacattaggctggcgggccatcttttggttttttgtcatttacgcagggatattccttctaattctggcactatttctgccggaaactttgaggcgtatagtaggcaacggtgctatctaccctcctgctcgatcacgaacgcctttggagcatttcctagcttcgagggacaaaaccctaccccctataacttcagcaacacccatacgaccggactggatagcccctttgcgcattctctttgtacctgacgtttttttaacgctttcctttctctctctacattacgcaacatggcagatggcgattacagcccaatcttctctgttcaagagcatttacaacctgaacgaaattgagattggtcttacttttatcgccaacggctttggctgtatgctcggtactctttcaattggtcggttcctcgactatgactaccagcatttcaagaaaaagttttccggacctacatcagacttccccatcgagcaagcccggcttcgtactgtctggttctggtctccgttccagtgcgccgcagtcctatggtttggctggacgttggatcaaaaggtacacatggcgtcccctattgtcgcatcttttgtcctagcatgggcagcgatgtccatccaagccgttattagtacctttatcgtcgacatattccccaaatcaagcgcatctgctacagccgctctcaacctcgccagatgtctgatgggtgccggtgcaacagcttcggtagaaccgtcgatcaatactttgggtgttggtttcacatttacactatgggcatgtctaatggcattgtcgttggcgtttgttggagtacaaatgcgctttggcccagcatggcggaaaagaagagaaaaaagacttgaagaaggggagaagggctag

SEQ ID NO: 4683 - protein, 466 aa, Cryptococcus neoformans var
MAEPPYTTFTKWQKLSLVVVASLSASFSGFASNIYFPAIPVMATSLGTSIENINLTVTSYMIFQAITPTFWGAISDAYGRRLVLISTLTVFFSACIGLALVKHYYQLVILRCLQSTGSASTIAIGSGIIGDVADRKERGSYMGFFQTGLLLPLAIGPVLGGIFAQTLGWRAIFWFFVIYAGIFLLILALFLPETLRRIVGNGAIYPPARSRTPLEHFLASRDKTLPPITSATPIRPDWIAPLRILFVPDVFLTLSFLSLHYATWQMAITAQSSLFKSIYNLNEIEIGLTFIANGFGCMLGTLSIGRFLDYDYQHFKKKFSGPTSDFPIEQARLRTVWFWSPFQCAAVLWFGWTLDQKVHMASPIVASFVLAWAAMSIQAVISTFIVDIFPKSSASATAALNLARCLMGAGATASVEPSINTLGVGFTFTLWACLMALSLAFVGVQMRFGPAWRKRREKRLEEGEKG

SEQ ID NO: 4684 - DNA, 1893 bp, Cryptococcus neoformans var
  CDS (1)..(1893)
atgaagacagccagcagctctagctcgacacccatggagctatcgacaccatcagtcaccttgacacacgataggatggaggaacaaaatagctcatccgaaactcttggtcctgattctagcccctcaatatcatgttcaaatatggaagaaattgcattggacaagaagaatcttcgtggaaaaccaccggataaagaaggagatggcagttgtgcgaagtttttggtggatactccgcaaagcgacaaagaaggggtttcagaagtcgagacgattgatggaagaccaaaagatgtatatgatcgcttttccaagagacagaagaacgttatcgttgcggttatatcatactccgctttcattgctcccatgacctcatctatcttccttccttcaataccgacgatggctgtcgacctacattcctcagctgaggtcatcaactatactgtcgcgatatttttggtcactatcggtgttgccagtgtcttttggtctccttactctggattttacggacgaagaccggtgtatctggctagtatgccgatcatggtaatagctagcataggagtcgctcaatcgaagaacatcggggctatcattggcacccgtatcttgcagggtataggaagctcctgtgtgctcagtgtaggggcgggaaccattggagatatcttcagacctactgaaagaagtcgaggtatggcgacttactatatgggtgtccttatcgggcctgccttgagtccaatactaggcgggatctttaccgagtatacttcacaaacttggcgtagtgcccaatactttctggctgggtgtggtgcgttatcggttgtcctcacctttttctttctgcctgagacattccacccgcctaccgtgcacgagcgtctgaaaaaggagagagggaagaagtttgtgatgtattgggtgaatcctttcaggtcagtgatgctgttgagatggccaaacatagcgatggcttgttttatctcaagttgcgtaatgcttgatacctactgtgtcattgttccactctctgctgttttcaaagatagatataacatccacaacactgctattgcaggttgcttattcctcgtgaatggtgcaggtaacatcatctcgagtaggattgccggaccatatgccgaccgcattgtgaagaagtacatgggaaaacgaggatacagaaggccagaggacagactgaaggctagcttctggggcactctgattctgatgccaatatcggtcttgatatacgggtggttgctgaagtttggcaaaggaggaatggctccacctttaatcatggtgttcctcaacggcatctctttaatgctctgccttacgcctctcaatacttatttggtagactgtatgcagtcgcgaagtgctgaggtcgtggctataaacaattgtattcgatacatcttttcggcggccgcctctgctttcgtccttccactagccaacgcgatcggttggggctggaccatgacaatgtgcgctttcgttagctggctggcagccggatcattgtttattctgtgtcgttacggagaacgctggcgggaagccgcaaatatccgttatggcatcaccgaagtcgaagctcaagaagagcgcgttgacgggggcaaagatgaagaagctgctgttgttgagaataatacaatcgaagacaggagggcctccgatggatacggggaataccttgaaggaccggtaccgatggagaaaaacttttctaggacaaagtcaagaacaaagaccgtggataggcaaattagtagaaaagagggcgaattgcctcttgtggaagaagtgttgaagagacaagtgtctttttctggcccttcaatccatggcgggggttaa

SEQ ID NO: 4685 - protein, 630 aa, Cryptococcus neoformans var
MKTASSSSSTPMELSTPSVTLTHDRMEEQNSSSETLGPDSSPSISCSNMEEIALDKKNLRGKPPDKEGDGSCAKFLVDTPQSDKEGVSEVETIDGRPKDVYDRFSKRQKNVIVAVISYSAFIAPMTSSIFLPSIPTMAVDLHSSAEVINYTVAIFLVTIGVASVFWSPYSGFYGRRPVYLASMPIMVIASIGVAQSKNIGAIIGTRILQGIGSSCVLSVGAGTIGDIFRPTERSRGMATYYMGVLIGPALSPILGGIFTEYTSQTWRSAQYFLAGCGALSVVLTFFFLPETFHPPTVHERLKKERGKKFVMYWVNPFRSVMLLRWPNIAMACFISSCVMLDTYCVIVPLSAVFKDRYNIHNTAIAGCLFLVNGAGNIISSRIAGPYADRIVKKYMGKRGYRRPEDRLKASFWGTLILMPISVLIYGWLLKFGKGGMAPPLIMVFLNGISLMLCLTPLNTYLVDCMQSRSAEVVAINNCIRYIFSAAASAFVLPLANAIGWGWTMTMCAFVSWLAAGSLFILCRYGERWREAANIRYGITEVEAQEERVDGGKDEEAAVVENNTIEDRRASDGYGEYLEGPVPMEKNFSRTKSRTKTVDRQISRKEGELPLVEEVLKRQVSFSGPSIHGGG

SEQ ID NO: 4686 - DNA, 1761 bp, Saccharomyces cerevisiae
  CDS (1)..(1761)
atgtcacgaagtaacagtatatacacagaagatattgagatgtatcctactcacaatgagcagcatctgacgagagaatacacaaaaccagatggtcaaacgaaaagtgaaaaactaaatttcgaaggcgcttatatcaacagtcacgggactctatccaagactaccacaagggaaatagaaggcgatttagactctgagacttcttctcactccagtgatgataaagttgatccaacccaacagataactgcagagacaaaagcgccatatactttactaagttacggtcagaagtggggaatggttgcaattctaacaatgtgtggcttttggtcttcattgggatcaccgatctattatcccgctttgaggcagttggaaaagcaatttaatgtggatgagaatatggttaacgttactgtggttgtgtatctgttgtttcaaggtatatctcccacagttagcggtggtctggcggattgctttggacggagacctataattttagcaggtatgccgatatacgttattgcatccatcgggctagcatgtgctccatcatacggtgttattatcttcttgaggtgtattcagagtattggtatttcccccacaattgcgatcagttctggtgttgtcggggacttcactttgaagcatgaaagaggtacatttgttggcgccacctcagggtttgttttactgggtcaatgttttggtagtcttattggtgccgtcctgactgcaaggtgggattggagagctatcttttggtttttgaccattggttgtggaagttgttttctaattgcctttcttattttgccagaaacaaagcgaaccattgcaggtaacctttccattaagcctaaaagattcatcaacagagcgccgattttcctactgggcccagttagaaggagattcaagtacgataatcctgattatgagacattagatcccaccattccgaaactagatttgtcatccgccgggaagatccttgtattgccagaaattattctgtctttatttccatcagggctcttatttgctatgtggacgttaatgctttcctctatttcatccggtttatcagtggcgccatacaactatcatttggtcattattggtgtgtgttatctacccggtggcattggcggtttaatgggttccttcttcacaggtagaattattgacatgtatttcaagagaaagatcaagaaattcgagcaagacaaagctaacgggttgattccacaagacgcagagattaatatgttcaaagtccgtttagtttgtcttctgccccaaaatttcttggccgtcgtagcctatcttttatttggttggagtatagataagggctggaggatcgaatctattttaattacttcatttgtctgttcatactgtgctatgagtacattatcaacatcaactacgttattggtcgatttgtacccaacgaaatcatctacagcaagtagttgtttcaactttgttaggtgcagtttgagtaccatcttcatgggttgctttgccaaaatgaaagctgcgatgactgtaggtggtacttttacatttttatgtgcgctggtatttttcttcaacttcttaatgtttattccgatgaaatatggtatgaagtggagggaggatagattattgaaacaacaaagacagtcttggttaaacaccttggcagtcaaagccaaaaagggaacaaaaagagaccagaacgataatcataattaa

SEQ ID NO: 4687 - protein, 586 aa, Saccharomyces cerevisiae
MSRSNSIYTEDIEMYPTHNEQHLTREYTKPDGQTKSEKLNFEGAYINSHGTLSKTTTREIEGDLDSETSSHSSDDKVDPTQQITAETKAPYTLLSYGQKWGMVAILTMCGFWSSLGSPIYYPALRQLEKQFNVDENMVNVTVVVYLLFQGISPTVSGGLADCFGRRPIILAGMPIYVIASIGLACAPSYGVIIFLRCIQSIGISPTIAISSGVVGDFTLKHERGTFVGATSGFVLLGQCFGSLIGAVLTARWDWRAIFWFLTIGCGSCFLIAFLILPETKRTIAGNLSIKPKRFINRAPIFLLGPVRRRFKYDNPDYETLDPTIPKLDLSSAGKILVLPEIILSLFPSGLLFAMWTLMLSSISSGLSVAPYNYHLVIIGVCYLPGGIGGLMGSFFTGRIIDMYFKRKIKKFEQDKANGLIPQDAEINMFKVRLVCLLPQNFLAVVAYLLFGWSIDKGWRIESILITSFVCSYCAMSTLSTSTTLLVDLYPTKSSTASSCFNFVRCSLSTIFMGCFAKMKAAMTVGGTFTFLCALVFFFNFLMFIPMKYGMKWREDRLLKQQRQSWLNTLAVKAKKGTKRDQNDNHN

SEQ ID NO: 4688 - DNA, 1659 bp, Candida maltosa
  CDS (1)..(1659)
atggctgcatttatcaaagattcattttggggtcaaattatttatagactttctggtagaaaattattccgtcataacgatgagttacctgattacgtggttccagaaaaataccttcttgatcctaaagaagaagtgttgaattcttcagataaaagtcaaagttctgaaaataaagaacaaacagaaggtgatcaagctaccattcagaatgaaccagcgtcagaacatatcatagtcacatgggacggtgatgatgatcctgagaacccttataattggccatttgcatggaaagctattgctgcaatgcagatcgggtttttaacagtgagtgtgtatatggcaagtgccatttatactcctggtgttgaagaaatcatgaatcaatttaatatcaactccactttagctactttaccattaactatgtttgttatcggttacggtattggtcctttattctggtcaccattatcggaaaattctcgaattggtagaactccattatatatcatcaccttgttcattttcttcattcttcagattccaactgctttatcaaatcatattgctgggttatcggtgttgagagtgattgccgggtttttcgcagcacctgcattgtcaactggtggtgcaagttatggtgatttcattgccatgcattattacagtattgctcttggtgtatggagtatttttgctgttgctggtccatccattggtccacttattggtgctgccgttatcaaccgtagtcacgatgccgatggttggagatggagtttctggtttatggctattttgtcaggagtttgttttattgttcttagtttctcacttccagagacttatggtaaaaccttgttgcgtcgtaaagctgaaagattgagaaagttgaccggtaacaacagaatcatttctgaaggagaattagaagatggtcacaagaccactagccaagtcgtgtcaagtttgttgtggagaccattggaaatcaccatgttggaaccagttgtgtttttgattgatatctacattgctttggtttacagtatcatgtatttgatttttgaaagtgttcctattgtctatgccggtatccatcacttcactttagttgaaatgggtgccacatacgtgagtaccattatcggtattattattggtggtgctatctatcttccaactgtttattacaagtttactaagaagttattggcaggacagaatgttactccagaagtctttttaccaccagctattttcggtgctatatgtatgccaatcggggttttcattttcggttggacctcgtctccagatatcaattggtttgttccattgattggtatggcattgtttgccgtgggggcttttattattttccaaactttgttcaattatatggctgttagttttaaagttgaatatttggccagtgttttctccagtaatgcctttttcagatctgtttcggcaggtgcattcccactttttggtagagctttatacaacaatttgtcaattgataagttcccggtcggttggggttcaagtattttagggttcatcagtcttggtatgattgccattccggtatttttttacttgaatggaccaaaattaagagctagatccaaatatgcttattag

SEQ ID NO: 4689 - protein, 552 aa, Candida maltosa
MAAFIKDSFWGQIIYRLSGRKLFRHNDELPDYVVPEKYLLDPKEEVLNSSDKSQSSENKEQTEGDQATIQNEPASEHIIVTWDGDDDPENPYNWPFAWKAIAAMQIGFLTVSVYMASAIYTPGVEEIMNQFNINSTLATLPLTMFVIGYGIGPLFWSPLSENSRIGRTPLYIITLFIFFILQIPTALSNHIAGLSVLRVIAGFFAAPALSTGGASYGDFIAMHYYSIALGVWSIFAVAGPSIGPLIGAAVINRSHDADGWRWSFWFMAILSGVCFIVLSFSLPETYGKTLLRRKAERLRKLTGNNRIISEGELEDGHKTTSQVVSSLLWRPLEITMLEPVVFLIDIYIALVYSIMYLIFESVPIVYAGIHHFTLVEMGATYVSTIIGIIIGGAIYLPTVYYKFTKKLLAGQNVTPEVFLPPAIFGAICMPIGVFIFGWTSSPDINWFVPLIGMALFAVGAFIIFQTLFNYMAVSFKVEYLASVFSSNAFFRSVSAGAFPLFGRALYNNLSIDKFPVGWGSSILGFISLGMIAIPVFFYLNGPKLRARSKYAY

SEQ ID NO: 4690 - DNA, 2070 bp, Saccharomyces cerevisiae
  CDS (1)..(2070)
atgcaagcccaaggttcacaatcgaatgtagggtctttgaggagtaattgctctgacaattcactaccgaacaatcatgttatgatgcactgcgatgaaagcagcggcacgccgcacagcgagcacaacgattatagttacgaaaagaccaatctggaaagtacggcatcaaatagtcgtgaacacagagacaaccagctaagtaggttgaagagtgaggaatacgttgttccaaagaatcaacgtaggggactattgcctcaactcgccattataccggagttcaaggatgccagagattatccaccgatgatgaaaaagatgattgtcttcttgattgcgttttcctccatgatgggccccatgggcacatctatcatttttccagcgatcaactcaatcacaacagaatttaaaacatcagtgattatggtaaacgtttcaattggtgtgtaccttttaagtcttggtgttttcccattgtggtggtcttctctatccgagctagagggcagaagaactacttacataacttcatttgcattattgtttgcatttaatatcgggtctgctctagctcctgatatcaactcatttattgccttgagaatgctctgtggggctgcttctgccagtgttcaaagtgtaggtgctggaacagtggctgatttatatattagcgaagatagaggtaaaaatttgagttattactatttgggtccactactggcgccgctactatctccaatttttggatctttgttagtgaatcgctggccctggagatccactcaatggtttatggttattttatccggatgtaatgtcattcttttgacggtgttactacctgaaacattaagaaaacaagattctaaaggcgctatcgctcaaattttggctgaaagacgtattcaagtagacaataacgaacgtggagagatacaagaagattatcagaggggagaagatgagacagatcgaattgaaaaccaagttgccacattatctactgagaagcataactacgttggagaggtaagggatcaagactcgctagatttagaaagtcactctagccccaatacttatgatggtcgagctggagaaacccaattgcaacggatttatacagaggcgagtagaagtctgtatgaatatcagctagatgatagcggtatcgatgcaacaacagcacaagttacgagaataagatcaacagatccaaagttagcgagatcgattcgagaaaatagtctgagaaaattacaaaccaacctggaagagcaagtcaaaaaagtgctatccagtaatggaggtgaaatcgctcctaaacaggtatcagcggtgaggaaggtctgggacaccttttttgtttattttatcaagcctttaaaatcattgcacttcctagaatatccacccgtggcacttgcaataacattttccgcaatttccttttccacagtatactttgttaatatgacagttgaatataaatattcaaggcctccttacaactttaaaccattatacattggtctactgtatattccgaattctgtaacatactttttcgcctcaatttacggtggacgttgggtggacatgcttttaaaaagatacaaagagaaatatggaattcttgctcctgaagctcgtatatcgtggaatgttgttacatctgtaatatctttccccattgcgctattgatatttggctggtgcctagataaaaaatgccactgggtaacgccactaattggaacagccctctttggatatgcagctatgatgacaattggtgctaccctttcctatttagtcgattcattgccgggaaagggtgccaccggtgttgctttgaataatttaataaggcaaatcttggctgcaaccgcagtctttgtcaccacacccatgttaaacggtatgggaactgggtgggctttcacaatgctggcctttatcgtcttgggtgctagcagtgtacttataatactgaaaaagcacggtgattactggagagagaactacgatttacaaaaattgtacgacaaaattgattaa

SEQ ID NO: 4691 - protein, 689 aa, Saccharomyces cerevisiae
MQAQGSQSNVGSLRSNCSDNSLPNNHVMMHCDESSGTPHSEHNDYSYEKTNLESTASNSREHRDNQLSRLKSEEYVVPKNQRRGLLPQLAIIPEFKDARDYPPMMKKMIVFLIAFSSMMGPMGTSIIFPAINSITTEFKTSVIMVNVSIGVYLLSLGVFPLWWSSLSELEGRRTTYITSFALLFAFNIGSALAPDINSFIALRMLCGAASASVQSVGAGTVADLYISEDRGKNLSYYYLGPLLAPLLSPIFGSLLVNRWPWRSTQWFMVILSGCNVILLTVLLPETLRKQDSKGAIAQILAERRIQVDNNERGEIQEDYQRGEDETDRIENQVATLSTEKHNYVGEVRDQDSLDLESHSSPNTYDGRAGETQLQRIYTEASRSLYEYQLDDSGIDATTAQVTRIRSTDPKLARSIRENSLRKLQTNLEEQVKKVLSSNGGEIAPKQVSAVRKVWDTFFVYFIKPLKSLHFLEYPPVALAITFSAISFSTVYFVNMTVEYKYSRPPYNFKPLYIGLLYIPNSVTYFFASIYGGRWVDMLLKRYKEKYGILAPEARISWNVVTSVISFPIALLIFGWCLDKKCHWVTPLIGTALFGYAAMMTIGATLSYLVDSLPGKGATGVALNNLIRQILAATAVFVTTPMLNGMGTGWAFTMLAFIVLGASSVLIILKKHGDYWRENYDLQKLYDKID

SEQ ID NO: 4692 - DNA, 1692 bp, Saccharomyces cerevisiae
  CDS (1)..(1692)
atgaccaaacaacaaacttctgtaatgcgtaacgcatctatagccaaggaagaacgtgaaggatctgataataataatgtggacagatccagctcagatgccatcagtgacaacgacgcagaaagatctaattctcattctgaaatagataacgaatcaaattttgatatggtgccttattcaaggttcagccataagcaaaaaatgcttcttgtcgttcagtgtgccttcacaggctttttttcaaccgtggcagggtctatctactatccagtgcttactattattgagaggaaatttaacatcacagaagagttagctaatgtcactattgtggtttattttattttccaaggggtggctccttcaattatgggtggtttagctgatacatttggaaggcggcctattgtattatgggcaatcttagcctacttctgtgcctgcatcggactggcatgtgcacataattacgcccaaatcctggctttaaggtgtttacaggcagcaggtatttctcctgttattgcaataaatagcggaataatgggagatgtaacgacaaaagtagagaggggtggatatgttggattggttgcagggttccaagttgttggaactgcattcggtgcattgattggtgccggattatcctcgaaatggggttggagggcaattttttggtttttggctattggttccggaatttgtctagttttttcaaccttattgatgccagagacaaaaagaactttggtgggaaacggctccgtaacaccaaggtcatttttgaataggtctttgatattgcatgttggttccgtaaaaaaaacattacatttagacgatcctgaccctgagaccttagaaccacgtactagcgtggattttttagcacctttaaaaattttgcacatacgagaaatagacattttattgtccattgccggcctgcaattttccacgtggaccactcatcaaacagccttaacaattgtattgagtaaaaagtacaatctatctgttgcaaaaataggcctgtgctttttacctgcaggaatctcgacactgacaagtattatctctgctggtcggtacttaaattggagctacagaacaagaaaggttaaatacaacagatggattaaagaacaagaattacagctgatggagaaatataaaggtgataaaaacaaggtagcagaacttattcactctaattctcattatgcattcaatttagtggaggcaaggttgcatccagcatttgtgacacttcttctcagtagcattggctttactgcctttggatggtgtatttcggtgaaaacaccgcttgctgctgtattatgcacaagtgcatttgcaagtttattttcaaactgtattttgaccttctctactactttgatagtagatctctttccgtctaaggcttctaccgcaacaggttgcttaaatttatttagatgtctcctatccgcaattttcattgcagcactgaccaagatggtcgagaagatgagatatggaggtgtttttacgtttttgagtgctataacttcatcttcatcgcttttattattctatctcctgaagaatgggaaacaactatcgttcgataggattagggcaaatgataagtcggctggaaggtcagttggtaaaaattcagaaaaagtttcgacgtga

SEQ ID NO: 4693 - protein, 563 aa, Saccharomyces cerevisiae
MTKQQTSVMRNASIAKEEREGSDNNNVDRSSSDAISDNDAERSNSHSEIDNESNFDMVPYSRFSHKQKMLLVVQCAFTGFFSTVAGSIYYPVLTIIERKFNITEELANVTIVVYFIFQGVAPSIMGGLADTFGRRPIVLWAILAYFCACIGLACAHNYAQILALRCLQAAGISPVIAINSGIMGDVTTKVERGGYVGLVAGFQVVGTAFGALIGAGLSSKWGWRAIFWFLAIGSGICLVFSTLLMPETKRTLVGNGSVTPRSFLNRSLILHVGSVKKTLHLDDPDPETLEPRTSVDFLAPLKILHIREIDILLSIAGLQFSTWTTHQTALTIVLSKKYNLSVAKIGLCFLPAGISTLTSIISAGRYLNWSYRTRKVKYNRWIKEQELQLMEKYKGDKNKVAELIHSNSHYAFNLVEARLHPAFVTLLLSSIGFTAFGWCISVKTPLAAVLCTSAFASLFSNCILTFSTTLIVDLFPSKASTATGCLNLFRCLLSAIFIAALTKMVEKMRYGGVFTFLSAITSSSSLLLFYLLKNGKQLSFDRIRANDKSAGRSVGKNSEKVST

SEQ ID NO: 4694 - DNA, 1488 bp, Schizosaccharomyces pombe
  CDS (1)..(1488)
atgtctgtttctgacaaggatttcaaagatatagagcttttgccggtgaagtcaattgaatccaaggattcaattgaccaatgcgatcctctcacctggcctataaggattagaataataaatacgataattatttctttcatgactatgctatgtatgtatggatccagcgtttttatgccaagcattcccgagctgtgtgagaaattcggtgaaccggaaacattggtcgttttaggtgcgactctttatgtgatcggcgtaatgctaggccctttgatattcagtcctctcagtgaattatatggaagaaggcctctcaacatatttggctatactcttttcgcgctgatgcaaatacccacggctttgtcggtgaaccttgcaatgttcgtggtctttcggtttttcagtggattttttggatcagtaggtttgggtattggagctggtagcttaagcgacatgtttagcaaaagagacagaggaaaatatattggaatttactttctcgggatttgtttgggacccgcaattgcccctatagcatcaggctttatcgccgggagctccatctcttggagatgggagttttggattctgttaatgctttcaggagtaagtcttttagctggtgttgtgtttttaaaagagacttatgctcctgtactgaaaaggaaacaagcaaagaaacttcttgaaaaacaggaaaatcagaaatcagtcgaagtcaagatctcagaaattacggaatcctcacaacaaattgaccccgacaaaagcttcgctgaagtagtgcatattctcgtaaccacgattcgacgtcctttgcatctgctatgcacacaaccaattatgatccttatttcattaatcgttggcactgtttatggaattttgtaccttttattcactgcctttgctgaggtctggatttcacaataccacttcacttcgggattaagcggtctgacctatatttctctatcaattggtcaagtatttgcggtgtttgtccttcttcctttgaaccagaagtattggctttctgctgttcagaaaaacaatggagtgccagaaccagaatttcgcttaccaatggcttttcttgggtgttttgccattatgaccggtatgtttatttttggttggaccgttcagtacaaagtcttttggttcgtgccgttgatcggaacgacattggtaggagccggatttgtcatgacattcaatcccatgaacatgtttatcgtcgataattatggccgatatgcggcaagcgcgatggctgccatcgccattcctagaaatattttcggtgcctgctttcctttatttgcagaaaaattgtttgagagacttggatatggttggggttcgagtctactagcttttcttttagtcgccataaatttttcaatagcagcattatatatgtttggaaaaactattcgtgaaaagcgtccctttgatcatacaaaatactag

SEQ ID NO: 4695 - protein, 495 aa, Schizosaccharomyces pombe
MSVSDKDFKDIELLPVKSIESKDSIDQCDPLTWPIRIRIINTIIISFMTMLCMYGSSVFMPSIPELCEKFGEPETLVVLGATLYVIGVMLGPLIFSPLSELYGRRPLNIFGYTLFALMQIPTALSVNLAMFVVFRFFSGFFGSVGLGIGAGSLSDMFSKRDRGKYIGIYFLGICLGPAIAPIASGFIAGSSISWRWEFWILLMLSGVSLLAGVVFLKETYAPVLKRKQAKKLLEKQENQKSVEVKISEITESSQQIDPDKSFAEVVHILVTTIRRPLHLLCTQPIMILISLIVGTVYGILYLLFTAFAEVWISQYHFTSGLSGLTYISLSIGQVFAVFVLLPLNQKYWLSAVQKNNGVPEPEFRLPMAFLGCFAIMTGMFIFGWTVQYKVFWFVPLIGTTLVGAGFVMTFNPMNMFIVDNYGRYAASAMAAIAIPRNIFGACFPLFAEKLFERLGYGWGSSLLAFLLVAINFSIAALYMFGKTIREKRPFDHTKY

SEQ ID NO: 4696 - DNA, 1761 bp, Saccharomyces cerevisiae
  CDS (1)..(1761)
atgtcacgaagtaacagtatatacacagaagatattgagatgtatcctactcacaatgagcagcatctgacgagagaatacacaaaaccagatggtcaaacgaaaagtgaaaaactaaatttcgaaggcgcttatatcaacagtcacgggactctatccaagactaccacaagggaaatagaaggcgatttagactctgagacttcttctcactccagtgatgataaagttgatccaacccaacagataactgcagagacaaaagcgccatatactttactaagttacggtcagaagtggggaatggttgcaattctaacaatgtgtggcttttggtcttcattgggatcaccgatctattatcccgctttgaggcagttggaaaagcaatttaatgtggatgaaaatatggttaacgttactgtggttgtgtatctgttgtttcaaggtatatctcccacagttagcggtggtctggcggattgctttggacggagacctataattttagcaggtatgctgatatacgttattgcatccatcgggctagcatgtgctccatcatacggtgttattatcttcttgaggtgtattcagagtattggtatttcccccacaattgcaatcagttctggtgttgtcggggacttcactttgaagcatgaaagaggtacatttgttggcgccacctcagggtttgttttactgggtcaatgttttggtagtcttattggtgccgtcctgactgcaaggtgggattggagagctatcttttggtttttgaccattggttgtggaagttgttttctaattgcctttcttattttgccagaaacaaagcgaaccattgcaggtaacctttccattaagcctaaaagattcatcaacagagcgccgattttcctactgggcccagttagaaggagattcaagtacgataatcctgattatgagacattagatcccaccattccgaaactagatttgtcatccgccgggaagatccttgtattgccagaaattattctgtctttatttccatcagggctcttatttgctatgtggacgttaatgctttcctctatttcatccggtttatcagtggcgccatacaactatcatttggtcattattggtgtgtgttatctacccggtggtattggcggtttaatgggttccttcttcacaggtagaattattgacatgtatttcaagagaaagatcaagaaattcgagcaagacaaagctaacgggttgattccacaagacgcagagattaatatgttcaaagtccgtttagtttgtcttctgccccaaaatttcttggccgtcgtagcctatcttttatttggttggagtatagataagggctggaggatcgaatctattttaattacttcatttgtctgttcatactgtgctatgagtacattatcaacatcaactacgttattggtcgatttgtacccaacgaaatcatctacagcaagtagttgtttcaactttgttaggtgcagtttgagtaccatcttcatgggttgctttgccaaaatgaaagctgcgatgactgtaggtggtacttttacatttttatgtgcgctggtatttttcttcaacttcttaatgtttattccgatgaaatatggtatgaagtggagggaggatagattattgaaacaacaaagacagtcttggttaaacaccttggcagtcaaagccaaaaagggaacaaaaagagaccagaacgataatcataattaa

SEQ ID NO: 4697 - protein, 586 aa, Saccharomyces cerevisiae
MSRSNSIYTEDIEMYPTHNEQHLTREYTKPDGQTKSEKLNFEGAYINSHGTLSKTTTREIEGDLDSETSSHSSDDKVDPTQQITAETKAPYTLLSYGQKWGMVAILTMCGFWSSLGSPIYYPALRQLEKQFNVDENMVNVTVVVYLLFQGISPTVSGGLADCFGRRPIILAGMLIYVIASIGLACAPSYGVIIFLRCIQSIGISPTIAISSGVVGDFTLKHERGTFVGATSGFVLLGQCFGSLIGAVLTARWDWRAIFWFLTIGCGSCFLIAFLILPETKRTIAGNLSIKPKRFINRAPIFLLGPVRRRFKYDNPDYETLDPTIPKLDLSSAGKILVLPEIILSLFPSGLLFAMWTLMLSSISSGLSVAPYNYHLVIIGVCYLPGGIGGLMGSFFTGRIIDMYFKRKIKKFEQDKANGLIPQDAEINMFKVRLVCLLPQNFLAVVAYLLFGWSIDKGWRIESILITSFVCSYCAMSTLSTSTTLLVDLYPTKSSTASSCFNFVRCSLSTIFMGCFAKMKAAMTVGGTFTFLCALVFFFNFLMFIPMKYGMKWREDRLLKQQRQSWLNTLAVKAKKGTKRDQNDNHN

SEQ ID NO: 4698 - DNA, 25 bp, Artificial sequence
  primer
atggcaggagcaacatcaagtataa

SEQ ID NO: 4699 - DNA, 26 bp, Artificial sequence
  primer
ttaatttactcccagttcttgctttt

SEQ ID NO: 4700 - protein, 619 aa, Artificial sequence
  consensus sequence
  Variant (2)..(23): Xaa in position 2 to 23 is any amino acid
  Variant (25)..(53): Xaa in position 25 to 53 is any amino acid
  Variant (54)..(55): Xaa in position 54 to 55 is any or no amino acid
  Variant (57)..(66): Xaa in position 57 to 66 is any amino acid
  Variant (67)..(68): Xaa in position 67 to 68 is any or no amino acid
  Variant (72)..(88): Xaa in position 72 to 88 is any amino acid
  Variant (90)..(100): Xaa in position 90 to 100 is any amino acid
  Variant (101)..(102): Xaa in position 101 to 102 is any or no amino acid
  Variant (104)..(122): Xaa in position 104 to 122 is any amino acid
  Variant (124)..(129): Xaa in position 124 to 129 is any amino acid
  Variant (132)..(151): Xaa in position 132 to 151 is any amino acid
  Variant (152)..(160): Xaa in position 152 to 160 is any or no amino acid
  Variant (162)..(169): Xaa in position 162 to 169 is any amino acid
  Variant (170)..(173): Xaa in position 170 to 173 is any or no amino acid
  Variant (176)..(177): Xaa in position 176 to 177 is any amino acid
  Variant (179)..(187): Xaa in position 179 to 187 is any amino acid
  Variant (188)..(197): Xaa in position 188 to 197 is any or no amino acid
  Variant (200)..(251): Xaa in position 200 to 251 is any amino acid
  Variant (252)..(426): Xaa in position 252 to 426 is any or no amino acid
  Variant (428)..(444): Xaa in position 428 to 444 is any amino acid
  Variant (446)..(462): Xaa in position 446 to 462 is any amino acid
  Variant (463)..(500): Xaa in position 463 to 500 is any or no amino acid
  Variant (502)..(510): Xaa in position 502 to 510 is any amino acid
  Variant (511)..(535): Xaa in position 511 to 535 is any or no amino acid
  Variant (538)..(567): Xaa in position 538 to 567 is any amino acid
  Variant (568)..(573): Xaa in position 568 to 573 is any or no amino acid
  Variant (575)..(590): Xaa in position 575 to 590 is any amino acid
  Variant (591)..(592): Xaa in position 591 to 592 is any or no amino acid
  Variant (594)..(613): Xaa in position 594 to 613 is any amino acid
  Variant (614)..(618): Xaa in position 614 to 618 is any or no amino acid
KXXXXXXXXXXXXXXXXXXXXXXPXXXXXXXXXXXXXXXXXXXXXXXXXXXXXXXPXXXXXXXXXXXXGRRXXXXXXXXXXXXXXXXXAXXXXXXXXXXXXXRXXXXXXXXXXXXXXXXXXXDXXXXXXRGXXXXXXXXXXXXXXXXXXXXXXXXXXXXXGXXXXXXXXXXXXWRXXFXXXXXXXXXXXXXXXXXXXETXXXXXXXXXXXXXXXXXXXXXXXXXXXXXXXXXXXXXXXXXXXXXXXXXXXXXXXXXXXXXXXXXXXXXXXXXXXXXXXXXXXXXXXXXXXXXXXXXXXXXXXXXXXXXXXXXXXXXXXXXXXXXXXXXXXXXXXXXXXXXXXXXXXXXXXXXXXXXXXXXXXXXXXXXXXXXXXXXXXXXXXXXXXXXXXXXXXXXXXXXXXXXXXXXXXXXXXXXXXXXXXXXXXGXXXXXXXXXXXXXXXXXGXXXXXXXXXXXXXXXXXXXXXXXXXXXXXXXXXXXXXXXXXXXXXXXXXXXXXXXRXXXXXXXXXXXXXXXXXXXXXXXXXXXXXXXXXXGWXXXXXXXXXXXXXXXXXXXXXXXXXXXXXXXXXXXXDXXXXXXXXXXXXXXXXXXRXXXXXXXXXXXXXXXXXXXXXXXXXG

SEQ ID NO: 4701 - DNA, 222 bp, Saccharomyces cerevisiae
  CDS (1)..(222)
atgacattagtagggaaactagtacacatatccatagatttggtcttggtatcaacgtgcctcgcggggattaaacgcaatacaggtttgacgcctaaactggagactctggacaatcagactatgagaaactacatgaagcggtacttgaacttgggagagtctgtatacgactattctgttgccacttgtggctcctcgacgtatttcgctaggaaatag

SEQ ID NO: 4702 - protein, 73 aa, Saccharomyces cerevisiae
MTLVGKLVHISIDLVLVSTCLAGIKRNTGLTPKLETLDNQTMRNYMKRYLNLGESVYDYSVATCGSSTYFARK

SEQ ID NO: 4703 - DNA, 312 bp, Eremothecium gossypii
  CDS (1)..(312)
atggtgcacttcagcgccgacctcgcgctggtggcgatggtgctggccgggctgcggcgcagcacgggctacgtgctcgcgtacgaagcctctgacctgcgcaactacatacggcggtacctggggtggggcgagtacctgttcgaccagctggccgcgctagctgcgcgcagcgcgtacttccggcgcgagacggcgctggacgggttcctgggcggggcgttccggcggctggaggaggttgcaggcgcggagggcgaggggcgcgcccacgagcgcgcggccgcgccgcggccggcgcatctagactag

SEQ ID NO: 4704 - protein, 103 aa, Eremothecium gossypii
MVHFSADLALVAMVLAGLRRSTGYVLAYEASDLRNYIRRYLGWGEYLFDQLAALAARSAYFRRETALDGFLGGAFRRLEEVAGAEGEGRAHERAAAPRPAHLD

SEQ ID NO: 4705 - DNA, 222 bp, Eremothecium gossypii
  CDS (1)..(222)
atgacattgttaggcaaggcggtgcatatttctatcgacctggttcttgtgtctacgtgtctggctggaatccggcgcaacacaggactgacggtcaagctggacaatgtccaggacaacttcatcaaggactatacggagaagctgttgaacgtcggggaatcggcgtttgactacgcggttgcgtactgcgggtcatcgagctcattccagcggaaatag

SEQ ID NO: 4706 - protein, 73 aa, Eremothecium gossypii
MTLLGKAVHISIDLVLVSTCLAGIRRNTGLTVKLDNVQDNFIKDYTEKLLNVGESAFDYAVAYCGSSSSFQRK

SEQ ID NO: 4707 - DNA, 459 bp, Neurospora crassa
  CDS (1)..(459)
atggtggtgggtaccccgaagtttcttgcgtcgttagcgttgctgttcttcattctgcgtccgaatgtacagagaaccccggccccttctccggattttccgatcttgtcattgttctccattgtcttgccttcgcactcgcccgctgctgctgcgtcgtcgcttgctgttcaacggagttctaagaatctcttctcccagctcctcgatttgctgacactaggcttatggtcgaagctcggacgtttgagccactatgcctttgacgctgtcctgctttcggcattcctcgctggaatgaagcgatcgaccggtctgactttcaaaactgacaaggtcgctggcgaaaacaaggaggttggaaaatgggttgacaagtatctcggcgtcggcgaatgggtgatggaccagtctgtcgccattgctggttcgagcggctggttcgacaggacccgataa

SEQ ID NO: 4708 - protein, 152 aa, Neurospora crassa
MVVGTPKFLASLALLFFILRPNVQRTPAPSPDFPILSLFSIVLPSHSPAAAASSLAVQRSSKNLFSQLLDLLTLGLWSKLGRLSHYAFDAVLLSAFLAGMKRSTGLTFKTDKVAGENKEVGKWVDKYLGVGEWVMDQSVAIAGSSGWFDRTR

SEQ ID NO: 4709 - DNA, 288 bp, Magnaporthe grisea 70-15
  CDS (1)..(288)
atggtgttctttcttctcaacttgctgacctttggcctggcctcgaagcttggacgagttacccattacgcgtttgacgccgtccttttgtcggctttcctggcaggcatgaaacggtcgacaggcttgaccttcaagacggataggcttgctggagagaacaaggagctgaacggctgggttcaaaagtacttgggcgtcggcgagtgggtgctggatcagtccgccgccgtagcgggttcaagtgggtggtttgagaggcggcagatatttaactgcgaggcttga

SEQ ID NO: 4710 - protein, 95 aa, Magnaporthe grisea 70-15
MVFFLLNLLTFGLASKLGRVTHYAFDAVLLSAFLAGMKRSTGLTFKTDRLAGENKELNGWVQKYLGVGEWVLDQSAAVAGSSGWFERRQIFNCEA

SEQ ID NO: 4711 - DNA, 264 bp, Gibberella zeae PH-1
  CDS (1)..(264)
atggtgctccttaacctgctgactttcggactctggtcaaaggtcggacggttgacacactatgcttttgacgctgttctcttctcggccttcctcgccggcatgaagcgatcaactggcttgaccttcaagaccgacagagtcgctggtgagaacaaggatttcaccggctggatcgacagatacctcggcgttggtgaatgggtcatggaccagtccgttgcgattgccggatccagcggctacttcgaacgaacccgatga

SEQ ID NO: 4712 - protein, 87 aa, Gibberella zeae PH-1
MVLLNLLTFGLWSKVGRLTHYAFDAVLFSAFLAGMKRSTGLTFKTDRVAGENKDFTGWIDRYLGVGEWVMDQSVAIAGSSGYFERTR

SEQ ID NO: 4713 - DNA, 258 bp, Kluyveromyces lactis NRRL Y-1140
  CDS (1)..(258)
atgggtgttaaagatatagttcattacagtattgacttagcgttgttgtctatggtattggctggattgcgtagaagtaacaattatgttgtcgcttatgaaatgtctgacttgaagaattatattaaacggtatcttgactggggagaatacttattcgataagttggctaacatggctgaaagaagtgcttattttaggaaacagactccttttgacaagttcttggatcatatggaaagaaagcgtaacctgtag

SEQ ID NO: 4714 - protein, 85 aa, Kluyveromyces lactis NRRL Y-1140
MGVKDIVHYSIDLALLSMVLAGLRRSNNYVVAYEMSDLKNYIKRYLDWGEYLFDKLANMAERSAYFRKQTPFDKFLDHMERKRNL

SEQ ID NO: 4715 - DNA, 309 bp, Debaryomyces hansenii CBS767
  CDS (1)..(309)
atgagtcttggaaaagtagcgcattattcatttgatttagttctaatctcgattatattagccggtattcatcgtaatactggattagttttcgataccagcaatttatcgtcagtggatgtccgtagatggtttggtaactacttagcatttggtgaacgttgttacgactcatcagtgtctttattgaaaatgagtggttactttagacaaaagaatcttgttgttgattatgtttctaaagaagctaacaagtatttgaaggaacaaacaggaagagatttgaaagatacaaccaaagacaaatag

SEQ ID NO: 4716 - protein, 102 aa, Debaryomyces hansenii CBS767
MSLGKVAHYSFDLVLISIILAGIHRNTGLVFDTSNLSSVDVRRWFGNYLAFGERCYDSSVSLLKMSGYFRQKNLVVDYVSKEANKYLKEQTGRDLKDTTKDK

SEQ ID NO: 4717 - DNA, 219 bp, Debaryomyces hansenii CBS767
  CDS (1)..(219)
atgattggaagagttgttcatatcagtgctgatttagtattattgtctgctttcttagctggggtcaaaagaaacactggtttaacgccaaatcttgattctgctactaatagtgaagatgttaaatattacgcgggcaaatatttagatttgggtgaaagaatatttgattactcgtcgacgtactttggatcgtcggattatttcaagcgtagataa

SEQ ID NO: 4718 - protein, 72 aa, Debaryomyces hansenii CBS767
MIGRVVHISADLVLLSAFLAGVKRNTGLTPNLDSATNSEDVKYYAGKYLDLGERIFDYSSTYFGSSDYFKRR

SEQ ID NO: 4719 - DNA, 234 bp, Yarrowia lipolytica CLIB99
  CDS (1)..(234)
atgggcactctcggtagactcttccacttctcctttgaccttgttctggtctccaccattctggccggtgtcaagcgatctactggtctcaccatcaagaccaacgactttgagaacaaggatactcgttcgtacatcgagcgatacctcgatgtcggcgagtgggtttttgacacctccgtggccttcatgtccacctccagctactttgaacgacgacccccgcgattctaa

SEQ ID NO: 4720 - protein, 77 aa, Yarrowia lipolytica CLIB99
MGTLGRLFHFSFDLVLVSTILAGVKRSTGLTIKTNDFENKDTRSYIERYLDVGEWVFDTSVAFMSTSSYFERRPPRF

SEQ ID NO: 4721 - DNA, 219 bp, Cryptococcus neoformans var. neoformans JEC21
  CDS (1)..(219)
atggtcttcggtcgtcttgtccacttcaccttcgacgcccttgcggtgtccactattcttgctggcgtcaagaagactactggcttcgcccctgccaccgatctcatccccgactcctctatcaagtccatcaccgactcatatctcggtgtcggcacaaccatttttgacattgttgctggacaagcggtgaccagtcaatattttaagcgaacataa

SEQ ID NO: 4722 - protein, 72 aa, Cryptococcus neoformans var. neoformans JEC21
MVFGRLVHFTFDALAVSTILAGVKKTTGFAPATDLIPDSSIKSITDSYLGVGTTIFDIVAGQAVTSQYFKRT

SEQ ID NO: 4723 - DNA, 252 bp, Ustilago maydis 521
  CDS (1)..(252)
atggtcgtgggtcgattgttgcactacgcaggcgacgccttactcgtctccacagtgctcgcaggcatcaagcgacagacgggtcttcaacctgacatcaaccgcatcaccgagcctactacaaggggtctgttggaaaagtacctcggctttggagagtttgtgtttgacagcagcgtcgccgctgcccgcgcttcgtcgctcttccaaaagggcttcccagacaagttgcacggtgcacctcacgcctga

SEQ ID NO: 4724 - protein, 83 aa, Ustilago maydis 521
MVVGRLLHYAGDALLVSTVLAGIKRQTGLQPDINRITEPTTRGLLEKYLGFGEFVFDSSVAAARASSLFQKGFPDKLHGAPHA

SEQ ID NO: 4725 - DNA, 309 bp, Ustilago maydis 521
  CDS (1)..(309)
atgtttggacgcattttccatctgctcatagatgccatgctggtgagcgtggcgctgtccggtatcaagcgaagcacaggtctcacgccagcagtgtcgcggatgcctaacaaggatcttcgaaacctgctgcgcatctacctggaagcaggagaatggacagtcgctgacaaaaccttcactacgaacaccgccgacagcgaccagtttgacagcccagacggttttttacctggtttggacggcgacactgaacttggcacaacgatgtcgttgcttgccttccgaccttgtattatatttcgctga

SEQ ID NO: 4726 - protein, 102 aa, Ustilago maydis 521
MFGRIFHLLIDAMLVSVALSGIKRSTGLTPAVSRMPNKDLRNLLRIYLEAGEWTVADKTFTTNTADSDQFDSPDGFLPGLDGDTELGTTMSLLAFRPCIIFR

SEQ ID NO: 4727 - DNA, 222 bp, Schizosaccharomyces pombe
  CDS (1)..(222)
atgccttttctttcccgactatttcattacggtgtcgacttagcactagtctctacttgtgtggccggcatccgtcgatcatctggtatttcttttgaggtcgagaaaattcataacgaagacgttaagacagctgtcgaaaagtatctaaactttggtgaatgggcctttgatcaatcttctgccttcttaggttcttcaacatggttcaaaaaggtataa

SEQ ID NO: 4728 - protein, 73 aa, Schizosaccharomyces pombe
MPFLSRLFHYGVDLALVSTCVAGIRRSSGISFEVEKIHNEDVKTAVEKYLNFGEWAFDQSSAFLGSSTWFKKV

SEQ ID NO: 4729 - DNA, 23 bp, Artificial sequence
  primer
atgctagacgatgataagggcac

SEQ ID NO: 4730 - DNA, 26 bp, Artificial sequence
  primer
ctagtcataaaccctttcataaaaca

SEQ ID NO: 4731 - protein, 66 aa, Artificial sequence
  consensus sequence
  Variant (2)..(4): Xaa in position 2 to 4 is any amino acid
  Variant (6)..(7): Xaa in position 6 to 7 is any amino acid
  Variant (9)..(9): Xaa in position 9 is any amino acid
  Variant (11)..(12): Xaa in position 11 to 12 is any amino acid
  Variant (16)..(17): Xaa in position 16 to 17 is any amino acid
  Variant (19)..(19): Xaa in position 19 is any amino acid
  Variant (22)..(37): Xaa in position 22 to 37 is any amino acid
  Variant (38)..(42): Xaa in position 38 to 42 is any or no amino acid
  Variant (45)..(46): Xaa in position 45 to 46 is any amino acid
  Variant (49)..(51): Xaa in position 49 to 51 is any amino acid
  Variant (53)..(60): Xaa in position 53 to 60 is any amino acid
  Variant (61)..(62): Xaa in position 61 to 62 is any or no amino acid
  Variant (64)..(65): Xaa in position 64 to 65 is any amino acid
HXXXDXXLXSXXLAGXXRXTGXXXXXXXXXXXXXXXXXXXXXYLXXGEXXXDXXXXXXXXXXSXXF

SEQ ID NO: 4732 - DNA, 423 bp, Saccharomyces cerevisiae
  CDS (1)..(423)
atgatggaattcaaagtgtcaccattgacaaagattatttctctgtcaggattcctcgcattgggattccttttggtcatactaagctgcgcattattccataattactacccactattcgatattttgatctttttgcttgccccaataccaaacacaattttcaatgcaggaaataaatatcacacatctgacttcatgtccgattcatcaaacactggccaagatctggctcacttccttacaggaatgctggtgacaagcggtatagcactccctgttgttttctatcattgccaattgattggccatttgagttgtatcatgtgcatgatcggtggtcttatcatatattctagtattgttatttttaaatggtttttcaaaaaagatttcaacgaagatgattccctttttggttaa

SEQ ID NO: 4733 - protein, 140 aa, Saccharomyces cerevisiae
MMEFKVSPLTKIISLSGFLALGFLLVILSCALFHNYYPLFDILIFLLAPIPNTIFNAGNKYHTSDFMSDSSNTGQDLAHFLTGMLVTSGIALPVVFYHCQLIGHLSCIMCMIGGLIIYSSIVIFKWFFKKDFNEDDSLFG

SEQ ID NO: 4734 - DNA, 396 bp, Gallus gallus
  CDS (1)..(396)
atggcgggtatcaaagctctcgtggggctgtccttcagcggagccatcgggctgacgttcctcatgctgggctgcgccctggagtactacggtgtttactggcctatgtttgtcttaatattttacttcatctgccccattccccacttcattgccagaagagtaagcgatgacagcgacgcagccagcagtgcctgcagggagctggcgtacttcttcacaactggaattgtcgtttctgcttttggctttcccataatccttgcgcgggtcgaagcgatcaaatggggagcctgtggtctggtgctggctggcaatgcagtcattttccttactattttaggcttttttcttgtgtttggtagaggagatgactttagctgggaacagtggtag

SEQ ID NO: 4735 - protein, 131 aa, Gallus gallus
MAGIKALVGLSFSGAIGLTFLMLGCALEYYGVYWPMFVLIFYFICPIPHFIARRVSDDSDAASSACRELAYFFTTGIVVSAFGFPIILARVEAIKWGACGLVLAGNAVIFLTILGFFLVFGRGDDFSWEQW

SEQ ID NO: 4736 - DNA, 396 bp, Rattus norvegicus
  CDS (1)..(396)
atggcgggcatcaaagctttaattagtttgtcctttggaggagctatcggactgatgtttttgatgcttggatgtgcccttccaatatacaaccaatactggcccctcttcgttctcttcttttacatcctctcgcccattccgtactgcatagccagaagattggtggacgacacagacgccatgagcaacgcttgtaaggagctcgccatattcctcaccacaggtgtcgtcgtctcggcctttgggctccctgtagtgtttgccagggcacatctgattgaatggggagcatgcgcacttgttctcaccggaaacacagtcatcttcgcgactattctaggcttcttcctggtcttcgggagcaatgatgacttcagctggcagcaatggtga

SEQ ID NO: 4737 - protein, 131 aa, Rattus norvegicus
MAGIKALISLSFGGAIGLMFLMLGCALPIYNQYWPLFVLFFYILSPIPYCIARRLVDDTDAMSNACKELAIFLTTGVVVSAFGLPVVFARAHLIEWGACALVLTGNTVIFATILGFFLVFGSNDDFSWQQW

SEQ ID NO: 4738 - DNA, 396 bp, Xenopus tropicalis
  CDS (1)..(396)
atggcggggattaaagcacttgttgcattatcctttagtggagctattggattaaccttccttatgttgggatgtgccttggagagctacaaggtgtattggcctttgtttgttttgatattttatgccatcagtccaattccttattttattgccatacgaatcagtgacgataccgatgctgccagcagtgcttgcagggaattggcatttttcttcactactggaatcgttgtctctgcctttggcttgcctatagttctagccagagttggtgtgattctgtggggtgcgtgtggactggtgcttgcagggaatgctgttattttccttacaatactgggcttcttcattgtgtttggaagatcagatgactttagctgggagcagtggtaa

SEQ ID NO: 4739 - protein, 131 aa, Xenopus tropicalis
MAGIKALVALSFSGAIGLTFLMLGCALESYKVYWPLFVLIFYAISPIPYFIAIRISDDTDAASSACRELAFFFTTGIVVSAFGLPIVLARVGVILWGACGLVLAGNAVIFLTILGFFIVFGRSDDFSWEQW

SEQ ID NO: 4740 - DNA, 396 bp, Homo sapiens
  CDS (1)..(396)
atggcaggcatcaaagctttgattagtttgtcctttggaggagcaatcggactgatgtttttgatgcttggatgtgcccttccaatatacaacaaatactggcccctctttgttctatttttttacatcctttcacctattccatactgcatagcaagaagattagtggatgatacagatgctatgagtaacgcttgtaaggaacttgccatctttcttacaacgggcattgtcgtgtcagcttttggactccctattgtatttgccagagcacatctgattgagtggggagcttgtgcacttgttctcacaggaaacacagtcatctttgcaactatactaggctttttcttggtctttggaagcaaggacgacttcagctggcagcagtggtga

SEQ ID NO: 4741 - protein, 131 aa, Homo sapiens
MAGIKALISLSFGGAIGLMFLMLGCALPIYNKYWPLFVLFFYILSPIPYCIARRLVDDTDAMSNACKELAIFLTTGIVVSAFGLPIVFARAHLIEWGACALVLTGNTVIFATILGFFLVFGSKDDFSWQQW

SEQ ID NO: 4742 - DNA, 393 bp, Caenorhabditis elegans
  CDS (1)..(393)
atgggaggagtacgagctgttgctgcactggcgttcgccggagttgttggcctcactttcctcgttcttggatgtgccctgcctagaacatggaccccaatgtttgttatcacattctacgttctttcgccggtaccacttctcatcgccagacgcttccaagaagatatgactggaacaaatgcatgcattgaattagctctcttcatcaccactggaattgtcatctccgcctttgctcttccgatagtgctggcacatgcaggaacgatagcaaacagtgcatgcttcctcgtcaatacaggatctgtgattatgttcggtacaattattgcatatttctacttgcatcgtgatgacgacagtggaagctggagccagtctctgttctaa

SEQ ID NO: 4743 - protein, 130 aa, Caenorhabditis elegans
MGGVRAVAALAFAGVVGLTFLVLGCALPRTWTPMFVITFYVLSPVPLLIARRFQEDMTGTNACIELALFITTGIVISAFALPIVLAHAGTIANSACFLVNTGSVIMFGTIIAYFYLHRDDDSGSWSQSLF

SEQ ID NO: 4744 - DNA, 423 bp, Arabidopsis thaliana
  CDS (1)..(423)
atggcagacgtacctggatacctgcgcacttgtttggatatggggaagatagctttcttagcaatccttgtatctacagggattgtgttgcagattctggcttgtgctctgttcaataactggtggccaatgctaagtgttataatgtatgtgctcctcccaatgcctttgctcttctttggtggatcagacagtacatctctattcaacgagtcagataatagttggatcaatgcagccaagttcttgactggtgcatcagcagttggaagcgtcgcgataccatcgattctaaaacacgccggactcatcggttggggcgcattagcccttgatctctcatcctacgttgtcttcctcgtggctattttgggttacatttgcataggagatgccagtgacaactattacagctacatttaa

SEQ ID NO: 4745 - protein, 140 aa, Arabidopsis thaliana
MADVPGYLRTCLDMGKIAFLAILVSTGIVLQILACALFNNWWPMLSVIMYVLLPMPLLFFGGSDSTSLFNESDNSWINAAKFLTGASAVGSVAIPSILKHAGLIGWGALALDLSSYVVFLVAILGYICIGDASDNYYSYI

SEQ ID NO: 4746 - DNA, 342 bp, Arabidopsis thaliana
  CDS (1)..(342)
atgttttcatctagtatcctcctacagatcctggcatgcgcgatatatggtaactggtggccaatgctatcagcactcatgtatgtagtggtgcctatgccttgtatgttctttggaggaggctcaacccaattccttattagtcgggacggtggagggtggatagacgcagcgaagttcttgaccggagcatcgaccgtgggaagccttgctatcccaatcatcttaaggcacgcacagatgatcgagacaggtgcaatgctcatagagttcacatcattcttcatattcatttgcactgtcatgtgttttcaccgggctagtctcgatgatgactggtaa

SEQ ID NO: 4747 - protein, 113 aa, Arabidopsis thaliana
MFSSSILLQILACAIYGNWWPMLSALMYVVVPMPCMFFGGGSTQFLISRDGGGWIDAAKFLTGASTVGSLAIPIILRHAQMIETGAMLIEFTSFFIFICTVMCFHRASLDDDW

SEQ ID NO: 4748 - DNA, 369 bp, Schizosaccharomyces pombe 972h-
  CDS (1)..(369)
atgtccgacctcaggaaaattatcggtctttcttcggtcctggcagtaggatttatgctggtgatcctgtcttgtgctttattcaagaattggtatccactgctaattgctcctcttcctaatctccttacgaaaaaatactcgacaagccatgactttttacaagaggaagacagaaatcttcttgactttggtcgatttacattcggtgcaaccatctgtaccgggtttgctttacccatagtatttgttaatgtcggattaattggtactgctgctgctacaatgagttgcgttggtggatctattatatttcttgttattactttatattctcaagcttttgttcaacacgaagaagaattttaa

SEQ ID NO: 4749 - protein, 122 aa, Schizosaccharomyces pombe 972h-
MSDLRKIIGLSSVLAVGFMLVILSCALFKNWYPLLIAPLPNLLTKKYSTSHDFLQEEDRNLLDFGRFTFGATICTGFALPIVFVNVGLIGTAAATMSCVGGSIIFLVITLYSQAFVQHEEEF

SEQ ID NO: 4750 - DNA, 381 bp, Drosophila melanogaster
  CDS (1)..(381)
atggccaccttaaagggcctcttcatctgcgcctttcttacatgcattggtgttaccttcctgatcctggcctgcgccgtgcccacgacaaagattttctatcccttcttcgttttgctgttctacgtgctgtcagttcttccagtcttcattgccaggaggacaactcctggaaatgagaccaatccgaaatcggagtttgctcacttccttaccgcgggaatggtgctgagtgccttcgccctgcccatcgtcctagcccacgcattggtgatcacctggacggcgagtatcctgacgataataagtaacattattaactacggcaccatcttctggtacgccatgcgcgatgacgagccatacggatccatgttctag

SEQ ID NO: 4751 - protein, 126 aa, Drosophila melanogaster
MATLKGLFICAFLTCIGVTFLILACAVPTTKIFYPFFVLLFYVLSVLPVFIARRTTPGNETNPKSEFAHFLTAGMVLSAFALPIVLAHALVITWTASILTIISNIINYGTIFWYAMRDDEPYGSMF

SEQ ID NO: 4752 - DNA, 381 bp, Arabidopsis thaliana
  CDS (1)..(381)
atggcgatgaccatcgaagtacttgctggacttgctttcatgttttcatctagtatcctcctacagatcctggcatgcgcgatatatggtaactggtggccaatgctatcagcactcatgtatgtagtggtgcctatgccttgtatgttctttggaggaggctcaacccaattccttattagtcgggacggtggagggtggatagacgcagcgaagttcttgaccggagcatcgaccgtgggaagccttgctatcccaatcatcttaaggcacgcacagatgatcgagacaggtgcaatgctcatagagttcacatcattcttcatattcatttgcactgtcatgtgttttcaccgggctagtctcgatgatgactggtaa

SEQ ID NO: 4753 - protein, 126 aa, Arabidopsis thaliana
MAMTIEVLAGLAFMFSSSILLQILACAIYGNWWPMLSALMYVVVPMPCMFFGGGSTQFLISRDGGGWIDAAKFLTGASTVGSLAIPIILRHAQMIETGAMLIEFTSFFIFICTVMCFHRASLDDDW

SEQ ID NO: 4754 - DNA, 423 bp, Eremothecium gossypii
  CDS (1)..(423)
atgggcgagacattttcacctttgcataagcttatctgcctcagcgcattgcttgcagctggttttctgctagtgattctggcatgtgcactatataataactactatccactactggacgtgctggtgtttgtcctagcgccactacctaatgctgtgttcggcggttcgtcatttggagggaatgagttcatgaacgaacgagtgcaaagcgcacaggagttcggccagtttatgaccgggggcttggtagccagtggtttgattcttccggtggttttctatcatacaggactgatcaaccagcagagctgcattgcctctgtgatcgggggcggtattatatacctgtgcatcatcattttctcctggttttttaaccgctcttgggaagaggacgaggatgcgctcttcagctattga

SEQ ID NO: 4755 - protein, 140 aa, Eremothecium gossypii
MGETFSPLHKLICLSALLAAGFLLVILACALYNNYYPLLDVLVFVLAPLPNAVFGGSSFGGNEFMNERVQSAQEFGQFMTGGLVASGLILPVVFYHTGLINQQSCIASVIGGGIIYLCIIIFSWFFNRSWEEDEDALFSY

SEQ ID NO: 4756 - DNA, 387 bp, Neurospora crassa
  CDS (1)..(387)
atggcagcaggactcaagaccatcatcgcgctctccttcgtcttggcggtgggcttcctcctcgtcatcttgtcatgcgcactatggaaggcatactacccgctgctggtggtggccacctacgtgttggcgcccatacccaactggatctgcagccattgcgccaatccggacgactttgttgagagctcgggcgctgcggtgttggatctgggtcgcttctgcactggtttcctggtcatgatgggacttgctcttccagttgttctcgcaaactcggccatcatcacggtcccggccatgatcatgtccgttatcggtggcctgttgatctatggcaccattatcagcttcgccatgttcttccaggaagagcaagacttctga

SEQ ID NO: 4757 - protein, 128 aa, Neurospora crassa
MAAGLKTIIALSFVLAVGFLLVILSCALWKAYYPLLVVATYVLAPIPNWICSHCANPDDFVESSGAAVLDLGRFCTGFLVMMGLALPVVLANSAIITVPAMIMSVIGGLLIYGTIISFAMFFQEEQDF

SEQ ID NO: 4758 - DNA, 390 bp, Magnaporthe grisea 70-15
  CDS (1)..(390)
atgccaaacgccgggctcaagaccataatagcgctatcgttcgtgctggcggttggcttcctcctcgtcatcctatcatgcgccctctggaaggtctactacccgctgctcgtcgtcgccacatatgtcttggcgcccgttcccaactggatagctaggtcctgttcaaatccggacgatttcgtcgagtcttcgggcggcgcggcgctcgacctggggaggttctgcactggtttcttggtcgttatgggaattgccctcccaatcgtgctggcccatgcgcacatgatcaacgctggcgccttggttatgtctgtggccggaggccttctaatttacggcaccgtcataagcttcggcatgtttttcaccgaggagcaagaattctag

SEQ ID NO: 4759 - protein, 129 aa, Magnaporthe grisea 70-15
MPNAGLKTIIALSFVLAVGFLLVILSCALWKVYYPLLVVATYVLAPVPNWIARSCSNPDDFVESSGGAALDLGRFCTGFLVVMGIALPIVLAHAHMINAGALVMSVAGGLLIYGTVISFGMFFTEEQEF

SEQ ID NO: 4760 - DNA, 387 bp, Gibberella zeae PH-1
  CDS (1)..(387)
atgtctgccggtctcaaaaccatcatcgcactctccttcgtgctcgccgtcggattcctcctcgttatcctgtcctgcgcgctgtggaaggtctactatcctctgctcgtcgttgccacctatgtcattgcgcccattcccaactggatctgcggacactgcgccaaccccgatgatttcgtcgagagctccggtgctgcggttctagatcttggacgtttctttacgggattctttgttgttatgggaattgctctacccgtcgtcctcgcacactccggcctcatcgaagtccaagccatggttatgtccataatcggcggtctactgatttacggaaccattgtcagcttcggcatgttcttccacgaggagcaagatttctag

SEQ ID NO: 4761 - protein, 128 aa, Gibberella zeae PH-1
MSAGLKTIIALSFVLAVGFLLVILSCALWKVYYPLLVVATYVIAPIPNWICGHCANPDDFVESSGAAVLDLGRFFTGFFVVMGIALPVVLAHSGLIEVQAMVMSIIGGLLIYGTIVSFGMFFHEEQDF

SEQ ID NO: 4762 - DNA, 396 bp, Gallus gallus
  CDS (1)..(396)
atggccggcatcaaagctctgatcagcctgtccttcgggggagcggtgggactgatgttcctgatgctgggctgcgctcttcctcagtacaaccaatactggccactgtttgttctgtttttttacatcctttctcctatcccgtactgcatagcaagaagattagtagatgacacagatgctacgagtaacgcctgcaaggagctggccgtatttcttacaacaggcattgttgtctcggcatttggactgcctatagtgtttgccagagcagaactgatttactggggtgcctgtgcacttgttcttacggggaatacagtcatcttcgctacgatcctaggatttttcttggtctttggcagcaatgacgacttcagctggcagcagtggtga

SEQ ID NO: 4763 - protein, 131 aa, Gallus gallus
MAGIKALISLSFGGAVGLMFLMLGCALPQYNQYWPLFVLFFYILSPIPYCIARRLVDDTDATSNACKELAVFLTTGIVVSAFGLPIVFARAELIYWGACALVLTGNTVIFATILGFFLVFGSNDDFSWQQW

SEQ ID NO: 4764 - DNA, 420 bp, Candida glabrata CBS138
  CDS (1)..(420)
atggaattgaggatttcgccacttactagaattatatccctatcaggatttttagcttctggtttcctgtttgttatattaagctgtgccttatatcacaattactaccctctatttggcacacttatatttttactggcaccgatcccaaactcactgtttggaaggaaaggctatgatacctctgatttcatgtctgatactaccaacaatgcccgtgattttggccatttcctgacaagtatgatggtaacgagtggtattgtgttgccctttgtattctaccactgccagttaattggctctgtgagctgtattatgagtatggtcggtggtctgataatatacttgagtatcattatcttctcctggtttttcagcacttcttgggacagcgaggacgataacctgttcggctag

SEQ ID NO: 4765 - protein, 139 aa, Candida glabrata CBS138
MELRISPLTRIISLSGFLASGFLFVILSCALYHNYYPLFGTLIFLLAPIPNSLFGRKGYDTSDFMSDTTNNARDFGHFLTSMMVTSGIVLPFVFYHCQLIGSVSCIMSMVGGLIIYLSIIIFSWFFSTSWDSEDDNLFG

SEQ ID NO: 4766 - DNA, 429 bp, Kluyveromyces lactis NRRL Y-1140
  CDS (1)..(429)
atgggtgtacaagtatctcctttgactaagatcatttgccttagtggcgtactagcattaggctttcttttgattatattgagttgcgcacttttccacaactattatccattgtttgacgtgttaatattcctactcgctccattgcctaatgcattgtttggaaagagcgatgggttttcatcacatggcgaattcttgaatgaatctggcagaaacggcgaggatttcggtcattttatgaccggtttgctagtatctagtggaattttattgccaattgtgttctaccactcaaacttgattaaccacgaaagtgcactcatgactgtttcaggtggccttatcatatacctgtgcatcgttttctttacatggtttttcaatggttcgtgggatacagaggatgataatctatttggttattaa

SEQ ID NO: 4767 - protein, 142 aa, Kluyveromyces lactis NRRL Y-1140
MGVQVSPLTKIICLSGVLALGFLLIILSCALFHNYYPLFDVLIFLLAPLPNALFGKSDGFSSHGEFLNESGRNGEDFGHFMTGLLVSSGILLPIVFYHSNLINHESALMTVSGGLIIYLCIVFFTWFFNGSWDTEDDNLFGY

SEQ ID NO: 4768 - DNA, 423 bp, Debaryomyces hansenii CBS767
  CDS (1)..(423)
atgaatccattaaataaaatcatattcctttcagcatttttagcgtcagggtttttgctaatactattatcatgtgcattgtatagtaactggaagccattatgggttatagtaatatttttaattgctccattaccgaatataatagcactgacaattgaaagtcgtagagacgacttcttgaccttcagtaatgaccatgggaataacccgactacattagaagaaatgtgcaaatttttgacaggggttttgcttgtaagcgggatttcgttacctttaacattatatcatacccatttgatacaattcggatctatgataatgagtataattggagggttaatagtgtacgtggacataatcatattcatatggttttttagtgaagaagaggaagatcacgaagacttcaatttctag

SEQ ID NO: 4769 - protein, 140 aa, Debaryomyces hansenii CBS767
MNPLNKIIFLSAFLASGFLLILLSCALYSNWKPLWVIVIFLIAPLPNIIALTIESRRDDFLTFSNDHGNNPTTLEEMCKFLTGVLLVSGISLPLTLYHTHLIQFGSMIMSIIGGLIVYVDIIIFIWFFSEEEEDHEDFNF

SEQ ID NO: 4770 - DNA, 453 bp, Debaryomyces hansenii CBS767
  CDS (1)..(453)
atgaattcgactacatcatccaaagataacccgttgaataaaatcataggattatcagttgttttatctatgggattcctcttagtcgttttagcaggaatatatggcaattggttccccattatcaatggtataatatttgccattgcacatttacccgttgctataacgaaagccatatctgattctagtgattatgatttcagctttgatcctgtgtcgtcctctcgaggaagcattttaaaagaatttggtcaatttacatctgcatttttagtagttacagggttctatctacctgtattattacatcattctcatatattaacaagggttgctatgatattgacaataataggtggaagcttaatttatggtactgtctttaagtttagcctgtactttgacgaaagtgaggaccatgaaactgaagactttggaggtgttatctaa

SEQ ID NO: 4771 - protein, 150 aa, Debaryomyces hansenii CBS767
MNSTTSSKDNPLNKIIGLSVVLSMGFLLVVLAGIYGNWFPIINGIIFAIAHLPVAITKAISDSSDYDFSFDPVSSSRGSILKEFGQFTSAFLVVTGFYLPVLLHHSHILTRVAMILTIIGGSLIYGTVFKFSLYFDESEDHETEDFGGVI

SEQ ID NO: 4772 - DNA, 375 bp, Mus musculus
  CDS (1)..(375)
atggcgctctccttcagtggggcaattgggctgacttttcttatgctgggatgtgccttggaggactatgacatttactggcccctgttcgtcttgattttctacgtcatctcccccatcccctacttcattgccaaaagggtcacatatgactctgacgcgaccagcagtgcctgtccggaattggtgtatttcttcaccactgggattgttgattctgcctttggacttcctgttattcttgctcgtgtggatgtgatcaagtggggagcctgtggtcttgtgttggccagcaacgctgtcattttcctcacaattctaggcttcttcctcgtctttgaaggaagagatgatttcagttgggaacagtggtag

SEQ ID NO: 4773 - protein, 124 aa, Mus musculus
MALSFSGAIGLTFLMLGCALEDYDIYWPLFVLIFYVISPIPYFIAKRVTYDSDATSSACPELVYFFTTGIVDSAFGLPVILARVDVIKWGACGLVLASNAVIFLTILGFFLVFEGRDDFSWEQW

SEQ ID NO: 4774 - DNA, 393 bp, Yarrowia lipolytica CLIB99
  CDS (1)..(393)
atggtccaaatctcgccactatcgaaaatcatcacattgtccacagtcctggccacgggctttctgctcatcatcctgtcatgtgcattgtggaacaactggctgccattgattgtcgttgccgtcttctgtctggcccctgcacccaacgcaatctgccagagctgggctggccaggacgacttcatgagcgagagtagcagcaccgtggtcgactttggtcgcttctccaccggcttcatggtcgtgtctggactgtcaattcccgtcatgctcgcacacaacagcatcatcaacactgcggccatgtggatgtcgctgtcgggcggtcttctcatctacgcaactatcattacctttggcgcattcttctatgagcccgaggagttctag

SEQ ID NO: 4775 - protein, 130 aa, Yarrowia lipolytica CLIB99
MVQISPLSKIITLSTVLATGFLLIILSCALWNNWLPLIVVAVFCLAPAPNAICQSWAGQDDFMSESSSTVVDFGRFSTGFMVVSGLSIPVMLAHNSIINTAAMWMSLSGGLLIYATIITFGAFFYEPEEF

SEQ ID NO: 4776 - DNA, 414 bp, Pan troglodytes
  CDS (1)..(414)
atgagaaccaatttggaactgaagaaaacaaatgctttgattagtttgtcctttggaggagcaatcggactgatgtttttgatgcttggatgtgcccttccaatatacaacaaatactggcccctctttgttctatttttttacatcctttcacctattccatactgcatagcaagaagattagtggatgatacagatgctatgagtaacgcttgtaaggaacttgccatctttcttacaacgggcattgtcgtgtcagcttttggactccctattgtatttgccagagcacatctgattgagtggggagcttgcgcacttgttctcacaggaaacacagtcatctttgcaactatactaggctttttcttggtctttggaagcaatgacgacttcagctggcagcagtggtga

SEQ ID NO: 4777 - protein, 137 aa, Pan troglodytes
MRTNLELKKTNALISLSFGGAIGLMFLMLGCALPIYNKYWPLFVLFFYILSPIPYCIARRLVDDTDAMSNACKELAIFLTTGIVVSAFGLPIVFARAHLIEWGACALVLTGNTVIFATILGFFLVFGSNDDFSWQQW

SEQ ID NO: 4778 - DNA, 396 bp, Canis familiaris
  CDS (1)..(396)
atggccggcatcaaagctttgattagtttgtcctttggaggagcaattgggctgatgtttttgatgcttggatgtgcccttccaatatacaaccaatactggcctctctttgttctgtttttttacatcctttcacctattccatactgcatagcgagaagattagtggatgacacagatgctatgagtaacgcttgtaaggaacttgccatatttcttacaacaggcattgttgtctcagcttttgggctccctattgtgtttgccagagcacatctgattgagtggggagcttgtgcacttgttctcacaggaaacacagtcatctttgcaactatactgggctttttcttggtctttggaagcaatgatgacttcagctggcagcagtggtga

SEQ ID NO: 4779 - protein, 131 aa, Canis familiaris
MAGIKALISLSFGGAIGLMFLMLGCALPIYNQYWPLFVLFFYILSPIPYCIARRLVDDTDAMSNACKELAIFLTTGIVVSAFGLPIVFARAHLIEWGACALVLTGNTVIFATILGFFLVFGSNDDFSWQQW

SEQ ID NO: 4780 - DNA, 393 bp, Cryptococcus neoformans var. neoformans JEC21
  CDS (1)..(393)
atgacagctggtctcaaaaccgtcatccttctctcattcatcctggccgcaggtttcctgctggtcatcctgtcgtgtgcgctctgggcaaactggttgcccctccttgtcgccctcacattcatcctcgcgccgttccccaactggatatgctctcgctgcgcctcggccgacgacctttctccagaattcaactctgcctatatcgactttggccgcttcctcaccggtatgcttgtgatgaccggtctttccctccccttgctactcacccactctgccttgatccagcccgctgcttgctggatgtcgattgcgggcggtatgctcgtctacggcacgatactagtctacgccggatggtttggaggcggtaacgaggaagagttttag

SEQ ID NO: 4781 - protein, 130 aa, Cryptococcus neoformans var. neoformans JEC21
MTAGLKTVILLSFILAAGFLLVILSCALWANWLPLLVALTFILAPFPNWICSRCASADDLSPEFNSAYIDFGRFLTGMLVMTGLSLPLLLTHSALIQPAACWMSIAGGMLVYGTILVYAGWFGGGNEEEF

SEQ ID NO: 4782 - DNA, 378 bp, Dictyostelium discoideum
  CDS (1)..(378)
atgggacatgatattaaaggtttttcttgcgcatttgcagttggtttattatttaatattttagcatgtatagtttctcactctggttatccaattatagttgttgcatcatattttcttgctccgttcccaaatatattatgtagaaatagagatagtttttcaagtgaaaaaggaacatttgaagatattgggttatttttaacaggtctatttattacatctggatttgcaattccaatgattttagcccattcagatattatttcaggaaaagcacttgcattttcaatggcaggcggtgttacagtttatgcaacaattattacattcctttggttctttaatagacataatgatgaagacaataattggtaa

SEQ ID NO: 4783 - protein, 125 aa, Dictyostelium discoideum
MGHDIKGFSCAFAVGLLFNILACIVSHSGYPIIVVASYFLAPFPNILCRNRDSFSSEKGTFEDIGLFLTGLFITSGFAIPMILAHSDIISGKALAFSMAGGVTVYATIITFLWFFNRHNDEDNNW

SEQ ID NO: 4784 - DNA, 387 bp, Aspergillus nidulans FGSC A4
  CDS (1)..(387)
atgacggctggtctaaaaacaatcatcgctctctccttcgtacttgcgattggatttctccttgttatactctcttcggctctctggcacaacttcctgccgctgactgttgttgcgacatacgttattgcgccgctccccaactggatctgctcaagatgcgcgaaccctgatgactttatggacagctctggcaatgccgttgccgactttggccggttcttgaccgggttcctggtactcatgggtgttgcgctcccagccgtccttgcgcacagtggtgcaattcaagtgcccgccatgatcatgtccatcctcggaggtctactgatttatggaacaatcatcagcttttcaatgtttttccgggaacaagaggaattctga

SEQ ID NO: 4785 - protein, 128 aa, Aspergillus nidulans FGSC A4
MTAGLKTIIALSFVLAIGFLLVILSSALWHNFLPLTVVATYVIAPLPNWICSRCANPDDFMDSSGNAVADFGRFLTGFLVLMGVALPAVLAHSGAIQVPAMIMSILGGLLIYGTIISFSMFFREQEEF

SEQ ID NO: 4786 - DNA, 435 bp, Candida albicans SC5314
  CDS (1)..(435): transl_table=12
atgaatccattgaataaaattatatttttatcggcatttttggcatcaggctttttattgatattattgtcatgtgcattatacaacaactaccatacactttgggtaatattaattttccttctagctccattaccaaatttaatagccaattccattgagctggcacgagattataatttcttgacgttcaatgattatggcaatagtaatgattcaacacaatcaccattacaggagtttggcaaatacataactgggtttttgattgttagtggtatagctttaccattgacattttaccattgtgggttaattgaattaggggcaaccattatgagtataattggtggtctcattgtatacagcgacattattatttttatctggttttttaatactgaagaagaagaacacgatgactttaatttctaa

SEQ ID NO: 4787 - protein, 144 aa, Candida albicans SC5314
MNPLNKIIFLSAFLASGFLLILLSCALYNNYHTLWVILIFLLAPLPNLIANSIESARDYNFLTFNDYGNSNDSTQSPLQEFGKYITGFLIVSGIALPLTFYHCGLIELGATIMSIIGGLIVYSDIIIFIWFFNTEEEEHDDFNF

SEQ ID NO: 4788 - DNA, 465 bp, Candida albicans SC5314
  CDS (1)..(465): transl_table=12
atgaattcaactcaaacattttcgtatctccaaaagaaccctttaaacaaaattattggtctttcagtaattctatcggttgggtttcttttggtaatattagcaggaatatatggaaattggtttcctattataattggcattatattcgcagtggcacatttgccggtggcaatcactaaaaacatcgctagtagttctgactatgatttcaattttgattctacaaccaccaactccagggctatcattgagattgggcagtttttgacggctttcttattggtgagtggtgtttatttgcctattctattaaaccactctttgatattgacgaaaacagctatggtcttgacaatagtgggcggtttgttgatttatggcactgtgtatacgtttagtcactattttgatgagccacaagaagaggatggcttggctgacctcggaggaggtgttatttaa

SEQ ID NO: 4789 - protein, 154 aa, Candida albicans SC5314
MNSTQTFSYLQKNPLNKIIGLSVILSVGFLLVILAGIYGNWFPIIIGIIFAVAHLPVAITKNIASSSDYDFNFDSTTTNSRAIIEIGQFLTAFLLVSGVYLPILLNHSLILTKTAMVLTIVGGLLIYGTVYTFSHYFDEPQEEDGLADLGGGVI

SEQ ID NO: 4790 - DNA, 387 bp, Aspergillus fumigatus Af293
  CDS (1)..(387)
atgatggcaggtcttaagacaattatcgcgctctcctttgttcttgccattggctttcttctggtcatcctctcctccgctctttggcacaacttccttccgttgattgtggttgcgacatatgtcatcgctcctgtaccgaattggatttgcgctcgatgcgcaaatccggatgatttcatggacagttctggtaatgcagtcgctgattttgggcgattcttgactggcttcctggtgttgatgggtgttgccctgccggccgtgcttgcgcatagcggagctatccagatccctgccatgatcatgtccatcctcggaggtcttctgatttacggcactattatcagtttctcgatgttcttcaaggagcaagaagagttttga

SEQ ID NO: 4791 - protein, 128 aa, Aspergillus fumigatus Af293
MMAGLKTIIALSFVLAIGFLLVILSSALWHNFLPLIVVATYVIAPVPNWICARCANPDDFMDSSGNAVADFGRFLTGFLVLMGVALPAVLAHSGAIQIPAMIMSILGGLLIYGTIISFSMFFKEQEEF

SEQ ID NO: 4792 - DNA, 498 bp, Ustilago maydis 521
  CDS (1)..(498)
atggcggccggactcaagagtgagtgctacagctgcagcgcctttgtcttgttggcaagtgatctgatcgaaagaagcgatcatgctgacacttggagtttgcttctcttcattctcttctacgctacagccatcatcctactctcatttgtgctcgcactgggcttcttgctcattatcctgtcgtgcgcactgtggtccaactggctgccgcttctcgtagcgctcatctacgtcctgacaccgttaccaaatagcctctgcgcacgctgcgccggtgccgacgacttttccgccgactacaatagcggctttttggactttggcaacttcatgacaggtctcatgattgtctctgggtttgccttgccactgtcgttggcgcatgcaggtgttattgcgccaacggcctgttggatgtcaatcgccggtggcggacttgtctacgctaccatcttgacctactctggattcttcagcgagacagatgactattaa

SEQ ID NO: 4793 - protein, 165 aa, Ustilago maydis 521
MAAGLKSECYSCSAFVLLASDLIERSDHADTWSLLLFILFYATAIILLSFVLALGFLLIILSCALWSNWLPLLVALIYVLTPLPNSLCARCAGADDFSADYNSGFLDFGNFMTGLMIVSGFALPLSLAHAGVIAPTACWMSIAGGGLVYATILTYSGFFSETDDY

SEQ ID NO: 4794 - DNA, 396 bp, Canis familiaris
  CDS (1)..(396)
atggcgggtgttaaagctcttgtggcattatccttcagtggggctattgggctgactttcctcatgctgggatgtgccttagaggattatggcgtttactggcccctgtttgtcctgatatttcacgccatctctcccatcccccatttcattgccaaaagagcaacatatgactctgacgcaacaagtagcgcctgtcgggagctggcatattttttcactactggaattgttgtttctgcctttggatttcctgttattcttgcccgtgtgtctgtgatcaaatggggagcctgtggccttgtgctggcaggcaatgcagtcattttccttacaattcaaggttttttccttgtatttggaagaggagatgattttagctgggagcagtggtag

SEQ ID NO: 4795 - protein, 131 aa, Canis familiaris
MAGVKALVALSFSGAIGLTFLMLGCALEDYGVYWPLFVLIFHAISPIPHFIAKRATYDSDATSSACRELAYFFTTGIVVSAFGFPVILARVSVIKWGACGLVLAGNAVIFLTIQGFFLVFGRGDDFSWEQW

SEQ ID NO: 4796 - DNA, 333 bp, Canis familiaris
  CDS (1)..(333)
atgctgggatgtgccttagaggattatggcgtttactggcccctgtttgtcctgatatttcacgccatctctcccatcccccatttcattgccaaaagagcaacatatgactctgacgcaacaagtagcgcctgtcgggagctggcatattttttcactactggaattgttgtttctgcctttggatttcctgttattcttgcccgtgtgtctgtgatcaaatggggagcctgtggccttgtgctggcaggcaatgcagtcattttccttacaattcaaggttttttccttgtatttggaagaggagatgattttagctgggagcagtggtag

SEQ ID NO: 4797 - protein, 110 aa, Canis familiaris
MLGCALEDYGVYWPLFVLIFHAISPIPHFIAKRATYDSDATSSACRELAYFFTTGIVVSAFGFPVILARVSVIKWGACGLVLAGNAVIFLTIQGFFLVFGRGDDFSWEQW

SEQ ID NO: 4798 - DNA, 396 bp, Mus musculus
  CDS (1)..(396)
atggcgggcgttaaagctctcgtggcgctctccttcagtggggcaattgggctgacttttcttatgctgggatgtgcgttggaggactatggcgtttactggcccctgttcgtcttgattttctacgtcacctcccccatcccctacttcattgccaaaagggtcacatatgactccgacgcgaccagcagtgcctgtcgggaactggcgtatttcttcaccactgggattgttgtttctgcctttggacttcctgttgttcttgctcgtgtggatgtgatcaagtggggagcctgtggtcttgtgctggccggcaacgctgtcattttcctcacaattcaaggcttcttcctcgtctttggaagaggagatgatttcagttgggaacagtggtag

SEQ ID NO: 4799 - protein, 131 aa, Mus musculus
MAGVKALVALSFSGAIGLTFLMLGCALEDYGVYWPLFVLIFYVTSPIPYFIAKRVTYDSDATSSACRELAYFFTTGIVVSAFGLPVVLARVDVIKWGACGLVLAGNAVIFLTIQGFFLVFGRGDDFSWEQW

SEQ ID NO: 4800 - DNA, 396 bp, Mus musculus
  CDS (1)..(396)
atggcgggcgttaaagctctcgtggcgctctccttcagtggggcaattgggctgacttttcttatgctgggatgtgcgttggaggactatggcgtttactggcccctgttcgtcttgattttctacgtcatctcccccatcccctacttcattgccaaaagggtcacatatgactccgacgcgaccagcagtgcctgtcgggaactggcgtatttcttcaccactgggattgttgtttctgcctttggacttcctgttgttcttgctcgtgtgggtgtgatcaagtggggagcctgtggtcttgtgctggccggcaacgctgtcattttcctcacaattcaaggcttcttcctcgtctttggaagaggagatgatttcagttgggaacagtggtag

SEQ ID NO: 4801 - protein, 131 aa, Mus musculus
MAGVKALVALSFSGAIGLTFLMLGCALEDYGVYWPLFVLIFYVISPIPYFIAKRVTYDSDATSSACRELAYFFTTGIVVSAFGLPVVLARVGVIKWGACGLVLAGNAVIFLTIQGFFLVFGRGDDFSWEQW

SEQ ID NO: 4802 - DNA, 396 bp, Mus musculus
  CDS (1)..(396)
atggcgggcatcaaagctttaattagtttgtcctttggaggagcgatcgggctgatgttcctgatgcttggatgtgcccttccgatatacaaccaatactggcccctcttcgttctcttcttttacatcctctcgcccatcccgtactgcatagccagaagattagtggatgacacggacgccatgagcaacgcgtgtaaggagcttgccatattcctcaccacaggcatcgtcgtctcggcttttggactccctgttgtgtttgccagagcacatctgatcgagtggggagcttgcgcacttgttttcacgggaaacacagtcatcttcgcgactattctaggcttcttcctggtctttggaagcaacgacgacttcagctggcagcagtggtga

SEQ ID NO: 4803 - protein, 131 aa, Mus musculus
MAGIKALISLSFGGAIGLMFLMLGCALPIYNQYWPLFVLFFYILSPIPYCIARRLVDDTDAMSNACKELAIFLTTGIVVSAFGLPVVFARAHLIEWGACALVFTGNTVIFATILGFFLVFGSNDDFSWQQW

SEQ ID NO: 4804 - DNA, 420 bp, Leishmania major
  CDS (1)..(420)
atgtctagccttcgccagttgatcatctcggccttcttcctggtgatgggcttcctcttcttgattttgggctgcaccgttgtaaagaaacgaaatgcgtggccgttgatgagccttgcgttctactgcttcgcccccgtccccttcttcttgtgtggtcgcggcgccgacagcgacgacttcaacgactttgatgacgagccgctggatgccttcagcacagtcggcctcttcatgggcggtgtgctgcttatatcgggaccagggctggcggtggtgctctatcacacctccgtaatttgcggcttggcactcttcttcacgctcctcagcggtgtgtgcttcatcacggcgggcgtgtcactcaccgtcgccgaccgtggcaatggcgacgacgctgctgacgggtacaacttctaa

SEQ ID NO: 4805 - protein, 139 aa, Leishmania major
MSSLRQLIISAFFLVMGFLFLILGCTVVKKRNAWPLMSLAFYCFAPVPFFLCGRGADSDDFNDFDDEPLDAFSTVGLFMGGVLLISGPGLAVVLYHTSVICGLALFFTLLSGVCFITAGVSLTVADRGNGDDAADGYNF

SEQ ID NO: 4806 - DNA, 393 bp, Tetraodon nigroviridis
  CDS (1)..(393)
atggctggcattaaagctttggttggtctgtccttcagtggtgccattggactcacgtttctcctcctgggttgtgcactggagcagtatggggtatactggccgctgtttgtcctgattttctatgtactcagtcccatcccgaccttcatatccaggcgtctcagtgatgatgactcttctagtaatgcttgcagagagctggcctactttttaaccactggcatcgtggtgtcatctttcgggcttcccatcgttctagcccgcaaagaaacgattcagtggggggcctgtggtctggtgatgacagggaatgctgtcatcttcctcacaatctttggcttcttcatcgtgttcggaggaggagacgatttcagctgggaacagtggtag

SEQ ID NO: 4807 - protein, 130 aa, Tetraodon nigroviridis
MAGIKALVGLSFSGAIGLTFLLLGCALEQYGVYWPLFVLIFYVLSPIPTFISRRLSDDDSSSNACRELAYFLTTGIVVSSFGLPIVLARKETIQWGACGLVMTGNAVIFLTIFGFFIVFGGGDDFSWEQW

SEQ ID NO: 4808 - DNA, 393 bp, Brachydanio rerio
  CDS (1)..(393)
atggcaggaataaaagctcttgttgcgttatcctttagtggtgcacttggactgacatttctccttttgggatgtgcactggaacagtttggacagtattggcccatgtttgttctgatattctacatcttatcacctataccaaatctaatagccaggcggcatgcggatgacactgagtcaagcaatgcatgccgggaacttgcatactttttaaccacaggtattgtggtgtcagcttatggtctccctgttgtgctggctcgaaaagctgtgattcaatggggtgccgctggtctggtaatggctggaaattgtgtaatttttctgactattctgggtttcttcctgatatttggaggtggagatgacttcagttgggaacagtggtaa

SEQ ID NO: 4809 - protein, 130 aa, Brachydanio rerio
MAGIKALVALSFSGALGLTFLLLGCALEQFGQYWPMFVLIFYILSPIPNLIARRHADDTESSNACRELAYFLTTGIVVSAYGLPVVLARKAVIQWGAAGLVMAGNCVIFLTILGFFLIFGGGDDFSWEQW

SEQ ID NO: 4810 - DNA, 342 bp, Oryza sativa
  CDS (1)..(342)
atgttctcaacaagtattcttttgcaaatactggcttgtgctctgtacaataattggtggcctatgttagcagctcttatgtatgtccttgtaccgatgccatgcctattcttcggtggtggatctacccagttcttgactagcagagatggtggagggtggttcaatgctgcaaaattcctgactggtgcatctgccatgggaagcattgcaatcccagcaattctgaggcacgctggcctaattgagactggagccatgttcatcgagttcacgtccttcttcatccttgtatgcacagtgatgtgcttccatagagctacgctggatgaagattggtaa

SEQ ID NO: 4811 - protein, 113 aa, Oryza sativa
MFSTSILLQILACALYNNWWPMLAALMYVLVPMPCLFFGGGSTQFLTSRDGGGWFNAAKFLTGASAMGSIAIPAILRHAGLIETGAMFIEFTSFFILVCTVMCFHRATLDEDW

SEQ ID NO: 4812 - DNA, 396 bp, Xenopus laevis
  CDS (1)..(396)
atggcggggattaaagcacttgttgcattatcctttagtggagccattggattaactttccttatgttgggatgtgccttggaaagctacaaggtgtattggcctttgtttgttttgatattttataccatcagtccgattccatattttattgctacacgaattagtgatgatacagatgctgccagcagtgcctgcagagaactggcatttttcttcaccactggaatcgttgtctcagcgtttggcttgcccatagttctggccagaattggtgtgattctttggggtgcctgtggactggtgcttgcagggaatgctgttattttccttacaatactgggctttttcattgtgtttggaagatcagatgactttagctgggagcagtggtaa

SEQ ID NO: 4813 - protein, 131 aa, Xenopus laevis
MAGIKALVALSFSGAIGLTFLMLGCALESYKVYWPLFVLIFYTISPIPYFIATRISDDTDAASSACRELAFFFTTGIVVSAFGLPIVLARIGVILWGACGLVLAGNAVIFLTILGFFIVFGRSDDFSWEQW

SEQ ID NO: 4814 - DNA, 411 bp, Oryza sativa
  CDS (1)..(411)
atggcgcgtagtatgaggacatgtttgcacagtggaagacttgcgcttcttgcaatactggtttctggtggaattgtattgcagattctggcctgtgctctgtataacaactggtggccaatgctaacagttcttatgtacctcatactaccaatgcccctcatatttttcctgggctccaacagcccctcaatgatgtctaatgatggcgatacttgggtgagcttcacaaaattcttgacgggcgcatcgatagtggggagcatcgccatcccgtcgatcctgaagcatgccggcgtcattggatggggagcgctcacgatggagctatcttctttcctggtctttggcgtcgcgatcctgtggctgattcaaatgaacagcgaagacgagtacagcagcgcgttctga

SEQ ID NO: 4815 - protein, 136 aa, Oryza sativa
MARSMRTCLHSGRLALLAILVSGGIVLQILACALYNNWWPMLTVLMYLILPMPLIFFLGSNSPSMMSNDGDTWVSFTKFLTGASIVGSIAIPSILKHAGVIGWGALTMELSSFLVFGVAILWLIQMNSEDEYSSAF

SEQ ID NO: 4816 - DNA, 396 bp, Brachydanio rerio
  CDS (1)..(396)
atggccggaattaaagctctgatcagcctgtcgtttggaggagccatcggcctgatgttcctcatgctgggctgtgctttacctgtctacaatgcgtactggccgttgttcctgctcttcttctacatcctctgtccgctccctcactgcatctctcggcgtgtggtggaggactccgactcggccagtaatgcctgtaaggagctggcggtgttcctgaccacaggcatcgtggtgtcggcgttcggcctgcccatcatcttcgcccgcgctgccgtgattgcgtggggagcgtgtgctctggtgctgacgggaaacatcgtgatcttcgccaccatcctgggcttcttcctggtgttcggctccaatgacgacttcagctggcagcagtggtga

SEQ ID NO: 4817 - protein, 131 aa, Brachydanio rerio
MAGIKALISLSFGGAIGLMFLMLGCALPVYNAYWPLFLLFFYILCPLPHCISRRVVEDSDSASNACKELAVFLTTGIVVSAFGLPIIFARAAVIAWGACALVLTGNIVIFATILGFFLVFGSNDDFSWQQW

SEQ ID NO: 4818 - DNA, 390 bp, Xenopus laevis
  CDS (1)..(390)
atggcaggcattaaagctctggtcagcctgtcgtttggtggagcaataggactgatgtttctgatgctgggatgtgccttgccacaatacaacaagtactggccactttttgtcttgttcttctacattcttgcaccaattccatactgcatagcaagaagagtggtggatgatacagacgcagcaagcaatgcttgcaaggagcttgctatattcctcactactggaattgttgtctctgcatttggacttcccattgtctttgccagagtacaagtgattgagtggggagcgtgtgccctggtccttacaggaaacatggttatcttttctaccattttaggattctttttagtctttggaaataaaaaaaaaaaaaaaaaaaaatag

SEQ ID NO: 4819 - protein, 129 aa, Xenopus laevis
MAGIKALVSLSFGGAIGLMFLMLGCALPQYNKYWPLFVLFFYILAPIPYCIARRVVDDTDAASNACKELAIFLTTGIVVSAFGLPIVFARVQVIEWGACALVLTGNMVIFSTILGFFLVFGNKKKKKKK

SEQ ID NO: 4820 - DNA, 396 bp, Xenopus laevis
  CDS (1)..(396)
atggcggggattaaaggacttgttgcattatcctttagtggagccattggattaaccttccttatgttgggatgtgccttggaaagctacaaggtgtattggcctttgtttgttttgatattttatgccatcagtccaattccatattttattgctacacgagtcagtgatgatacagatgccgccagcagtgcctgcagagaactagcgtttttcttcactactggaattgtcgtctcagcgtttggcttgcccattattctggccagagttggtgtgattctgtggggtgcgtgcggactagtgcttgcagggaatgctgttatattccttacaatactgggctttttcattgtgtttggaagatcagatgactttagctgggagcagtggtaa

SEQ ID NO: 4821 - protein, 131 aa, Xenopus laevis
MAGIKGLVALSFSGAIGLTFLMLGCALESYKVYWPLFVLIFYAISPIPYFIATRVSDDTDAASSACRELAFFFTTGIVVSAFGLPIILARVGVILWGACGLVLAGNAVIFLTILGFFIVFGRSDDFSWEQW

SEQ ID NO: 4822 - DNA, 402 bp, Rhodnius prolixus
  CDS (1)..(402)
atgccggggatgaaagcgcttgtttcgttggcgtttgcaggttcaattggaatgacgtttataattttggcatgcgctcttcctcattttggtgtgtggtggccatttattgttgtgatattctacttgtttgctcccgtgcccacattattagctcgcaagtacacagaaaggactggctcgactaattctaccatggagcttgctatttttattactatggcattcgtggtctcctcgtttgctctacctgttgtcttagctagagcacctgtcacaaaaccggctatcgagtggggcgcatgctatttgacgctgactggtaatatcgtggtctatatcacatatcttggtttcttcgtcaccttgtaccaggatgacagcgactataacatgtggtga

SEQ ID NO: 4823 - protein, 133 aa, Rhodnius prolixus
MPGMKALVSLAFAGSIGMTFIILACALPHFGVWWPFIVVIFYLFAPVPTLLARKYTERTGSTNSTMELAIFITMAFVVSSFALPVVLARAPVTKPAIEWGACYLTLTGNIVVYITYLGFFVTLYQDDSDYNMW

SEQ ID NO: 4824 - DNA, 396 bp, Xenopus laevis
  CDS (1)..(396)
atggcaggcattaaagctctggtcagcctgtcgtttggtggagcaataggactgatgtttctgatgctgggatgtgccttgccacaatacaacaagtactggccactttttgtcttgttcttctacattcttgcaccaattccatactgcatagcaagaagagtggtggatgatacagacgcagcaagcaatgcttgcaaggagcttgctatattcctcactactggaattgttgtctctgcatttggacttcccattgtctttgccagagtacaagtgattgagtggggagcgtgtgccctggtccttacaggaaacatggttatcttttctaccattttaggattctttttagtctttggaaataatgatgatttcagttggcaacagtggtga

SEQ ID NO: 4825 - protein, 131 aa, Xenopus laevis
MAGIKALVSLSFGGAIGLMFLMLGCALPQYNKYWPLFVLFFYILAPIPYCIARRVVDDTDAASNACKELAIFLTTGIVVSAFGLPIVFARVQVIEWGACALVLTGNMVIFSTILGFFLVFGNNDDFSWQQW

SEQ ID NO: 4826 - DNA, 390 bp, Schistosoma japonicum
  CDS (1)..(390)
atgacaggagttaaaactgtaatatttgtctcactagctgcgtcaatttcatttacattcttgctgctagcctgtgcattgcctcaatacaatgtttggtggcctttattcatgttgatattttacatcatagcaccagttccattgttgcttgctaaaaattgtcagaatagctcttcaagcgaggatttgagtgtgtttttaaccacagtcatagttacatcggcgtatgcactacccattttgtttgctcgtgcacctaaaaacaatcctcttatattttggggcgcttgtggacttacgctgtcagcaaacacacttatgtttgcaaccatcttttttctggtttatttggtagtgaagcctgatgacttcggtattggtttttga

SEQ ID NO: 4827 - protein, 129 aa, Schistosoma japonicum
MTGVKTVIFVSLAASISFTFLLLACALPQYNVWWPLFMLIFYIIAPVPLLLAKNCQNSSSSEDLSVFLTTVIVTSAYALPILFARAPKNNPLIFWGACGLTLSANTLMFATIFFLVYLVVKPDDFGIGF

SEQ ID NO: 4828 - DNA, 381 bp, Drosophila melanogaster
  CDS (1)..(381)
atggccaccttaaaggccctcttcatctgcgcctttcttacatgcattggtgttaccttcctgatcctggcctgcgccgtgcccacgacaaagattttctatcccttcttcgttttgctgttctacgtgctgtcagttcttccagtcttcattgccaggaggacaactcctggaaatgagaccaatccgaaatcggagtttgctcacttccttaccgcgggaatggtgctgagtgccttcgccctgcccatcgtcctagcccacgcattggtgatcacctggacggcgagtatcctgacgataataagtaacattattaactacggcaccatcttctggtacgccatgcgcgatgacgagccatacggatccatgttctag

SEQ ID NO: 4829 - protein, 126 aa, Drosophila melanogaster
MATLKALFICAFLTCIGVTFLILACAVPTTKIFYPFFVLLFYVLSVLPVFIARRTTPGNETNPKSEFAHFLTAGMVLSAFALPIVLAHALVITWTASILTIISNIINYGTIFWYAMRDDEPYGSMF

SEQ ID NO: 4830 - DNA, 423 bp, Arabidopsis thaliana
  CDS (1)..(423)
atggcagacgtacctggatacctgcgcacttgtttggatatggggaagatagctttcttagcaatccttgtatctacagggattgtgttgcagattctggcttgtgctctgttcaataactggtggccaatgctaagtgttataatgtatgtgctcctcccaatgcctttgctcttctttggtggatcagacagtacatctctattcaacgagtcagataatagttggatcaatgcagccaagttcttgactggtgcgtcagcagttggaagcgtcgcgataccatcgattctaaaacacgccggactcatcggttggggcgcattagcccttgatctctcatcctaccttgtcttcctcgtggctattttgggttacatttgcataggagatgccagtgagaactattacagctacatttaa

SEQ ID NO: 4831 - protein, 140 aa, Arabidopsis thaliana
MADVPGYLRTCLDMGKIAFLAILVSTGIVLQILACALFNNWWPMLSVIMYVLLPMPLLFFGGSDSTSLFNESDNSWINAAKFLTGASAVGSVAIPSILKHAGLIGWGALALDLSSYLVFLVAILGYICIGDASENYYSYI

SEQ ID NO: 4832 - DNA, 405 bp, Arabidopsis thaliana
  CDS (1)..(405)
atggcgatgaccatcgaaggtaatcaatcacctatcttccaactacttgctggacttgctttcatgttttcatctagtatcctcctacagatcctggcatgcgcgatatatggtaactggtggccaatgctatcagcactcatgtatgtagtggtgcctatgccttgtatgttctttggaggaggctcaacccaattccttattagtcgggacggtggagggtggatagacgcagcgaagttcttgaccggagcatcgaccgtgggaagccttgctatcccaatcatcttaaggcacgcacagatgatcgagacaggtgcaatgctcatagagttcacatcattcttcatattcatttgcactgtcatgtgttttcaccgggctagtctcgatgatgactggtaa

SEQ ID NO: 4833 - protein, 134 aa, Arabidopsis thaliana
MAMTIEGNQSPIFQLLAGLAFMFSSSILLQILACAIYGNWWPMLSALMYVVVPMPCMFFGGGSTQFLISRDGGGWIDAAKFLTGASTVGSLAIPIILRHAQMIETGAMLIEFTSFFIFICTVMCFHRASLDDDW

SEQ ID NO: 4834 - DNA, 396 bp, Homo sapiens
  CDS (1)..(396)
atggcaggcatcaaagctttgattagtttgtcctttggaggagcaatcggactgatgtttttgatgcttggatgtgcccttccaatatacaacaaatactggcccctctttgttctatttttttacatcctttcacctattccatactgcatagcaagaagattagtggatgatacagatgctatgagtaacgcttgtaaggaacttgccatctttcttacaacgggcattgtcgtgtcagcttttggactccctattgtatttgccagagcacatctgattgagtggggagcttgtgcacttgttctcacaggaaacacagtcatctttgcaactatactaggctttttcttggtctttggaagcaatgacgacttcagctggcagcagtggtga

SEQ ID NO: 4835 - protein, 131 aa, Homo sapiens
MAGIKALISLSFGGAIGLMFLMLGCALPIYNKYWPLFVLFFYILSPIPYCIARRLVDDTDAMSNACKELAIFLTTGIVVSAFGLPIVFARAHLIEWGACALVLTGNTVIFATILGFFLVFGSNDDFSWQQW

SEQ ID NO: 4836 - DNA, 396 bp, Mus musculus
  CDS (1)..(396)
atggcgggcatcaaagctttaattagtttgtcctttggaggagcgatcgggctgatgttcctgatgcttggatgtgcccttccgatatacaaccaatactggcccctcttcgttctcttcttttacatcctctcgcccatcccgtactgcatagccagaagattagtggatgacacggacgccatgagcaacgcgtgtaaggagcttgccatattcctcaccacaggcatcgtcgtctcggcttttggactccctgttgtgtttgccagagcacatctgatcgagtggggagcttgcgcacttgttctcacgggaaacacagtcatcttcgcgactattctaggcttcttcctggtctttggaagcaacgacgacttcagctggcagcagtggtga

SEQ ID NO: 4837 - protein, 131 aa, Mus musculus
MAGIKALISLSFGGAIGLMFLMLGCALPIYNQYWPLFVLFFYILSPIPYCIARRLVDDTDAMSNACKELAIFLTTGIVVSAFGLPVVFARAHLIEWGACALVLTGNTVIFATILGFFLVFGSNDDFSWQQW

SEQ ID NO: 4838 - DNA, 396 bp, Homo sapiens
  CDS (1)..(396)
atggcgggcgttaaagctctcgtggcattatccttcagtggggctattggactgacttttcttatgctgggatgtgccttagaggattatggcgtttactggcccttattcgtcctgattttccacgccatctcccccatcccccatttcattgccaaaagagtcacctatgactcagatgcaaccagtagtgcctgtcgggaactggcatatttcttcactactggaattgttgtttctgcctttggatttcctgttattcttgctcgtgtggctgtgatcaaatggggagcctgcggccttgtgttggcaggcaatgcagtcattttccttacaattcaagggtttttccttatatttggaagaggagatgattttagctgggagcagtggtag

SEQ ID NO: 4839 - protein, 131 aa, Homo sapiens
MAGVKALVALSFSGAIGLTFLMLGCALEDYGVYWPLFVLIFHAISPIPHFIAKRVTYDSDATSSACRELAYFFTTGIVVSAFGFPVILARVAVIKWGACGLVLAGNAVIFLTIQGFFLIFGRGDDFSWEQW

SEQ ID NO: 4840 - DNA, 396 bp, Mus musculus
  CDS (1)..(396)
atggcgggcgttaaagctctcgtggcgctctccttcagtggggcaattgggctgacttttcttatgctgggatgtgcgttggaggactatggcgtttactggcccctgttcgtcttgattttctacgtcatctcccccatcccctacttcattgccaaaagggtcacatatgactccgacgcgaccagcagtgcctgtcgggaactggcgtatttcttcaccactgggattgttgtttctgcctttggacttcctgttgttcttgctcgtgtggatgtgatcaagtggggagcctgtggtcttgtgctggccggcaacgctgtcattttcctcacaattcaaggcttcttcctcgtctttggaagaggagatgatttcagttgggaacagtggtag

SEQ ID NO: 4841 - protein, 131 aa, Mus musculus
MAGVKALVALSFSGAIGLTFLMLGCALEDYGVYWPLFVLIFYVISPIPYFIAKRVTYDSDATSSACRELAYFFTTGIVVSAFGLPVVLARVDVIKWGACGLVLAGNAVIFLTIQGFFLVFGRGDDFSWEQW

SEQ ID NO: 4842 - DNA, 396 bp, Rattus norvegicus
  CDS (1)..(396)
atggcgggcgttaaagctcttgtggcactctccttcagtggggcaattgggctgacctttcttatgctgggatgtgccttggaggactatggcgtttactggcccctgttcgtcttgattttctacgtcatctcccccatcccctacttcattgccaaaagggtcacctatgactcggacgcgactagcagtgcctgtcgggaactggcatatttcttcaccactgggattgttgtttctgcctttggatttcctgttattcttgctcgcgtggctgtgatcaagtggggagcctgtggtcttgtgctggctggcaatgctgttattttcctcacgatccaaggcttcttcctcgtctttgggagaggagatgatttcagttgggaacagtggtag

SEQ ID NO: 4843 - protein, 131 aa, Rattus norvegicus
MAGVKALVALSFSGAIGLTFLMLGCALEDYGVYWPLFVLIFYVISPIPYFIAKRVTYDSDATSSACRELAYFFTTGIVVSAFGFPVILARVAVIKWGACGLVLAGNAVIFLTIQGFFLVFGRGDDFSWEQW

SEQ ID NO: 4844 - DNA, 399 bp, Caenorhabditis elegans
  CDS (1)..(399)
atgggaggagtacgagctgttgctgcactggcgttcgccggagttgttggcctcactttcctcgttcttggatgtgccctgcctaggtacggaacatggaccccaatgtttgttatcacattctacgttctttcgccggtaccacttctcatcgccagacgcttccaagaagatatgactggaacaaatgcatgcattgaattagctctcttcatcaccactggaattgtcatctccgcctttgctcttccgatagtgctggcacatgcaggaacgatagcaaacagtgcatgcttcctcgtcaatacaggatctgtgattatgttcggtacaattattgcatatttctacttgcatcgtgatgacgacagtggaagctggagccagtctctgttctaa

SEQ ID NO: 4845 - protein, 132 aa, Caenorhabditis elegans
MGGVRAVAALAFAGVVGLTFLVLGCALPRYGTWTPMFVITFYVLSPVPLLIARRFQEDMTGTNACIELALFITTGIVISAFALPIVLAHAGTIANSACFLVNTGSVIMFGTIIAYFYLHRDDDSGSWSQSLF

SEQ ID NO: 4846 - DNA, 25 bp, Artificial sequence
  primer
atgatggaattcaaagtgtcaccat

SEQ ID NO: 4847 - DNA, 25 bp, Artificial sequence
  primer
ttaaccaaaaagggaatcatcttcg

SEQ ID NO: 4848 - protein, 122 aa, Artificial sequence
  consensus sequence
  Variant (2)..(7): Xaa in position 2 to 7 is any amino acid
  Variant (9)..(9): Xaa in position 9 is any amino acid
  Variant (10)..(13): Xaa in position 10 to 13 is any or no amino acid
  Variant (15)..(15): Xaa in position 15 is any amino acid
  Variant (19)..(23): Xaa in position 19 to 23 is any amino acid
  Variant (24)..(25): Xaa in position 24 to 25 is any or no amino acid
  Variant (27)..(30): Xaa in position 27 to 30 is any amino acid
  Variant (31)..(36): Xaa in position 31 to 36 is any or no amino acid
  Variant (38)..(38): Xaa in position 38 is any amino acid
  Variant (40)..(59): Xaa in position 40 to 59 is any amino acid
  Variant (60)..(74): Xaa in position 60 to 74 is any or no amino acid
  Variant (76)..(83): Xaa in position 76 to 83 is any amino acid
  Variant (84)..(89): Xaa in position 84 to 89 is any or no amino acid
  Variant (91)..(98): Xaa in position 91 to 98 is any amino acid
  Variant (99)..(102): Xaa in position 99 to 102 is any or no amino acid
  Variant (104)..(106): Xaa in position 104 to 106 is any amino acid
  Variant (108)..(120): Xaa in position 108 to 120 is any amino acid
LXXXXXXGXXXXXLXCALXXXXXXXPXXXXXXXXXXPXPXXXXXXXXXXXXXXXXXXXXXXXXXXXXXXXXXXXGXXXXXXXXXXXXXXPXXXXXXXXXXXXIXXXAXXXXXXXXXXXXXTI

SEQ ID NO: 4849 - DNA, 3114 bp, Saccharomyces cerevisiae
  CDS (1)..(3114)
atggcatgcctctcaagaattgatgcaaatttgctccaatattatgaaaaacctgaacccaataatacggttgatttatacgtcagtaataacagtaataataacgggctgaaagaaggagataagtccatctctacaccagttcctcagccttacggaagtgaatattccaattgtttgttattgagtaactctgagtatatctgttaccatttttcctcaagatcaacattgttgacattttatcctttgagtgacgcataccatgggaagacaattaatatacacttaccaaatgcttctatgaatcagagatacactttaacgatacaagaagtggaacagcaattactggttaatgttatcttaaaagatggttcgtttttaacgttacaactacccctaagtttcctattttcatcggccaacactctcaatggagagtggtttcatctccaaaatccctacgactttacagttagagttcctcatttccttttctatgtatcaccccagttctcagttgtttttttggaagatggcggtttgttgggtttaaaaaaagttgacggcgtacattacgagcctttactattcaatgataattcatacttgaaaagcctaacgcgatttttttctaggagttctaaatcggattacgatagtgtgattagttgtaaattattccatgaaagatacttaattgtgttgactcagaattgccacttgaaaatttgggatttaacttcatttactttaatacaagattatgatatggtttcacagtcagattcagacccaagccattttagaaaagtggaagctgtaggggaatacctttccttgtataacaatactctagttacattgttgcctttggaaaatgggctttttcaaatgggcaccttgttggttgattcaagcggtattttgacttatacttttcaaaataacatccccactaatctttcagcttctgctatttggtcaattgtagatttagttctaacgagaccattggagttgaatgtcgaggctagttatttaaatttgatcgttttatggaaaagtggcactgctagcaagttacagatactaaacgtaaatgatgaaagtttcaaaaactatgaatggatagaatcagttaacaaatccttagtagatttgcaatccgaacatgatttggatatcgttacaaagactggagatgttgagaggggtttctgtaatttgaaatcaagatatggtacccaaatttttgaacgtgcacagcaaatattgagtgaaaataagattattatggctcataacgaagatgaagaatatttggctaatttagaaacaatattgagagacgtaaaaaccgcattcaacgaggcttcttctataacactttatggcgatgaaattattctcgtcaattgtttccaaccgtataatcattccctttacaagctgaatactactgtggagaattggttttataatatgcactctgaaactgatggttctgaattgttcaagtatttaaggacattgaatggttttgcttctactttgtcaaatgatgttcttagatccatttctaagaagtttcttgatataataacaggagagctgcctgattctatgactaccgtagaaaaatttacggacattttcaaaaattgcctagaaaatcaatttgaaatcacaaatctaaagattcttttcgacgaattaaactcttttgatatacccgttgttttaaatgatttaatcaataaccaaatgaagcctggtatattttggaaaaaggatttcatctctgcaatcaaattcgatggtttcacaagtataatttccctagaatctcttcaccagttactttccatacattatcgtattactttacaagtattgttaacattcgttctgttcgatcttgataccgaaattttcggacagcatatatctacattattggatttgcattataagcaatttttattgttaaacctttatagacaagataagtgtctgttggcggaagttcttctcaaggattcttctgaattctctttcggtgtcaaattttttaactacggccaactcattgcctatatcgattccttaaactctaatgtttacaatgcttccatcactgaaaattctttctttatgacgtttttccgctcatatatcattgaaaacacatctcataagaatataaggttctttctcgagaacgttgaatgccccttctacttacgccacaacgaggtgcaagaatttatgtttgccatgacgttatttagttgtggtaatttcgatcaatcctatgaaatttttcaactacacgattatccggaggctatcaatgataaattgccgacattcttagaagaccttaagagtgaaaactatcacggtgatagtatatggaaagatcttttgtgcacctttacagttccatataggcattctgcattctattatcaattatctctcttatttgatagaaataacagccaagaatttgctttgaaatgtatatctaagtcagcagaatattcattaaaagaaattcagattgaagaactgcaagacttcaaagaaaaacagcatattcattatttaaatcttttaatccacttcagaatgtttgaagaagtcttggatgttttgagattgggtcacgagtgtctttccgacacagtaagaacaaattttctccaattattattacaggaagacatatattcacgagattttttcagcacacttctgcgcttgtgtaacgcacattcagacaatggcgagctatatcttcgtacagtagatattaaaatagtggatagtattctgtcacaaaatctacggagtggtgattgggagtgttttaagaaactttattgttttagaatgttgaacaaaagcgagagggctgctgcagaagtactgtaccagtacatattaatgcaagctgatcttgatgttattcgaaagagaaaatgttacctaatggtcatcaacgttttatctagctttgatagtgcatacgatcaatggattctaaacggaagtaaagtggttactttaactgatttaagagatgagttacgaggtctatag

SEQ ID NO: 4850 - protein, 1037 aa, Saccharomyces cerevisiae
MACLSRIDANLLQYYEKPEPNNTVDLYVSNNSNNNGLKEGDKSISTPVPQPYGSEYSNCLLLSNSEYICYHFSSRSTLLTFYPLSDAYHGKTINIHLPNASMNQRYTLTIQEVEQQLLVNVILKDGSFLTLQLPLSFLFSSANTLNGEWFHLQNPYDFTVRVPHFLFYVSPQFSVVFLEDGGLLGLKKVDGVHYEPLLFNDNSYLKSLTRFFSRSSKSDYDSVISCKLFHERYLIVLTQNCHLKIWDLTSFTLIQDYDMVSQSDSDPSHFRKVEAVGEYLSLYNNTLVTLLPLENGLFQMGTLLVDSSGILTYTFQNNIPTNLSASAIWSIVDLVLTRPLELNVEASYLNLIVLWKSGTASKLQILNVNDESFKNYEWIESVNKSLVDLQSEHDLDIVTKTGDVERGFCNLKSRYGTQIFERAQQILSENKIIMAHNEDEEYLANLETILRDVKTAFNEASSITLYGDEIILVNCFQPYNHSLYKLNTTVENWFYNMHSETDGSELFKYLRTLNGFASTLSNDVLRSISKKFLDIITGELPDSMTTVEKFTDIFKNCLENQFEITNLKILFDELNSFDIPVVLNDLINNQMKPGIFWKKDFISAIKFDGFTSIISLESLHQLLSIHYRITLQVLLTFVLFDLDTEIFGQHISTLLDLHYKQFLLLNLYRQDKCLLAEVLLKDSSEFSFGVKFFNYGQLIAYIDSLNSNVYNASITENSFFMTFFRSYIIENTSHKNIRFFLENVECPFYLRHNEVQEFMFAMTLFSCGNFDQSYEIFQLHDYPEAINDKLPTFLEDLKSENYHGDSIWKDLLCTFTVPYRHSAFYYQLSLLFDRNNSQEFALKCISKSAEYSLKEIQIEELQDFKEKQHIHYLNLLIHFRMFEEVLDVLRLGHECLSDTVRTNFLQLLLQEDIYSRDFFSTLLRLCNAHSDNGELYLRTVDIKIVDSILSQNLRSGDWECFKKLYCFRMLNKSERAAAEVLYQYILMQADLDVIRKRKCYLMVINVLSSFDSAYDQWILNGSKVVTLTDLRDELRGL

SEQ ID NO: 4851 - DNA, 3411 bp, Schizosaccharomyces pombe 972h-
  CDS (1)..(3411)
atgaatgaattaaagcatgcggtagttccgatagacttacaatctttttgtctggaaggaactttggcgttgtgggttccagctctcgaaaacgactcggaagacgattctgaagctatagaaacagctgatgataatgaaaaactttttaaaaaggaatgtgtagcatatgatgcaggtgtttatacctcaaataaaagcaaaggttcacaaactttacgatggagtatattccaaaacagaacactcactatctttgatgtttcattaaattctaagaaggagcctttatcaaaatttaatgtgaaaattcattttccatccaacgtaatgaaggacggtgtagctttctcgttcagtgagcattccgacacgaccattatatatgctattactcacgctcgcgttttgtattatattagattatctaaaacttggttccaattaccggacgctcgcttagacgacgattggtgtctttgttaccgaccaatatcctttctgaatcaaaaacccgatttaatggccgcaattagcacgtctgaaatttgtgtaagctttttcaatggaggtttaacaaagattatattaaatccaaaagacgctagtcactacgaacagcatattgatgattctagttatttgttttccctaaaaaaatatctatcacttcaggcatttaaggcagattaccgctctcctaatactattatttcaatgatttttttgtctacctataatgttcttgtgatgctatcgcttgactataagttaaaagttttggatttgtctactaatcaatgcgtcgaaaccattgaactgtcacagactatacttcctctacaatcctttccttatttaacttcagatcacaccactaattctttcatcgctctgtattacccagataattctcatggctctttttcaatttacaaacttaacgcaaacgcccactcttttaaattaaatgttgtcatcgagaagggcataattcctccttctttaccagacgatgagttcataccatggatgctttctgattttcaactgatatcgtcagagggctctcaatctaaatttttgctcattattgcttggaaaagcaacttaaataccgttatccaaaaatgcaaccttagtctagatcaggacgagagtttttcatgcgtttggagtcactctttggatagcttttccctcatagaaaaaaccttttttgacgttccaacaaacatgtcgtctggggatatctcagagatttggctacaacacatttttgcacataatacatctattgagtctatacaagttgctcttttaagctttcaaaacagctcctcgcaagtttcaaaaaataaactggataaatttggcgcacttactataagtgaacttaaaaatgccgttttgtcgtctatagtttcaacgatccaaatagagccaaattcagatttaactggatacgattattatgaatataagcggctattatataatgaatgggaaaggtttgcgaaacttgttgcatatctggatcattttggagatgaaatattaagtattaacttcgatccttcgaacgctgttacatatatcaattatgcaaataaagtggcttttattagggatccttatctcattgaatcctttgacgaagagccgttgaccaaattaattagttcccttgaaacagatgatccttctctaattgaaggttatcaaattctggatcttggtaggagtttacattcctgtatgtcattttctactttatctgaaattagatactcattacgagaactagtccaggatttgccatcttattctttatttgatacattgtgggtattttatgacaagcacatatatcccaacgtcgatccagattatatcagtactttaattgatactctagtttctcttgaaaacccgatgcgcgacattgattctcttatccaacgcttaagaagtttcgatatttacaaccattccgctcaatccccttccttatttttgtgtgcatcggtagcacgggttttggacagtattttgaaaaagtttcaagtctctattgaaggatttatttttctactttctttgataactagccagcaggattatgagttacaatccaaatttgcaggatgtgataaattatttctttctttactagaagattggcgtcttgtgagttttcttttagagaattctgcacttttgctagaaaaatttgaggaggaggatgttgattcaacaaactgtaatttaaatactatggaagctttagcaagtgttaacacagcccttcagtttttttccgctttgaattattccgaatgtttctcagaaagccaaatttcacctttacatgctaccgtgatatcgtctttgtcggcaatctttataagggacgatacggaaaatgatctggtcactgaacttgtagaaaagttgtttctattcaaacaatataatgcatgtatgcaattaatagggtggcttaactctgacccaattgcagtctacttgaaagcacttatttatctcaaatcgaaagaagctgttaaggctgtccgatgtttcaagactacttctctagtcctttactcacatacttctcaattcgcagttttacgggagtttcaagaaattgctgaaaaataccaccatcagaacctattatcgtgttattaccttcatctatcaaaaaagctgttcgaggagagtgcatatatagatgcattagaattttctttattagcagatgcctcgaaagagactgacgacgaagatttgtctattgcaattacccatgagactttaaaaaccgcttgtgcagcaggaaagtttgacgctgctcacgttgcattgatggttttatccactacgcctttgaaaaagtcatgtttactagactttgtaaatcaattaacgaaacaaggtaaaataaatcagcttctaaattattcaatgccaacgttaagacaggacgtcgacaatttgcttgagcgaaaggcctttcaaatgattaacgttgaatcacaaccatgctggtataatattttgtttagttggcggtataaacatcaaaactatcgagacgcagcagcaattatttatgaaaaactgagccggtatatctctactacagaattaattggaaaaaaggagagaacttttataatagaacattatttgattgttttgaacactctggagttgcttccgaaagaagatacatggattcttgtgacagacatgtccgtggacaaggaacctgaccctaactttcttccacaaaaattacttactctagatgcaattgtagcagaatatcacttacagttgaaggatgtcgctgttcaagttacagctgaaatgtcatcggccatgaatatcgatttataa

SEQ ID NO: 4852 - protein, 1136 aa, Schizosaccharomyces pombe 972h-
MNELKHAVVPIDLQSFCLEGTLALWVPALENDSEDDSEAIETADDNEKLFKKECVAYDAGVYTSNKSKGSQTLRWSIFQNRTLTIFDVSLNSKKEPLSKFNVKIHFPSNVMKDGVAFSFSEHSDTTIIYAITHARVLYYIRLSKTWFQLPDARLDDDWCLCYRPISFLNQKPDLMAAISTSEICVSFFNGGLTKIILNPKDASHYEQHIDDSSYLFSLKKYLSLQAFKADYRSPNTIISMIFLSTYNVLVMLSLDYKLKVLDLSTNQCVETIELSQTILPLQSFPYLTSDHTTNSFIALYYPDNSHGSFSIYKLNANAHSFKLNVVIEKGIIPPSLPDDEFIPWMLSDFQLISSEGSQSKFLLIIAWKSNLNTVIQKCNLSLDQDESFSCVWSHSLDSFSLIEKTFFDVPTNMSSGDISEIWLQHIFAHNTSIESIQVALLSFQNSSSQVSKNKLDKFGALTISELKNAVLSSIVSTIQIEPNSDLTGYDYYEYKRLLYNEWERFAKLVAYLDHFGDEILSINFDPSNAVTYINYANKVAFIRDPYLIESFDEEPLTKLISSLETDDPSLIEGYQILDLGRSLHSCMSFSTLSEIRYSLRELVQDLPSYSLFDTLWVFYDKHIYPNVDPDYISTLIDTLVSLENPMRDIDSLIQRLRSFDIYNHSAQSPSLFLCASVARVLDSILKKFQVSIEGFIFLLSLITSQQDYELQSKFAGCDKLFLSLLEDWRLVSFLLENSALLLEKFEEEDVDSTNCNLNTMEALASVNTALQFFSALNYSECFSESQISPLHATVISSLSAIFIRDDTENDLVTELVEKLFLFKQYNACMQLIGWLNSDPIAVYLKALIYLKSKEAVKAVRCFKTTSLVLYSHTSQFAVLREFQEIAEKYHHQNLLSCYYLHLSKKLFEESAYIDALEFSLLADASKETDDEDLSIAITHETLKTACAAGKFDAAHVALMVLSTTPLKKSCLLDFVNQLTKQGKINQLLNYSMPTLRQDVDNLLERKAFQMINVESQPCWYNILFSWRYKHQNYRDAAAIIYEKLSRYISTTELIGKKERTFIIEHYLIVLNTLELLPKEDTWILVTDMSVDKEPDPNFLPQKLLTLDAIVAEYHLQLKDVAVQVTAEMSSAMNIDL

SEQ ID NO: 4853 - DNA, 3081 bp, Eremothecium gossypii
  CDS (1)..(3081)
atggcagaatcacagttgtccaaacttgatgttaatttacagagcttgaatccctacacgttctcaaaaacccggtgtattgtcaaccttcacatatctgacgataccaaaaacagagatccatctacgactaatggcagctattccaattcacagctgctttccaatggcgaacatgtctgctatcacttttcccaggactactgcgtgctctctatctacccagtgacagacgcaatcactgggaaaacggttgttgtgcacctgccgcatgagacctttaacgaccatcataccttcaccatggcggaagaagatggctgtattgtaatggacctgatactgaagacgggcctgttcctgacactccgcttttcccttgagtaccttttcaatcggaacgcggacatcaacagctcgtggtactccctgttaaaaccatacgatttcacagttaggctgcccgattacctgtataaggtcaatagcgcgctatcgattgtctacctaaatgatggtggccttctcggtctgcagaaaacacaaacctcagggagtgatgagtacgacctgcatcccgtgctattcaatgacaacagctacttccaaagttttacgaggtttttcagccacaacgatagtggccgagaaaatgttgtaagcagcgtgtcttatggcgattaccatttactcactttaactgagaattgcaaattgagaatctgggatctgagaaccaattctgtaaccgcgcagctaaatctaatcacagatccccaggataaacacaggaaatacgaatctattggtccctacttggcgttactagatagcgtactggttgtctttcttccctttggcaatggtgctttcagaacatttcaattgtccgtcaacaactctggaggccttgtgctaacacccagaggggagctgattcggacaaatctttccacggcttctatctggtcattagttgacacgaagttgacaaaaccttttgagcttaatatcgagaccagctacctacaaatggttgtattatggaagagcaacacaagcatcaaactacagattctgaattttgaaactgaagcgttagataaacacagttgggttgaagcctcaaataaatcgctaccagacattttggataatgatatcctaggtgacaactttgagcaatccttgttggatctaaaggcacactatacccctgccatatatgaagaggcccagagaattttaagcgctaacgggattatttttgttccaagtcagcaaaataacgatgagtacttgtcaaaccttgaatccattttgaaagaccttaagaagcaccatgatgaaccttcatccctaactttatacaatggcgaagtggttatggtaaacacactctatctttacaaccattttgtctacaagataaactccaaattggaatcgttttactacaacctaacatcagagaatgaagcgacccaggacgacctgctcacatacctgcaggttgtcaacgggtttgtctcgactctctcttcagaaactctgcaacggacttctagaaaactatgcggacttgtcactggcgaactgcaaggcaatatgccattgaaggataagttcactgcgatattcaaagaatgtttggagtctcaatttcaggtttcaaacctcaaaaaattatatgaccggttaacgtcattggatatcatgactttactgaaaagcttcatcgaaaatcatctgcaaaattcattattaacaccaacgctgatagactctatgtcgtttgataatttctcgagtgttgcacttctggagtctgtctaccaatgcgtgctaatcgagaacaaatttattgttgatactttgcttatcttcacactcatggatttcaattattctatgtttgaaaaacaactcaatttcctgctcaaaacacactacaatcaatctctctggcttcagctctacaggctagataagtccctgctgatctccgaaatttttgtcgcaacgagcaagtatggctatggacccaagatttccagctatgccgacctctccgctgccacaaaacgtatcgtcacttacattgcagaggcgccattgttggagaatccctttttgatcgccccatacaacaaatggataatccaccccaagaacaattccactgtgaggaatccatccttctttttagacaccatacacacgcagctctatgttcgtgaaaacacggtgcatcagtttatgctgggcctttcctattatcgttgtggacgttacgaagaagcttacagttacttgtcgagggcagaaaccgcacctatcaagcccaagcagctaccgctatgcctgcagctcataaccaaggcagcaaaccacccatggcagagtatcatatccgatctcggtgttgaaccccaggctgcgggctattactataacctttcgaagttattcagcaatgtgatgagctactcgtatgcattgcagagcattaaaaaatcgatagcgctctcccaggaagtttctccttcgactgaattccgtatacttcaattgacgcagtttatggatacactgatcatctttgatgaattcgaggaggtgctcgatgttctgacgctagagcaggagaccctaggcagagatataaggacctcatactatgagcggatgctctccgaccaacagttgagagacaggttcatcacgactttgttccgtataagtgtgctgctcttcaacgatctgctgttgctgtacacgggagcataccgccacctagtttacaactcgttggaggttgatattcgcatataccccgagcacgggacgcgcgagagcgggttccgtgtaaaccaccacgagcgcgaggctgcggaagtcctatatgagtacatcgggcgtggcaacgatcccatcgtcaaggaaaagtgttactggatgatagtcaacgtgctagccagtctttccccccaggatcaatggataattaactcaagtaaccgcggtcaggtcgtgtacttggcggacatccggaaagacttacaagcgctgacagcttga

SEQ ID NO: 4854 - protein, 1026 aa, Eremothecium gossypii
MAESQLSKLDVNLQSLNPYTFSKTRCIVNLHISDDTKNRDPSTTNGSYSNSQLLSNGEHVCYHFSQDYCVLSIYPVTDAITGKTVVVHLPHETFNDHHTFTMAEEDGCIVMDLILKTGLFLTLRFSLEYLFNRNADINSSWYSLLKPYDFTVRLPDYLYKVNSALSIVYLNDGGLLGLQKTQTSGSDEYDLHPVLFNDNSYFQSFTRFFSHNDSGRENVVSSVSYGDYHLLTLTENCKLRIWDLRTNSVTAQLNLITDPQDKHRKYESIGPYLALLDSVLVVFLPFGNGAFRTFQLSVNNSGGLVLTPRGELIRTNLSTASIWSLVDTKLTKPFELNIETSYLQMVVLWKSNTSIKLQILNFETEALDKHSWVEASNKSLPDILDNDILGDNFEQSLLDLKAHYTPAIYEEAQRILSANGIIFVPSQQNNDEYLSNLESILKDLKKHHDEPSSLTLYNGEVVMVNTLYLYNHFVYKINSKLESFYYNLTSENEATQDDLLTYLQVVNGFVSTLSSETLQRTSRKLCGLVTGELQGNMPLKDKFTAIFKECLESQFQVSNLKKLYDRLTSLDIMTLLKSFIENHLQNSLLTPTLIDSMSFDNFSSVALLESVYQCVLIENKFIVDTLLIFTLMDFNYSMFEKQLNFLLKTHYNQSLWLQLYRLDKSLLISEIFVATSKYGYGPKISSYADLSAATKRIVTYIAEAPLLENPFLIAPYNKWIIHPKNNSTVRNPSFFLDTIHTQLYVRENTVHQFMLGLSYYRCGRYEEAYSYLSRAETAPIKPKQLPLCLQLITKAANHPWQSIISDLGVEPQAAGYYYNLSKLFSNVMSYSYALQSIKKSIALSQEVSPSTEFRILQLTQFMDTLIIFDEFEEVLDVLTLEQETLGRDIRTSYYERMLSDQQLRDRFITTLFRISVLLFNDLLLLYTGAYRHLVYNSLEVDIRIYPEHGTRESGFRVNHHEREAAEVLYEYIGRGNDPIVKEKCYWMIVNVLASLSPQDQWIINSSNRGQVVYLADIRKDLQALTA

SEQ ID NO: 4855 - DNA, 3081 bp, Candida glabrata CBS138
  CDS (1)..(3081)
atggcgcagttggctaaggttgaccttgatctactacagatatgtcaaggtaatggagagtttgttcacttgctggaaaatagcaaaggatcacccgagagtttcgcaagtgcatattcgcagtcgatgcgcttgaccaatggtgagtttctttgctatcacatttctacggattacaagtctatttctttttacaactttaagaatgcaagcgatggaagaactattatcatacacttaccggccaagttaatgcacgagcaccatacattagtagtggaagagcaagaaggtgtgatagttgtggatgtaattttggagagctctgcgtttcttacaatgaggttaccacttgaatacatatttggaattgaaaatgtattggatgataattggttgtcaatgcaatcaccttatgatttcacggtgagaagacctcacctactacacaaagtttctcaggatttcttcgtggtatttctagaagatggtggcctattaggtctaagacagcataatgagaactatttggaacctcttctattcaacgattattcatacattcagacattgacaagcatgttctccagaaaaaagaaacaacccgctgatagagctgttgcctgtttggttatacacgataagtacttggtcgtcttgactaggctgtgccatttgaaaatatgggacttgggaagttttcatcttgtacaagaatataatttaactgagaattttaatggtacactcgaaacaatagaatatgaatcaaatggtaactacatatcgacattgaacgatgttattgttatatatttaccaatcggaaatggtgtctttaaattcggcagattgtctttcacaaatgacggtgaaagaaagccaacttttaacatgttcagttcgattgatgcaaacatgaaaaaatctactatatggtcctttgtagacatgaaactaacagatccattggaattgaattttacttctactacgtttaacttaattatactttggaagagcggtagcaatagtaagttgcaaattctcaatataaaggactcctcatttagcgattttgaatggattgaagcttcaaataagtctctacaaaattttcagacggaggaaatatcagcattgattcaaaattatgattttgataaggccctttacaaattgaagtcacattattctgatatgacatttaaagaagcagatagcctattattggcaaataacatcgtatattctgaaaataatgaaacccagcaacaacagtatttggcaaacttagacacattattgcgtgatattaataataatcattcagaaattgcttcatttacaatttacaagaatgatatgatactagtaaacactcataacttgtataaccacggcttctacaaaatcaactcatctcttgaaaacatatactttaatttgagtgagattactgataatgacgatcagtttgccaaatatttcaagttattgaatttattcttctcaactatttctagagacgctatcttatccacttcagacaaatttaatgacattgctataaggaagcatgagcactcaacaaatatatcaacagctttctctcaaatatttaatgaatgtctgaagtccaagtttgaaaagaataatgtaaaaactctatttgcggaattagcaacatatgacattattgaaattctaaatgaattaatagaaaatcatttgaaggacacttcttatcaccttgacaattttgtggaagcatttacaggcaatgtgatgaactctagtataattatcgaaaatttatatcatcaaatcgttgttcaaaacaagcttctccaattagtccttttgtctttcttatttttagatttcgatacaaacatttttggggacaagattgagaccttattagatattaactataagcaaactttcttcatgtctttttatgaatttgatagtaagttgacccagagtagtatgagcatgcacacattacaataccctcatggagtacaaatattttcttcatctgaattagcgggctatctagagtttgaaattgcaactttgtattccactccaattgttgatagcaggctatatatagcctttatgcaagaatatgtgctgaactggagagaaaaaatggaaccgcctcaaaaggctatcaatttcttcaaatatattctagagcctttgtacagacggaacgagattgatgaggagtttttactggcgatgtcaatgtttaattgtggacggtttgaacaagcttatgaattttttaccatgaatgactatatgttgcacctggccaacaaattaccacctttcttaaaaaatgtccaacaaaacagtctgtggtatgaattactaaaaacattcaccgagtcttcaaccaatgcgcactactatcttcaactatccttattgttcaaaacatataatagattggacttggcactaaaatgtgtatcaaagtctgttgaatactccatgaaacatccaagtgtcgaagaggcgccagaatttagcaaaacgcaacatttagcctacttggatctcttggtagaatttaaaatgtacgaagaagtgatagatgtgctaagaatgagccagacggttttggataagagtacaagaaaagaatgtttttacaaattattatccaattcatgtcatggtccaaatttttttactattttgttgaactcctgcaacactcaagagggtagtaagccctgtttaagtcacagagactttgtaatcatagatgagatcctaattaatagcttgaagagtaacaaatgggaggattgcaaaaaaatcttcacattccgcctaacgaataacagagatagagaggccgcagagatagtttatgaatatttgcaagacttagtcccacaacagtatcaggaaaaacaaaagtgttatttatttattctgaatgtgctgaaaacatttgataatgtggaagatcaatggatcatctacgatggtaaggttaaaaagttgattgatttgaaaacggaattctgcaaattaagtagtgctatataa

SEQ ID NO: 4856 - protein, 1026 aa, Candida glabrata CBS138
MAQLAKVDLDLLQICQGNGEFVHLLENSKGSPESFASAYSQSMRLTNGEFLCYHISTDYKSISFYNFKNASDGRTIIIHLPAKLMHEHHTLVVEEQEGVIVVDVILESSAFLTMRLPLEYIFGIENVLDDNWLSMQSPYDFTVRRPHLLHKVSQDFFVVFLEDGGLLGLRQHNENYLEPLLFNDYSYIQTLTSMFSRKKKQPADRAVACLVIHDKYLVVLTRLCHLKIWDLGSFHLVQEYNLTENFNGTLETIEYESNGNYISTLNDVIVIYLPIGNGVFKFGRLSFTNDGERKPTFNMFSSIDANMKKSTIWSFVDMKLTDPLELNFTSTTFNLIILWKSGSNSKLQILNIKDSSFSDFEWIEASNKSLQNFQTEEISALIQNYDFDKALYKLKSHYSDMTFKEADSLLLANNIVYSENNETQQQQYLANLDTLLRDINNNHSEIASFTIYKNDMILVNTHNLYNHGFYKINSSLENIYFNLSEITDNDDQFAKYFKLLNLFFSTISRDAILSTSDKFNDIAIRKHEHSTNISTAFSQIFNECLKSKFEKNNVKTLFAELATYDIIEILNELIENHLKDTSYHLDNFVEAFTGNVMNSSIIIENLYHQIVVQNKLLQLVLLSFLFLDFDTNIFGDKIETLLDINYKQTFFMSFYEFDSKLTQSSMSMHTLQYPHGVQIFSSSELAGYLEFEIATLYSTPIVDSRLYIAFMQEYVLNWREKMEPPQKAINFFKYILEPLYRRNEIDEEFLLAMSMFNCGRFEQAYEFFTMNDYMLHLANKLPPFLKNVQQNSLWYELLKTFTESSTNAHYYLQLSLLFKTYNRLDLALKCVSKSVEYSMKHPSVEEAPEFSKTQHLAYLDLLVEFKMYEEVIDVLRMSQTVLDKSTRKECFYKLLSNSCHGPNFFTILLNSCNTQEGSKPCLSHRDFVIIDEILINSLKSNKWEDCKKIFTFRLTNNRDREAAEIVYEYLQDLVPQQYQEKQKCYLFILNVLKTFDNVEDQWIIYDGKVKKLIDLKTEFCKLSSAI

SEQ ID NO: 4857 - DNA, 3030 bp, Kluyveromyces lactis NRRL Y-1140
  CDS (1)..(3030)
atgaccagcttttctcgtctgaatacaaatttactacaattaaaatcgaagcactcatcagacaatgcccaacatttatacgtcaatgggaatgttggatcatctacagaagaaataacttccgtagagtacagcaaactgttgcaactaaaattaattgatgaatcgttgtccttccaatggtgtaataattacactgttttgagtatttactccatgaaggaaacttttgcaaggaaaaccatatatatccactttccaaaacctcttctgaacaaatggtttactgcagtcgtatacgaatctagtgaaacgacctccaacctatgttttgatgtgattttaaaggatggaattttcatcaacctttcattgcctatcgattttattctatcgagaactcgtcaaaatgagtatcctgagaattggttgaaggttttaaacccgtatgatttctcagtacgtcctccacagtgtctatttcatgttgataacaccttcagtgtagtatttctaaaagatggtggtcttttggggttaaaacgtattccgctcgaaatattaaacgattttgaattgcaacctgtcctattcaatgatagttcatactttcaaagttttacaagaatgttttcaaagtacgataaccacaactctgcagtggtatctgcagaacttttgaatgacaagtatcttgtcacattaacgaatgatgcaaccattaaaatctgggatttaaccacatatcaactaaatgcgcatttcgatctaaaagagaaaaaccagcaggtgaattatggagctgccggaaaatacatgataatttgtggatctctcctgtttgtatacctacctgcaggtaatggatcgttccaagtcattcaattagaaaatacgcattcttcaagaatctccttcaaaccattaaacgttaatatacctctcaatctttcatcttattcaatatggtctttaattgacattcaattagtaaaatcctcaattgtcaaacaatcgggactcaacttggttttattatggaaaagtaacacagtgaccaagctacaactactctccttcgaagactctctgtatagtagctacaaatggattgatggtaacagcacatacctctctgatttgcttgatgactcagacctaataacaaacggaaatatggaaaaggctctcctcaatctcaagtcacactactcacaatcaacgtacgatgacgcacaaaagatactgaataaaaataatgtcatggtgcagataaatgatcctcataatcaagattatttgaataatctagaagctcttttgaaagaacttcataaacaatatcaggagccttcaactctaactattcttgatgatgagataattgttgttaacagcttacacatgtatcatcattccacgtataagttagactcacaacttgaaacaattttctttaacatttttgagagaaaggaaccctcgtctcaactagagcttttcttaaatatcctgcatggtttttcaacaaccattacatctgaaacgttaaataagatatctgagaagttcttagacatggtaaatggttcaataaatccctcgttatcattgaaaaataaaattaccattgtctttcaagattgtctaacaaatggtttccaaagtgctaatttatcaaaattgttggaaaatctaaattctattgatgtggtggaggttttatccgaatttatacactgtgatttgaaagtaggtgctttttcagttattgatttattagatactgacattttcttatctgttttgtctatggaatccttgaagcagacactctccattatggataagtttatcattgatatattgttagtattcactattgtggatatcaactatgaagtttttgcagagaagttgtctaagttaattaccttgcacttcaatatctcattgtggctccaagtgtatcaaatagataaattattggcaatttctgagaccttcggtcatgttactaaatacaattatggtgcacaattgaaatcttacagcgatataaccgactttactacattaatggttggttttgtcaagaattctccaacagctgaacctccaatatttacaagagccttttccgatttcatattgaacggcgaagatttgacttgtgcaaagcaattcctacactttgttgctaagccttaccatgtgtccaaggatccagtagaagaactactatatgctctttctttgttcaaatgcaatgaatatgatgcatctattgaaatattcttggcaaatgacttctctgatgagctctcactacctaaatatctggaggttactgaaaatcacgtttggtacaatctccttcatgcgatcaatacaaaagataaaccagcatactattatgaactttcagttctatgttccaaagcttcatcgtatgctaatgctttaaaaaccatcaaaaaatctatatcacttgatggtacaagagcagatcagttgatacaatacttagatacattgatagtatttggcgattataaagaagtcctggatgtattgaggttggaacaaaaagtccttgatataagcctaagagaaaaatactattatacactgctgagtgatcaaaagtacagtgaaatgttcactgcaactttactccaagaatgctacaatgcaaacatttccaacggatccatactattatgtgtgagtgattataaaattatagcttcaattttatcatcacaagtttctctcactgattggaacagctataaaaagttgttctctttcagaatactaaatcaacatgaaaggaaagcgtgcgaggaactatatgactatgtactcttcggatcgaacgacgaggttaaagaaaagtgcctacttctaatatccaatgtcttaaagacattttcagatgctaaggaccaatggttcatcagctatccaggacaaattattcatttacatgaattgaatgacaaaatgaataagtgttcaaagtag

SEQ ID NO: 4858 - protein, 1009 aa, Kluyveromyces lactis NRRL Y-1140
MTSFSRLNTNLLQLKSKHSSDNAQHLYVNGNVGSSTEEITSVEYSKLLQLKLIDESLSFQWCNNYTVLSIYSMKETFARKTIYIHFPKPLLNKWFTAVVYESSETTSNLCFDVILKDGIFINLSLPIDFILSRTRQNEYPENWLKVLNPYDFSVRPPQCLFHVDNTFSVVFLKDGGLLGLKRIPLEILNDFELQPVLFNDSSYFQSFTRMFSKYDNHNSAVVSAELLNDKYLVTLTNDATIKIWDLTTYQLNAHFDLKEKNQQVNYGAAGKYMIICGSLLFVYLPAGNGSFQVIQLENTHSSRISFKPLNVNIPLNLSSYSIWSLIDIQLVKSSIVKQSGLNLVLLWKSNTVTKLQLLSFEDSLYSSYKWIDGNSTYLSDLLDDSDLITNGNMEKALLNLKSHYSQSTYDDAQKILNKNNVMVQINDPHNQDYLNNLEALLKELHKQYQEPSTLTILDDEIIVVNSLHMYHHSTYKLDSQLETIFFNIFERKEPSSQLELFLNILHGFSTTITSETLNKISEKFLDMVNGSINPSLSLKNKITIVFQDCLTNGFQSANLSKLLENLNSIDVVEVLSEFIHCDLKVGAFSVIDLLDTDIFLSVLSMESLKQTLSIMDKFIIDILLVFTIVDINYEVFAEKLSKLITLHFNISLWLQVYQIDKLLAISETFGHVTKYNYGAQLKSYSDITDFTTLMVGFVKNSPTAEPPIFTRAFSDFILNGEDLTCAKQFLHFVAKPYHVSKDPVEELLYALSLFKCNEYDASIEIFLANDFSDELSLPKYLEVTENHVWYNLLHAINTKDKPAYYYELSVLCSKASSYANALKTIKKSISLDGTRADQLIQYLDTLIVFGDYKEVLDVLRLEQKVLDISLREKYYYTLLSDQKYSEMFTATLLQECYNANISNGSILLCVSDYKIIASILSSQVSLTDWNSYKKLFSFRILNQHERKACEELYDYVLFGSNDEVKEKCLLLISNVLKTFSDAKDQWFISYPGQIIHLHELNDKMNKCSK

SEQ ID NO: 4859 - DNA, 3576 bp, Debaryomyces hansenii CBS767
  CDS (1)..(3576)
atggatctatcctacgctacagtcaatataatgggttacaagaggcatttagcagcacagactgttaaattacctcttaaatacccatcaacgctgcagaaatatacacccaatgaacaatttcatagacagttagctagcacgggtgatatagtcaatttgagtaaaataaactcctcattcattgaccaaatttcgtacgtggttctaaatgatatgaagactatatcttttacgccattgaattcgcaagtaaataatttccgcttgaaatttcaaagcttgcaagtggtattaccgcatgaacttaaatcaaatcactgtatcagtgtttattatgaaaagctggagactgaagatgaaggatggataattatggatttgattgatgagaattatttgtttataacattgaaaatatctttaactgactttattgtagaagataaccagaaggccaaattctcattaaataatttcgatcaatgggggagaatatcaataccctactcattcgaactaagatcacctccatcgtttatgaaagccattgattctcgtaacataataatttctttgaaagacggtggattattgcatttacagagatcggagcatttgaaggattttgctgttcataatttcagtgatccaacgtcattattaccattgaattttgtgagtggcctattcaagagagatacttcaaatcaagatattgttctagatggagtctcgtctaattcgcttgtggacttggtagctgttagtactatacttataacattgactgtcgacaaagtgttaaaattctggaatctagaaaatcatcaacaagcgcgtagtccaatagatttgaaagatgataagtcgggatcaagagctgatgcggcctggttaagttccgtatcttctagatacttgcaagttgttgaaagtgaagcgtccggtcatgcatatttaacttgtcactacactactacatctaatagtttaaaacaaaattacaatgagatgggtttgcttttcaaagcgtgggagattttagatcataagactcaaatagaattgatttccttagatcgcttgaccttccaaccacagttgccagatttgctaatttcctcacaaggcgatgaagagacaaagtatcataattccttatggtttgttcaagattttagatgcgaaagtcgtggtgaatatttgaactatcatattttatggaaatcaaatacatcatcaatccttgtgacctataaaattcatttcaataatggtgcagtatcatcaataaattggtcccaaccaaacagttcgaactcattatctgattctacttctcatcatgatattgaattttactccaacaaaattttgaattctgagagctatgatgacttgattattacaacttcattaaatatcttcagagagcatataggtcttgaaagcgttagatataatagttccattcgtgagactgttatcgagacaattgataaggctgcaaatgattatcaagatcgcaagtcttgttggtataaattggactgcttgtgtgaagaacttaagaaagtaggtgaagaatcattagcattatgcatagccaataagtcaactatattgaccttgaatattaataatatcagtatatttaggcaatcgcatcactatgaaggattcttttataataagccatcatccagtgaaggtaaattggcagcaatattagaacggttaacagttgcgttatctccaaagacatataataaaatttaccgtggtgttctaaaccttgaagcttcaaaagtaactgctgataaggctactatgttgtatgatactattcttaataataagatttcgacagatgaaatctctctgattatgactgaattggaaagtattcctgacgtcctcgatgttatttcatcgttaattgattcgcgtattaagccagataaccttgatgaaactataagaaaattaaatccactagccactattggtactttgactaaattgaatacactagtaactttcagaaatatcaaacgtcaccatgagtcaattttattaagcttggtcgttttattcttaatttgtgaagtgaatgaacagatcctactcttgcttaataaattaattcaaagattatccagttatgttattgttgattgtgttttcaatacttgctttgaatcagataacatacatgctaaagtagaatcgacagaccttagcaattccgaaaactcgttattttggacaggattagccaatagaaacccaagacttaattctttgattatagaaggtaaattgactgaaagttacgattacttttatggtcatgtcatttcatcatatgataaatttattcttgatgttattatagagttaataaatcatggtgaaagtttattaattaaagagaaattcttctctaaattaagtcaatcaaaaatcatcgatagatttttgatcgggttagtttatttaatcaacaatgagccattggagtttttcctgatatttgaaaagcacgaatttttcaagtttgataatgattctattaaagaagatttaaagaaaaaattcctaaactcgttgtctatcaacccacgtataaaatctttcctcaccacgatatttttaaatgaatttgatggtatagacagtgaattaggaaaagcaaactatttccatgcattatcggaattatcaaaatcacaaggaagagatttacgccatcgttcacatcaccgtcaaaggtttataaccccgactacaagcgctattaatgctgttacatcagctgatggttcatcttctactattgaagcggagttcataaataatgcgttgaaatttgaaagaattgctgttgaaaacttgaagaaaattaataacccagatgaaacagttatcctgaatattgaccaattctatctaaatatatttgagatggcactcagttcattaaaatatgatttggtatatgagtgcttatcatatttgtcttcttcgaaggtttcaaagattttcgattttaaggatctacttagtaggttcataaacaacttaatgttaaatcaacgtatatccattatttttccaccaaattcgaataagttatactctagacattatttattaattgattcgatactattggaaaccgctaacaatgagttagcattggctaattctctcaagtgttatgaatatctttatacatggaggcttttcggcccaacgttagattctagtcaattagccgataaaagaggtgcagctgaatcgttatatatgtttattacgaggtttaagcatgagcaaacgaatttactcgccaattctacaacagttgttgaagatatcaaacaatataaattgaagattttagaattatacatgataattttaaattgtttgaaaagcttcgatgatgatgaagataagtggattataaaatcaaaaagtgttgattcattatcagttaccaaattggatgaaataaatttagaatattacgaatggttaagagaattagaagacgatttgaactaa

SEQ ID NO: 4860 - protein, 1191 aa, Debaryomyces hansenii CBS767
MDLSYATVNIMGYKRHLAAQTVKLPLKYPSTLQKYTPNEQFHRQLASTGDIVNLSKINSSFIDQISYVVLNDMKTISFTPLNSQVNNFRLKFQSLQVVLPHELKSNHCISVYYEKLETEDEGWIIMDLIDENYLFITLKISLTDFIVEDNQKAKFSLNNFDQWGRISIPYSFELRSPPSFMKAIDSRNIIISLKDGGLLHLQRSEHLKDFAVHNFSDPTSLLPLNFVSGLFKRDTSNQDIVLDGVSSNSLVDLVAVSTILITLTVDKVLKFWNLENHQQARSPIDLKDDKSGSRADAAWLSSVSSRYLQVVESEASGHAYLTCHYTTTSNSLKQNYNEMGLLFKAWEILDHKTQIELISLDRLTFQPQLPDLLISSQGDEETKYHNSLWFVQDFRCESRGEYLNYHILWKSNTSSILVTYKIHFNNGAVSSINWSQPNSSNSLSDSTSHHDIEFYSNKILNSESYDDLIITTSLNIFREHIGLESVRYNSSIRETVIETIDKAANDYQDRKSCWYKLDCLCEELKKVGEESLALCIANKSTILTLNINNISIFRQSHHYEGFFYNKPSSSEGKLAAILERLTVALSPKTYNKIYRGVLNLEASKVTADKATMLYDTILNNKISTDEISLIMTELESIPDVLDVISSLIDSRIKPDNLDETIRKLNPLATIGTLTKLNTLVTFRNIKRHHESILLSLVVLFLICEVNEQILLLLNKLIQRLSSYVIVDCVFNTCFESDNIHAKVESTDLSNSENSLFWTGLANRNPRLNSLIIEGKLTESYDYFYGHVISSYDKFILDVIIELINHGESLLIKEKFFSKLSQSKIIDRFLIGLVYLINNEPLEFFLIFEKHEFFKFDNDSIKEDLKKKFLNSLSINPRIKSFLTTIFLNEFDGIDSELGKANYFHALSELSKSQGRDLRHRSHHRQRFITPTTSAINAVTSADGSSSTIEAEFINNALKFERIAVENLKKINNPDETVILNIDQFYLNIFEMALSSLKYDLVYECLSYLSSSKVSKIFDFKDLLSRFINNLMLNQRISIIFPPNSNKLYSRHYLLIDSILLETANNELALANSLKCYEYLYTWRLFGPTLDSSQLADKRGAAESLYMFITRFKHEQTNLLANSTTVVEDIKQYKLKILELYMIILNCLKSFDDDEDKWIIKSKSVDSLSVTKLDEINLEYYEWLRELEDDLN

SEQ ID NO: 4861 - DNA, 2775 bp, Yarrowia lipolytica CLIB99
  CDS (1)..(2775)
atggtggcgaaaacgtttcgagaggagcccgtcggcggcacccatcaacaagtggaatacttgtttcccaacgtggagattgatggctcgaaattgatcacgaaaaaggtggtggacgaaagaaagcgaaaactggaatctgacgatgccgaggaggtgtttctgcgacgctacgtgtccaaggaagggcagatgttccagagctcgaccaatggcgagttttctgtgcgcttcttcgacgagtcgcacatcatggaggtgactggagtgaatcacgatcgcaagagtgtgcgtatctattttcccgagggactacagaaccattgcacgtgtgtgactgaaaaggatggggttctttacattgattccatttcaaacagctttctgctgtacagcgtgaagctgccatttgctctgttcaatgaggacaacaccgagcattacgacacctcacggttctttcagcagcaggaggactacggcattcgaagccgaaagccgcttcttctcaagtcgctcaagggccagtccaacgaacttgtgctatctttatgcgacggaggactcatgaaattggaacgacaagagaagaacggcctgtttctgacatcgttattttccgacccctcgtatctcacgagcctcaaggaccggttcttcagcaaggacaagattgcgtccatgccgcatctcagcatccacgctattatctctatgacaaactttgagaaccacctgttgaccgtgtctgtcaaccagactctcaaaaagtgggatctgaatactctcaccggcacagaaatcaagtttgacagcgacaagagcaaactcgacactgagcctgtcactcgagtgtgtgcgtcgggcgagttcttcatcaccttttgtggagaaaccatctacttctgggatcaaaacttcgtccaggtcttctcgtccaagatcccagacattggactatggtcgctaaaggacatggcgttccgtcaaaacgagggtcagttcgaggtctccaccgtgtggatgtctggtgtgtcccacgttgtcaagaaggctacagtaaacagaaatggagacatccagtggtctgagtgtggaacacctcttcgaatgctcccaccactcacagtccacgactacgagcgtgccgtctctctttacagcgtgccccttctcaaggctgctctttccatcttctctcgacatggaggaggaggaaacaccatcagtgaagccatctcgtcacagctcagactctacactaaccacagcggtcccgactacactggctacgccaaggaccaggttgaggcttggagcaagtttgaaggtatctgccaggagctcagcagacaggctagtgcatgcatcggaagcagtctttctggtgcccagatctatattctaactggaaccggtgtgtctaccatccgaccttccactgaactagaaaagctgtacgatgagagaaacattgatggctccaacttgtccaagctcatgttcactattgatcggttcactcaacagctgacaaaccgagctcgacgaaatattgtatcgttcatggaggaggacatcctggctctgccccactactctcagggcaaccgaatggccgacatgatgaacgtgctcatcaaggaggtgcccaaactggcgtacaagaagctgtttgactcgttcaacggcgtatacaaccttctcgatacctttgacgacctggctgccgtaatggatacgtctagaggctccattgatacagcctatgttatgtgtcttgatgctttggtctctcttttgctcatttacaaccgagacggagatgaaaccggtctggacaagaacagagtcgttcgcgtgtttgtgcggttcatgaaccactttagaacattcacaattgcccgagagtgtgcatttcaacagggcgagcgatacggcactctggacaacttttcggagaccaggtttttcgaggtgctggctcgactacctgctgatcgagcagccaagctcacacggttcctcaacactgaccgaccttctcggtttgttaagggtctgattctgctccgtatgggtgagtcccgaaaggccaagcgatgtttctttgagggagagttcccctccgacgatacactgagccactttggtctgccagctcgaggacaagactcatactacgagtacacgagcaaggtgattgcgggtcttggattcaacgagctcgccgtcatttttgcatccagagtaacaaacccagacacagcctgtctcatcaacaagttccgatacgccttggctgcccgaaactacgacgtcgcatactacactgccattgctgagctcaagcataaggacaatgtggccgagctgatcctggacatggccaagcatcagcccctgaggctgctcacctaccccttcacatcctaccatcctctggtggatgcaattctggcctcgtccagcttgcccaacaagtacaaactgttgtacgcctggagagtttctcgggaggacctcaagggagctgcctgtgctctgtacgagcagctactgacagtcaagcagggtattgaccaaggaatgtctgagaagaagacgtatgtggccgagctctactccagcattctcaacgttctggctcttcagggcaaggacgatgcctggtttgtttcgaatggaaaggttcacactctgcaggatgttgagaacgaacatagccagtggttggcaggtatggttcgggagatgaagttggtgttgaggtag

SEQ ID NO: 4862 - protein, 924 aa, Yarrowia lipolytica CLIB99
MVAKTFREEPVGGTHQQVEYLFPNVEIDGSKLITKKVVDERKRKLESDDAEEVFLRRYVSKEGQMFQSSTNGEFSVRFFDESHIMEVTGVNHDRKSVRIYFPEGLQNHCTCVTEKDGVLYIDSISNSFLLYSVKLPFALFNEDNTEHYDTSRFFQQQEDYGIRSRKPLLLKSLKGQSNELVLSLCDGGLMKLERQEKNGLFLTSLFSDPSYLTSLKDRFFSKDKIASMPHLSIHAIISMTNFENHLLTVSVNQTLKKWDLNTLTGTEIKFDSDKSKLDTEPVTRVCASGEFFITFCGETIYFWDQNFVQVFSSKIPDIGLWSLKDMAFRQNEGQFEVSTVWMSGVSHVVKKATVNRNGDIQWSECGTPLRMLPPLTVHDYERAVSLYSVPLLKAALSIFSRHGGGGNTISEAISSQLRLYTNHSGPDYTGYAKDQVEAWSKFEGICQELSRQASACIGSSLSGAQIYILTGTGVSTIRPSTELEKLYDERNIDGSNLSKLMFTIDRFTQQLTNRARRNIVSFMEEDILALPHYSQGNRMADMMNVLIKEVPKLAYKKLFDSFNGVYNLLDTFDDLAAVMDTSRGSIDTAYVMCLDALVSLLLIYNRDGDETGLDKNRVVRVFVRFMNHFRTFTIARECAFQQGERYGTLDNFSETRFFEVLARLPADRAAKLTRFLNTDRPSRFVKGLILLRMGESRKAKRCFFEGEFPSDDTLSHFGLPARGQDSYYEYTSKVIAGLGFNELAVIFASRVTNPDTACLINKFRYALAARNYDVAYYTAIAELKHKDNVAELILDMAKHQPLRLLTYPFTSYHPLVDAILASSSLPNKYKLLYAWRVSREDLKGAACALYEQLLTVKQGIDQGMSEKKTYVAELYSSILNVLALQGKDDAWFVSNGKVHTLQDVENEHSQWLAGMVREMKLVLR

SEQ ID NO: 4863 - DNA, 3897 bp, Aspergillus nidulans FGSC A4
  CDS (1)..(3897)
atggcaaagatttacaaagatacccaggtcgacctccggccgtactcgccgagcaccatcgtcaacatcccgattccaacacaaacaggctcgcagaaccgggcgcgattcgcaatctcctccctcacagatctcgccgagcccatcgcgaaagatgaggatgagttcgcaagacgatacatcgcgacgcaggggtctgtctatttccgcaaacgcaatgtatacccgcgagcgtttctctggagggtcgtcaatgaaagcacggttttagaaatacaatgtgtggatttgacaaagggtggcatcgagaaccatgaatataacatcacgctgcgattggacttccaggacaagattctgccatcgggcgtagctctggccgacttggaagaccacgatgtgttgaatctgtttgtgatcacggcctccaaggagttgcacaccttggctttgcgaccagaattcttccggaaaccagcgtcaatagaccaaaatatttcggactggtgcaaatcttatatcccagcaccgttggctttttcgcatccgcatagattacatgcgagcagcccgctggagctgttcatctccctcgacagcggtgcgctcttacgattgaccaggagggccgctgacgatggttcaaattggtctccgcttaccctggacgagagaacttggggttcatctcttcgagggctggtcaggtggaatgcccaaagttctatcaaatacggcgggcgcactctcgacacaaatgtagcaaatgcggtcgccacgacatccgatcagacgtacgttttcgcagtctgcctgaatcacacactgaagatctggaatctcgctacgaataaattggtggcaactaaggatctactcggccgcgagatgcagcagaattccctaacatactcgttgaaccccgccgagtcgtcgtttatccgcgtattcaatgttgagagggccctggacggcgggtaccgctactacgctgtgacttattcgccctttgaagatggatgtttcaagttctgggccatcaaagggggtcttaccacgcctttagaaattgaagacctttttcccgccgcgacgttgaggcctttggatcctgattcgacgggaaatatgttttggagcattgccgacttccaggtcaagccggcggaggagggaaagcgcatggagctctgggtactatggaggaatagcggtctttatcaactatatactcttcacttcaactttgaatcgctagtttcggattgggcgaacaactggaccactgctgcttccgacacccgacgacaagagcttccgccacctttaccaatttccgatgtcgtggatccgaccgagaagtggttgaaatttcttctacagccaaacagatttcctactgaagtactcgagacttccttaacgatttaccaggaagccctcaagcctttgtcttcctcgagcacatcaaaaaagagcacccctcttgtagaacgtttatgctctacattcgcagctacagtgtctctgcggaaattcgaagatgacgacatggatttctcacggtatcgttcagatacagattctaagtggcggcaattctggcagattgcggatgacctgaataagaggagatttgagcctctcaccctatcatatgatgtgtattacgagactccctgggtgcttctttcagatagctgtgcagttgtacgggaatgcagctcaacagaactccttctacacaatccaggacctgtgcttcagagcgaaggacccaagatcgcggatcgatggaggcatcgaaacctggaatcagagcttggtgacttgtatgaggaagcttcacatctcatgacggttgcttccaatttcaggaagagattctcagctgacctcaatgcagcttgccagagcgccattgaggcggagatcttcgcggagccctcatcttctgtccaagataggatggaggtcttccgtgaccggtgcgatatctcagagcagatttctaaccagatttataacgacttaatttccgagatgaatgagaagctcaacatctatatgctatctagcgacattttcttcaagatacttgggaccatcccacttgggtttcccgggaaagactctgaccttctccctacgcattttggggtaaaggttaccgtgaacggcgtccaggagactattcagtttacgcgccagattctgatcgatctcttggtacttgttgtgttcattgacgctgaggtggagcaggataaagggtccaccttcgatgcagtcgaactgtttgttgagttggtcactttactccgagagtacgaaatgatgctgtggctaagctcaaatatgcggaaagagaccgacaaattctcaaaggcagcggaggacttcccgaatccatccttttctttaaagcagctaccatcaagcgacaagagtgcaaggattacaaccattttagaggatttgttcgcgacggacatcaaacctcgccaggccattggccttcctcagagctatattttgacactcggcatccaagatgtgctatcatggtgcgacttgatagccaaggggaacatcgatctcgcttgggactttctacgctttcaaccaagtacatcctggtcgacttatgtaaaaggtcgcctctacgtggccatgtctgagcttgatacagcagccttgtattttagaaaagccgcctaccttctctcttgtggaaaaccgctgggcaatctgcacgagatgtcctcgacactcctcgatattgtctcagtggactgtttccataatggacttccaaagtatttccagcatgtgctatcaatatttgagcaggtgcgggcattttctcatgtttcagaatttgctagcctagcattgcaagctctcgcgagtgaacacggtagcgagcaggacgtagaggtcgcccgattgaagaatgaccttctctcacgcctgttttatgcttcgttgcagacctgtcaatttgaccaggcatattccgctctctcccggtacaaggactccgcactacagaagtccgcattgaattccctcatcaccagcatcctggctgcttcaggttcaggaagcgctgggctcgagcagatcctcgctttccctaccactctcatccctaatctcgcctctcacgtggacgagattctggtctctcttgcccagaaacagccctcaacttctcctttcgataccaaatccagatggaccgaaggcaccgtggattaccaaagaatcctccaagcttaccgtatcaagcgcggagactaccgtggagctgccgaagtcgcctatcacaacgtcgaacgcctccgccaggccagagacacatccacccaccacctcctctccaaagccaaagcaggggatcccctccaccacattctcgaagaagatgaccccgagagcaacgaaatcagacacgagcttttatcgctcatcaacctcctcgcttgcgtcgacaaaagcgaggcttacatccttgtcgacaaaaaagaggctcgctcactcacagctcacagcaacgccagcttggtagcagccgctggacccgaaaacgacgacgaaaacgtcttcatggatgatgcagatgtgccaaccgcacgtcacggctcaatctcaaatctaagattcttatccaataaaccatctgtttcgttgccgccgcccacttcacccgcgcaagggcctcggcgacgagtcatagtcactctcgatcacttgcgtcgcgaataccaattggagttagatcgagtcaacaggattgaacgcggggattgggagtttggtctcgatgatggtgttggtttcgatcttgaaaggaatgtggcggataatgttgatacaatgccgcttgcctaa

SEQ ID NO: 4864 - protein, 1298 aa, Aspergillus nidulans FGSC A4
MAKIYKDTQVDLRPYSPSTIVNIPIPTQTGSQNRARFAISSLTDLAEPIAKDEDEFARRYIATQGSVYFRKRNVYPRAFLWRVVNESTVLEIQCVDLTKGGIENHEYNITLRLDFQDKILPSGVALADLEDHDVLNLFVITASKELHTLALRPEFFRKPASIDQNISDWCKSYIPAPLAFSHPHRLHASSPLELFISLDSGALLRLTRRAADDGSNWSPLTLDERTWGSSLRGLVRWNAQSSIKYGGRTLDTNVANAVATTSDQTYVFAVCLNHTLKIWNLATNKLVATKDLLGREMQQNSLTYSLNPAESSFIRVFNVERALDGGYRYYAVTYSPFEDGCFKFWAIKGGLTTPLEIEDLFPAATLRPLDPDSTGNMFWSIADFQVKPAEEGKRMELWVLWRNSGLYQLYTLHFNFESLVSDWANNWTTAASDTRRQELPPPLPISDVVDPTEKWLKFLLQPNRFPTEVLETSLTIYQEALKPLSSSSTSKKSTPLVERLCSTFAATVSLRKFEDDDMDFSRYRSDTDSKWRQFWQIADDLNKRRFEPLTLSYDVYYETPWVLLSDSCAVVRECSSTELLLHNPGPVLQSEGPKIADRWRHRNLESELGDLYEEASHLMTVASNFRKRFSADLNAACQSAIEAEIFAEPSSSVQDRMEVFRDRCDISEQISNQIYNDLISEMNEKLNIYMLSSDIFFKILGTIPLGFPGKDSDLLPTHFGVKVTVNGVQETIQFTRQILIDLLVLVVFIDAEVEQDKGSTFDAVELFVELVTLLREYEMMLWLSSNMRKETDKFSKAAEDFPNPSFSLKQLPSSDKSARITTILEDLFATDIKPRQAIGLPQSYILTLGIQDVLSWCDLIAKGNIDLAWDFLRFQPSTSWSTYVKGRLYVAMSELDTAALYFRKAAYLLSCGKPLGNLHEMSSTLLDIVSVDCFHNGLPKYFQHVLSIFEQVRAFSHVSEFASLALQALASEHGSEQDVEVARLKNDLLSRLFYASLQTCQFDQAYSALSRYKDSALQKSALNSLITSILAASGSGSAGLEQILAFPTTLIPNLASHVDEILVSLAQKQPSTSPFDTKSRWTEGTVDYQRILQAYRIKRGDYRGAAEVAYHNVERLRQARDTSTHHLLSKAKAGDPLHHILEEDDPESNEIRHELLSLINLLACVDKSEAYILVDKKEARSLTAHSNASLVAAAGPENDDENVFMDDADVPTARHGSISNLRFLSNKPSVSLPPPTSPAQGPRRRVIVTLDHLRREYQLELDRVNRIERGDWEFGLDDGVGFDLERNVADNVDTMPLA

SEQ ID NO: 4865 - DNA, 3345 bp, Candida albicans SC5314
  CDS (1)..(3345): transl_table=12
atggatgtatcttattcatttacacctttgacgggatataaagatagtttggtcaatcaacatgtaaaattacctttaaattatccaaccatcgacaatcacaaccctaagaaatctacaactcccaacaatgaattccataagaaaatagctactacaggtaagatcatcaatttacctaaacaatcaattgtcccggcagtttcaatctccgtttacaatgatatgaaaaccattgttttaacaccaatggaatttcaactgagtagtattggtttccaatttcaaaatttaattatagatttacctcattcaaccatttcaaccaattgtattacattttattatcatcaagatcatattttgattgatttaattgatcaaaattatttgtttattacgttaaaaattgccattgatagattcattttaggtggtcaacaactcactttagataattttgaagaatgggggtatatttctgttccttattcatttgaactaagatcttcaccatttttgttgaaatgtttggataatttgaatttaattgtttctttgaaagatggaggattgctacatttcaaaagagatgaggaattgggtgaaattaatgtgtttaatttccaagaacaaggtacattaataccatttttaggttttttcggtagtgggaaacagaaagatgttgttttagatggggtttcgtctaattcaattgttgatgctttacagattggtggtagtggtgtggtgattactttatctgtcaacaaagtgttgaaactttggaatcttgatggtcaccagaacttgtcttcattgacaattgcttcagatgacaatacatggttacccactattcctagcaagtatttaaaatcctatgatcaagaagatgggaaaactattataacattgtttatcaataccaaatcaggagattcatcaaagagtatgtttgtattcaaatcatttgaattagaaagttcaaatttgcatgatttgtcagatctttctttccaaccagaactccctaattcattattgttttcctctgatgtgttttatcatgaatccaatttccaaaacactatttggtttattcaagattatgaagttgtaggattcggaacatctcagctcaaatactatattttatggaaatccaatacatcttcaattttggtggaatatactataaacccagttaatggtgcaattttatcaattgaaatttcccatcctaatgggtttgaaattgacgaaaatatatctgcttatcatgacgctgaatattatatggatagaatatttgattctgggaattacgactcgttaattgttttgacatcaattaaaatattaagtcaacattgggaaatagataatgacatggtggtgacatctcagtcaattcgacaattggctatagatacaatcaattcaaaagcagaatcaggtaccattaaaaattattggtttaaattgcaatctttatgtgaagaatttaaaaatttgagtcaagaaacattgtcattgtcagttttcgataatcaagttttaactttgaatgttaatggtcatggtatattccgtaaatctgctttttttgaatcttttgctaatcagaaattgaatagtgctgatgggaaattaatgctgattttcaataaatttgaaacttttatatcacgtaaaagttatcataaattgcatgaagaattacttcaattaagaaaaatttcggcaaatgagataacaaatttattcacaaaacacattgaaggaaaaatatctactaatgaaatacagacaattctaaaagatttagaacagattcctgggattgttgaaatagtgaaatcgttaattggtagctctgggtttgaattaatcgtcgatgcaaattccatttcaagtaaagaactcggtgcttttcacaaaatatctaccgtgatgatattcaagaacattatggagacacataaaacattgttattagatttggtggtgttatttcttacatgtgaaaccaatgatcaaatagttgaatttgtcaaccaaattcgtgcaactttggtacaatatgatgtcatggaagtagttttcaccacatgtttgaataagggagaagttgaaactaagaatatgggccaagtgcaaaattctattttttggtcatcagttgtggctactcattctcaattaaaacgattaattgagtcattacagctaaatgatggctatgaatatttttataacaatgtcttacctgatgactatttagttgatgtggttattgaattgatcaacaataaagagtacttttttttgcaaaaaaaatttttaaccaagcttaatcaagagaataaggtggagaaacttttggttggtttgatatatttgttcaataatgatgtaaagtctttttacaagattttcaatgattattctaatttccaaaattttactgaaaataaaattaaaaatttgaaccaagatgtcaacttgcagaaatttatagaggcattgttatctaacccttccaaatctcaatattttcatggattatcaaaattggttcaatcgcaaatcaaaactaatgataacaaatcacaacaagaagaacattgttttattgaaattgcatctgattttgaaactttagccattgaaaatgaatctgacattaccatcagagaagaattttatttgaatttatttgaattatccttaccagtttcaaattatgatattaccaccaaatgtttaaaaaatttaactctttcgactaatttcaaaaatttaatgacaaaatttattacgaaaataatttttcaactgaaattagatatcatattcccaccaaataataatgatgatgatttttatggacaacatttttcattaattgattcaataattgttaaagttgcccaagattccaatttatcacaatctttacgagtttatcaatatttgtattcatggagattatttggttgtatggtggcggtggtcaacaacaataagacgctagaattgggtgataaaagaggtgcaattgaagctttatatgaattcattactcgatttagaatagaaaatcctactggtgatgtggaaaggaaagtaaaattgaaaatccttgaaatttatatgataattttgaatttattaaaaagttttgaaaataatcaagatcaatggtttttaaagacaaatagctataaagagacaacaacaacaagaagaagatcaatcgtatctttgaatgatttaaaattggaatacttagaatggttgaaaaatttagatgaagatgtatcaatgtttacatag

SEQ ID NO: 4866 - protein, 1114 aa, Candida albicans SC5314
MDVSYSFTPLTGYKDSLVNQHVKLPLNYPTIDNHNPKKSTTPNNEFHKKIATTGKIINLPKQSIVPAVSISVYNDMKTIVLTPMEFQSSSIGFQFQNLIIDLPHSTISTNCITFYYHQDHILIDLIDQNYLFITLKIAIDRFILGGQQLTLDNFEEWGYISVPYSFELRSSPFLLKCLDNLNLIVSLKDGGLLHFKRDEELGEINVFNFQEQGTLIPFLGFFGSGKQKDVVLDGVSSNSIVDALQIGGSGVVITLSVNKVLKLWNLDGHQNLSSLTIASDDNTWLPTIPSKYLKSYDQEDGKTIITLFINTKSGDSSKSMFVFKSFELESSNLHDLSDLSFQPELPNSLLFSSDVFYHESNFQNTIWFIQDYEVVGFGTSQLKYYILWKSNTSSILVEYTINPVNGAILSIEISHPNGFEIDENISAYHDAEYYMDRIFDSGNYDSLIVLTSIKILSQHWEIDNDMVVTSQSIRQLAIDTINSKAESGTIKNYWFKLQSLCEEFKNLSQETLSLSVFDNQVLTLNVNGHGIFRKSAFFESFANQKLNSADGKLMSIFNKFETFISRKSYHKLHEELLQLRKISANEITNLFTKHIEGKISTNEIQTILKDLEQIPGIVEIVKSLIGSSGFELIVDANSISSKELGAFHKISTVMIFKNIMETHKTLLLDLVVLFLTCETNDQIVEFVNQIRATLVQYDVMEVVFTTCLNKGEVETKNMGQVQNSIFWSSVVATHSQLKRLIESLQLNDGYEYFYNNVLPDDYLVDVVIELINNKEYFFLQKKFLTKLNQENKVEKLLVGLIYLFNNDVKSFYKIFNDYSNFQNFTENKIKNLNQDVNLQKFIEALLSNPSKSQYFHGLSKLVQSQIKTNDNKSQQEEHCFIEIASDFETLAIENESDITIREEFYLNLFELSLPVSNYDITTKCLKNLTLSTNFKNLMTKFITKIIFQSKLDIIFPPNNNDDDFYGQHFSLIDSIIVKVAQDSNLSQSLRVYQYLYSWRLFGCMVAVVNNNKTLELGDKRGAIEALYEFITRFRIENPTGDVERKVKLKILEIYMIILNLLKSFENNQDQWFLKTNSYKETTTTRRRSIVSLNDLKLEYLEWLKNLDEDVSMFT

SEQ ID NO: 4867 - DNA, 3942 bp, Aspergillus fumigatus Af293
  CDS (1)..(3942)
atggcgaaaatctataaggatacaagagtcgaccttcggccatattcgccgaacaccgtcgccaacatccagattccaaaccaagagagctcgcggaaccgcgcccgattctcgatagccacatccttcgcgagtcttgaagaaccagcagcgaaagacgaggaggagttttctcgccgatacctagctacacaggggtcaatttacttccggaaacacaaagtgtatccccgaacctttctctggcgggtggttaatgacaacaaggtcctggagatccagtgcgtggatttgacgaagggagggattgaacatcatgaatacgacatcacattacgcttcgacttccaggaagagatccttccatccggggttgacatcgctgacttggaggatcatgacgtgttgagtgtgtttgtgatcacggcttccaagcagctgcacacgttgactctgcgcccggagttctttcgccgactagcggcaattgatgagaatgtatctgagtggtgtaaatcatgcacaccggcacctctggctttctcgcatccccatcggttacatgctagcagtccactcgagttgtttatttctctagatagcggcgcgctgctgcgcctgactaggagggctggtgacgatggctcgcattggactcctttgacatttgacgagagaacctggggggcgtcgattcgcggtctcgtccgatggcatgcgcaacccacgatcaagtaccagggacgcaaccttgatgtaaacgcggccaatgcgattgccactacctccgaccaaacttatgcattcgcggtttgcttgaaccatactctgaagatatggaacctcgctacgaatagactagccgccactaaggatctcttaaaccgaccagtacaacagcaggaatccgcagcatactcattaaaccccgccgaatcatcattcattcgtgtgtttaatgtggagagagctctggatggcggttatcgctactacatagtcacctactcgccctttgaggatgggcgcttcaaattctgggctgtcaaaggaggcctgacgtcgcagctggtcgtcgaggacctctttcctgacgctgcactgacgccgttggacccagaccctacaggcagcatgttctggagtatcgctgatttccaggtcaagcccatggaggaagggaagcgcatggagctgtgggtgctgtggagaaataacagcgtgtaccaactgtatacactgcatttcagcttcgagacgctggttacagactgggcgacgaattgggtgtccacggccatggacacgcggacacatgcatcatcacccgctgttacatcggcggatgcgctggacccgacagagaagtggttgagcttcctcctacagccgaaccgatactcgcctgaggtacttgagactgctttgtctgtttatcaggaagcacttcggcccctgtccttccctacggcaccaaagaaaagcgcgcctcttcaggaacgactctgttcgacggtcgctgccacagtttcccttcgtaagtatgcggaggatgacatggattttacaaggtaccggacagacacagactccaaatggcgccaattctggcagatcgcggaagacatcaacaagcgaagattcgcagcgattcgccttgcgtatgatgtctacaacgaagttccctggatgcttttctcggatagctgtgcagtcattcgcgaatgtagccctaccgagttgctcctgcataactcaggctccgagcttcgaacggaggggcccaagatagccgaccggtggagccacaggaacctgggctcggagattggcgatctttacgagcaggcatcgttcctgttgaaggttgcttccggttttaggaaacgtttcccccctgaactcgaagcagcgtgccactgcgcccttgaggcagaagtctatgcggagccttcatcgtccatcccagaccggatggatgcgttccgtgagcggtgcgacttcaccgagcaggtttccaataaaacttatgacggcctgcttgctgcaatgaatgagcgtttgaatatttacaacttgtcgaatgatgtcttctacaccatcattgacacgatacctctcggcttccctggcaaagattcagaacttcttcccactcgtttcggggtgaaagtaactgtcaacggcgcccaggagaccattgagaacacacggcagcttctcatcgacctgttactcctcgtggtcttcgtggacggagaggtccaacaggaggacgggtcgacttttgatgccggcgatctctttgctacgctcatctctcttttgagggaatacgagatgatgtcctggctcagctcgaacgtccgaaagtgtgccgacaagtctccgagtgtcattagtgatacgtccaactcgacgttttccctgaaagactccacacccaagggcaatggcgagcgagtcgtgactattttggaggatctcttcgccactgatattaaacctcgccaagctattggcttgccccagagctacatactgacactcggtattcgagatgtcctttcctgggtgactcgccaaggggaggtggcctacccgaacgcactggtttacattcagtgcgatctcattgcgaagaacaactttgaccttgcctgggatttcttgcgcttccaagcagccacatcatggtcaacttatgtgaagggtcgtttatatgtggcgatgtccgaattcgacactgcggctttgtacttccgtaaggctgcatacctcctctcatgcggtaaacctctcggcaacttgcatgagatgtcatcaacgctactggacatcgtctcggtagactgtttccacaacggaccccccaaatacttccaacatatcttgtcgatattcgaacaggcacgatccttttcccacgttgcagactttgccagccttgcactacaagcgctcgcaagtgaaaatagggatgaaaaggaccctgagcgtattaacatgcgcaccgacctgctctcgcgtcttttctatgcgtccttgaagacctgccaatttgacctggcctattcagcaatgtctcgatacgaggatcatgcactgcagcgatccgccctctcctctcttatcaccgccatattgaatgcctccggacctggcctgtctggacttcagcagattctacactttcccacatcgctcctcccaaatatcgccactcatgtggatgacacacttgtctcccttgctcggaagcagacctccttcaattctctattggaagccggaacaaagtgggccgacaccacaccagattatcagcgcatcctgcaagcataccgtgttgcccgtaatgattatcgcggagctgccgaaatcgcgtatcgaaacgtccaacgtctaagacatgctagagacagcccgtcgcatcatctggttctagccaaaggcagagatgctgacgatacgcggcagacggtcgaggaggacgacccggagagcaaggaaatccgcaacgagcttctgtctctgatcaacctacttggctgcgttgacaagagcgaagcctacatcctcgttgagaaggaagattcgacgcctgtggcccgccaccacggcgttccagcggacgatgacggcaatgtcttcatggacgatgcagataccagctctcttacacccacaggatctagacgcagtatcagctccagcacaagcgctatcaaacctcatactcccagagatagcaagtcctcggtctccggtgcgggtatcaacaaccaccgccaacggcgggtcatagtgactctcgaccacctccgtcgcgaataccagtctgagctggaccgagtcagcagaatcgaaagaggagattgggaattcgggcttcttgacgcgccggaagcagataatgatgatacaatgctccttgcttag

SEQ ID NO: 4868 - protein, 1313 aa, Aspergillus fumigatus Af293
MAKIYKDTRVDLRPYSPNTVANIQIPNQESSRNRARFSIATSFASLEEPAAKDEEEFSRRYLATQGSIYFRKHKVYPRTFLWRVVNDNKVLEIQCVDLTKGGIEHHEYDITLRFDFQEEILPSGVDIADLEDHDVLSVFVITASKQLHTLTLRPEFFRRLAAIDENVSEWCKSCTPAPLAFSHPHRLHASSPLELFISLDSGALLRLTRRAGDDGSHWTPLTFDERTWGASIRGLVRWHAQPTIKYQGRNLDVNAANAIATTSDQTYAFAVCLNHTLKIWNLATNRLAATKDLLNRPVQQQESAAYSLNPAESSFIRVFNVERALDGGYRYYIVTYSPFEDGRFKFWAVKGGLTSQLVVEDLFPDAALTPLDPDPTGSMFWSIADFQVKPMEEGKRMELWVLWRNNSVYQLYTLHFSFETLVTDWATNWVSTAMDTRTHASSPAVTSADALDPTEKWLSFLLQPNRYSPEVLETALSVYQEALRPLSFPTAPKKSAPLQERLCSTVAATVSLRKYAEDDMDFTRYRTDTDSKWRQFWQIAEDINKRRFAAIRLAYDVYNEVPWMLFSDSCAVIRECSPTELLLHNSGSELRTEGPKIADRWSHRNLGSEIGDLYEQASFLLKVASGFRKRFPPELEAACHCALEAEVYAEPSSSIPDRMDAFRERCDFTEQVSNKTYDGLLAAMNERLNIYNLSNDVFYTIIDTIPLGFPGKDSELLPTRFGVKVTVNGAQETIENTRQLLIDLLLLVVFVDGEVQQEDGSTFDAGDLFATLISLLREYEMMSWLSSNVRKCADKSPSVISDTSNSTFSLKDSTPKGNGERVVTILEDLFATDIKPRQAIGLPQSYILTLGIRDVLSWVTRQGEVAYPNALVYIQCDLIAKNNFDLAWDFLRFQAATSWSTYVKGRLYVAMSEFDTAALYFRKAAYLLSCGKPLGNLHEMSSTLLDIVSVDCFHNGPPKYFQHILSIFEQARSFSHVADFASLALQALASENRDEKDPERINMRTDLLSRLFYASLKTCQFDLAYSAMSRYEDHALQRSALSSLITAILNASGPGLSGLQQILHFPTSLLPNIATHVDDTLVSLARKQTSFNSLLEAGTKWADTTPDYQRILQAYRVARNDYRGAAEIAYRNVQRLRHARDSPSHHLVLAKGRDADDTRQTVEEDDPESKEIRNELLSLINLLGCVDKSEAYILVEKEDSTPVARHHGVPADDDGNVFMDDADTSSLTPTGSRRSISSSTSAIKPHTPRDSKSSVSGAGINNHRQRRVIVTLDHLRREYQSELDRVSRIERGDWEFGLLDAPEADNDDTMLLA

SEQ ID NO: 4869 - DNA, 24 bp, Artificial sequence
  primer
atggcatgcctctcaagaattgat

SEQ ID NO: 4870 - DNA, 25 bp, Artificial sequence
  primer
ctatagacctcgtaactcatctctt

SEQ ID NO: 4871 - protein, 1219 aa, Artificial sequence
  consensus sequence
  Variant (2)..(27): Xaa in position 2 to 27 is any amino acid
  Variant (28)..(34): Xaa in position 28 to 34 is any or no amino acid
  Variant (36)..(40): Xaa in position 36 to 40 is any amino acid
  Variant (42)..(48): Xaa in position 42 to 48 is any amino acid
  Variant (49)..(49): Xaa in position 49 is any or no amino acid
  Variant (51)..(52): Xaa in position 51 to 52 is any amino acid
  Variant (54)..(64): Xaa in position 54 to 64 is any amino acid
  Variant (65)..(66): Xaa in position 65 to 66 is any or no amino acid
  Variant (68)..(69): Xaa in position 68 to 69 is any amino acid
  Variant (74)..(74): Xaa in position 74 is any amino acid
  Variant (76)..(131): Xaa in position 76 to 131 is any amino acid
  Variant (132)..(144): Xaa in position 132 to 144 is any or no amino acid
  Variant (147)..(147): Xaa in position 147 is any amino acid
  Variant (149)..(149): Xaa in position 149 is any amino acid
  Variant (151)..(191): Xaa in position 151 to 191 is any amino acid
  Variant (192)..(218): Xaa in position 192 to 218 is any or no amino acid
  Variant (220)..(238): Xaa in position 220 to 238 is any amino acid
  Variant (239)..(255): Xaa in position 239 to 255 is any or no amino acid
  Variant (257)..(258): Xaa in position 257 to 258 is any amino acid
  Variant (259)..(259): Xaa in position 259 is any or no amino acid
  Variant (261)..(274): Xaa in position 261 to 274 is any amino acid
  Variant (275)..(287): Xaa in position 275 to 287 is any or no amino acid
  Variant (290)..(290): Xaa in position 290 is any amino acid
  Variant (292)..(296): Xaa in position 292 to 296 is any amino acid
  Variant (298)..(555): Xaa in position 298 to 555 is any amino acid
  Variant (556)..(661): Xaa in position 556 to 661 is any or no amino acid
  Variant (663)..(756): Xaa in position 663 to 756 is any amino acid
  Variant (757)..(806): Xaa in position 757 to 806 is any or no amino acid
  Variant (808)..(886): Xaa in position 808 to 886 is any amino acid
  Variant (887)..(968): Xaa in position 887 to 968 is any or no amino acid
  Variant (970)..(1017): Xaa in position 970 to 1017 is any amino acid
  Variant (1018)..(1038): Xaa in position 1018 to 1038 is any or no amino acid
  Variant (1040)..(1042): Xaa in position 1040 to 1042 is any amino acid
  Variant (1044)..(1049): Xaa in position 1044 to 1049 is any amino acid
  Variant (1050)..(1063): Xaa in position 1050 to 1063 is any or no amino acid
  Variant (1065)..(1065): Xaa in position 1065 is any amino acid
  Variant (1069)..(1070): Xaa in position 1069 to 1070 is any amino acid
  Variant (1072)..(1091): Xaa in position 1072 to 1091 is any amino acid
  Variant (1092)..(1121): Xaa in position 1092 to 1121 is any or no amino acid
  Variant (1123)..(1123): Xaa in position 1123 is any amino acid
  Variant (1125)..(1142): Xaa in position 1125 to 1142 is any amino acid
  Variant (1143)..(1212): Xaa in position 1143 to 1212 is any or no amino acid
  Variant (1214)..(1218): Xaa in position 1214 to 1218 is any amino acid
IXXXXXXXXXXXXXXXXXXXXXXXXXXXXXXXXXWXXXXXPXXXXXXXXPXXLXXXXXXXXXXXXXLXXGGLLXLXXXXXXXXXXXXXXXXXXXXXXXXXXXXXXXXXXXXXXXXXXXXXXXXXXXXXXXXXXXXXXXXXXXXXLKXWXLXXXXXXXXXXXXXXXXXXXXXXXXXXXXXXXXXXXXXXXXXXXXXXXXXXXXXXXXXXXXXXXXXXXXFXXXXXXXXXXXXXXXXXXXXXXXXXXXXXXXXXXXXWXXXDXXXXXXXXXXXXXXXXXXXXXXXXXXXLWXSXXXXXLXXXXXXXXXXXXXXXXXXXXXXXXXXXXXXXXXXXXXXXXXXXXXXXXXXXXXXXXXXXXXXXXXXXXXXXXXXXXXXXXXXXXXXXXXXXXXXXXXXXXXXXXXXXXXXXXXXXXXXXXXXXXXXXXXXXXXXXXXXXXXXXXXXXXXXXXXXXXXXXXXXXXXXXXXXXXXXXXXXXXXXXXXXXXXXXXXXXXXXXXXXXXXXXXXXXXXXXXXXXXXXXXXXXXXXXXXXXXXXXXXXXXXXXXXXXXXXXXXXXXXXXXXXXXXXXXXXXXXXXXXXXXXXXXXXXXXXXXXXXXXXXXXXXXXXXXXXXXXXXXXXXXXXXXXXXXXXXXXXXXXXXXXXXXXXXXXXXXXXXXXXXXLXXXXXXXXXXXXXXXXXXXXXXXXXXXXXXXXXXXXXXXXXXXXXXXXXXXXXXXXXXXXXXXXXXXXXXXXXXXXXXXXXXXXXXXXXXXXXXXXXXXXXXXXXXXXXXXXXXXXXXXXXXXXXXXXXXXXXXXXXXXXXXXXFXXXXXXXXXXXXXXXXXXXXXXXXXXXXXXXXXXXXXXXXXXXXXXXXXXXXXXXXXXXXXXXXXXXXXXXXXXXXXXXXXXXXXXXXXXXXXXXXXXXXXXXXXXXXXXXXXXXXXXXXXXXXXXXXXXXXXXXXXXXXXXXXXXXXXXXXXXXXXXXXXLXXXXXXXXXXXXXXXXXXXXXXXXXXXXXXXXXXXXXXXXXXXXXXXXXXXXXXXXXXXXXXXXXXXXXLXXXRXXXXXXXXXXXXXXXXXXXXRXAAEXXYXXXXXXXXXXXXXXXXXXXXXXXXXXXXXXXXXXXXXXXXXXXXXXXXXXNXLXXXXXXXXXXXXXXXXXXXXXXXXXXXXXXXXXXXXXXXXXXXXXXXXXXXXXXXXXXXXXXXXXXXXXXXXXXXXXXXXXXXXXXXXLXXXXXE

SEQ ID NO: 4872 - DNA, 909 bp, Saccharomyces cerevisiae
  CDS (1)..(909)
atgttttccagattatccagatctcactcaaaagcattaccgattgctctaggtacagttgctatagcagctgctaccgcattctattttgcaaaccgtaaccaacattcctttgtcttcaatgaatctaataaagtgttcaaaggtgatgacaaatggatcgacttgccaatatctaaaatagaggaggaatcccacgacaccagaaggtttacttttaagctgcctaccgaagactcagaaatggggttggtcctagcatctgctctgtttgctaaatttgtcacaccaaagggatccaatgtggtgagaccatacactcctgtgagtgatctttcccagaagggtcacttccagctggtcgtcaagcattatgaaggtggtaaaatgacctcacatttatttggtcttaaaccaaatgacaccgtttctttcaagggtcctattatgaaatggaagtggcaacctaatcagttcaagtcaatcaccttgttaggtgccggtaccggtatcaaccctctgtaccaattagctcatcatatagttgaaaacccaaacgacaagaccaaagttaacttgctatatgggaacaagactcctcaggacattttactaaggaaggaactggatgcgttgaaggaaaagtatcctgacaagttcaatgttacttactttgttgacgacaagcaagatgaccaagactttgatggtgaaattagtttcatctccaaagattttattcaggagcatgttccaggtccaaaggaaagcacacatttgtttgtctgcggtcccccaccatttatgaacgcttactcaggtgagaagaagtcacctaaggaccaaggtgaattgatcggtatcttgaacaatttgggctactccaaggaccaagttttcaaattttaa

SEQ ID NO: 4873 - protein, 302 aa, Saccharomyces cerevisiae
MFSRLSRSHSKALPIALGTVAIAAATAFYFANRNQHSFVFNESNKVFKGDDKWIDLPISKIEEESHDTRRFTFKLPTEDSEMGLVLASALFAKFVTPKGSNVVRPYTPVSDLSQKGHFQLVVKHYEGGKMTSHLFGLKPNDTVSFKGPIMKWKWQPNQFKSITLLGAGTGINPLYQLAHHIVENPNDKTKVNLLYGNKTPQDILLRKELDALKEKYPDKFNVTYFVDDKQDDQDFDGEISFISKDFIQEHVPGPKESTHLFVCGPPPFMNAYSGEKKSPKDQGELIGILNNLGYSKDQVFKF

SEQ ID NO: 4874 - DNA, 906 bp, Homo sapiens
  CDS (1)..(906)
atgggggcccagctcagcacgttgggccatatggtgctcttcccagtctggttcctgtacagtctgctcatgaagctgttccagcgctccacgccagccatcaccctcgagagcccggacatcaagtacccgctgcggctcatcgaccgggagatcatcagccatgacacccggcgcttccgctttgccctgccgtcaccccagcacatcctgggcctccctgtcggccagcacatctacctctcggctcgaattgatggaaacctggtcgtccggccctatacacccatctccagcgatgatgacaagggcttcgtggacctggtcatcaaggtttacttcaaggacacccatcccaagtttcccgctggagggaagatgtctcagtacctggagagcatgcagattggagacaccattgagttccggggccccagtgggctgctggtctaccagggcaaagggaagttcgccatccgacctgacaaaaagtccaaccctatcatcaggacagtgaagtctgtgggcatgatcgcgggagggacaggcatcaccccgatgctgcaggtgatccgcgccatcatgaaggaccctgatgaccacactgtgtgccacctgctctttgccaaccagaccgagaaggacatcctgctgcgacctgagctggaggaactcaggaacaaacattctgcacgcttcaagctctggtacacgctggacagagcccctgaagcctgggactacggccagggcttcgtgaatgaggagatgatccgggaccaccttccacccccagaggaggagccgctggtgctgatgtgtggccccccacccatgatccagtacgcctgccttcccaacctggaccacgtgggccaccccacggagcgctgcttcgtcttctga

SEQ ID NO: 4875 - protein, 301 aa, Homo sapiens
MGAQLSTLGHMVLFPVWFLYSLLMKLFQRSTPAITLESPDIKYPLRLIDREIISHDTRRFRFALPSPQHILGLPVGQHIYLSARIDGNLVVRPYTPISSDDDKGFVDLVIKVYFKDTHPKFPAGGKMSQYLESMQIGDTIEFRGPSGLLVYQGKGKFAIRPDKKSNPIIRTVKSVGMIAGGTGITPMLQVIRAIMKDPDDHTVCHLLFANQTEKDILLRPELEELRNKHSARFKLWYTLDRAPEAWDYGQGFVNEEMIRDHLPPPEEEPLVLMCGPPPMIQYACLPNLDHVGHPTERCFVF

SEQ ID NO: 4876 - DNA, 714 bp, Homo sapiens
  CDS (1)..(714)
atgaactccaggaggagagagccaatcaccttacaggaccctgaagccaagtacccgctgcccttgattgagaaagagaaaatcagccacaacacccggaggttccgctttggactgccttcgccggaccatgtcttagggcttcctgtaggtaactatgtccagctcttggcaaaaatcgataatgaattggtggtcagggcttacacccctgtctccagtgatgatgacagaggctttgtggacctaattataaagatctacttcaaaaatgtacacccccaatatcctgaaggtgggaagatgactcagtatttggagaacatgaaaatcggggagaccatcttttttcgagggccaaggggacgcttgttttaccatgggccagggaatcttggaatcagaccagaccagacgagtgagcctaaaaaaacactggccgatcacctgggaatgattgctgggggcacaggcatcacacccatgttgcagctcattcgccacatcaccaaggaccccagtgacaggaccaggatgtccctcatctttgccaaccagacagaggaggatatcttggtcagaaaagagcttgaagaaattgccaggactcacccagaccagttcaacctgtggtacaccctggacaggcctcccattggtccctggtcggcagagggcgctaccctactgagcaattctgcgcagttccactaa

SEQ ID NO: 4877 - protein, 237 aa, Homo sapiens
MNSRRREPITLQDPEAKYPLPLIEKEKISHNTRRFRFGLPSPDHVLGLPVGNYVQLLAKIDNELVVRAYTPVSSDDDRGFVDLIIKIYFKNVHPQYPEGGKMTQYLENMKIGETIFFRGPRGRLFYHGPGNLGIRPDQTSEPKKTLADHLGMIAGGTGITPMLQLIRHITKDPSDRTRMSLIFANQTEEDILVRKELEEIARTHPDQFNLWYTLDRPPIGPWSAEGATLLSNSAQFH

SEQ ID NO: 4878 - DNA, 918 bp, Rattus norvegicus
  CDS (1)..(918)
atggggatccagccgagcccggtcttgctagcctctctgggggtggggctgtttaccctgttcggcctggctctgggtacctacttggttcgaagatcccgccggccacaggtcactctccaggacccggatgagaagtacctgctgcgattgctggacaagacgacagtgagccacaacaccaggaggttccgctttgccctgcccaccgcccaccacattctggggctgcctgtgggtaagcacgtctacctctctgcccgaattgatggcagtcaggtcatcaggccttacactcctgtcaccagcgatgaagaccagggctatgtagatcttgtcatcaaggtttatctgaaaggtgtgcaccccaaattttctgaaggagggaagatgtctcagtacctggatagcctgaagattggggatgtggtggagttccgggggccgagtgggttgctcagttatgctgggaaagggaattttaacattcagcccaacaaaaaatccccacctgaactgcgagtggctaagaaattgggaatgattgctggcgggacaggaatcaccccaatgctgcagctgatccgggccatcttgaaagtccctgaagatccaacccagtgctttctgctttttgccaaccagactgaaaaggacataatcctgcgggaggacctagaggagctgcaggcccaatatcctatccgctttaagctctggttcaccctggactaccctccagaagactggacctacagcaagggctttgttaccgccgacatgatccaggagcacctgcctgccccagcagaggatgtgctgctgctgctttgtgggccaccacctatggtacagctggcctgccacccgaacctggataagctgggctattcacagaagatgcgattcacctactga

SEQ ID NO: 4879 - protein, 305 aa, Rattus norvegicus
MGIQPSPVLLASLGVGLFTLFGLALGTYLVRRSRRPQVTLQDPDEKYLLRLLDKTTVSHNTRRFRFALPTAHHILGLPVGKHVYLSARIDGSQVIRPYTPVTSDEDQGYVDLVIKVYLKGVHPKFSEGGKMSQYLDSLKIGDVVEFRGPSGLLSYAGKGNFNIQPNKKSPPELRVAKKLGMIAGGTGITPMLQLIRAILKVPEDPTQCFLLFANQTEKDIILREDLEELQAQYPIRFKLWFTLDYPPEDWTYSKGFVTADMIQEHLPAPAEDVLLLLCGPPPMVQLACHPNLDKLGYSQKMRFTY

SEQ ID NO: 4880 - DNA, 831 bp, Rattus norvegicus
  CDS (1)..(831)
atgagcgtcaagaagaaagatcttatcactttacaggaccctgaagccaagtacccgctgcccttgattgagaaagagcaaatcaaccacaacaccagaaggttccgatttggactgccctcaccagaccatgtcctagggcttcctgtaggtaactatgtccatctcttggcacaaattaacaatgaattggtgatcagggcttacacgcctgtctccagtgacgatgatcaaggatttgtggacttaattataaagatctacttcaaaaatgtgcaccctaagtatcctgaaggaggaaagatgactcagtacttggagaatatgaaaattggggacaccattctttttcgggggccaacggggcgcctgttctataatgagccagggacccttttaatcaaaacagacaaaacgagtgagcctgaaaaaaagctggttcatcacctggggatgattgctggaggcacaggcattacgcccatgctacagctaattcgccacatcaccaaggacaccagcgatgggaccaggatgtccctcctctttgccaaccagacagaagaggatatcttgctgagaaaggagctagaagaagtggccacaacgcatcagaaccagttcagcctgtggtataccctggacaggccccccagtggttgggagtacagctcaggcttcattactgcagacatgatcaaggagcacctccctcctcctggggaggccacactcatcctggtatgtggcccaccacctctgatccaggaggcagctcaccccagcctggagcagcttggctacaccaaggacatgatttttacctactaa

SEQ ID NO: 4881 - protein, 276 aa, Rattus norvegicus
MSVKKKDLITLQDPEAKYPLPLIEKEQINHNTRRFRFGLPSPDHVLGLPVGNYVHLLAQINNELVIRAYTPVSSDDDQGFVDLIIKIYFKNVHPKYPEGGKMTQYLENMKIGDTILFRGPTGRLFYNEPGTLLIKTDKTSEPEKKLVHHLGMIAGGTGITPMLQLIRHITKDTSDGTRMSLLFANQTEEDILLRKELEEVATTHQNQFSLWYTLDRPPSGWEYSSGFITADMIKEHLPPPGEATLILVCGPPPLIQEAAHPSLEQLGYTKDMIFTY

SEQ ID NO: 4882 - DNA, 915 bp, Xenopus tropicalis
  CDS (1)..(915)
atggagatttccacagactctaacatgctggtagccctggcagtaatcggggtaactgtgttactgttcctgattaaagcgctgggatctcaggctaagaaagcgccgctcactctgctggaccccaatgccaagtacccactacctctcatagagaaacaggaaatcagccacgacaccaagaaattcaggtttgggctcccctcgcaagagcatgtcttggggctccctgtaggtcagcatgtttacctctctgccaagatcaatgggagcctggtcgttcgggcgtatacgccggtgtctagtgatgaagtcaagggccacgtggatctgatagtgaaggtatattacaaaaacgttcatcccaaattcccagagggaggcaaaatgtcccaacacctggacagtcttaaaataggggaaacaattgatttccggggtccaaatgggcttcttgtctacaaagagaagggtaagtttgccatcaggccagataagaagtccgaaccaaagcttaaggtggccaaacatgtcggaatgcttgccggaggaactggtattacacccatgttacagctgatccggcagatcacccaggatcccaatgataatacaaaatgctccctcatatttgctaaccagacagaagacgacattttgctgcgttatgaactggaaactgtagccaagagccacccggagcagtttaagctgtggtatacactggatcggcccccgcaaggctggaagtacggcgctggctttgtcaccgcagacatgattaaagagcacctaccgcccccatccgaggatgtcgttgtgctgatgtgcgggcctcctcccatgatccagtttgcgtgccaggacaacctgaccaagcttgggtaccccgaggccggaaggtttgcctactag

SEQ ID NO: 4883 - protein, 304 aa, Xenopus tropicalis
MEISTDSNMLVALAVIGVTVLLFLIKALGSQAKKAPLTLLDPNAKYPLPLIEKQEISHDTKKFRFGLPSQEHVLGLPVGQHVYLSAKINGSLVVRAYTPVSSDEVKGHVDLIVKVYYKNVHPKFPEGGKMSQHLDSLKIGETIDFRGPNGLLVYKEKGKFAIRPDKKSEPKLKVAKHVGMLAGGTGITPMLQLIRQITQDPNDNTKCSLIFANQTEDDILLRYELETVAKSHPEQFKLWYTLDRPPQGWKYGAGFVTADMIKEHLPPPSEDVVVLMCGPPPMIQFACQDNLTKLGYPEAGRFAY

SEQ ID NO: 4884 - DNA, 837 bp, Homo sapiens
  CDS (1)..(837)
atgaagctgttccagcgctccacgccagccatcaccctcgagagcccggacatcaagtacccgctgcggctcatcgaccgggagatcatcagccatgacacccggcgcttccgctttgccctgccgtcaccccagcacatcctgggcctccctgtcggccagcacatctacctctcggctcgaattgatggaaacctggtcgtccggccctatacacccatctccagcgatgatgacaagggcttcgtggacctggtcatcaaggtttacttcaaggacacccatcccaagtttcccgctggagggaagatgtctcagtacctggagagcatgcagattggagacaccattgagttccggggccccagtgggctgctggtctaccagggcaaagggaagttcgccatccgacctgacaaaaagtccaaccctatcatcaggacagtgaagtctgtgggcatgatcgcgggagggacaggcatcaccccgatgctgcaggtgatccgcgccatcatgaaggaccctgatgaccacactgtgtgccacctgctctttgccaaccagaccgagaaggacatcctgctgcgacctgagctggaggaactcaggaacaaacattctgcacgcttcaagctctggtacacgctggacagagcccctgaagcctgggactacggccagggcttcgtgaatgaggagatgatccgggaccaccttccacccccagaggaggagccgctggtgctgatgtgtggccccccacccatgatccagtacgcctgccttcccaacctggaccacgtgggccaccccacggagcgctgcttcgtcttctga

SEQ ID NO: 4885 - protein, 278 aa, Homo sapiens
MKLFQRSTPAITLESPDIKYPLRLIDREIISHDTRRFRFALPSPQHILGLPVGQHIYLSARIDGNLVVRPYTPISSDDDKGFVDLVIKVYFKDTHPKFPAGGKMSQYLESMQIGDTIEFRGPSGLLVYQGKGKFAIRPDKKSNPIIRTVKSVGMIAGGTGITPMLQVIRAIMKDPDDHTVCHLLFANQTEKDILLRPELEELRNKHSARFKLWYTLDRAPEAWDYGQGFVNEEMIRDHLPPPEEEPLVLMCGPPPMIQYACLPNLDHVGHPTERCFVF

SEQ ID NO: 4886 - DNA, 831 bp, Homo sapiens
  CDS (1)..(831)
atgaactccaggaggagagagccaatcaccttacaggaccctgaagccaagtacccgctgcccttgattgagaaagagaaaatcagccacaacacccggaggttccgctttggactgccttcgccggaccatgtcttagggcttcctgtaggtaactatgtccagctcttggcaaaaatcgataatgaattggtggtcagggcttacacccctgtctccagtgatgatgacagaggctttgtggacctaattataaagatctacttcaaaaatgtacacccccaatatcctgaaggtgggaagatgactcagtatttggagaacatgaaaatcggggagaccatcttttttcgagggccaaggggacgcttgttttaccatgggccagggaatcttggaatcagaccagaccagacgagtgagcctaaaaaaacactggccgatcacctgggaatgattgctgggggcacaggcatcacacccatgttgcagctcattcgccacatcaccaaggaccccagtgacaggaccaggatgtccctcatctttgccaaccagacagaggaggatatcttggtcagaaaagagcttgaagaaattgccaggactcacccagaccagttcaacctgtggtacaccctggacaggcctcccattggctggaagtacagctcaggcttcgttactgccgacatgatcaaggagcaccttcctcctccagcgaagtccacgctcatcctggtgtgtggcccgccaccactaatccagacggcggctcaccctaacctggagaagctgggttatacccaggacatgattttcacctactaa

SEQ ID NO: 4887 - protein, 276 aa, Homo sapiens
MNSRRREPITLQDPEAKYPLPLIEKEKISHNTRRFRFGLPSPDHVLGLPVGNYVQLLAKIDNELVVRAYTPVSSDDDRGFVDLIIKIYFKNVHPQYPEGGKMTQYLENMKIGETIFFRGPRGRLFYHGPGNLGIRPDQTSEPKKTLADHLGMIAGGTGITPMLQLIRHITKDPSDRTRMSLIFANQTEEDILVRKELEEIARTHPDQFNLWYTLDRPPIGWKYSSGFVTADMIKEHLPPPAKSTLILVCGPPPLIQTAAHPNLEKLGYTQDMIFTY

SEQ ID NO: 4888 - DNA, 918 bp, Homo sapiens
  CDS (1)..(918)
atggggatccagacgagccccgtcctgctggcctccctgggggtggggctggtcactctgctcggcctggctgtgggctcctacttggttcggaggtcccgccggcctcaggtcactctcctggaccccaatgaaaagtacctgctacgactgctagacaagacgactgtgagccacaacaccaagaggttccgctttgccctgcccaccgcccaccacactctggggctgcctgtgggcaaacatatctacctctccacccgaattgatggcagcctggtcatcaggccatacactcctgtcaccagtgatgaggatcaaggctatgtggatcttgtcatcaaggtctacctgaagggtgtgcaccccaaatttcctgagggagggaagatgtctcagtacctggatagcctgaaggttggggatgtggtggagtttcgggggccaagcgggttgctcacttacactggaaaagggcattttaacattcagcccaacaagaaatctccaccagaaccccgagtggcgaagaaactgggaatgattgccggcgggacaggaatcaccccaatgctacagctgatccgggccatcctgaaagtccctgaagatccaacccagtgctttctgctttttgccaaccagacagaaaaggatatcatcttgcgggaggacttagaggaactgcaggcccgctatcccaatcgctttaagctctggttcactctggatcatcccccaaaagattgggcctacagcaagggctttgtgactgccgacatgatccgggaacacctgcccgctccaggggatgatgtgctggtactgctttgtgggccacccccaatggtgcagctggcctgccatcccaacttggacaaactgggctactcacaaaagatgcgattcacctactga

SEQ ID NO: 4889 - protein, 305 aa, Homo sapiens
MGIQTSPVLLASLGVGLVTLLGLAVGSYLVRRSRRPQVTLLDPNEKYLLRLLDKTTVSHNTKRFRFALPTAHHTLGLPVGKHIYLSTRIDGSLVIRPYTPVTSDEDQGYVDLVIKVYLKGVHPKFPEGGKMSQYLDSLKVGDVVEFRGPSGLLTYTGKGHFNIQPNKKSPPEPRVAKKLGMIAGGTGITPMLQLIRAILKVPEDPTQCFLLFANQTEKDIILREDLEELQARYPNRFKLWFTLDHPPKDWAYSKGFVTADMIREHLPAPGDDVLVLLCGPPPMVQLACHPNLDKLGYSQKMRFTY

SEQ ID NO: 4890 - DNA, 918 bp, Mus musculus
  CDS (1)..(918)
atggggatccagccgagcccggtcttgctagcctctctgggggtggggctgcttactctgctcggcctggctctgggtacctacttggttcgaagatcccgccggccgcaggttactctccaggacccggatgagaagtacctgctgcgattgctagacaagacgacagtgagccacaacaccaggaggttccgctttgccttgcccaccgcccaccacattctggggctgcctgtgggtaagcacgtctacctctctgcccgaattgatggcagtctggtcatcaggccttacacccctgtcaccagtgatgaagaccaaggctatgtagatcttgtcatcaaggtttatctgaaaggtgtgcaccccaaatttcctgaaggagggaagatgtctcaatacctggatagcctgaagattggggatatggtggagttccgggggccgagcgggttgctcagttatgctgggaaagggaattttaatattcagcccaacaaaaaatctccacctgaactgcgagtggcgaagaaattgggaatgattgctggtgggacaggaatcaccccaatgctgcagctgatccgggccatcttgaaagtccctgaagatccaacccagtgctttctgctttttgccaaccagactgaaagggatataatcctgcgggaggacctagaggaacttcaggcccagtatcctaatcgctttaagctctggttcactctggactctcctccagaagactggacctacagcaagggctttgttacggctgacatgatccaggagcacctgcctgccccagcagaggatgtgctgctgctgctctgtggaccaccacccatggtgcagctggcctgccaccctaacttggataagctgggctattcacaaaagatgcgattcacctactga

SEQ ID NO: 4891 - protein, 305 aa, Mus musculus
MGIQPSPVLLASLGVGLLTLLGLALGTYLVRRSRRPQVTLQDPDEKYLLRLLDKTTVSHNTRRFRFALPTAHHILGLPVGKHVYLSARIDGSLVIRPYTPVTSDEDQGYVDLVIKVYLKGVHPKFPEGGKMSQYLDSLKIGDMVEFRGPSGLLSYAGKGNFNIQPNKKSPPELRVAKKLGMIAGGTGITPMLQLIRAILKVPEDPTQCFLLFANQTERDIILREDLEELQAQYPNRFKLWFTLDSPPEDWTYSKGFVTADMIQEHLPAPAEDVLLLLCGPPPMVQLACHPNLDKLGYSQKMRFTY

SEQ ID NO: 4892 - DNA, 906 bp, Mus musculus
  CDS (1)..(906)
atgggggcccagctgagcacgttgagccacgtggtgctctcgcccgtctggttcatctacagtctcttcatgaagctgtttcagcgctccacaccggccatcaccctcgagaaccccgacatcaagtaccctctgaggctcatcgacaaggaggtcatcagtcctgacactcggcgcttccgatttgccctcccttcaccccagcacatcctgggccttcctattggccaacacatctacctctcgactaggatcgatggcaacttggtcattcggccctacacccctgtgtcgagcgatgatgacaagggctttgtggacttggtggtcaaggtttacttcaaggacacccatcccaagtttccagctggagggaaaatgtctcagtacctggaaaacatgaagattggagacaccattgaattccggggtcccaatgggctactggtctaccagggcaaagggaagtttgccatccgtgcagacaagaagtccaaccccgttgtcaggacggtgaagtctgtaggcatgattgcaggagggacaggcatcaccccaatgctgcaggtgatccgagccgtcctgaaggacccaaacgaccacaccgtgtgctatctgctctttgccaaccagtccgagaaagatatcctgttgcggcctgagctggaggaactgaggaacgaacattctgctcgcttcaagctctggtacacagtggacaaagcccctgatgcctgggactatagccagggcttcgtgaatgaggagatgatcagggaccaccttccaactcctggggaggagccgctgatactgatgtgtggacccccaccaatgatccagtttgcctgtttgccaaacctggagcgtgtgggccatcccaaggagcgatgcttcaccttctga

SEQ ID NO: 4893 - protein, 301 aa, Mus musculus
MGAQLSTLSHVVLSPVWFIYSLFMKLFQRSTPAITLENPDIKYPLRLIDKEVISPDTRRFRFALPSPQHILGLPIGQHIYLSTRIDGNLVIRPYTPVSSDDDKGFVDLVVKVYFKDTHPKFPAGGKMSQYLENMKIGDTIEFRGPNGLLVYQGKGKFAIRADKKSNPVVRTVKSVGMIAGGTGITPMLQVIRAVLKDPNDHTVCYLLFANQSEKDILLRPELEELRNEHSARFKLWYTVDKAPDAWDYSQGFVNEEMIRDHLPTPGEEPLILMCGPPPMIQFACLPNLERVGHPKERCFTF

SEQ ID NO: 4894 - DNA, 846 bp, Arabidopsis thaliana
  CDS (1)..(846)
atggataccgagtttctccgaaccctagatcgtcagattcttttgggtgtcttcgttgctttcgtcgccgttggtgctggtgctgcttattttcttacatcctccaagaaacgcagagtgtgtttggatccagagaatttcaaggagttcaagcttgttaagagacatcagcttagtcacaatgtggccaagttcgtttttgaactcccaacttctacttctgtgttgggtcttcccattggacaacacatcagttgcaggggaaaggatggtcaaggagaggatgttattaagccatacaccccgactacgttagactctgacgttggacgtttcgaacttgtcattaagatgtatccgcaaggacggatgtctcatcatttcagggagatgcgtgttggagaccatcttgccgtaaagggaccaaagggtaggttcaagtatcaaccaggtcagtttagggcatttggaatgcttgctggaggttcaggcatcactcccatgttccaagtggccagagcaattctagaaaacccaacagacaagacaaaggtgcatctcatttacgccaacgtcacatacgacgacattctcttgaaggaagaattggagggtcttactaccaattaccctgaacaatttaaaatcttctatgttttgaaccagcctccggaagtatgggatggtggtgttggatttgtatcaaaggaaatgattcagactcattgccctgcacctgcatctgatattcagatcctaagatgcggaccaccgccaatgaacaaggccatggctgcaaaccttgaagctctgggatactctccggagatgcaattccagttctga

SEQ ID NO: 4895 - protein, 281 aa, Arabidopsis thaliana
MDTEFLRTLDRQILLGVFVAFVAVGAGAAYFLTSSKKRRVCLDPENFKEFKLVKRHQLSHNVAKFVFELPTSTSVLGLPIGQHISCRGKDGQGEDVIKPYTPTTLDSDVGRFELVIKMYPQGRMSHHFREMRVGDHLAVKGPKGRFKYQPGQFRAFGMLAGGSGITPMFQVARAILENPTDKTKVHLIYANVTYDDILLKEELEGLTTNYPEQFKIFYVLNQPPEVWDGGVGFVSKEMIQTHCPAPASDIQILRCGPPPMNKAMAANLEALGYSPEMQFQF

SEQ ID NO: 4896 - DNA, 930 bp, Caenorhabditis elegans
  CDS (1)..(930)
atggtggagaataacactctcataatcacaggaggagtggtcgtagtttcgagtattgctatctacatttatttgaaagcaacaaatacatgccccttctcactttgtaaaaagagcaagaaacgaactcttgtcgatgattctgtcaagtatccacttccgttgattgaaaagttcgagatcagtcatgacacgagaaaattccgattcggattaccatcgaaggatcatattcttgggcttccaatcggccaacacgtttacctcaccgcaaatattgatggaaagattatcgttcgcccatatactccagtatccagcgatgaagatctaggattcgttgatttgatggtgaaggtttacttcaagaacacaaatgagaaattcccagaaggtggaaaaatgagtcaacatttggagagcctcaagattggagacacgatcaatttccgcgggccacaaggaaatattgtttacaaaggtcacggattgttcagcatcaaagccgataagaaggccgagccgaagaatcgagttttcaagcatctttccatgattgctggaggaaccggaatcacaccaatgcttcaagtcattgctgccattcttcgtgatccaactgacaccactcagatcagacttttgtttgcaaatcagactgaggacgatattctgtgcagacaggaacttgacgatcttgcaaaggagcatccaactcgtttccgtgtatggtatacagtcgatagaccaccagtgatgtggagctattcctctggattcatcaatgacagcatgatcaaggaaaacctcttcccacctggcgatgattctgctgttctcttgtgcggaccaccaccaatgatcaactttgcttgcattccgaaccttgagaagctcgaatacgacccagcaaatcgtcttctcttctag

SEQ ID NO: 4897 - protein, 309 aa, Caenorhabditis elegans
MVENNTLIITGGVVVVSSIAIYIYLKATNTCPFSLCKKSKKRTLVDDSVKYPLPLIEKFEISHDTRKFRFGLPSKDHILGLPIGQHVYLTANIDGKIIVRPYTPVSSDEDLGFVDLMVKVYFKNTNEKFPEGGKMSQHLESLKIGDTINFRGPQGNIVYKGHGLFSIKADKKAEPKNRVFKHLSMIAGGTGITPMLQVIAAILRDPTDTTQIRLLFANQTEDDILCRQELDDLAKEHPTRFRVWYTVDRPPVMWSYSSGFINDSMIKENLFPPGDDSAVLLCGPPPMINFACIPNLEKLEYDPANRLLF

SEQ ID NO: 4898 - DNA, 912 bp, Caenorhabditis elegans
  CDS (1)..(912)
atggttgagaacaatacacttgcgataactggaggcgtggtacttatttcaagtgtttctctatttttgtatttgagacaactcagggctgaaaaaaaatcaaaaagaacgcttgaagacgattcggtcaaatatttgcttcctctcatagaaaagttcgagatcagtcacaatacgagaaaattccgattcggattaccatcgaaggatcatattctaggacttcccattggacatcatgtgtatcttagtgccaatattggtggaaagcttatagttcgatcctataccccagtgtcttgtgacttagacttgggatatgtagatttgatggttaaagtgtattttaagaatacacatgaaagattcccggatggtgggaaaatgagccaacatttggagagcctcaagattggagatactgttagcttccgtggtccacatggaagcataatttataagggaagtggtctattcactgtacgaatggataagaaggccgagccaaagaatcgatttttcaagcatctttccatgattgctggaggtaccggaatcacaccgatgcttcaagtcattgccgccattcttcgtgatccaattgacgctactcagatcagacttctgtttgcaaatcagaccgaagacgatattctgtgcaggaaagagctcgacgagctagccgagaagcatccaactcgtttccgtgtatggtatactgtaagcaaagcgtcaaaagattggagatattctacagggcatataaatgaggaaatgatcaaggaacatctattcccttccaatgaggaatctgctgtgctgttgtgtggaccaccagcaatgatcaactgtgcgtgcattccaaatcttgataagcttggacacaattcagaaaattaccttatattctag

SEQ ID NO: 4899 - protein, 303 aa, Caenorhabditis elegans
MVENNTLAITGGVVLISSVSLFLYLRQLRAEKKSKRTLEDDSVKYLLPLIEKFEISHNTRKFRFGLPSKDHILGLPIGHHVYLSANIGGKLIVRSYTPVSCDLDLGYVDLMVKVYFKNTHERFPDGGKMSQHLESLKIGDTVSFRGPHGSIIYKGSGLFTVRMDKKAEPKNRFFKHLSMIAGGTGITPMLQVIAAILRDPIDATQIRLLFANQTEDDILCRKELDELAEKHPTRFRVWYTVSKASKDWRYSTGHINEEMIKEHLFPSNEESAVLLCGPPAMINCACIPNLDKLGHNSENYLIF

SEQ ID NO: 4900 - DNA, 906 bp, Schizosaccharomyces pombe 972h-
  CDS (1)..(906)
atggccaaacaaactcttcttagtaccccgttgcatggagtctatattccagtgtttttgatcatctttggtacttacattgtgaaacgcgaatgggtgggttacgctattgttgtggcattctctcttggttttcataagttctggcgtggacgcgttcgtaaagtattgagtgataaaattcaacaatttgaacttagtgataaagctgtattgaaccacaacactgccatttatcgtttccgtctgcctcgcgctaacgatgttcttggtctccccataggacaacatttaaaggtctttgttgatgttgatggtaaggagtattccagatcttacactcctctgtcttccgatgctgacaaaggttattttgatttgctcgtaaagtcttaccccaatggcaaagtgagtaagaagttttctgaacttaagattggtgataccatcggtgttcgtggccctaagggaaattggaagcatcgcactggcctcgcgcgccattttggcatgatcgcaggcggaacaggtattactcctatgcttcaaatcattcgtgctgttctttctaattttgaagatccaacggaaatcactcttttatatgctaatgtatcagagggtgatattgttcttcgtgatgagattgacgcacttgctaagaaggatcctcgttttaccgttcattatgttttgaacaatcctcctgaaaactggaagggaagtgttggatttgttactcaagaacttatcaaggcgcatttccctgctccttctcctgaaaccaaagttcttatttgtggccctactcccatggttaattcactcagagaagctacagttgcattgggatatgaaaagtcccgagccatttcgaagcttgaggatcaagtatttgtcttttag

SEQ ID NO: 4901 - protein, 301 aa, Schizosaccharomyces pombe 972h-
MAKQTLLSTPLHGVYIPVFLIIFGTYIVKREWVGYAIVVAFSLGFHKFWRGRVRKVLSDKIQQFELSDKAVLNHNTAIYRFRLPRANDVLGLPIGQHLKVFVDVDGKEYSRSYTPLSSDADKGYFDLLVKSYPNGKVSKKFSELKIGDTIGVRGPKGNWKHRTGLARHFGMIAGGTGITPMLQIIRAVLSNFEDPTEITLLYANVSEGDIVLRDEIDALAKKDPRFTVHYVLNNPPENWKGSVGFVTQELIKAHFPAPSPETKVLICGPTPMVNSLREATVALGYEKSRAISKLEDQVFVF

SEQ ID NO: 4902 - DNA, 1461 bp, Rattus norvegicus
  CDS (1)..(1461)
atggattggatccgattgaccaaaagtggaaaggacttcacgggattgaagggcgggttaattgaagtaacagaagaagaacttaagaagcacaacaagaaagacgactgttggatatgcataagagggtttgtttacaatgtcagcccatatatggagtatcatcctggtggggaggatgagcttatgagagccgcaggagcagatggaacggatctttttaatgaggtgcatcgttgggtcaattatgaatccatgctgaaagagtgcctggttggcaggatggctgtgaagcccgctgttccgaaagactgtcatgaaggaaagagagtcttaaatggcatgcttcccaagagccaagtgacagacacactgcccagggaaggccccagttctccaagctatgattggttccaaacagagtcttcagtgaccattgttatatacaccaagcagaagaatatcaatttagactcagtaatcgttgacctccaggatgactccttgagagcagaagcagtcatcaaggatcattcttatcttatacatattgggttaagccatgaagttcaagaaaatttttctgtacgggttattgagaatgttggaaaaatagagattgtcctacaaaagaaagaaactgtttcttggaaatgtcttggtgatcccctggagaaacatgattcttttattccaaagaaagatacaggcttgtactatagacagtgccagttaatttccaaggaagacgttactcatgacacaaggctcttctgtctgatgctgcctcccagtactcaccttcaggtgccagttgggcaacatgtttacctcaagctcagtgtcacaggtgcagaaatagtaaagccatatacacccgtgtctgagtccttactctcagattttaaagaaccagttctttccccaaataagtacatctactttttgatcaaaatctatcctgctggactcttcacgccagaacttgatcgtcttcagattggagattttgtttctgtaagtggtcctgagggcaattttaaagtttccaaactccaggaagtggaagatctctttttattggcagccggaacaggcttcacaccaatggttactgtactgaatcacgctttaactcacatgtccagtctcaggaaggtgaagttaatgttcttcaataaaacagaggatgacataatttggagatgccagctagagaaattggcattaaaagataaaagatttcatgttgaatatgttctctcggcaccttccccagaatggaatggcaaacagggacacgtgtcacgagctcttctctctgaatttttgcaacgaagtttagaaaattctaaagtcttcctttgcatctgtggaccaaccccatttacagatgaggggataaggttgctgcatgatcttaacttttccgatgatgagattcatggttttacagcataa

SEQ ID NO: 4903 - protein, 486 aa, Rattus norvegicus
MDWIRLTKSGKDFTGLKGGLIEVTEEELKKHNKKDDCWICIRGFVYNVSPYMEYHPGGEDELMRAAGADGTDLFNEVHRWVNYESMLKECLVGRMAVKPAVPKDCHEGKRVLNGMLPKSQVTDTLPREGPSSPSYDWFQTESSVTIVIYTKQKNINLDSVIVDLQDDSLRAEAVIKDHSYLIHIGLSHEVQENFSVRVIENVGKIEIVLQKKETVSWKCLGDPLEKHDSFIPKKDTGLYYRQCQLISKEDVTHDTRLFCLMLPPSTHLQVPVGQHVYLKLSVTGAEIVKPYTPVSESLLSDFKEPVLSPNKYIYFLIKIYPAGLFTPELDRLQIGDFVSVSGPEGNFKVSKLQEVEDLFLLAAGTGFTPMVTVLNHALTHMSSLRKVKLMFFNKTEDDIIWRCQLEKLALKDKRFHVEYVLSAPSPEWNGKQGHVSRALLSEFLQRSLENSKVFLCICGPTPFTDEGIRLLHDLNFSDDEIHGFTA

SEQ ID NO: 4904 - DNA, 906 bp, Rattus norvegicus
  CDS (1)..(906)
atgggggcccagctgagcacgttgagccgagtggtactctccccggtctggttcgtctacagcctcttcatgaagctgtttcagcgctcctcaccggccatcaccctcgagaaccccgacatcaagtaccctctgcggctcatcgacaaggagattatcagccacgacactcggcgcttccgatttgcactcccttcgccccagcacatcctgggccttcctatcggccagcacatctacctctccaccaggatcgatggcaacttggtcattcgtccctacacccctgtgtctagtgatgatgacaagggctttgtggacttggtggtcaaggtttacttcaaggacacgcatcccaagtttccagctggagggaaaatgtctcagtacctggaaaacatgaatattggagacaccattgaattccggggccccaatgggctactggtctaccagggcaaagggaagttcgccatccgtgcagacaagaagtccaaccctgttgtcaggacggtgaagtctgtaggcatgattgcaggagggacaggcatcaccccaatgctgcaggtgatccgagccgtcttgaaggacccgaacgaccacactgtgtgctatctgctcttcgccaaccagtccgagaaagacatcctgctgcggcctgagctggaggaactgaggaacgaacattcttctcgcttcaagctctggtacacagtggacaaagcccccgatgcctgggactatagccaaggcttcgtgaatgaggagatgatcagggaccatcttccacctcctggggaggagacactgatactgatgtgtggacccccaccgatgatccagtttgcctgtttgccaaacctggagcgtgtgggccatcccaaggagcgatgcttcaccttctga

SEQ ID NO: 4905 - protein, 301 aa, Rattus norvegicus
MGAQLSTLSRVVLSPVWFVYSLFMKLFQRSSPAITLENPDIKYPLRLIDKEIISHDTRRFRFALPSPQHILGLPIGQHIYLSTRIDGNLVIRPYTPVSSDDDKGFVDLVVKVYFKDTHPKFPAGGKMSQYLENMNIGDTIEFRGPNGLLVYQGKGKFAIRADKKSNPVVRTVKSVGMIAGGTGITPMLQVIRAVLKDPNDHTVCYLLFANQSEKDILLRPELEELRNEHSSRFKLWYTVDKAPDAWDYSQGFVNEEMIRDHLPPPGEETLILMCGPPPMIQFACLPNLERVGHPKERCFTF

SEQ ID NO: 4906 - DNA, 951 bp, Drosophila melanogaster
  CDS (1)..(951)
atggcccgcatcgttgaaagcaattttgtgccactcgccgtgggtgtggtagccgtactcgccggcgccctgatcgtccactatctgctgaataagaagtccacgaaaccacgccgggaacccaatcgcaccgctcggctgcgcacacttgtggatcccaatgacaagtacctgctgcctctcatcgaaaaggagaatctgagccatgacactaggagattccggtttggattgccctccaagcagcatgtccttggcctgcccgttggccagcacattcatctgatcgccaccatcgacaatgagctaataattcggccatacactccgatatcgtctgatgaggatgtgggctacgtggacctagtcgtcaaggtgtacttcaaggattcgcatcccaagttcccggccggcggcaaaatgacacaacacctggagcagctcgagttgggggacaagatctcgttccgtggtccctcgggtaggctacaatatctcggcaatggcaccttctccatcaaaaagttgcgcaaggatcctccaaagcacgtgaccgccaagcgggtcaacatgattgccggcggcactggcattactccaatgcttcaattggccagggaagttctcaagcgcagcgataaggataagactgaactggcgttgctgttcgccaatcagagcgaaaaggacattctactgcgtgcagagttggacgaactggcccagaagcatcctgaccagttcaagatctggtacacagtcgacaaggcaaacgaaggttggcagtatagcgttggcttcatcaatgaggaaatgatcgccgcccacctgcttccggccaaggacgataccattgtgttgctttgcggcccaccaccaatgattaactttgcctgcaatccggcgctggacaagcttggctaccatccggacacccgttttgcctactaa

SEQ ID NO: 4907 - protein, 316 aa, Drosophila melanogaster
MARIVESNFVPLAVGVVAVLAGALIVHYLLNKKSTKPRREPNRTARLRTLVDPNDKYLLPLIEKENLSHDTRRFRFGLPSKQHVLGLPVGQHIHLIATIDNELIIRPYTPISSDEDVGYVDLVVKVYFKDSHPKFPAGGKMTQHLEQLELGDKISFRGPSGRLQYLGNGTFSIKKLRKDPPKHVTAKRVNMIAGGTGITPMLQLAREVLKRSDKDKTELALLFANQSEKDILLRAELDELAQKHPDQFKIWYTVDKANEGWQYSVGFINEEMIAAHLLPAKDDTIVLLCGPPPMINFACNPALDKLGYHPDTRFAY

SEQ ID NO: 4908 - DNA, 942 bp, Drosophila melanogaster
  CDS (1)..(942)
atgacggaattcgattttgtgccactcgccgtgggtgtggtagccgtactcgccggcgccctgatcgtccactatctgctgaataagaagtccacgaaaccacgccgggaacccaatcgcaccgctcggctgcgcacacttgtggatcccaatgacaagtacctgctgcctctcatcgaaaaggagaatctgagccatgacactaggagattccggtttggattgccctccaagcagcatgtccttggcctgcccgttggccagcacattcatctgatcgccaccatcgacaatgagctaataattcggccatacactccgatatcgtctgatgaggatgtgggctacgtggacctagtcgtcaaggtgtacttcaaggattcgcatcccaagttcccggccggcggcaaaatgacacaacacctggagcagctcgagttgggggacaagatctcgttccgtggtccctcgggtaggctacaatatctcggcaatggcaccttctccatcaaaaagttgcgcaaggatcctccaaagcacgtgaccgccaagcgggtcaacatgattgccggcggcactggcattactccaatgcttcaattggccagggaagttctcaagcgcagcgataaggataagactgaactggcgttgctgttcgccaatcagagcgaaaaggacattctactgcgtgcagagttggacgaactggcccagaagcatcctgaccagttcaagatctggtacacagtcgacaaggcaaacgaaggttggcagtatagcgttggcttcatcaatgaggaaatgatcgccgcccacctgcttccggccaaggacgataccattgtgttgctttgcggcccaccaccaatgattaactttgcctgcaatccggcgctggacaagcttggctaccatccggacacccgttttgcctactaa

SEQ ID NO: 4909 - protein, 313 aa, Drosophila melanogaster
MTEFDFVPLAVGVVAVLAGALIVHYLLNKKSTKPRREPNRTARLRTLVDPNDKYLLPLIEKENLSHDTRRFRFGLPSKQHVLGLPVGQHIHLIATIDNELIIRPYTPISSDEDVGYVDLVVKVYFKDSHPKFPAGGKMTQHLEQLELGDKISFRGPSGRLQYLGNGTFSIKKLRKDPPKHVTAKRVNMIAGGTGITPMLQLAREVLKRSDKDKTELALLFANQSEKDILLRAELDELAQKHPDQFKIWYTVDKANEGWQYSVGFINEEMIAAHLLPAKDDTIVLLCGPPPMINFACNPALDKLGYHPDTRFAY

SEQ ID NO: 4910 - DNA, 831 bp, Mus musculus
  CDS (1)..(831)
atgagtgtcaagaagaaagatcttatcaccttacaggaccctgaagccaagtacccgctgcccttgattgagaaggagcaaatcagtcacaacaccagaaggttccgctttgggctgccctcaccagaccatgtcctggggcttcctgtcggtaactatgtccatctcttggcacaaattaacaatgaattggtgatcagggcttacacacctgtctccagtgacgatgatcaaggctttgtggacttaattataaagatctacttcaaaaatgtgcaccccaagtatcctgaaggaggaaagatgactcagtacttggagaacatgaaaattggggataccatcctttttcgggggccaacagggcgcctgttctacaatgagccaggaacccttttaatcaaagcaaacaaaacaagtgagcctgaaaaaaagctggttcaccacctggggatgattgctggaggcacaggcattacgcccatgctacagctgattcgccacatcaccaaggacaccagcgatgagaccaggatgtccctcctctttgctaaccagacagaagaggatatcttgctgagaaaggagctagaagaagtcgccacgactcatcacaaacagttcaacctgtggtataccctggacaggcctcccagtgactggaagtacagctcaggctttgttagcgctgacatgatcaaggagcacctccctcctcctggggaggacacgctcatcctggtgtgtggcccaccacctctgatccaggcggcagctcaccccagcctggagcagctcagctataccaaggacatgatttttatctactaa

SEQ ID NO: 4911 - protein, 276 aa, Mus musculus
MSVKKKDLITLQDPEAKYPLPLIEKEQISHNTRRFRFGLPSPDHVLGLPVGNYVHLLAQINNELVIRAYTPVSSDDDQGFVDLIIKIYFKNVHPKYPEGGKMTQYLENMKIGDTILFRGPTGRLFYNEPGTLLIKANKTSEPEKKLVHHLGMIAGGTGITPMLQLIRHITKDTSDETRMSLLFANQTEEDILLRKELEEVATTHHKQFNLWYTLDRPPSDWKYSSGFVSADMIKEHLPPPGEDTLILVCGPPPLIQAAAHPSLEQLSYTKDMIFIY

SEQ ID NO: 4912 - DNA, 885 bp, Oryza sativa (japonica cultivar-group)
  CDS (1)..(885)
atggcggcgctgctgcttcgtaggctcgccgggacccaccgcggccgcgtgcctctggccgccgccgccgccgtcaccggtggagcggcgctcttctgcgcctcgtctcccccaaccatcgcgctcatggaggagaagggcgaggatgccgctgctaaagttgcgcttaacccagacaagtggctagagttcaagctccaggagaaggcaacagttagccacaattcacaattatttagggctccaataggagaggaagtggagggaggaagaaaatttgtcattcgcccgtacacacctatctctgatccagattctaaaggatattttgacctgctaatcaaggtaacacaaagtttaatgtctgaagttcagaacatgctagttgcttttagatcagcagttcttgtagtccagtgtaaggtttatcctgatgggaaaatgagtcagtatttcgcaagtctgaaaccaggagatgttgttgaggtcaaagggcccattgaaaagctcagatatagcccaaatatgaagaaacaaattggcatgatcgctggtgggactggcataacaccaatgctgcaggttgtcagggctatcctaaaaaaccctgatgacaacactcaggtttccttaatttatgccaatgtgtcaccagatgatatcttgctgaaaagggaattagatagacttgccagtagctatcctaatttcaaggtattctacacggtggacaaaccatcaaatgattggaggggtggtgttggctacatatccaaggacattgccttgaaaggtttgccacggccaggggaggattctctgatccttctcaccggcattctgaaagagttaggatacactgcagagatggtatacaagttctga

SEQ ID NO: 4913 - protein, 294 aa, Oryza sativa (japonica cultivar-group)
MAALLLRRLAGTHRGRVPLAAAAAVTGGAALFCASSPPTIALMEEKGEDAAAKVALNPDKWLEFKLQEKATVSHNSQLFRAPIGEEVEGGRKFVIRPYTPISDPDSKGYFDLLIKVTQSLMSEVQNMLVAFRSAVLVVQCKVYPDGKMSQYFASLKPGDVVEVKGPIEKLRYSPNMKKQIGMIAGGTGITPMLQVVRAILKNPDDNTQVSLIYANVSPDDILLKRELDRLASSYPNFKVFYTVDKPSNDWRGGVGYISKDIALKGLPRPGEDSLILLTGILKELGYTAEMVYKF

SEQ ID NO: 4914 - DNA, 915 bp, Danio rerio
  CDS (1)..(915)
atgagctacgcgatgtccaccacagtagcagtgacggttggagtggtgctggtgtcaacagctgggctgctgggttattattacttcaacaggaagaggaaaatactcataaccctaattgatccttctgaaaaatacaagttgcgactagtagacaaagagatcataagtcatgatacccggagatttcggttcgccctgcctagtccagagcatgttttgggattaccagtgggcaagcatgtttatctctctgccaggattgatgggaatctgattgtgcgtccttacacaccggtgtccagcgatgatgacaaaggattcgttgatctagtcgtgaagatttattttagggatgtgcacccaaagtttcctgaagggggaaagatgtcccaatacctggagagtttgcggatcggagatgtgattgacttcagaggaccaggaggtttgctggagtacaagggcgcaggtcgcttggatatacaggccgataagaaggcccctgcagagaccaagactgtaaaatctctgggtcttattgctggaggaacaggcattacgccaatgttgcagctgattcgtgacatcaccaagaacccaaatgacacgactacatgcagcctgttgtttgccaatcagactgagaaggacattctgctgaaggatgagctggaggagattcaggccaggcattctgatcgcttcaaactctggttcaccgtggaccgagctccggcagattgggagtacagtcagggcttcatcagcgctgagatgattcaggaccatcttcctccacccagtgatgactctatgatcctgatgtgtggtccacctcctatgatccagttcgcctgtaatccaaacctggacaagctgggctacaggcagagccagcgcttcgcctattag

SEQ ID NO: 4915 - protein, 304 aa, Danio rerio
MSYAMSTTVAVTVGVVLVSTAGLLGYYYFNRKRKILITLIDPSEKYKLRLVDKEIISHDTRRFRFALPSPEHVLGLPVGKHVYLSARIDGNLIVRPYTPVSSDDDKGFVDLVVKIYFRDVHPKFPEGGKMSQYLESLRIGDVIDFRGPGGLLEYKGAGRLDIQADKKAPAETKTVKSLGLIAGGTGITPMLQLIRDITKNPNDTTTCSLLFANQTEKDILLKDELEEIQARHSDRFKLWFTVDRAPADWEYSQGFISAEMIQDHLPPPSDDSMILMCGPPPMIQFACNPNLDKLGYRQSQRFAY

SEQ ID NO: 4916 - DNA, 921 bp, Eremothecium gossypii
  CDS (1)..(921)
atgttgtccagaataacgagatccagcaaggcattaaactttgcgctcggtactaccgcagtcgcagccgccggctacctgtacgcgcagtcgcgcgggaatctgagcaccagtctgaacaaaggcgacgtgaccgggcaggcagcagcgcagacattcaccggggatggccaatggcacgcactgaagattgccaagatcgagcaagtttcgcacgacacgcgccgtttcaccttcgcgcttccttctcaggatcacgtgacaggtttgaccactgcgtcagcgctgctagccaagtatgtgactccaaagggctccaacgtgatcagaccatacaccccagtcagtgacaacatggcgcgcgggatgttccagctggtgatcaaacattacgacggcggcaagttcacgacccacctctttgggcttaaggaaaacgacactgtggagttcaagggacctatacagaagtggcgctgggaccccaacatgtttgactcgattgtgctcatgggtgccggtacgggtattacccctctgttccagatgatgcatcatatcgcggaaaacccaactgacaacaccaaggtgcatcttctgtacggcaacaagaccccccaggacattctgctacgcaaggaactcgaggagctagcttcgaagtaccctgaccaggtgaaggtaacgtatttcgtggacaaaccagagggtgactacaagggtgagaagggctttatcacgaaagacttcttgaagcagaacttgccaaccccgggctccaactcgcacatctttgtatgcgggcccccaccatttatggacgcgttttccggcaacaaggtatccccatctgaccagggtcaggttacgggtgtcctatctgagctaggctacaccaaggaccatgtttacaagttctaa

SEQ ID NO: 4917 - protein, 306 aa, Eremothecium gossypii
MLSRITRSSKALNFALGTTAVAAAGYLYAQSRGNLSTSLNKGDVTGQAAAQTFTGDGQWHALKIAKIEQVSHDTRRFTFALPSQDHVTGLTTASALLAKYVTPKGSNVIRPYTPVSDNMARGMFQLVIKHYDGGKFTTHLFGLKENDTVEFKGPIQKWRWDPNMFDSIVLMGAGTGITPLFQMMHHIAENPTDNTKVHLLYGNKTPQDILLRKELEELASKYPDQVKVTYFVDKPEGDYKGEKGFITKDFLKQNLPTPGSNSHIFVCGPPPFMDAFSGNKVSPSDQGQVTGVLSELGYTKDHVYKF

SEQ ID NO: 4918 - DNA, 864 bp, Eremothecium gossypii
  CDS (1)..(864)
atggattacaagtttgaagccctagtcaccgcactggtactggctgtgagtttcatttttatctacggcaagttcagcggagcgaagcagagccaaccagcggtcaagacaacgctgaataaggactggcaagagttctcactgttgaccaaaactgtgttaacccacaatacagcgatataccggtttggactgcctgaggccgatgccgtgctcgggcttcctatcgggcagcacatctcgatcagcggagtcatcgacggaaaggagatgttgcgctcgtacacgccgacgtcgctagattcagatgcaaccgggtactttgagctgctggtgaagtcgtacgagaagggtaacatctcgaagatgctggcggagctcgcgattggggaccggatcaaggtccgcggaccaaagggcttctaccactacgagcccaacatgtacaaggagatcggcatgattgcgggcggcaccggaatttctcccatgtaccagattattcgtgcgattttctcgaacccgcgggacaagacgcgagtctgcttggtgtacggtaaccagacaaaggacgatattttgctgaagcccgagcttgacgcgatggttgctgccaagccggaccagtttaagatcctctacatgttggataaagtcgctgaaggcgaacagtgggagggaaaactgggatacatcaccgaggcgatcatgcgcgagcacctaccggcgcctagcagcagtgcgcaactgctgctgtgcggcccgccaccaatggtttcttcggccaagcgcattgctgtttcgctgggatttgagaaggcgaaacctatttctaagaagggtgaccaagtttttgcattctaa

SEQ ID NO: 4919 - protein, 287 aa, Eremothecium gossypii
MDYKFEALVTALVLAVSFIFIYGKFSGAKQSQPAVKTTLNKDWQEFSLLTKTVLTHNTAIYRFGLPEADAVLGLPIGQHISISGVIDGKEMLRSYTPTSLDSDATGYFELLVKSYEKGNISKMLAELAIGDRIKVRGPKGFYHYEPNMYKEIGMIAGGTGISPMYQIIRAIFSNPRDKTRVCLVYGNQTKDDILLKPELDAMVAAKPDQFKILYMLDKVAEGEQWEGKLGYITEAIMREHLPAPSSSAQLLLCGPPPMVSSAKRIAVSLGFEKAKPISKKGDQVFAF

SEQ ID NO: 4920 - DNA, 933 bp, Eremothecium gossypii
  CDS (1)..(933)
atgaccgaacgcagaggtatggagatattggatgatcccattcatgggatcttcatccccagcggcatctttacattgggcgttcttgttatcgcctggtcagcggggaacgcatggtaccttctaggcattctagctttggcaatgtttgtaggtgcacgcctgctactagcatacagaagcaggacttcaattcttccaaatgagtggacgccattagaattggaagaacggatcgttctaagcaaaaatgctgcgatatacagattcaagctccgttcaagcgtggaaactcttgatatacctactggctttcatttagctgcgaaggtgatgctggatggtgtagaagaagtgcgttactacacgcctatctccaacaaatttgccgagggccatttcgatatcattgtcaaatcttatgtcgacggtaaggtatccaaatggtttgctgggctacagccaggccaaactgtggaattcaaaggtcctgtaggacggttcagctatgtgacgaatgcgtacaagaaaatcggtatggtcaccgggggctctgcaattacgccgatgttgagtgttctcaacaagatcgttacaactcctgaagataccacgcaagtgtgcttaatttacgccaatgagacggaaaacgatatcctgttgaaagatgaattggacgatcttgccagcaagtacccaaactttgaagtacactacgttgtacgcaaaccctcggccagctggacgggtgaagttggctatgtgactaagcagcatcttgaaaaataccttccgccatgcaatccagcccacagactactcatctgtggaccacctaaaatgaagcagatggtgttggaatacgctgaacagttggggtggcccaaaggcgccatgaagtcaaagccagaagaccaagtttttgttttctga

SEQ ID NO: 4921 - protein, 310 aa, Eremothecium gossypii
MTERRGMEILDDPIHGIFIPSGIFTLGVLVIAWSAGNAWYLLGILALAMFVGARLLLAYRSRTSILPNEWTPLELEERIVLSKNAAIYRFKLRSSVETLDIPTGFHLAAKVMLDGVEEVRYYTPISNKFAEGHFDIIVKSYVDGKVSKWFAGLQPGQTVEFKGPVGRFSYVTNAYKKIGMVTGGSAITPMLSVLNKIVTTPEDTTQVCLIYANETENDILLKDELDDLASKYPNFEVHYVVRKPSASWTGEVGYVTKQHLEKYLPPCNPAHRLLICGPPKMKQMVLEYAEQLGWPKGAMKSKPEDQVFVF

SEQ ID NO: 4922 - DNA, 897 bp, Danio rerio
  CDS (1)..(897)
atgtctttcatctttaacctcatcactggtagctgtcaattcgtgcttgattttctccgaagactctttggttttaagtcgagaccagccatcacccttgaagatcccgatgtaaaatacccattgcgtcttgttgacaaagagattataagccatgacacaagaagatttcgatttgctttaaaatcacccgatcatgttcttggacttcctattggtcaacacatctacttgtctgccaaaattgatggcaaccttgtggtgaggccttacacgccggtgtctagtgatgatgataagggcttcgtggatctagttgtcaagatatactacaaaaatatccatccaaagtttccagacggaggcaagatgtcccaatacttggagagccttcgcattggtgacacaattgatttcaggggaccaagtggactgctggtttacaaaggcaaaggatcgtttgcaatcaggccagataagaaatcagacgctgtgataaaaactgctaaacatgttggcatgattgctgggggaacaggcattactcccatgctccagatcatccaagcagtcatgaaagatccaaaggatgacacagtgtgttacttactctttgcaaaccagacagaaaaagacattctcctacgccctgagttggaggagatcatggccaatcacccgacacggtttaagctgtggtacaccgtcgacagagcaccagacggttgggagtacagtcaaggcttcatcaatgaagacatggtgagaaagcaccttccttcacccggaaacgaaacactcgtcttgatgtgtggacctcctcccatgattcagttcgcctgcaacccaagtctggacaaggtgggccattccaatgacaggcgcttcatgttctag

SEQ ID NO: 4923 - protein, 298 aa, Danio rerio
MSFIFNLITGSCQFVLDFLRRLFGFKSRPAITLEDPDVKYPLRLVDKEIISHDTRRFRFALKSPDHVLGLPIGQHIYLSAKIDGNLVVRPYTPVSSDDDKGFVDLVVKIYYKNIHPKFPDGGKMSQYLESLRIGDTIDFRGPSGLLVYKGKGSFAIRPDKKSDAVIKTAKHVGMIAGGTGITPMLQIIQAVMKDPKDDTVCYLLFANQTEKDILLRPELEEIMANHPTRFKLWYTVDRAPDGWEYSQGFINEDMVRKHLPSPGNETLVLMCGPPPMIQFACNPSLDKVGHSNDRRFMF

SEQ ID NO: 4924 - DNA, 1032 bp, Neurospora crassa
  CDS (1)..(1032)
atgagtctgttcgttgctagcaccagatccgccttccgggctgccgcccccatcaagaggtctttccagacccgccgctcctatgcgaccgagccttccaagggtggcagcagcagcaccatcctcctcggtgctgccgctgttggtcttgccggcgccggcgcctactttttctccggcgctggtgccgccaagaaggctgaggccagcgttaagcaggtgaccgagaagatcacccccggcgagatcaagaaggccttcgtcggcggcgaccagggatggctcagcctcaagctcgaggaggttgagctggtcaaccacaacaccaagcgcctgcgcttcagactccctgaggacgacatggtgtctggcctccatgttgccagcgccatcctcaccaagttcaagcctatcgatgctgagaaggctgtcctcaggccttacactcccatcagcgacgagagtgcccagggctacattgacctcctggtcaagaagtacgagggtggtcccatgagcacctacctccatgacatggctcccggccagcgcctcgacatcaagggccctcttcccaagtacccctgggaggctaacaagcacaagcacatcgccctcgttgctggcggcaccggtatcactcccatgtaccagctcatccgcgccatcttcaacaaccccgatgacaagaccaaggttactctcgtcttcggcaacgttagcgaggaggacgttctcctcaagcacgagctcgccaccatcgagaaccactacccccagcgcttccgcgctttctacgtcctcgacaaccctcccaaggagtgggccggtaacaagggctacatcaacaaggacctcctcaagaccgtccttcctgagcccaagaacgaggatatcaagatcttcgtctgcggcccacccggcatgatgaactccatctccggcaacaagaagagccccagggaccagggcgagctgaccggtatcctcaaggagctcggctactctcccgatcaggtatacaagttctaa

SEQ ID NO: 4925 - protein, 343 aa, Neurospora crassa
MSLFVASTRSAFRAAAPIKRSFQTRRSYATEPSKGGSSSTILLGAAAVGLAGAGAYFFSGAGAAKKAEASVKQVTEKITPGEIKKAFVGGDQGWLSLKLEEVELVNHNTKRLRFRLPEDDMVSGLHVASAILTKFKPIDAEKAVLRPYTPISDESAQGYIDLLVKKYEGGPMSTYLHDMAPGQRLDIKGPLPKYPWEANKHKHIALVAGGTGITPMYQLIRAIFNNPDDKTKVTLVFGNVSEEDVLLKHELATIENHYPQRFRAFYVLDNPPKEWAGNKGYINKDLLKTVLPEPKNEDIKIFVCGPPGMMNSISGNKKSPRDQGELTGILKELGYSPDQVYKF

SEQ ID NO: 4926 - DNA, 1053 bp, Ustilago maydis 521
  CDS (1)..(1053)
atgttcatccgacctgtcctctcgtcttcgctcggccacgcggctcgctcgagcctgcgatcgcaggcgccagctgtgcgccagtacgctaccgaggctggcaagtcctctggcggctcgaaccttcctctggtgcttgctctcggtggtgttgcgggtattggtgcatggtacggactcggaggctttgatgaccccaagaaagtatcgaacaagatccaagagaagggcaaggaggctgtcgaccaggccaagggtgctgtcgagggcggcgctctcaacaaggaccagtttgtcgagttcaccttgaaggagatcaagccgtacaaccatgactcggccacgctcatctttgagttgccggagggcaagaagcctgggatgggcgttgcttccgcggtggtcgtcaaggctgtcggtgacggtctcaaggacgaccagggcaaggatgtgattcgcccttacacccctattacttcgcccgatacagtcggtcacatggacttcctcgtcaagaagtaccccggcggaaagatgaccacctacatgcactcgatgaagcctggtgacaagctcggcatcaagggccccatcgccaagttcgcgtacaaggccaacgagttcgagtcaattggtatgatcgccggtgggtctggcatcactccgatgtatcaggtcatccaggatattgcctcgaacccgtcggacaaaaccaaggtcacgctcatctactcgaacaagaccgaacaggatattttgctgcgcgaacagtttgatcaactggccaagaaggatgaccgcttcaccattatctacggcctcgacaagcttcccaagggcttcaacggtttcgagggatatgtgaccgaggacctggtcaagaagcacctgccgcagcccgagttggccgacaaggccaagatctttgtttgcggacctcctccccaggttgaggctatcagcggtaaaaagggccctaagggtagccagggcgaattgaagggtctgcttgccaagctgggctaccaggctgatcaggtttacaagttctag

SEQ ID NO: 4927 - protein, 350 aa, Ustilago maydis 521
MFIRPVLSSSLGHAARSSLRSQAPAVRQYATEAGKSSGGSNLPLVLALGGVAGIGAWYGLGGFDDPKKVSNKIQEKGKEAVDQAKGAVEGGALNKDQFVEFTLKEIKPYNHDSATLIFELPEGKKPGMGVASAVVVKAVGDGLKDDQGKDVIRPYTPITSPDTVGHMDFLVKKYPGGKMTTYMHSMKPGDKLGIKGPIAKFAYKANEFESIGMIAGGSGITPMYQVIQDIASNPSDKTKVTLIYSNKTEQDILLREQFDQLAKKDDRFTIIYGLDKLPKGFNGFEGYVTEDLVKKHLPQPELADKAKIFVCGPPPQVEAISGKKGPKGSQGELKGLLAKLGYQADQVYKF

SEQ ID NO: 4928 - DNA, 897 bp, Candida glabrata CBS138
  CDS (1)..(897)
atggcctttgctagatttgcacgccctacacagagattcttaccatttgcaattggtgctgttgccgtcacagctggtgctctatatttgaatggttggaataccataaagaatgagaaccctaaggtctttatcggtgatagaaaatggattgacctagaattggaaaagatcattgaggaatctcatgacactaagagatttttcttcaaactaccaaccgatgattcagtcagtggtttgactcttgcatctgctgtgctaacaaagtttatgactccaaaaggcaaccctgttatcagaccatacaccccagttagtgacttgtcagaaaagggttacatagagtttgtaatcaagcattatgaaggtggtaagatgactgaccacctgttccaattaaagccaaaggacactttggcttttcagggccctatccctaaatggcaatggaagccaaactcctttgatactataactttgctaggtggtggtactggtattactccattatatcaattagttcaccacattacccaaaataaggaagacaagactaaaatcaacctattttacggcagtaagacaccatctgacatcttgttaaagaaagaattagatgacttacagaagaaatacccagaacaactcaacattcaatactttgttgacaaggacgacaccggaaagttcgatggaaataagggcttcatcaccaaggatttcttagctaagaatgccccaggtccaaaggaaaaaacgcaagtttttgtttgcggtcctccaccattcatggattctttatctggtcaaaagaagtcaccaatggaacaaggtgacctaactggtgctttgaaagatttgggttattctcaagatcaagtattcaagttttag

SEQ ID NO: 4929 - protein, 298 aa, Candida glabrata CBS138
MAFARFARPTQRFLPFAIGAVAVTAGALYLNGWNTIKNENPKVFIGDRKWIDLELEKIIEESHDTKRFFFKLPTDDSVSGLTLASAVLTKFMTPKGNPVIRPYTPVSDLSEKGYIEFVIKHYEGGKMTDHLFQLKPKDTLAFQGPIPKWQWKPNSFDTITLLGGGTGITPLYQLVHHITQNKEDKTKINLFYGSKTPSDILLKKELDDLQKKYPEQLNIQYFVDKDDTGKFDGNKGFITKDFLAKNAPGPKEKTQVFVCGPPPFMDSLSGQKKSPMEQGDLTGALKDLGYSQDQVFKF

SEQ ID NO: 4930 - DNA, 891 bp, Kluyveromyces lactis NRRL Y-1140
  CDS (1)..(891)
atgttcgctagactgtccagatctaataagtttttgccaattgccctcggtgttggtgctgcttccattgctactgctattattctacaaagaaattattcgatcatgaacgacacttccaaagcctttttgggtgataacgaatggattgatttaccaatcatcaagatcgagaaattgtctcatgataccaagagatttacttttgctttgccaaagaaggatcaagtttctggtttgatcactgcctcttgtatcttggccaagttcgttactccaaagggttctaacgtcattagaccatacactccagtgagtgacaacggtaccaagggtaagatggaattggtggttaagcattacgaaaacggtaagtttacctctcatttgttcggtttgaaggaaaacgataccgtttcctttaaaggtccaattactaagtgggagtggaagccaaactcttacgattccatcactttgttaggcgctggtaccggtattaacccattgtaccaattagttcaccatattgctgaaaacccagaggataacaccaagatccatttgtactacggtaacaagactccagaagacatcttgctgaagagcgaattggacaacttgcaaaagaagtaccctgatcaagtcaagatcacatacttcgtcgacaaggcagaaggcaacttcgaaggtgaaactggtttcatcaccaaggactacttgtctcatcaagctccaaagccatccgaaaagaaccaagtcttcgtctgtggtcctcctccattcatgaaagcttattctggtccaaaggtctccccacaagaccaaggtgaattgactggtatcttggctgaactaggttactccaagagtaacgtcttcaagttctga

SEQ ID NO: 4931 - protein, 296 aa, Kluyveromyces lactis NRRL Y-1140
MFARLSRSNKFLPIALGVGAASIATAIILQRNYSIMNDTSKAFLGDNEWIDLPIIKIEKLSHDTKRFTFALPKKDQVSGLITASCILAKFVTPKGSNVIRPYTPVSDNGTKGKMELVVKHYENGKFTSHLFGLKENDTVSFKGPITKWEWKPNSYDSITLLGAGTGINPLYQLVHHIAENPEDNTKIHLYYGNKTPEDILLKSELDNLQKKYPDQVKITYFVDKAEGNFEGETGFITKDYLSHQAPKPSEKNQVFVCGPPPFMKAYSGPKVSPQDQGELTGILAELGYSKSNVFKF

SEQ ID NO: 4932 - DNA, 846 bp, Kluyveromyces lactis NRRL Y-1140
  CDS (1)..(846)
atggttcctgggaagttcattttcactgcgacctttgtgttactgtgcactatcattgccgttgttttggaataccaatcaaagaaggataagccagtgctagataaggagaagttacaggaatttccattggtggcaaagacagtgttgactcataatactgctatttacagatttggtttaccaaagtctacacaggtattagggcttccaattggtcaacatatttctgttcaagcaaacatcaatggcaaggatattttaaggtcttatacaccaacttcgttggactcggacgccgtcggtcactttgaacttttaattaagtcctacgaaaagggtaacatttcaaagcattttgcacagctcaacattggtgacaaaattaaggtacgtggcccaaagggtttctaccattaccaacctaacatgaatgaagaaatcggtatgatcgctggtggtactggtattgctccaatgtatcaaattatgaaatcaatttttgccaacgattccgataaaaccaaggtatctttagtctatggtaatcaaactgaggaggatatccttttgaagaaggaattggacgcatttgttgaaagaaaaccagatcaattcaaggtttattacttgttagataaggctccagaagcttggactggtggtgttgggtatatcaccgttgatactatgaaagaacgtcttccagctccagctgaaggcgtccaacttttggtgtgcggtccgcctcctatggtttcatctattaagagaaatgctgtcactttaggttacgagaaagctaaacctatttctaagatgggagaccaaatctttgtattttaa

SEQ ID NO: 4933 - protein, 281 aa, Kluyveromyces lactis NRRL Y-1140
MVPGKFIFTATFVLLCTIIAVVLEYQSKKDKPVLDKEKLQEFPLVAKTVLTHNTAIYRFGLPKSTQVLGLPIGQHISVQANINGKDILRSYTPTSLDSDAVGHFELLIKSYEKGNISKHFAQLNIGDKIKVRGPKGFYHYQPNMNEEIGMIAGGTGIAPMYQIMKSIFANDSDKTKVSLVYGNQTEEDILLKKELDAFVERKPDQFKVYYLLDKAPEAWTGGVGYITVDTMKERLPAPAEGVQLLVCGPPPMVSSIKRNAVTLGYEKAKPISKMGDQIFVF

SEQ ID NO: 4934 - DNA, 900 bp, Debaryomyces hansenii CBS767
  CDS (1)..(900)
atgtcatttactcgtcaattaactaagaatttaactagttttaaggtattagcaccattcgctgctgcggtgggaagcgtcggaatagcataccaatattcaacatcttctattatgaatgaaacaggaaagactttcactggtaatgacgaatggattgacttgaagttagctaagagttgggataccactcataacactaaacattttgttttcgagttggccaaccaggatgatgtttccggattgatcaatgcttcgtgtttattaaccaagtttgttacaccaaagggtaacaatgttatcagaccatacactccaatttctgatgttgatggtaagggttctattgaatttgtcatcaagaagtacgatggaggtaagatgtctagccacatccatgacttgaagccaaacgacactttggcattcaagggaccagttgtcaagtggaagtgggaaccaaatcaatacaagtcgattgctttgatcggtggtggtaccggtatcactccattgtaccaattgatgcacgaaattaccaagaaccctgaagacaagaccaaggtcaacttattctacggtaaccttaccgaaaaagatattttgattaagaaagaattagatactattgctgaaaagcacaaggaccaagtcaacgttgtttatttcctcgacaaggctcctgaaaactggaacggcgaaaccggttacatttctaaggaattcttacaatctaaattgccaggtccaggtaaggacaacaaggttttcgtctgtggtccaccgggcttgtacaaggctctttctggtcctaagaagtctccaactgaccaaggtgaagttgaaggtgccttagctgacttaggttacaccaaggaaaatgtcttcaagttctag

SEQ ID NO: 4935 - protein, 299 aa, Debaryomyces hansenii CBS767
MSFTRQLTKNLTSFKVLAPFAAAVGSVGIAYQYSTSSIMNETGKTFTGNDEWIDLKLAKSWDTTHNTKHFVFELANQDDVSGLINASCLLTKFVTPKGNNVIRPYTPISDVDGKGSIEFVIKKYDGGKMSSHIHDLKPNDTLAFKGPVVKWKWEPNQYKSIALIGGGTGITPLYQLMHEITKNPEDKTKVNLFYGNLTEKDILIKKELDTIAEKHKDQVNVVYFLDKAPENWNGETGYISKEFLQSKLPGPGKDNKVFVCGPPGLYKALSGPKKSPTDQGEVEGALADLGYTKENVFKF

SEQ ID NO: 4936 - DNA, 876 bp, Yarrowia lipolytica CLIB99
  CDS (1)..(876)
atgcttgtgccctgggcccccattgctgccacctctgtagttgccgccgccgcctcttcctactacttctccaacatggccatctccaacgacgctaagaccgccaccctcaagggcgacgaccagtgggttgatctcaagctcaagtcctccaaggacctgtcccacaacaccaaggccctcatcttcgagctccctacccccgactccaccctcggtcttaccaccgcttccgctctcctcaccaagtacgtgacccctaagggctccaacgttgtccgaccttacacccctgtttccgaccctgactccaagggcgagtttgagctcgtcgtcaagtcctaccccgagggtaagatgtccaagcacatccacgagctcaaggagggtgacactctgtccttcaagggtcccatcatcaagtatcagtggcagcccaacctccacaaggagatcaccctgattggtgccggaaccggcatcacccctctgtaccagctcatctctgccatcaacaagaaccccgaggataagaccaaggtgaacctcttttacggtaacgccactgagggtgacattctcctcaaggacgagattgacgccatcgccaaggccaagccccagcagttcaacgtccactacttcctcgacaagccttccgacaactggaagggtgagaacggatttatctccgaggagttcatcaagggcaactcccccgctgccgactccgacaacgtcaaggtctttgtctgcggtcctcctcctttctacaaggccatctccggcgccaaggtctctcctaccgaccagggcgaggttgacggtgctctcaagaacctcggtttcaacaaggaccaggtcttcaagttctaa

SEQ ID NO: 4937 - protein, 291 aa, Yarrowia lipolytica CLIB99
MLVPWAPIAATSVVAAAASSYYFSNMAISNDAKTATLKGDDQWVDLKLKSSKDLSHNTKALIFELPTPDSTLGLTTASALLTKYVTPKGSNVVRPYTPVSDPDSKGEFELVVKSYPEGKMSKHIHELKEGDTLSFKGPIIKYQWQPNLHKEITLIGAGTGITPLYQLISAINKNPEDKTKVNLFYGNATEGDILLKDEIDAIAKAKPQQFNVHYFLDKPSDNWKGENGFISEEFIKGNSPAADSDNVKVFVCGPPPFYKAISGAKVSPTDQGEVDGALKNLGFNKDQVFKF

SEQ ID NO: 4938 - DNA, 936 bp, Oryza sativa (japonica cultivar-group)
  CDS (1)..(936)
atggcggcgctgctgcttcgtaggctcgccgggacccaccgcggccgcgtgcctctggccgccgccgccgccgtcaccggtggagcggcgctcttctgcgcctcgtctcccccaaccatcgcgctcatggaggagaagggcgaggatgccgctgctaaagttgcgcttaacccagacaagtggctagagttcaagctccaggagaaggcaacagttagccacaattcacaattatttagattttcgtttgacccatctactaagttgggtcttgatgttgcttcatgtctcataacaagggctccaataggagaggaagtggagggaggaagaaaatttgtcattcgcccgtacacacctatctctgatccagattctaaaggatattttgacctgctaatcaaggtttatcctgatgggaaaatgagtcagtatttcgcaagtctgaaaccaggagatgttgttgaggtcaaagggcccattgaaaagctcagatatagcccaaatatgaagaaacaaattggcatgatcgctggtgggactggcataacaccaatgctgcaggttgtcagggctatcctaaaaaaccctgatgacaacactcaggtttccttaatttatgccaatgtgtcaccagatgatatcttgctgaaaagggaattagatagacttgccagtagctatcctaatttcaaggtattctacacggtggacaaaccatcaaatgattggaggggtggtgttggctacatatccaaggacattgccttgaaaggtttgccacggccaggggaggattctctgatccttgtttgtggtcctccaggtatgatgaatcatatatccggtgacaaggcaaaggatagatcgcagggcgagctcaccggcattctgaaagagttaggatacactgcagagatggtatacaagttctga

SEQ ID NO: 4939 - protein, 311 aa, Oryza sativa (japonica cultivar-group)
MAALLLRRLAGTHRGRVPLAAAAAVTGGAALFCASSPPTIALMEEKGEDAAAKVALNPDKWLEFKLQEKATVSHNSQLFRFSFDPSTKLGLDVASCLITRAPIGEEVEGGRKFVIRPYTPISDPDSKGYFDLLIKVYPDGKMSQYFASLKPGDVVEVKGPIEKLRYSPNMKKQIGMIAGGTGITPMLQVVRAILKNPDDNTQVSLIYANVSPDDILLKRELDRLASSYPNFKVFYTVDKPSNDWRGGVGYISKDIALKGLPRPGEDSLILVCGPPGMMNHISGDKAKDRSQGELTGILKELGYTAEMVYKF

SEQ ID NO: 4940 - DNA, 969 bp, Aspergillus nidulans FGSC A4
  CDS (1)..(969)
atgttttctcgctatgctttccgctgcgctcaacccctgaggcagagcgcccgccaatactccaccgaagcccccaagagcaagtcccttgcccccgtctatgtggctgtcggtctggctggccttggtgtcggattgtaccgctaccagtccggtgctgccaccgcagaggctcctgctgagcgtcccaaggttttcacaggcggagaccagggatgggtgaacctcaagctctctgacattgagattctgagccacaacaccaagaggctgcgcttcgaatttcccgacaaggaggctgtctccggtctccacatcgcctctgctcttttgaccaagtattctccccccgatggctcgaagccagttatccgcccctacactcccactagcgatgaagatcagcccggttacctcgagcttgttgtcaaacgctaccctaacggcccgatgtctgagcatctgcacaacatgaatgtcgaccagcgtctggacttcaagggacctcttcccaaatacccctgggaagccaacaagcataagcacatctgcttggtcgctggtggaactggaatcaccccaatgtaccagctagctcgcgagatcttcaagaaccccgaggacaagaccaaggtcactctcgtctttggaaacgtcagtgaggaagacatcctcctgaagagggagttcgaggacttggagaacacatacccccagcgattccgcgcattctacgttcttgacaaccctcccgagggctggaccggcggcaagggctacatcaccaaggagcttctgaagactgtcctccccgagccgaaggaggagaacatcaagatttttgtctgcggtcctcctggcatgtacaaggccatcagcgggcccaaggtcagccctaaggaccagggcgagcttaccggtatcctgaaggagctgggttacagcaaggaccaggtctacaagttctga

SEQ ID NO: 4941 - protein, 322 aa, Aspergillus nidulans FGSC A4
MFSRYAFRCAQPLRQSARQYSTEAPKSKSLAPVYVAVGLAGLGVGLYRYQSGAATAEAPAERPKVFTGGDQGWVNLKLSDIEILSHNTKRLRFEFPDKEAVSGLHIASALLTKYSPPDGSKPVIRPYTPTSDEDQPGYLELVVKRYPNGPMSEHLHNMNVDQRLDFKGPLPKYPWEANKHKHICLVAGGTGITPMYQLAREIFKNPEDKTKVTLVFGNVSEEDILLKREFEDLENTYPQRFRAFYVLDNPPEGWTGGKGYITKELLKTVLPEPKEENIKIFVCGPPGMYKAISGPKVSPKDQGELTGILKELGYSKDQVYKF

SEQ ID NO: 4942 - DNA, 906 bp, Candida albicans SC5314
  CDS (1)..(906): transl_table=12
atgttgactcatcatttatcgaaattggctactccaaaattcttagtaccattcgctggtgccactgctttgtcaattggtttggcattgcaatattctacttccaacaattacattgctaacgaaactggtaaaactttcactgatagcaatgaatgggtggacttgaaattatctaagtcaattgatttgactcataacaccaaacacttggttttcaagttaaaagatgagaatgatgtttctggtttgatcactgcttcatgtttgttgaccaaatttgttacaccaaagggtaacaatgttattcgtccatatacccctgtctctgatgttaaccaatctggtgaaattgatttcgtgattaaaaaatacgacggaggtaaaatgtcaagtcacattttcgatttgaaagaaggtgaaaccttatcattcaaaggaccaattgttaaatggaaatgggaaccaaatcaattcaagtccattgctttgattggtggtggtactggtattactccattataccaattgttgcatcaaatcacttctaatccaaaggacaacaccaaagttaatttgatttacggtaacttgactccagaagatatcttgttaaagaaagaaatcgatgctattgcttctaaacacaaggaccaagttaaagttcattactttgttgacaaggcagatgaaaagaaatgggaaggtcaaattggtttcattactaaagaattcttacaaaaagaattagaaaaaccaggttctgatttcaaggtttttgtttgtggtccaccaggtttatacaaggctatatcaggtcctaaagtttccccaactgatcaaggtgaattgactggtgctttgaaagatttgggtttcgaaaaagaacatgtctttaaattttag

SEQ ID NO: 4943 - protein, 301 aa, Candida albicans SC5314
MLTHHLSKLATPKFLVPFAGATALSIGLALQYSTSNNYIANETGKTFTDSNEWVDLKLSKSIDLTHNTKHLVFKLKDENDVSGLITASCLLTKFVTPKGNNVIRPYTPVSDVNQSGEIDFVIKKYDGGKMSSHIFDLKEGETLSFKGPIVKWKWEPNQFKSIALIGGGTGITPLYQLLHQITSNPKDNTKVNLIYGNLTPEDILLKKEIDAIASKHKDQVKVHYFVDKADEKKWEGQIGFITKEFLQKELEKPGSDFKVFVCGPPGLYKAISGPKVSPTDQGELTGALKDLGFEKEHVFKF

SEQ ID NO: 4944 - DNA, 1440 bp, Aspergillus fumigatus Af293
  CDS (1)..(1440)
atgactgtttcaaccatggcagatgtcagcggtgctcagaaaagccctgctgttgctttacccgagtacacgctgaaggaagttgcgctgcataaccgcaaagacgacaattggattgtgatccacggacaagtgtacgatgtgacaaaataccagaaagaccatcctggcggcgcagatgttctggcggaagttgccggctcagatgcgacagaagcatttgaagacatcggccattcagaagattcgcgcgaaattctcgaggaattcctgatcggaacccttcagggcgcgaaagaatatgtcgctccgaagaaagttcgcatcattgctcagagccccgtcgagactcctgcttcttcatcagcaacccgatacgtaggagcggtcaccagtctgctgggagcagtcgcctccttgatctatgtctaccgtcgcggttccctgtacgcacttgacaccacggggtcactccacagatatctgtctcagcccttaaggggggtaaggttgccgcaggggggcttcgccaatggatttctcgcagctactctgatttgtgcggcagcaggtggtgtgatcgcacgtaaagccgccaaactaaccaagatcgagtcgggattcctgcagtatccaccgcatatcaaggcacgtaaggtgcccagggctgacccgcacttgcttaaagggttccttgattcaaaggagtttcagcgcctgccgctcatccagaaggatcagttatcttcaaacgtataccgcttcgtgttcgggttaccggatagcaatggagtgattggtctacccatcggtcagcacgtcgccattcgcgctgttatcgatggtgtcaccgtgagccggtcgtatacacccgtttccaacaacctagaccgaggaaggctggaattagtcgtgaaatgctatccggatggcgtgctctctggaaaatacctagcgaacctgcaagtgggtgacgaggtcgaattcagaggacccaaaggcgcgatgcgctacaaaccagggttctgcaagaagatgggaatggtagccggcggaacaggaatcacacctatgtaccagctgatccgtgctatctgcgaagatgagcgtgatacgacggagatcagccttatctacgccaacagaactgaggcagacatcttactgcgggatgaactcgagcagtttgcccgcaaataccccaagaatttcaagctgtggtacatgcttgacacggccccggagaattgggcgtatggaagcggcttcgtcaaccaggaggtcctcagcgagcgactattcgcgccttcgcctgacactaaggtcctcctctgcgggcctccgggcatggtgagcgctaccaagaagatgctggctgcgattggattccagaagccagggccagtttcgaagatgaccgaccagattttctgcttctaa

SEQ ID NO: 4945 - protein, 479 aa, Aspergillus fumigatus Af293
MTVSTMADVSGAQKSPAVALPEYTLKEVALHNRKDDNWIVIHGQVYDVTKYQKDHPGGADVLAEVAGSDATEAFEDIGHSEDSREILEEFLIGTLQGAKEYVAPKKVRIIAQSPVETPASSSATRYVGAVTSLLGAVASLIYVYRRGSLYALDTTGSLHRYLSQPLRGVRLPQGGFANGFLAATLICAAAGGVIARKAAKLTKIESGFLQYPPHIKARKVPRADPHLLKGFLDSKEFQRLPLIQKDQLSSNVYRFVFGLPDSNGVIGLPIGQHVAIRAVIDGVTVSRSYTPVSNNLDRGRLELVVKCYPDGVLSGKYLANLQVGDEVEFRGPKGAMRYKPGFCKKMGMVAGGTGITPMYQLIRAICEDERDTTEISLIYANRTEADILLRDELEQFARKYPKNFKLWYMLDTAPENWAYGSGFVNQEVLSERLFAPSPDTKVLLCGPPGMVSATKKMLAAIGFQKPGPVSKMTDQIFCF

SEQ ID NO: 4946 - DNA, 2676 bp, Phaeosphaeria nodorum
  CDS (1)..(2676)
atgagcgtcgctattgagaacaaggctggagtgcctcttcctccacccactgaacaccaaccacaaccctacgcagcatcgaaaagtattcaactgccaccttcgccgcctgagacggtaaatggtgatgacagcaaatcaaatgcttcaaactcggaaccggatttcgctcttccaccacccacaaccattccaaccaaaacattggatgtcgaccagaaaaccccagatgctcacgtacctcgcgacccacggttgataagattaacgggagtgcatccgttcaacgtcgaagcacctttaaccgatttgttcaacgaaggcttcctcactagtccggaactattctacgtttgcaatcacggagctgtgccagaagtacacgactccgaatgtttagattgggagttctcagtcgaaggtcttgtagcaaatcctctcaagataacactacggcaattgctggaagagtacgaaaatgttacatatcccatcacactagtctgtgctggtaacagacgtaaagagcaaaatgttgtaaggaagagtaagggttttcaatggggaccagctggtttatccactgcattgttcactggtgtagtgatgaaagacattattgaacgcgcaaagcctttgaagcgcgcaaagtatgtctgtatggagggagcagataagctacctaacggttattacggcacctcagtcaagttgaactgggtgatggacccaaaccgaggaatcatgcttgctcatggtatgaacggcgagatgctgcgacctgaccatggcaagccgcttcgagcagtcatccctggtcagattggaggaagaagtgtaaagtggctaaagaagttgatcattacggctgaaccaagtgacaactggtaccacatttacgacaaccgagtattaccaacaaccgtcgacccagacgaggctgcaaagaacccaaaatggtggatggatgaccgctacgccatctacgacctgagtcctaattctgccattgcacgtcccgcgcatgatgaaaaacttgaaattaaatctgcacccaagtcctacaaagttgaaggctacgcctacagtggtggtggacgtcgcataactcgatgtgaagtctcgctagacaagggcaaaacgtggcgcttggccaatatcgactatgcagaagacaagtaccgtgcccacgaagaccgcgaacttttcggcggccgtctcgacatggactggcgagaaacgagtttttgctggtgtttctggaaccttgacattgcgatcgctgagctgcaagaaactgatgacattgtcgtccgcgttatggatgaggccatgtgcatacagccgcgtgacatgtactggagtgtactcggtatgatgaacaacccctggttcagaatagtcatccacaaggaaggcgacacgctccgctttgagcacccaacacaacctgccttgatgcctggaggttggatggagaggatcaagaaggcaggtggcaacttgacgaatgggtattggggtgaacgcatcaatggacaggagccagagcacgctgctatcgaggacgctaaggagatcaagatgacaaaagacggtgttgacaagcagatatcgatcgacgaactcaggaaacacgacaatgcggagaatccttggttcgtcgtcaatggtgaggtctacgacggaactgcatttctggaaggtcatcccggtggcgcgcaaagtattgtcagcgtagcagggcttgatgcttcagacgagttcatggcaattcacagcgagactgccaaagcaatgatgccagactatcacatcggcagcctcgacgaagcatcccgcaaagtcctagccgaaggcgaacccgtcaacgagtccaccgagccccgaccagtcttcctagatgcacgcatatggaaccgggccctactccacgcgaaaaccccggtatcgtgggacacccgcattttcaccttcaagctcgaccacgaccaacaagccctcggcctccccacaggccaacacctaatgatccgcctgcgcgaccccgtaacccgcgaagcatcatccgcttcctacacgcccatttcgcaaacctccaaactcggcttctgcgacgtgctaatcaaagtgtacgccgacacgcaagaaaaagtcggcgggaaaatgaccaaagcgctcgatgcgattcccgtcggccattttgtggatttcaagggcccgattggcaagtttgaatatctgggaaatgggcgctgtagtatcaatgggaaacagcgaagtgttaagaaattatacatggtctgtggaggaagtggcatcacgcctattttccaggtcctgcgcgctgttatgcaggataaaaacgacccgacccattgcacggtcctgaatggcaaccgtctggtagaagatatcctgtgtcgcgaggacttggatgtgttcgcgagggagaacccggagaggtgtaagttgctatacacgcttactaagggaccggaggattgggagggcttgaggggcagaattgggaaggagttgttgggggagcagtgtaaggtcgatagcgaggggagcagtttggtgttgatttgtgggccggaggcgttggagaagagtacgcacaaggcgctgaatgagatggggtggagggacgaggatttgatgttcttctag

SEQ ID NO: 4947 - protein, 891 aa, Phaeosphaeria nodorum
MSVAIENKAGVPLPPPTEHQPQPYAASKSIQLPPSPPETVNGDDSKSNASNSEPDFALPPPTTIPTKTLDVDQKTPDAHVPRDPRLIRLTGVHPFNVEAPLTDLFNEGFLTSPELFYVCNHGAVPEVHDSECLDWEFSVEGLVANPLKITLRQLLEEYENVTYPITLVCAGNRRKEQNVVRKSKGFQWGPAGLSTALFTGVVMKDIIERAKPLKRAKYVCMEGADKLPNGYYGTSVKLNWVMDPNRGIMLAHGMNGEMLRPDHGKPLRAVIPGQIGGRSVKWLKKLIITAEPSDNWYHIYDNRVLPTTVDPDEAAKNPKWWMDDRYAIYDLSPNSAIARPAHDEKLEIKSAPKSYKVEGYAYSGGGRRITRCEVSLDKGKTWRLANIDYAEDKYRAHEDRELFGGRLDMDWRETSFCWCFWNLDIAIAELQETDDIVVRVMDEAMCIQPRDMYWSVLGMMNNPWFRIVIHKEGDTLRFEHPTQPALMPGGWMERIKKAGGNLTNGYWGERINGQEPEHAAIEDAKEIKMTKDGVDKQISIDELRKHDNAENPWFVVNGEVYDGTAFLEGHPGGAQSIVSVAGLDASDEFMAIHSETAKAMMPDYHIGSLDEASRKVLAEGEPVNESTEPRPVFLDARIWNRALLHAKTPVSWDTRIFTFKLDHDQQALGLPTGQHLMIRLRDPVTREASSASYTPISQTSKLGFCDVLIKVYADTQEKVGGKMTKALDAIPVGHFVDFKGPIGKFEYLGNGRCSINGKQRSVKKLYMVCGGSGITPIFQVLRAVMQDKNDPTHCTVLNGNRLVEDILCREDLDVFARENPERCKLLYTLTKGPEDWEGLRGRIGKELLGEQCKVDSEGSSLVLICGPEALEKSTHKALNEMGWRDEDLMFF

SEQ ID NO: 4948 - DNA, 2736 bp, Solanum tuberosum
  CDS (1)..(2736)
atggcggcatctgttgaaaacaggcagttcactcaccttgaaccgggtttatcaggcgtaggccgtaatttcaagcctaggcctgattccccggttcgtggttgcaacttccctccgtcatccaaccatgaactccctttccaaaaacaacaaaatctccccatttaccttgattactcgtctagtgaagacgaagatgacgatgatgaaaaaaatgaatacgttcaaatgatcaaaaaaggtaaaactgaattagaaccatcaattcacgatactagagacgaaggtaccgctgataattggatccaacgaaacttttccttaatacgtctcaccggtaaacacccattcaactccgaaccccctttggctcgacttatgcatcacggtttcatcaccccagtcccacttcattacgtccgtaaccatggccccgttcccaaagcctcctgggctgactggagcgtcgaagtaaccgggctagtaaaacgaccaatgaaattcacaatggatcagctggttaacgaatttccttcacgtgaattgcctgtcacacttgtatgtgctggcaatcgtcggaaagagcagaatatggttaagcagacgattggtttcaactggggtgctgctgcagtttcaactaccgtatggcgcggagtacccctccgcccgttgttgaaacggtgcggtgttcatagtaagaaaaaaggtgcgcttaacatctgtttcgaaggttcagatgttttacctggaggtggaggttcaaagtacggaacgagtataaagaaggaattcgccatggatccatctcgtgatattattgtagcttacatgcaaaacggagaaatgttgagcccggatcacgggtttccggtaaggatgattattccgggattcataggtggaagaatggtgaaatggccaaagaggattgtggtcactacacaagaatcagaaagctattatcattacaaggataatagagtcctccctccacatgttgagctcgaacttgctaacgctgaagcatggtggtacaaaccagagtacatcatcaatgagctcaacatcaactctgtcattacaactccgtcccatgaagaaattttgcctattaatgcgtggactactcagcgaccttacacgttgagaggctatgcttatcccggtggaggtaaaaaggtaactcgagtggaagtgactttggatggaggagagacatggagtgtgtgtacacttgatcacccagagaagccaactaagtatggcaagtactggtgttggtgcttttggtcacttgaggttgaggtgctcgacttgcttagagctaaagaaattgctgtacgagctatcgatgagacccacaatactcaacccgagaagcttatttggaacgtcatgggaatgatgaacaattgttggtttcgagtgaagatgaagtgtgtcaagcctcacaagggagagattggtatagtgtttgagcacccgacccaacctggaaaccaatcaggtggatggatggcaaaggagagacacttggagatatcagcagtggctcctccaacactaaagaagagtatttcaactcctttcatgaacacagcttcgaagatgtattccatgtctgaggtgaggaagcacaactcttcagactctgcttggatcatagtccatggacatatctacgatgcctcacgtttcttgaaagaccatcctggtggtgttgacagcattctcatcaatgctggaactgattgtactgaggaatttgatgcaattcattctgataaggctaagaagctattggaggactttaggattggtgaactcataactactggttacacgtctgattcgtctccaaacacgtctgtccacggatcctcttccattagtagcttcttagcacctattaaggaacttgttcaaacaccaacaaggagtgtagccctcatcccaagggaaaaaatcccttgcaaactcgtcgacaagcaatccatctcccatgatgttagaaaattcaaatttgcattaccctctgaggatcaagtcttaggcttacctgttggcaaacacattttcctctgtgccacagttgatgacaaactctgcatgcgtgcctacacgcctactagcacagtcgatgaagtagggttcttcgagttggttgtcaaagtctacttcaaaggagttcaccctaaattccctaatggaggtcaaatgtcacaacatcttgattctctcccaataggtgcattccttgacgttaaaggtccattaggtcacattgaataccaaggcaagggtaatttcttagtccatggtaaacaaaagtttccgaagaagttagctatgatagctggtggaacaggtataactcctgtatatcaagtaatcgaatcaattttgaaagatccagaagacgacacagaaatgtatgtggtgtatgcaaacagaacagaggacgatattttgctcaaagaggaactcgatgcatgggcagagcaaatcccagatagagttaaagtttggtatgtcgttcaagaatcaattacagaaggatggaagtatagtacaggatttgttacagaagcaattctcagagaacatatacctcaaccatctcatacaacattggcattggcttgtggaccacctcctatgatacaatttgctattaatccaaacttggagaaaatgggatatgacattaaggaggaattattggtgttctaa

SEQ ID NO: 4949 - protein, 911 aa, Solanum tuberosum
MAASVENRQFTHLEPGLSGVGRNFKPRPDSPVRGCNFPPSSNHELPFQKQQNLPIYLDYSSSEDEDDDDEKNEYVQMIKKGKTELEPSIHDTRDEGTADNWIQRNFSLIRLTGKHPFNSEPPLARLMHHGFITPVPLHYVRNHGPVPKASWADWSVEVTGLVKRPMKFTMDQLVNEFPSRELPVTLVCAGNRRKEQNMVKQTIGFNWGAAAVSTTVWRGVPLRPLLKRCGVHSKKKGALNICFEGSDVLPGGGGSKYGTSIKKEFAMDPSRDIIVAYMQNGEMLSPDHGFPVRMIIPGFIGGRMVKWPKRIVVTTQESESYYHYKDNRVLPPHVELELANAEAWWYKPEYIINELNINSVITTPSHEEILPINAWTTQRPYTLRGYAYPGGGKKVTRVEVTLDGGETWSVCTLDHPEKPTKYGKYWCWCFWSLEVEVLDLLRAKEIAVRAIDETHNTQPEKLIWNVMGMMNNCWFRVKMKCVKPHKGEIGIVFEHPTQPGNQSGGWMAKERHLEISAVAPPTLKKSISTPFMNTASKMYSMSEVRKHNSSDSAWIIVHGHIYDASRFLKDHPGGVDSILINAGTDCTEEFDAIHSDKAKKLLEDFRIGELITTGYTSDSSPNTSVHGSSSISSFLAPIKELVQTPTRSVALIPREKIPCKLVDKQSISHDVRKFKFALPSEDQVLGLPVGKHIFLCATVDDKLCMRAYTPTSTVDEVGFFELVVKVYFKGVHPKFPNGGQMSQHLDSLPIGAFLDVKGPLGHIEYQGKGNFLVHGKQKFPKKLAMIAGGTGITPVYQVIESILKDPEDDTEMYVVYANRTEDDILLKEELDAWAEQIPDRVKVWYVVQESITEGWKYSTGFVTEAILREHIPQPSHTTLALACGPPPMIQFAINPNLEKMGYDIKEELLVF

SEQ ID NO: 4950 - DNA, 2679 bp, Metarhizium anisopliae
  CDS (1)..(2679)
atgccccagtctgaaagcaactcggaaccgggtttccaacagaaaaccgttgtattccctccgagcccccccagcaccgtggggagatctcggaggtgtagtgcggatggcaattccaacgatatcactttccctgtatcgcctaccatagcaaataacgacgcccttatctatcctctccccccaacaaattcgcaaaaatcagttcgaccagaggatctcaaaacgccggacagccacgttgaaagagacgctcgactgattcgactaaccggaacacatcccttcaattgcgagcctcccctgcgcgacttatatgatgaagggtttttaactagtgaggaccttcactatgttagaaaccatgggccagtacctcaatgtgacgatggtgacatggatcactggacattcaccgtcgatggccttgttgagaatccatttactcttagcgtcagggagctcatcgcatcttatgagcaggtgacatatcccatcactcttgtctgcgcgggcaatcgccgcaaggagcagaatgtggtccgcaagtcaaagggtttctcctggggctcagccggtctctcaacagctctgtggactggtgttgcccttggcgatctgatagccaaggcaaaaccgaggagaggtgcgagatatgtatgtttcgagggagctgataaactgccaaacggctactatgggacgtctgttaagctcaattggtgcctagatccaaacagaggtattatggttgctcataaaatgaacggttgtgttctgcaccctgatcacggcaagcctgttcgggtcgttatccctggacaaatcggaggccgcagtgtcaaatggctgaagaggataacagtcaccgagaaaccaagcgataactggtaccacatctatgacaatagagttctgccaactatggtgacacccgaggcaagtgccgacctgccagatacatggaaagacgagcggtatgccatatacgaccttaacaccaatagtgtcatctgttacccggcacataatgaaacacttttactaaatggcgactcgagcacttataaagtccggggatacgcgtatggtggtgggggtaaacggattactcggatcgaggttactttggacaagggcaagacttggagattggccaatattgattaccccgaggaccgatatcgccttgctcccgacggagaaagactatatggcggaagagttgacatgtggtggcgggagacatcgttttgttggtgtttctgggaactcgacgttgacatcggagatctcaaaacaacgacggatatcatggtcagagcaatggacgaaagcctcatggtacagcccagagacatgtattggagtgttttgggtatgatgaacaacccttggttcagggttgtcgtccatgacatcggccacgcattacagtttgagcaccctacgcaacctgctttgattcccggtgggtggatggagcggatcaagaaggcaggaggcaatctcacaaatggctcgtggggtgaaaagctggctggccaaactgaagatgtgatgggacaagaaccagaacaggatgtatgcatgactaaccccagagctgaccgtctggttaccatgtgtgaattgaaatcccacagtggtgaacaggaaccttggttcattgttgatggacaggtatacgacggaacaccgtttttggagggtcatcccggtggctctgcatctatatttggagctgctggacaagatgtcacggaggagtttgtcacaattcacagtgaaaacgccaaagccatgatgcctgcgtatcatattggaaaactcgacgaagatgcactagcgcaactgtccggcgagactaatgaatgcgatcccagtcgaagcgtgtttcttgacagcaaagtctggacaaaagcaaccctgcaggaaaagatcagcgtttcttcagactccaagatcttcagattcaagctagatcacgccgagcaagaagtcggattgcctgttgggcagcacctgatgatgaggctgcgcgacccggtaactcgagagtcaatcatcagggcttatactccaatttccgaaggtacagaccgaggatgtctcgatgttttgatcaaaatctaccacggcactccggaacgtagaggtggcaagatgacacaggcacttgattctattccagtgggacactttgttgatttcaagggaccagtgggaaaattcgagtatcttggaaggggcctctgttccatatctgggaaacctcgccatgtatccaggtttaacatgatatgtggcgggtcgggcatcacgccgatatttcaagtctttcgagccatgataaagggtgccgatgactccaccgagtgcgttattttagacggaaatcgtgttgaggaagacatcttgtgtagactggagctcgaccaaatggcatcaagcgcgaagcataggtgtagcctgctccattgcctcagtcgtccgtcttctacatgggaaggacggactggccgaattgacaaggacctgatttcaagcgaaatcggatcgccaaggctcgacaaagacgatatagttctggtctgtggcccggaacaaatggaaaagggtgtctgcgaaacactaagggttctgggatggccggatgagaatattgtggtattctga

SEQ ID NO: 4951 - protein, 892 aa, Metarhizium anisopliae
MPQSESNSEPGFQQKTVVFPPSPPSTVGRSRRCSADGNSNDITFPVSPTIANNDALIYPLPPTNSQKSVRPEDLKTPDSHVERDARLIRLTGTHPFNCEPPLRDLYDEGFLTSEDLHYVRNHGPVPQCDDGDMDHWTFTVDGLVENPFTLSVRELIASYEQVTYPITLVCAGNRRKEQNVVRKSKGFSWGSAGLSTALWTGVALGDLIAKAKPRRGARYVCFEGADKLPNGYYGTSVKLNWCLDPNRGIMVAHKMNGCVLHPDHGKPVRVVIPGQIGGRSVKWLKRITVTEKPSDNWYHIYDNRVLPTMVTPEASADLPDTWKDERYAIYDLNTNSVICYPAHNETLLLNGDSSTYKVRGYAYGGGGKRITRIEVTLDKGKTWRLANIDYPEDRYRLAPDGERLYGGRVDMWWRETSFCWCFWELDVDIGDLKTTTDIMVRAMDESLMVQPRDMYWSVLGMMNNPWFRVVVHDIGHALQFEHPTQPALIPGGWMERIKKAGGNLTNGSWGEKLAGQTEDVMGQEPEQDVCMTNPRADRLVTMCELKSHSGEQEPWFIVDGQVYDGTPFLEGHPGGSASIFGAAGQDVTEEFVTIHSENAKAMMPAYHIGKLDEDALAQLSGETNECDPSRSVFLDSKVWTKATLQEKISVSSDSKIFRFKLDHAEQEVGLPVGQHLMMRLRDPVTRESIIRAYTPISEGTDRGCLDVLIKIYHGTPERRGGKMTQALDSIPVGHFVDFKGPVGKFEYLGRGLCSISGKPRHVSRFNMICGGSGITPIFQVFRAMIKGADDSTECVILDGNRVEEDILCRLELDQMASSAKHRCSLLHCLSRPSSTWEGRTGRIDKDLISSEIGSPRLDKDDIVLVCGPEQMEKGVCETLRVLGWPDENIVVF

SEQ ID NO: 4952 - DNA, 2736 bp, Solanum tuberosum
  CDS (1)..(2736)
atggcggcatccgttgaaaacaggcagttcactcaccttgaaccgggtttatcaggcgtaggccgtactttcaagcctaggcctgattccccggttcgtggttgcaacttccctccgtcatccaaccatgaactccctttccaaaaacaacaaaatctccccatttaccttgattactcgtctagtgaagacgaagatgacgatgacgaaaaaaatgaatacgttcaaatgatcaaaaaaggtaaaactgaattagaaccatcaattcacgatactagagacgaaggtaccgctgataattggatccaacgaaacttttccttaatacgtctcaccggtaaacacccattcaactccgaaccccctttggctcgacttatgcatcacggtttcatcactccggttccacttcattacgtccgtaaccatggccccgttcccaaagcctcctgggctgactggagcgtcgaagttactgggctagtaaaacgaccaatgaaattcacaatggatcagctggttaacgaatttccttcacgtgaattgcctgtcacacttgtatgtgctggcaatcgtcgtaaagagcagaatatggttaagcagacaattggtttcaactggggcgctgctgccgtttcaactaccgtatggcgcggagtacccctccgcccgttgttgaaacggtgcggtgttcatagtaagaaaaaaggcgcgcttaacatctgtttcgaaggttcagatgttttacctggaggtggaggttcaaagtacggaacgagtataaagaacgaattcgccatggatccatctcgtgatattattgtagcttacatgcaaaacggagaaatgttgagcccggaccatgggtttccggtaagaatgattattccgggattcatcggtggaagaatggtgaaatggccaaagaggattgtggtcactacacaagaatctgaaagctattatcactacaaggataatagagttctccctccacatgttgagctcgaacttgctaacgctgaagcatggtggtacaaaccagagtacatcatcaatgagctcaacatcaactctgtcattacaactccgtcccatgaagaaattttgcctatcaatgcgtggactactcagcgaccttacacgttgagaggctatgcttatcccggtggaggtaaaaaggtaactcgagtggaagtgactttggatggaggagagacatggagtgtgtgtacacttgatcacccagagaagccaactaagtatggcaagtactggtgttggtgcttttggtcacttgaggttgaggtgctcgacttgcttagagctaaagaaattgctgtacgagctatcgatgagacccacaatactcaacccgagaagcttatttggaacgtcatgggaatgatgaacaattgttggtttcgagtgaagatgaagtgtgtcaagcctcacaagggagagattggtatagtgtttgagcacccgacccaacctggaaaccaatcaggtggatggatggcaaaggagagacacttggagatatcagcagtggctcctccaacactaaagaagagtatttcaactcctttcatgaacacagcttcgaagatgtattccatgtctgaggtgaggaagcacaactcttcagactctgcttggatcatagtccatggacatatctacgatgcctcacgtttcttgaaagaccatcctggtggtgttgacagcattctcatcaatgctggaactgattgtactgaggaatttgatgcaattcattctgataaggctaagaaactattggaggactttaggattggtgaactcataactactggttacacgtctgattcgtctccaaacacttctgtccatggatcctcttccattagtagcttcttagcacctattaaggaacttgttcaaacaccaacaaggagtgtagctctcatcccaagggaaaaaatcccttgcaaactcgtcgacaagcaatccatctcccatgatgttagaaaattcaaatttgcattaccctctgaggatcaagtcttaggcttacctgttggcaaacacattttcctctgtgccacagttgatgacaaactctgcatgcgtgcctacacgcctactagcacagtcgatgaagtagggttcttcgagttggttgtcaaaatctacttcaaaggagttcaccctaaattccctaatggaggtcaaatgtcacaacatcttgattctctcccaataggtgcattcctcgacgttaaaggtccattaggtcacattgaatatcaaggcaagggtaatttcttagtccatggtaaacaaaagtttccgaagaagttagctatgatagctggtggaacaggtataactcctgtatatcaagtaatcgaatcaattttgaaagatccagaagacgacacagagatgtatgtggtgtatgcaaacagaacagaggacgatattttgctcaaagaggaactcgatgcatgggcagagcaaatcccagatagagttaaagtttggtatgtcgttcaagaatcaattacagaaggatggaagtatagtacaggatttgttacagaagcaattctcagagaacatatacctcaaccatctcatacaacattggcattggcttgtggaccacctcctatgatacaatttgctattaatccaaacttggagaaaatgggatatgacattaaggaggaattattggtgttctaa

SEQ ID NO: 4953 - protein, 911 aa, Solanum tuberosum
MAASVENRQFTHLEPGLSGVGRTFKPRPDSPVRGCNFPPSSNHELPFQKQQNLPIYLDYSSSEDEDDDDEKNEYVQMIKKGKTELEPSIHDTRDEGTADNWIQRNFSLIRLTGKHPFNSEPPLARLMHHGFITPVPLHYVRNHGPVPKASWADWSVEVTGLVKRPMKFTMDQLVNEFPSRELPVTLVCAGNRRKEQNMVKQTIGFNWGAAAVSTTVWRGVPLRPLLKRCGVHSKKKGALNICFEGSDVLPGGGGSKYGTSIKNEFAMDPSRDIIVAYMQNGEMLSPDHGFPVRMIIPGFIGGRMVKWPKRIVVTTQESESYYHYKDNRVLPPHVELELANAEAWWYKPEYIINELNINSVITTPSHEEILPINAWTTQRPYTLRGYAYPGGGKKVTRVEVTLDGGETWSVCTLDHPEKPTKYGKYWCWCFWSLEVEVLDLLRAKEIAVRAIDETHNTQPEKLIWNVMGMMNNCWFRVKMKCVKPHKGEIGIVFEHPTQPGNQSGGWMAKERHLEISAVAPPTLKKSISTPFMNTASKMYSMSEVRKHNSSDSAWIIVHGHIYDASRFLKDHPGGVDSILINAGTDCTEEFDAIHSDKAKKLLEDFRIGELITTGYTSDSSPNTSVHGSSSISSFLAPIKELVQTPTRSVALIPREKIPCKLVDKQSISHDVRKFKFALPSEDQVLGLPVGKHIFLCATVDDKLCMRAYTPTSTVDEVGFFELVVKIYFKGVHPKFPNGGQMSQHLDSLPIGAFLDVKGPLGHIEYQGKGNFLVHGKQKFPKKLAMIAGGTGITPVYQVIESILKDPEDDTEMYVVYANRTEDDILLKEELDAWAEQIPDRVKVWYVVQESITEGWKYSTGFVTEAILREHIPQPSHTTLALACGPPPMIQFAINPNLEKMGYDIKEELLVF

SEQ ID NO: 4954 - DNA, 2631 bp, Glycine max
  CDS (1)..(2631)
atgaatggcgtcgttcggcccctcaaaccaggcccggatatcccgcgtcccaagaagctaccccagccgccgccgccactctcggattcctcaagcgacgaagaagaagacaccaccttgaacttgaaggacctgattcgcaagggaacaacggaagttgaatcctccattttcgacccgcgcgacgatggaacctctgaccactggatccaacggaactcttcccttgtccgtttaacgggaaagcacccgtttaactcggagccacccctccctcgcctcatgcaccacggcttcatcaccccggtccccctccactacgtccgcaaccacgggccagtcccccgggcccgctgggaggactggaccgtggaagtcacgggcctggtcaccaggcccacatgcttcaccatggagcaactcctccacgatttccccagtcgcgagttcccagccacactcgtctgcgctgggaaccggcggaaggaacagaacatggtgaaacagagcatcggcttcaactggggggcagccgccatctccacttcggtgtggcgcggcgtgcccttgcgcaccctgctcaagagctgcgggatctacacccgcaccaagggcgcgctccacgtgtgcttcgaaggggccgaggatctgccaggtggaggtgggtccaagtacggaaccagtatcctgagggaggttgcactggatccctcccgcgacatcattctcgcctacatgcaaaacggggagcctttgtccccggatcacggcttccccgttagaatgataatacccggtttcattggtggccgcatggtcaaatggttgaagcgcatcattgttactaccgaccaatctcaaaactattaccattataaggataacagggtactcccttctcacgttgatgccgaacttgccaatgctcaagcttggtggtacaagccggactatattatcaacgagcttaacataaactccgtgataaccacgccttgccaccaggagatcttgcccatcaactcatggactactcagatgccttatttcatcagaggctatgcgtattccggtggtgggagaaaggtgacacgtgttgaggtaaccctggacggaggtgaaacgtggcaagtgtgcacactggactgtccggagaaacccaacaaatatggaaagtactggtgttggtgtttttggtctgtggaggttgaggttttggacctgctcggagccagggagattgcggtgcgtgcttgggacgaggccctcaacacccaacctgaaaagctcatttggaatgttatgggcatgatgaacaactgctggttcagagtgaaaaccaatgtgtgcaggccccacaagggtgagataggtatagtgtttgaacaccccacccaaccaggcaaccaatccggcggatggatggcaaaagaaaaacacctagagaaatcatctgagtccaacccaaccctcaagaagagtgtctcctccccattcatgaacaccacctcaaaaacctataccatgtctgaagtcagaaggcacaacaacgccgattcggcttggatcatagtccacggtcatgtctatgattgcacccgcttcctcaaagaccatcccggtggcacagacagcatcctcatcaacgccggcaccgactgcaccgaggagttcgaagccatccactccgacaaagccaagcaaatgcttgaagactaccgaatcggcgagctcaccaccacctgctacaactctgattcttcatcgtcaaacccctccgtgcatggcagctccgacaccatccctttgacccccatcaaggaagtgattacaccaatgcgaagcgtggctcttaacccacgcgagaaaatcccatgcaagctcatctccaaaacctccatctctcacgacgttaggcttttccgctttgccctcccctccgacgacctactcatgggtttgccagttgggaagcacatattcctatgtgccaccgttgacgagaaactatgcatgcgagcctacactccaacaagcagcgttcacgaagtgggatacttcgacctcgtcgttaaggtttacttcaaaggggtgcaccctaagttccccaacggtgggatcatgtctcaacacttggactctctccccattggttctgtcttggacgtgaaaggcccacttggccacattgaatacactggcagaggaaacttcctcgttcatgggaaaccaaggtttgccacgaggctagccatgttggctggtggcacaggaatcacacccatttaccaagtggttcaagccattctaaaggatccagaggactgcaccgagatgcatgtggtttacgcgaaccgaaccgaggatgatatattgctgaaggaagagcttgatgagtgggctaagaagtatgataggttgaaggtgtggtacgtgatacaagaaagcataagagaagggtgggaatacagtgtgggattcatcactgaaagtatcctgacggagcatattccaaatgcatctcctgataccttggcattgacttgtggaccaccacctatgattcaatttgcagtccagccgaatttggagaagttgggctacgacacccagaataacttgctcgtgtag

SEQ ID NO: 4955 - protein, 876 aa, Glycine max
MNGVVRPLKPGPDIPRPKKLPQPPPPLSDSSSDEEEDTTLNLKDLIRKGTTEVESSIFDPRDDGTSDHWIQRNSSLVRLTGKHPFNSEPPLPRLMHHGFITPVPLHYVRNHGPVPRARWEDWTVEVTGLVTRPTCFTMEQLLHDFPSREFPATLVCAGNRRKEQNMVKQSIGFNWGAAAISTSVWRGVPLRTLLKSCGIYTRTKGALHVCFEGAEDLPGGGGSKYGTSILREVALDPSRDIILAYMQNGEPLSPDHGFPVRMIIPGFIGGRMVKWLKRIIVTTDQSQNYYHYKDNRVLPSHVDAELANAQAWWYKPDYIINELNINSVITTPCHQEILPINSWTTQMPYFIRGYAYSGGGRKVTRVEVTLDGGETWQVCTLDCPEKPNKYGKYWCWCFWSVEVEVLDLLGAREIAVRAWDEALNTQPEKLIWNVMGMMNNCWFRVKTNVCRPHKGEIGIVFEHPTQPGNQSGGWMAKEKHLEKSSESNPTLKKSVSSPFMNTTSKTYTMSEVRRHNNADSAWIIVHGHVYDCTRFLKDHPGGTDSILINAGTDCTEEFEAIHSDKAKQMLEDYRIGELTTTCYNSDSSSSNPSVHGSSDTIPLTPIKEVITPMRSVALNPREKIPCKLISKTSISHDVRLFRFALPSDDLLMGLPVGKHIFLCATVDEKLCMRAYTPTSSVHEVGYFDLVVKVYFKGVHPKFPNGGIMSQHLDSLPIGSVLDVKGPLGHIEYTGRGNFLVHGKPRFATRLAMLAGGTGITPIYQVVQAILKDPEDCTEMHVVYANRTEDDILLKEELDEWAKKYDRLKVWYVIQESIREGWEYSVGFITESILTEHIPNASPDTLALTCGPPPMIQFAVQPNLEKLGYDTQNNLLV

SEQ ID NO: 4956 - DNA, 1893 bp, Agrostemma githago
  CDS (1)..(1893)
atggagaaattgagtccggatcatgggtttccggttaggatgattattccggggtttattggtgggcgaatggttaagtggttgaagaggattatcgttgcaccggttgagtccgatagttattatcattatagggataatcgggttttgccttctcatgtcgacgcagaacttgccaattccgaagcgtggtggtataagacggagtatataataaacgagttgaatataaattcggtgataacgacaccatgtcacgaagaaatattgccgattaatgcgtggagtacacaacgtccttacactttgaggggttacgcttattctggaggagggaagaaagtgacaagagtagaagtgacaatggatggaggagaaacatggagaatagcagaattggacatccaacaaaaaggaagcaaatacggcaaatattggtgttggtgtttttggtcattagaagtcgaagtacttgatctacttggtgctaaagagattgcggttcgagcttgggatcaaactcacaatactcaacccgaaaaactcatttggaatgtcatgggcatgatgaacaattgttggttccgtgtgaagaccaacgtgtgcaagcctcacaagggtgaaatcggtattgtgttcgagcatccgacccaacccggtaacaaaccgggcgggtggatggcccgggaacgtcacctcgaactgactgtgccaggtggcaataacctgaagcgtacttcatccaccccgttcatgaacacaaactccaaaatgttctcaatgtcggagattaaaaagcacaactcggccgagtcagcgtggatcgttgtacacggacacgtgtacgacgccacccggttcctcaaggaccacccgggtgggtccgacagtattttgatcaatgctggaactgactgcaccgaggaatttgacgcgatccactcggacaaggctaagaaaatgattgaggactttagaatcggcgagttgatcaccaccggataccagtccgattcgacgagctcttcgcccggtaactcggtccacggagggtccctcatgtccagtctggcaccaatcacggaaatcgacccttttcgcaatgtagccctcaaggcgagggagaaaatcccctgtaagctcatcgaaaaagtctcactgtcccacgacgtgagaaggtttcgcttcgccctaccttccaaggaccaagtcctaggtctcccgtgtgggaaacacgtgttcgtctgtgcctcagtagacgataaacttgtcatgagagcgtacaccccaaccacagcaatcgatgaagtaggctacttcgacctagtggtcaaagtctacttcagggaccagcaccctagattccccaacggcggggtcatgtcacaacatttagattctctaccattgggctcaatcatagaagtcaaaggcccattgggccatatcgagtacttaggaaaaggaaacttcatggtccacggaaaacctaaattcgctaaaaagttaaccatgatctgtggtgggaccgggataaccccgatctaccaagtaatgaaagcgatactaaaagacgaagacgacgacaccgagatgcacgtgatctacgcaaatcgtacaattgacgatattctattacgccccgaactcgagaaatgggccattgagtacaaggaaagggtgaaactatggtatgtagtggaaaagggaaatgaagagtggaaatatgatgttggttttattaatgagaagattcttagagatcacgtgccggaatctggtgagcacgtgctggcattgacatgtgggcctccacctatgatccagtttgctgttcaacccaatttggagaaaatgggctatgatgttaaggaacaattgttgatcttttga

SEQ ID NO: 4957 - protein, 630 aa, Agrostemma githago
MEKLSPDHGFPVRMIIPGFIGGRMVKWLKRIIVAPVESDSYYHYRDNRVLPSHVDAELANSEAWWYKTEYIINELNINSVITTPCHEEILPINAWSTQRPYTLRGYAYSGGGKKVTRVEVTMDGGETWRIAELDIQQKGSKYGKYWCWCFWSLEVEVLDLLGAKEIAVRAWDQTHNTQPEKLIWNVMGMMNNCWFRVKTNVCKPHKGEIGIVFEHPTQPGNKPGGWMARERHLELTVPGGNNLKRTSSTPFMNTNSKMFSMSEIKKHNSAESAWIVVHGHVYDATRFLKDHPGGSDSILINAGTDCTEEFDAIHSDKAKKMIEDFRIGELITTGYQSDSTSSSPGNSVHGGSLMSSLAPITEIDPFRNVALKAREKIPCKLIEKVSLSHDVRRFRFALPSKDQVLGLPCGKHVFVCASVDDKLVMRAYTPTTAIDEVGYFDLVVKVYFRDQHPRFPNGGVMSQHLDSLPLGSIIEVKGPLGHIEYLGKGNFMVHGKPKFAKKLTMICGGTGITPIYQVMKAILKDEDDDTEMHVIYANRTIDDILLRPELEKWAIEYKERVKLWYVVEKGNEEWKYDVGFINEKILRDHVPESGEHVLALTCGPPPMIQFAVQPNLEKMGYDVKEQLLIF

SEQ ID NO: 4958 - DNA, 2580 bp, Aspergillus parasiticus
  CDS (1)..(2580)
atggcaaccatcacggaggttcggacggatgcgctcgtcccaactgacctcgtccttaagacaggtcagatcaaaattcaaagcgaagagatctcgacgaaagacctgtccgatatccctctgccaccaccatcaaaacggccgacagaagtgctgagcgtagataaaggaaccccagatagccatgttccgcgtgatcctcgactcatcagattaacgggtgttcatccgtttaacgttgagccacctcttacagatctgtataaagaagggtttttaacatcgccggagctcttctatgttcgaaatcatggcccagtccctcatgtcaaggatgaagatatccctcactgggaaattactatcgaaggactggtagagaagcctttggtactaaacttccgacaagtgttgcagcagtacgaccaaataacggcgcccatcaccctcgtatgtgcaggcaatcgacgcaaagagcaaaacattgtacgtaaaacgaaaggtttttcttggggatccgcgggactatcgactgccctcttcactggcccattgctggcggatatcctccgcagtggcaaacccctgcgtcaagcgaaatacgtctgtatggaaggagcggataagctgcccaatggtcactacggcacactcattaaattgaactgggccctagaccccaacagggggatcatgcttgcacataaaatgaacggggagtctcttcgcccagatcatggtcgtccgctgagggccgtcgtgcccggtcaaataggaggacgaagtgtcaagtggctgaagaggctgatcttgaccgatgcaccaagcgataactggtaccatatcaatgacaaccgcgtcttaccaacaatggtctcgcccgatatggcatcaaataaccgaaattggtggcacgatgagcgggatgcgatttatgacctaaacaccaactccgccgttggatatcctcaaaacaatgaggtcttaaatatcctggaggccagggccgtcatatactgtcagaggatagcttacgctggtgggggccgtagggttaccagggtagaaatatccctagacaaaggcaaatcttggagattggcggatatcgaatatgccgaagacaagtatcgtgatttcgaaggcgagctttttggaggcaaagtagatatgtactggcgcgaaacttgcttctgctggtgtttttggtctctaagcatcgccatcccagagcttgagaacagtgatgccatccttgtaagagccatggatgaagcattgggcgtgcagcctcgcgatatgtactggtccgttctcggaatgatgaacaacccttggttccgggttacaattacgaaggaaaacgggaacttgagattcgagcaccctacccaccctagtatgcctacaggatggatggaacgcgtcaaaaaagctgggggtgacccgacgaatggtaactggggagaaagacacgaaggagaggagccgacggagccggagcccgtgcaagacattaatatgaagaaagacgggccaagccgaacgattagttttgaagaattcaaggagaattcctgtgatgagaagccatggttcatcgtgaatggagaagtgtatgatggtcaagcatttcttgaaggccaccctggcggacggcagagtattatctcctctgccggtcaggacgtctccgaggaattccttgctattcatagcgagacggcaaaggcgatgatgcctgagtaccatattggaacgacggatccggaaggcttgatagcactcaaggatgatgcatcatcctccaccgatgaaattcgcccagtgttcctccaatcacggtcttggacaaaggcaacattgaaagaaaggaaagacatatcatgggatacacgaatatttagtttcaaattggaacacgaagatcaaacattgggtttaccagtcggccagcatcttatgatcaaagtcctcgacagatcatccaacaacgaagccatcatccgctcatacaccccgatttctgaaaccagccaaaaagggactgtggacttgctggttaaagtatactttgcaacagccacctcggcaggcggcaagatgacgatggccctggataggctgccattgggctccgtggtcgaatatcttggaaatggacgagttctcataagtggcaaggagcgccatgttcggtcgtttaagatgatttgtggaggaaccggtatcacaccgatcttgcaggtcttgcgcgccgtggttcaggaccatcaagatcctacctcttgtgtagtcctcaatggaaacagacaggaggaagatatccttcgccgggctgagctcgacggcttcatggcgtccgacagcagaaggtgtaatataatacacactctatccaaagcgccggactcatggactggccgccgaggacgcatatccgaagagctcctaaaggagtacgcggctccagaagatgagagtatggtactgatttgtggtccgccagccatggaagaatcggctcggaggatactgttggcggaaggatggaaagaatcagaccttcactttttctga

SEQ ID NO: 4959 - protein, 859 aa, Aspergillus parasiticus
MATITEVRTDALVPTDLVLKTGQIKIQSEEISTKDLSDIPLPPPSKRPTEVLSVDKGTPDSHVPRDPRLIRLTGVHPFNVEPPLTDLYKEGFLTSPELFYVRNHGPVPHVKDEDIPHWEITIEGLVEKPLVLNFRQVLQQYDQITAPITLVCAGNRRKEQNIVRKTKGFSWGSAGLSTALFTGPLLADILRSGKPLRQAKYVCMEGADKLPNGHYGTLIKLNWALDPNRGIMLAHKMNGESLRPDHGRPLRAVVPGQIGGRSVKWLKRLILTDAPSDNWYHINDNRVLPTMVSPDMASNNRNWWHDERDAIYDLNTNSAVGYPQNNEVLNILEARAVIYCQRIAYAGGGRRVTRVEISLDKGKSWRLADIEYAEDKYRDFEGELFGGKVDMYWRETCFCWCFWSLSIAIPELENSDAILVRAMDEALGVQPRDMYWSVLGMMNNPWFRVTITKENGNLRFEHPTHPSMPTGWMERVKKAGGDPTNGNWGERHEGEEPTEPEPVQDINMKKDGPSRTISFEEFKENSCDEKPWFIVNGEVYDGQAFLEGHPGGRQSIISSAGQDVSEEFLAIHSETAKAMMPEYHIGTTDPEGLIALKDDASSSTDEIRPVFLQSRSWTKATLKERKDISWDTRIFSFKLEHEDQTLGLPVGQHLMIKVLDRSSNNEAIIRSYTPISETSQKGTVDLLVKVYFATATSAGGKMTMALDRLPLGSVVEYLGNGRVLISGKERHVRSFKMICGGTGITPILQVLRAVVQDHQDPTSCVVLNGNRQEEDILRRAELDGFMASDSRRCNIIHTLSKAPDSWTGRRGRISEELLKEYAAPEDESMVLICGPPAMEESARRILLAEGWKESDLHFF

SEQ ID NO: 4960 - DNA, 2595 bp, Penicillium chrysogenum
  CDS (1)..(2595)
atggccagcataaccacacaaacgataacacagcccgaaacaatctctttcaaaaatgcccagatcacagtcgaggatattatcccaactccaggagaacccgatattccacttcctccgccgtcaaagaaccccgtcgacatcttggatgtggacaaaggcacaccggataaccatgtacctcgagatccgcgactgattcggctgacgggagttcatccattcaatgtggagccaccattgacagcattgtacaaagaagggtttctcacatccccggagctgttctatgttcggaaccacgggccagtgcccagggtccgcgatgaggatatcccaaattgggagattagtatagaagggttggtggagaagccattagtcctgaacttccgcgaagtgcttcagaaatatgaccagatcaccgcaccaatcacacttgtctgtgcgggcaacagacgcaaagaacaaaacacagtccggaagtcaaagggcttctcatggggtgcggctggtttatcgacggcgctattcacagggcctatgatggcggatattctgcgcagtgcgaagccacttcgacaagcaaagtatgtctgcatggagggtgctgataaactgccgaatggattctacggaacctcggtcaaattgaactgggccatggacccaaaccgaggaatcatgttggcacataagatgaatggcgaagaccttcggccagaccatggcagtcccctgagggcagtggtgcctggtcaaatcggaggtcggagcgtgaagtggctaaagaagttgattctgaccgatgccccaagtgataactggtatcatatcaatgataatcgagtgctcccgaccatggtgacaccggagatgtccgccgagaatcgcaagtggtggaccgatgagcgatatgccatttatgaactcaacgtgaactcggtggctgtgtacccgcaacacgaggaagaaatcgacctgtcaacggctggacccacgtacacagtcaaaggatatgcatacgccggaggtggccgaagaataacaaaagttgaagtttcgctagacagaggcaaatcatggcacctctccgagatcgaatacgcagaagataaataccgcgactttgacggcgagctgttcggcggcaaggtagacatgtggtggagggaggcatctttctgttggtctttctggtcgttggatgtcccggtggcagaccttgagaccagcgatgcaattctagtccgtgcagtggatgaggcattgagcgctattccgcgtgacatgtactggtctgtcttgggcatgatgaataacccatggttcagagtggcaatcacgaaacaagggaatacgttgaaatttgaacatcccacacatccagccaaagcaggcgggtggatggaaagagtcaagaagacgggtggtgacttgctcaatggtaactggggtgaaagggttgaaggcgaggagcccatcgaaccggagcctgtgaaggagataaacatgaagaaagatggcctgaacagacaaatcgacctgcaagagttaaaagccaatagcagcagcgaaaaaccctggtttgttgttaatggcgaagtatatgatggcacagctttcctcgaaggtcatcctggaggagccatcagtgttacatcttctgctggtctggatgtatcggaggatttccttgcaatccacagtgaaactgcgaaggcaatgatgccggattaccatattggcacattagacaaggcatccctcgaagcgctgaaaggcgactcaactgctggttccgatgtaccacaggcagtgttccttcagtcggggaaatggacaaaagccaccctcacggagaagaaggatgtatcctgggatacgcgactcttcgtattcgacctggaacatgagaagcagactctcggcctaccgatcggccagcatttgatgatcaaagtccaagatccatccaataacgaagcaattatcaggtcctatacgcccatgtcagacacaaacctgataggcaagatggagttactcgtgaagatctacttcccaacggaaagcattccgggaggaaaaatgactatggctctcgacaagcttcccctaggctcaaagatcgactgcaagggcccaacaggccggtttgaatatctcggcaacggccgggtttccattagcggcaaagaacgccatgtccgctctttcaagatgatctgtggaggaactggcatcacaccagtcttccaggtcttgcgagctgttatgcaagacacgcaagatcccacgacgtgcgttgtgctagacggaaacaggcaggaggaagatatcttgtgtcgttctgaccttgatgcttatgtcgagaccgactcgcagaaatgcactgtcgtgcacacgttgactaaagggtctgatacgtggactggtcatcgaggacgcatttctgaggaactcctcgcggagtacgcggctccagaagagcagagcatggttctggtctgtgggcctgggcctatggagaagtctgcccgcgaaattcttcttgcccaaggttgggccgagtcggatcttcacttcttctag

SEQ ID NO: 4961 - protein, 864 aa, Penicillium chrysogenum
MASITTQTITQPETISFKNAQITVEDIIPTPGEPDIPLPPPSKNPVDILDVDKGTPDNHVPRDPRLIRLTGVHPFNVEPPLTALYKEGFLTSPELFYVRNHGPVPRVRDEDIPNWEISIEGLVEKPLVLNFREVLQKYDQITAPITLVCAGNRRKEQNTVRKSKGFSWGAAGLSTALFTGPMMADILRSAKPLRQAKYVCMEGADKLPNGFYGTSVKLNWAMDPNRGIMLAHKMNGEDLRPDHGSPLRAVVPGQIGGRSVKWLKKLILTDAPSDNWYHINDNRVLPTMVTPEMSAENRKWWTDERYAIYELNVNSVAVYPQHEEEIDLSTAGPTYTVKGYAYAGGGRRITKVEVSLDRGKSWHLSEIEYAEDKYRDFDGELFGGKVDMWWREASFCWSFWSLDVPVADLETSDAILVRAVDEALSAIPRDMYWSVLGMMNNPWFRVAITKQGNTLKFEHPTHPAKAGGWMERVKKTGGDLLNGNWGERVEGEEPIEPEPVKEINMKKDGLNRQIDLQELKANSSSEKPWFVVNGEVYDGTAFLEGHPGGAISVTSSAGLDVSEDFLAIHSETAKAMMPDYHIGTLDKASLEALKGDSTAGSDVPQAVFLQSGKWTKATLTEKKDVSWDTRLFVFDLEHEKQTLGLPIGQHLMIKVQDPSNNEAIIRSYTPMSDTNLIGKMELLVKIYFPTESIPGGKMTMALDKLPLGSKIDCKGPTGRFEYLGNGRVSISGKERHVRSFKMICGGTGITPVFQVLRAVMQDTQDPTTCVVLDGNRQEEDILCRSDLDAYVETDSQKCTVVHTLTKGSDTWTGHRGRISEELLAEYAAPEEQSMVLVCGPGPMEKSAREILLAQGWAESDLHFF

SEQ ID NO: 4962 - DNA, 2607 bp, Aspergillus oryzae
  CDS (1)..(2607)
atggcaaccatcaccgaggtgcggacggatgcgctcgtcccaactgacctcgttcttaagacaggtcagatcaaaatcgaaagcgaagagatctcgacgagagacctgtctgatatccctctgccaccgccatcaaaacggccgacagaagtgctgagcgtagataaaggaactccagatagccatgttcctcgtgaccctcggcttatcagattaacgggtgttcatccgtttaatgttgagccacctctcacagatctgtataaagaagggtttttaacatcgccggagctcttctatgttcgaaatcatggcccagtccctcatatcaaggatgaagatatccctcactgggaaattagcatcgaagggctggtagagaagcctttggtactaaacttccgacaagtgttgcagcagtacgaccaaataacagcgcctatcaccctcgtatgtgctggcaatcgacgcaaagagcaaaacaatgtacgtaaaacgaaaggtttttcctggggatcggcgggactatcgactgccctcttcactggcccattgctggcggatattctccgcagtgcgaaacccctgcgtaaagcgaaatacgtctgtatggaaggagcggataagctgcccaatggtcactacggcacatctattaaattgaactgggccctggaccccaacagggggatcatgcttgcacataaaatgaacggggagtctcttcgcccagatcatggtcgtccgctgagggccgtcgtgcccggtcaaataggaggacgaagtgttaagtggctgaagaggctgatcttgaccgatgcaccaagcgacaactggtaccatatcaatgacaaccgcgtcttaccaacaatggtctcgcctgagatggcatcaaataaccgaaattggtggcacgatgagcggtatgcgatttatgacctaaacaccaactccgccgttgcatatccccaaaacaatgaggtcttaaatctcctggtcgcagggccgtcatatactgtcagaggatatgcatacgccggtgggggccgcagggttaccagggtagaaatatccctagacaaaggcaaatcttggagattggcggaaatcgaatatgccgaagacaagtatcgtgattttgaaggcgagctttttggaggcaaagtagatatgtactggcgcgaaacttgcttctgctggtgtttttggtctctaagcatcaccatcccagagcttgagaacagtgatgccatccttgtaagagccatggacgaagcattgggcgtgcagcctcgcgatatgtactggtccgttctcggaatgatgaacaacccgtggttccgggttacaattacgaaggaaaacgggaacttgagattcgagcaccctacccaccctagtatgcctacaggatggatggaacgcgtcaaaaaggctgggggtgacctgacgaatggtaactggggagaaagacacgaaggagaggagccgacggagccggagcccgtgcaagacattaatatgaagaaagacgggctaagccgagtgattggttttgaagaattcaaggagaattcctgcgatgagaagccatggttcatcgtgaatggagaagtgtatgatggtcaagcatttcttgaaggccaccctggcggagcgcagagtattatctcctctgctggtctggatgtctctgaggaattccttgctattcatagcgagacggcaaaggcgatgatgcctgagtaccatattggaacgatggatccggaaggtttaaaagcactcaaggatgatgcatcatcctccaccgatgaaattcgcccagtgttcctccaatcacggtcttggacaaaggcaacattgaaagaaaggaaagacatatcctgggatacacgaatatttagtttcaaattggaacacgaagatcaaacattgggtttaccagtcggccagcatcttatgatcaaagtcctcgacacatcatccaacaacgaagccatcatccgctcatacaccccaatttctgaaaccagccagaaagggaccgtggacttgctggttaaagtatactttgcaacagccacctcggcaggcggcaagatgacgatggccctggataggctgccattgggctccgtggtggaatgcaagggtccgacaggcagattcgaataccttggaaatggacgagttgtcataagtgggaaggaacgccatgttcggtcgtttaagatgatttgtggaggaaccggtatcacaccgatcttccaggtcttgcgcgccgtggttcaggaccggcaagatcccacctcttgtacagtcctcaatggaaacagacaggaggaagatatcctttgccgggctgagctcgacggcttcatggcaaccgacagcagaaggtgtaatataatacacaccctatccaaagcgccggactcatggactggccgccgaggacgcatatccgaagagctcctaaaggagtacgcggctccagaagatgagagtatggtcctgatttgtggtccgccagccatggaagaatcggctcggaggatactgttggcggaaggatggaaagaatcagaccttcacttcttctaa

SEQ ID NO: 4963 - protein, 868 aa, Aspergillus oryzae
MATITEVRTDALVPTDLVLKTGQIKIESEEISTRDLSDIPLPPPSKRPTEVLSVDKGTPDSHVPRDPRLIRLTGVHPFNVEPPLTDLYKEGFLTSPELFYVRNHGPVPHIKDEDIPHWEISIEGLVEKPLVLNFRQVLQQYDQITAPITLVCAGNRRKEQNNVRKTKGFSWGSAGLSTALFTGPLLADILRSAKPLRKAKYVCMEGADKLPNGHYGTSIKLNWALDPNRGIMLAHKMNGESLRPDHGRPLRAVVPGQIGGRSVKWLKRLILTDAPSDNWYHINDNRVLPTMVSPEMASNNRNWWHDERYAIYDLNTNSAVAYPQNNEVLNLLVAGPSYTVRGYAYAGGGRRVTRVEISLDKGKSWRLAEIEYAEDKYRDFEGELFGGKVDMYWRETCFCWCFWSLSITIPELENSDAILVRAMDEALGVQPRDMYWSVLGMMNNPWFRVTITKENGNLRFEHPTHPSMPTGWMERVKKAGGDLTNGNWGERHEGEEPTEPEPVQDINMKKDGLSRVIGFEEFKENSCDEKPWFIVNGEVYDGQAFLEGHPGGAQSIISSAGLDVSEEFLAIHSETAKAMMPEYHIGTMDPEGLKALKDDASSSTDEIRPVFLQSRSWTKATLKERKDISWDTRIFSFKLEHEDQTLGLPVGQHLMIKVLDTSSNNEAIIRSYTPISETSQKGTVDLLVKVYFATATSAGGKMTMALDRLPLGSVVECKGPTGRFEYLGNGRVVISGKERHVRSFKMICGGTGITPIFQVLRAVVQDRQDPTSCTVLNGNRQEEDILCRAELDGFMATDSRRCNIIHTLSKAPDSWTGRRGRISEELLKEYAAPEDESMVLICGPPAMEESARRILLAEGWKESDLHFF

SEQ ID NO: 4964 - DNA, 1925 bp, Mus musculus
  CDS (1)..(1437)
atgggtgggttaattgaagtaactgaagaagagcttaagaagcacaacaagaaagaagattgttggatatgcataagagggtttgtttacaacgtcagcccttatatggagtaccatccgggtggggaggatgaactcatgagagccgcaggagccgatggaacagatctttttaatgaggttcatcgttgggtcaattatgaatccatgctgaaagaatgcctggttggcaggatggctgtgaagcctgctgttccaaaagactgtcatgaaggaaagagagtcttaaatggcatgcttcccaagagccaaatgtcagacacactgcccagggatgtgacagacacactgcccagggaagacctcagttctccaagctatgattggttccaaacagagtcttcagtcaccattgttgtatacaccaaacaaaagaatatcagtttagactcagtaatcgttgacctccaggatgactccttgagagcagaagcagtcatcaaggatcactcttaccttgtacatgttgggctaagccatgaagttcaagaaaatttttctgtacgggttattgaaaatgttggaaaaatagagattgtcctacaaaagaaagaaagtgtttcttggcaatgtcttggtgatcacctggagaaacatgattctttcattccgaagaaagatacaggcttgtactacagacggtgccagttaatatctaaggaagatgtcactcatgacacgagacttttctgtctgatgctgcctccaagtactcaccttcaggtgccagttggacaacatgtttacctcaagctcagtgtcacaggtgcagaaatagtaaagccatatacacccgtgtctgattccttactctcagattttaaagaaccagtcctttccccaaataaatacatctgctttttgatcaaaatctatcctgctggactcttcacaccagagcttgatcgtcttcagattggagattttatttctgtaagcggacctgaaggcgattttaaagtatccaaactccaggaagtagaagatctctttctattggcagccggaacaggattcacaccaatggtcactgtactgaattatgctttgtctcacatgtccagtctcaggaaggtgaagttgatgttcttcaataaaacagaggacgatataatttggagatgtcagctagagaagttggcattaagagaaaaaagatttgatgttgaatttgttctctcggcaccttctccagaatggaatggcaaacagggacacatatcacgagctcttctctctgaatttttgcaaagaagttcagaaaactctagggccttcctttgcatctgcggaccaacacaatttactgacgaggggataaggttgctgcatgatcttaacttttctgatgatgagattcacggattcaccgcttaagaaaagctgccattgtcttttattcaactagtttatatttgtgattgcctaggagtttttaaatgagtttttgtatgtatggaaggctttgctttctgaaatgaaatcatgtgtcttcagtacaagtaacttcttggtttaattttgtaccgtgacttatcttactgctgaccctgacctggagggtcagtcatggcagcaggtgcatatgggagcctttgttatgaactgcaagtttcctgaccactgaagttgtatcactgttcggcagtcaacacttgtattttatgacatgataaactaagcaatcattttggttactttttatgctgcaagatatcttctgagcaatatgtattaaatattccactgcactgttcactcaggaattgatggtgtatgtccttagtagtcttaaaacttggaatgctgtaactattggtggtccagttttgtgaactggacagatagaataaaactatacttcc

SEQ ID NO: 4965 - protein, 478 aa, Mus musculus
MGGLIEVTEEELKKHNKKEDCWICIRGFVYNVSPYMEYHPGGEDELMRAAGADGTDLFNEVHRWVNYESMLKECLVGRMAVKPAVPKDCHEGKRVLNGMLPKSQMSDTLPRDVTDTLPREDLSSPSYDWFQTESSVTIVVYTKQKNISLDSVIVDLQDDSLRAEAVIKDHSYLVHVGLSHEVQENFSVRVIENVGKIEIVLQKKESVSWQCLGDHLEKHDSFIPKKDTGLYYRRCQLISKEDVTHDTRLFCLMLPPSTHLQVPVGQHVYLKLSVTGAEIVKPYTPVSDSLLSDFKEPVLSPNKYICFLIKIYPAGLFTPELDRLQIGDFISVSGPEGDFKVSKLQEVEDLFLLAAGTGFTPMVTVLNYALSHMSSLRKVKLMFFNKTEDDIIWRCQLEKLALREKRFDVEFVLSAPSPEWNGKQGHISRALLSEFLQRSSENSRAFLCICGPTQFTDEGIRLLHDLNFSDDEIHGFTA

SEQ ID NO: 4966 - DNA, 879 bp, Mus musculus
  CDS (1)..(879)
atgagtgtcaagaagaaagatcttatcaccttacaggaccctgaagccaagtacccgctgcccttgattgagaaggagcaaatcagtcacaacaccagaaggttccgctttgggctgccctcaccagaccatgtcctggggcttcctgtcggtaactatgtccatctcttggcacaaattaacaatgaattggtgatcagggcttacacacctgtctccagtgacgatgatcaaggctttgtggacttaattataaagatctacttcaaaaatgtgcaccccaagtatcctgaaggaggaaagatgactcagtacttggagaacatgaaaattggggataccatcctttttcgggggccaacagggcgcctgttctacaatgagccaggctgccagacaagggctgcagaagtcaaaaacatctttatatttctaggaacccttttaatcaaagcaaacaaaacaagtgagcctgaaaaaaagctggttcaccacctggggatgattgctggaggcacaggcattacgcccatgctacagctgattcgccacatcaccaaggacaccagcgatgagaccaggatgtccctcctctttgctaaccagacagaagaggatatcttgctgagaaaggagctagaagaagtcgccacgactcatcacaaacagttcaacctgtggtataccctggacaggcctcccagtgactggaagtacagctcaggctttgttagcgctgacatgatcaaggagcacctccctcctcctggggaggacacgctcatcctggtgtgtggcccaccacctctgatccaggcggcagctcaccccagcctggagcagctcagctataccaaggacatgatttttatctactaa

SEQ ID NO: 4967 - protein, 292 aa, Mus musculus
MSVKKKDLITLQDPEAKYPLPLIEKEQISHNTRRFRFGLPSPDHVLGLPVGNYVHLLAQINNELVIRAYTPVSSDDDQGFVDLIIKIYFKNVHPKYPEGGKMTQYLENMKIGDTILFRGPTGRLFYNEPGCQTRAAEVKNIFIFLGTLLIKANKTSEPEKKLVHHLGMIAGGTGITPMLQLIRHITKDTSDETRMSLLFANQTEEDILLRKELEEVATTHHKQFNLWYTLDRPPSDWKYSSGFVSADMIKEHLPPPGEDTLILVCGPPPLIQAAAHPSLEQLSYTKDMIFIY

SEQ ID NO: 4968 - DNA, 2634 bp, Chlorella vulgaris
  CDS (1)..(2634)
atgacagtgctcctggcaggcgaggactcagcccacggcagcgggtctgcaggagcagcaatgaaagccaatggctacagcacagaggcatcagcagcatcgccgcaagcacccgccgccgagtgcggcaaggcgccggtggaggagccgctgcagcccggcactgacgagtacaagctgcacctgcccgtcaccgaagtgctggacgcagacaagggcaccaaggacgagtggatcccccggcacccagaccttgtgcggctcacagggcggcatcccttcaacgtcgagcccatcccgtcccgcctctttgagtcgtacatcacaccaccctccctgcactatgtccgcaaccacggagctgtaccgcagattaagtgggaggagcaccgcctggcagtcaacggcctggtttctgcgcccaccacattcacaatggacgacatcctcgcgatgcctagtgttgacgtgacctgtacactgacctgcgcaggcaaccgccgcaaggaggagaacatggtgaagcagacgataggcttcaactgggggccctcgggcacaggctgctccacctggacaggcgtgcgcgtgagcgacctgctgcagcgctgcgggatgaagatgcccaaggagggcgcgcgccacgtgtgcttccgaggcccaaagggcgagctgcccaagggagatgacggcagctacggcaccagcgtcacctgggtaaaggctatggacccagcctctgacgtcatcctcgcatacaagcagaacggccgcctgctgacacccgaccacggctacccgctgcggctcatcattccaggctacatcggcgggcgcatgatcaagtggctggaggagatcacggtcaccgaggtggagagccagaactactaccacttccacgacaacagagtgctgccctcgcacgttgatgaggcgctggccaactccgaaggctggtggtacaagccggacttcatcatcaatgacctcaatgtccagtcagccataggctacccggcacatgaagaggtggtgcccctcgcggccggcacctacgccgtacgaggctacgcgtactgcggcaacggcaacaagatcattcggtgcgaggtttcgctggacgacggcaagagctggcggctgggctctgtgacgcacgaggggcaacctactgagtacggcaagcactggggctgggtgtggtggagcttggaggtgcccattgctgagctgcttaccactcctgagatcatttgccgagcctgggacagctccatgaacacacagcccaacacgttcacctggaacgtgatggggatgatgaacaactgctcgtaccgcgtcaagatccacccccgccagaccaccgacggccgctttgcgctgcagtttgagcaccccaccattgccggccccactgtcggcggctggatgaaccgagcagaggacgtggcggcggcggcagcagtgacggtggcgccgccacccgcgcccgcaggtgccaagagcttcaccatggcagaagtggagacgcacacgaccatggagagcgcgtggtttgttgttgatggaaaggtgtacgacgcaacacccttcctgaaggaccacccgggtggcgccgactcgatcctgcttgtggctggcacagacgccactgacgagtttaatgccatccactcgctcaaagccaagaagcagttgctggagtactacattggagagctggcggaagaggggcaggaggcagcagcaccagcgccggcgaccccggcgccagcggcggcaatcggcacggcggtgccagttgccaacggcgcagcgccagctgcagcagctccggaagagttggtggcgctcaacccccgcaagcggcagtcgttcaagctgattgagaaggaggcgctgtcacacaacacccgccgcttccgattcgcactgcagtcgccgcagcaccgctttgggctgccggtcggaaagcacgtcttcctttatgccaaggttgacggcgagctggtgatgcgggcttacaccccctcatcctctgacgaccagctgggctactttgaactggtggtgaagatctacttcgcaaaccagcacccccgtttcccagaaggaggcaagatgagccagtaccttgagggcatggccatcggggactttatggaggtgaagggtcctctggggcacgttcactacaaggggcgaggcagctacacgctggatggtacgccgcacagcgccagccgcatcagcatgattgctggcggcacaggcatcacccccatgctccaggtcattaaagcggtgctgaaggaccccaaagacacaacgcagctctccctgctgtatgccaatgtgtcaccggacgacatcctgctgcgagaagagctggacgcactggcagcgaagcacgacaacttcagcgtgtggtacacagttgacaaggcggatgaggggtggccgttcagcaccgggttcatcaatgaggagatggtgaaggagcgcctgtttccggccggcgacgacaccatctgctgcctgtgcggccctccccccatgatcaagtttgcctgcctgcccaacctcgagaagctgggctacaagccggagcagtgcattcaattttga

SEQ ID NO: 4969 - protein, 877 aa, Chlorella vulgaris
MTVLLAGEDSAHGSGSAGAAMKANGYSTEASAASPQAPAAECGKAPVEEPLQPGTDEYKLHLPVTEVLDADKGTKDEWIPRHPDLVRLTGRHPFNVEPIPSRLFESYITPPSLHYVRNHGAVPQIKWEEHRLAVNGLVSAPTTFTMDDILAMPSVDVTCTLTCAGNRRKEENMVKQTIGFNWGPSGTGCSTWTGVRVSDLLQRCGMKMPKEGARHVCFRGPKGELPKGDDGSYGTSVTWVKAMDPASDVILAYKQNGRLLTPDHGYPLRLIIPGYIGGRMIKWLEEITVTEVESQNYYHFHDNRVLPSHVDEALANSEGWWYKPDFIINDLNVQSAIGYPAHEEVVPLAAGTYAVRGYAYCGNGNKIIRCEVSLDDGKSWRLGSVTHEGQPTEYGKHWGWVWWSLEVPIAELLTTPEIICRAWDSSMNTQPNTFTWNVMGMMNNCSYRVKIHPRQTTDGRFALQFEHPTIAGPTVGGWMNRAEDVAAAAAVTVAPPPAPAGAKSFTMAEVETHTTMESAWFVVDGKVYDATPFLKDHPGGADSILLVAGTDATDEFNAIHSLKAKKQLLEYYIGELAEEGQEAAAPAPATPAPAAAIGTAVPVANGAAPAAAAPEELVALNPRKRQSFKLIEKEALSHNTRRFRFALQSPQHRFGLPVGKHVFLYAKVDGELVMRAYTPSSSDDQLGYFELVVKIYFANQHPRFPEGGKMSQYLEGMAIGDFMEVKGPLGHVHYKGRGSYTLDGTPHSASRISMIAGGTGITPMLQVIKAVLKDPKDTTQLSLLYANVSPDDILLREELDALAAKHDNFSVWYTVDKADEGWPFSTGFINEEMVKERLFPAGDDTICCLCGPPPMIKFACLPNLEKLGYKPEQCIQF

SEQ ID NO: 4970 - DNA, 2748 bp, Petunia hybrida
  CDS (1)..(2748)
atggcggcatcagtcgaaaaccgtcagtttagtcacctagaaccgggtttgtcaggtgtggtccggtctttcaagccccgatctgattccccggttcgtggctgcaattttcctctcaacaatgaactcactaatttccaaaagaaaccaaatactaccatttaccttgattgctcgtcaagcgaagacgacgatgatgatgacgacaaaaatgaataccttcaaatgataagaaaagggaagttagaggtagaaccatctgttcatgacattagggacgaaggaactgctgataattggattgaaaggaataattccatgattcgtcttactgggaaacatccatttaactccgagccacccttggctagactcatgcaccatggttttatcactccggtcccacttcattacgttcgtaatcatggaccggttcccaagggcatgtgggacgactggaccgtcgaagtcacgggtctagtgaagcgcccaatgaaattcacaatggaacagttggttaacgagttcccatctagagaattgcccgtgactcttgtatgtgccggtaatcggaggaaagagcagaacatggtgaaacaaaccattggtttcaactggggtgctgccgctgtttcaactactgtatggcgcggggttcccctccgtgccatcttgaaacgctgcggtatctatagccggacaaaaggggcactcaacatttgttttgaaggtgccgatgtcttgccgggaggtggtggctcaaaatatggtaccagcattaagaaggaattcgccatggatccgtcacgagatatcatcatagcttacatgcagaatggagaaaagttgacaccggaccatggatttccgttacggatgattattccgggattcattggtggcaggatggtgaaatggcttaagaggattatagtcactactcaagaatcagaaagctattatcattacaaggacaatagggttcttcccccccatgttgatgctgaacttgctaacgctgaagcatggtggtacaagccagagtacatcatcaatgagctgaacatcaactctgtgattacgacgccgtgtcatgaagaaattttgccaatcaactcgtggacgactcagcgaccctacacgttgagaggatattcttattctggtggagggaaaaaagtaacgcgagtagaagttaccatggatggaggagagacatggaatgtttgcaccgtagatcacccagaaaagcctaacaagtatggaaagtactggtgctggtgcttttggtcactggaggttgaagtgctagacttgcttagtgccaaggaaattgctgttcgagcttgggatgaaaccctcaatactcaaccggagaagcttatctggaatgtcatgctatgttgcaatgttcagggaatgatgaacaactgctggttccgagtcaaaaccaatgtatgcaagcctcacaaaggagagattggtatagtctttgagcacccaacccaacctggaaacctatctggtgggtggatggcaaaggaaaggcatttggagatatcggcagaagccccaccaactctaaagaagagtatctcaactccattcatgaacacagcttcaaagatgtactccatgtctgaggtcaagaagcataactctgctgattctgcttggataattgtccatggccatgtctacgacgcgacacgtttcttgaaagaccaccctggtgggattgatagcatcctcattaatgcaggcactgattgcactgaggaatttgacgcaattcactctgataaggctaagaaactcttggaggactttaggattggtgaactcataactactggttacacctctgattcctctcctaacaactctgtccatggatcttcttccttcagtggatttttagcacccattaaggaacttgctccagctgtgaggagtgtggccctcattccaagggagaaaatcccatgcaaactcgtcgacaagaaatccatctcccatgatgttaggaaatttcgatttgcattaccatctgaggatcaagtattgggattgcccgttggtaagcacatcttcctctgtgcaattattgatgataagctttgcatgcgtgcctacacgcctactagcaccgttgatgaggtgggatactttgagttggttgtcaaaatatactttaaaggaattgtccctaaattccctaacggagggcaaatgtcacagtatctggattctctcccattgggagcttttgtcgacgtgaaaggtccattaggtcacattgaataccaaggaaggggcaacttcttagtacatggcaaacgcaagtttgccaagaagttggccatgctagctggtggaacagggataacccccgtttatcaagtaatgcaggcaattctgaaagatccagaagatgagacagaaatgcatgtagtgtatgcaaatagaacagaagatgatattctacttaaggatgagcttgattcatgggctgtcaaacttccggaaagggttaaggtttggtatgtagttcaagattctataaaagaaggatggaagtacagcaccggtttcattacagaagccgttctgagagaacatatccctttaccatctcagacaacactagctttagcatgtggaccacctcccatgattcaatttgctgttaatccaaacttggagaagatgggttacgacattaaggattccttattggtgttctaa

SEQ ID NO: 4971 - protein, 915 aa, Petunia hybrida
MAASVENRQFSHLEPGLSGVVRSFKPRSDSPVRGCNFPLNNELTNFQKKPNTTIYLDCSSSEDDDDDDDKNEYLQMIRKGKLEVEPSVHDIRDEGTADNWIERNNSMIRLTGKHPFNSEPPLARLMHHGFITPVPLHYVRNHGPVPKGMWDDWTVEVTGLVKRPMKFTMEQLVNEFPSRELPVTLVCAGNRRKEQNMVKQTIGFNWGAAAVSTTVWRGVPLRAILKRCGIYSRTKGALNICFEGADVLPGGGGSKYGTSIKKEFAMDPSRDIIIAYMQNGEKLTPDHGFPLRMIIPGFIGGRMVKWLKRIIVTTQESESYYHYKDNRVLPPHVDAELANAEAWWYKPEYIINELNINSVITTPCHEEILPINSWTTQRPYTLRGYSYSGGGKKVTRVEVTMDGGETWNVCTVDHPEKPNKYGKYWCWCFWSLEVEVLDLLSAKEIAVRAWDETLNTQPEKLIWNVMLCCNVQGMMNNCWFRVKTNVCKPHKGEIGIVFEHPTQPGNLSGGWMAKERHLEISAEAPPTLKKSISTPFMNTASKMYSMSEVKKHNSADSAWIIVHGHVYDATRFLKDHPGGIDSILINAGTDCTEEFDAIHSDKAKKLLEDFRIGELITTGYTSDSSPNNSVHGSSSFSGFLAPIKELAPAVRSVALIPREKIPCKLVDKKSISHDVRKFRFALPSEDQVLGLPVGKHIFLCAIIDDKLCMRAYTPTSTVDEVGYFELVVKIYFKGIVPKFPNGGQMSQYLDSLPLGAFVDVKGPLGHIEYQGRGNFLVHGKRKFAKKLAMLAGGTGITPVYQVMQAILKDPEDETEMHVVYANRTEDDILLKDELDSWAVKLPERVKVWYVVQDSIKEGWKYSTGFITEAVLREHIPLPSQTTLALACGPPPMIQFAVNPNLEKMGYDIKDSLLVF

SEQ ID NO: 4972 - DNA, 846 bp, Glycine max
  CDS (1)..(846)
atgacccacttgccccttattaaggaaatcaccacaacaccaccaccaccaccacgcgacgtggttcttaaaacacgtgagaaaatcccatgcaagctcgtgtcgaagacttccatttcccacgatgtgaggctcttccgtttgggcttaccctcaaaagaccagctcctaggtttacccgtggggaagcatattttcctatgtgccaccatcaatgagaagctatgcatgcgagcctacactccaacaagtagtgtggacgaagtagggttcttcgatcttgccataaaggtttacttcaaaggggtgcaccccaagttcccaaggggaggactcatgtctcagcatttggactccctctccattgggtctgtgttggacgtgaaaggcccattgggccacatagagtacaccggaagaggcaacttcttggttcatggaaagcaaagattcgcaaagaggctagccatgttggctggtggaactgggatcacacccatttaccaagtggcacaagcgattctgaaggacccagaggaccccacagagatgcatgtggtctatgcaaacaaaactgaggatgatattttgttgaaggaagaaatgatgtgtggcgaagaacaatgtgaccgattcaaggtggtggtacgtgtggaaactgctagggaaggatgggaatacagtgttgggttcatcacagaaagtatcatgagggagcaccttccagaaacgtcgacggatgccttagctttgacatgtgggccaccacctatgattcaatttgcagtgcagcctaatttggagaagatgggatatgatatcaaggccgatctacttgtgttttag

SEQ ID NO: 4973 - protein, 281 aa, Glycine max
MTHLPLIKEITTTPPPPPRDVVLKTREKIPCKLVSKTSISHDVRLFRLGLPSKDQLLGLPVGKHIFLCATINEKLCMRAYTPTSSVDEVGFFDLAIKVYFKGVHPKFPRGGLMSQHLDSLSIGSVLDVKGPLGHIEYTGRGNFLVHGKQRFAKRLAMLAGGTGITPIYQVAQAILKDPEDPTEMHVVYANKTEDDILLKEEMMCGEEQCDRFKVVVRVETAREGWEYSVGFITESIMREHLPETSTDALALTCGPPPMIQFAVQPNLEKMGYDIKADLLVF

SEQ ID NO: 4974 - DNA, 2679 bp, Physcomitrella patens
  CDS (1)..(2679)
atgggaatctcattggactcgccgattttgagcaacagcgctgttggaaaacttgacaccgatttgcagtcaaaaaagatgctacccaacggagatgtccattcctgcaaggttttgcacgaagaagtgtcgtctgccttccggggatctcctgtaaaaaagatcttgagcatttcggagacggaagaattcgatgatgaagagtcggcttccgaggatgagaaggtgatgggatatgctgcagaaattccgattaccaaggtcgacgagcgagacaaaggaacttcggacgactggatcccgcgtcatcccgagctggttcgccttacaggtcgtcacccctttaactgcgagccaccgcttgccaccttgatggaggccgggtttctgacgcctacctcgcttcactatgttcgaaaccacggagcagttcctcgtgcgtcatgggacgattggaaaattgaaatctcgggattggtgaagcgtcctacgacgttcacgatgaacgacattctgcgttttccggcccgtgaactgccggtgacgctggtgtgcgccggcaaccgcaggaaggaggaaaacatcgtgaaacaatccatcggattcaactggggcgctgctgcagtcagcacttctatttggcgcggagtacgtctgtgcgacatcttacgccattgcggggtggtctcgaggaagaagggcgctttgtacgtctgtttcgagggtgccgaaatcctgccaggtggtgggggctcaacgtacggcacgagcatcaccattgacaccgcaatggacaaagcccaagatgtgctgctcgcttaccagcagaatgggcagtgtttggaacccgaccacggtttccccatccggttgatcatcccaggctacattggtggccgcatggtgaaatggctgaacaagatcgaggtgactacgcaagagtcaggaaactactaccatttccacgataaccgagtgctgccctcccacgttgatgccgagactgccaaagctgaaggttggtggtacaggccggactacatcataaaccagttgaacatcaactctgccatcacctcgcctgcgcatggggaggcgcttccagtgaatttctcaacgcttcaggagtcttacatagtgaaaggatatgcctatagcggtggcggccggaaagtgacgagagtcgaggtctcgcttaacgatgggaagtcgtggattctgtgtgatttgaagcatccggaagagcctactagatatgggaagtactggtgttggtgcttctggcagataaacgtggacgtcttggatctcctgaagtgcaaggagatcgtggtacgcgcttgggatgcagccatgaacacacagcctcagcacctcatttggaacgtaatgggaatgatgaacaactgctggttccgggtgaagatcggcattaccaagtccgaagacaacggcattcatctgacgttcgatcacccgactcagccaggtaaccagactgggggctggatggtgaaatcggaagcgcagaaaccagcggagccgttgattaagattattgaaacgaaggttgcagcccctgcccgtcaaataaagttgtcggaagtgcgtaaacaccagaaagcagactcttgctggatcatcgtccgcaacaaagtatacgattgcacgccgttcttggatgatcatcccggcggggctgatagtattttgatcaacgggggcacggactcaacagaggaatttgatgccattcactctgccaaagctcaggccatgttagaagagtattacatcggcgacctggtggcctcgaaagacgacctggaagtagagctagtcaaagacgagaaggaggacattgcgaaacttgtgtcttcatctggtaggccagtggctctgaatcccagggaacggctacccttccgcttgatcgagaaggaaaccttgagtcacgacgtccgaaggttgagattcgcacttcaaagtgagaatcacgtcctgggactgccagtaggaaagcatattctcctgagcgcaaccatcaacgggaagttttgtatgagggcttatactcctatcagcaacgacgatgatgtgggctactttgaactggtaattaaagtgtactacaagaacgcccactcgaagttcccgatgggaggactcttctctcagtatttggattcattaagaattggggacaccattgacgtgaagggtccagtggggcacatcgtatacgagggtaaaggacatttccttataaacgggaagtccaaattcgttaagaaagtttccatgctggcaggcggcacgggaatcacgcccatgtaccaagtgatccgggctatcgtaagcgaccccgaagaccaaactcagatatgtcttttgtactccaaccgcaatgagggagacatcatgttgaggaaagagctggacacatggcaacagcaacacgaaaatctcaaggtccacttcacgctcactggagccgctcccgaggactgggccttcagcaaaggccgcatctgtgaagccatgatcaaggagcacattcccgaaggctgcgaggcgtcactggctttgctgagcggcccgcaggagctcatccagtcagcatgtctccccagcctactcaaccacaaattcgacaagtcgatatgcttagaattttag

SEQ ID NO: 4975 - protein, 892 aa, Physcomitrella patens
MGISLDSPILSNSAVGKLDTDLQSKKMLPNGDVHSCKVLHEEVSSAFRGSPVKKILSISETEEFDDEESASEDEKVMGYAAEIPITKVDERDKGTSDDWIPRHPELVRLTGRHPFNCEPPLATLMEAGFLTPTSLHYVRNHGAVPRASWDDWKIEISGLVKRPTTFTMNDILRFPARELPVTLVCAGNRRKEENIVKQSIGFNWGAAAVSTSIWRGVRLCDILRHCGVVSRKKGALYVCFEGAEILPGGGGSTYGTSITIDTAMDKAQDVLLAYQQNGQCLEPDHGFPIRLIIPGYIGGRMVKWLNKIEVTTQESGNYYHFHDNRVLPSHVDAETAKAEGWWYRPDYIINQLNINSAITSPAHGEALPVNFSTLQESYIVKGYAYSGGGRKVTRVEVSLNDGKSWILCDLKHPEEPTRYGKYWCWCFWQINVDVLDLLKCKEIVVRAWDAAMNTQPQHLIWNVMGMMNNCWFRVKIGITKSEDNGIHLTFDHPTQPGNQTGGWMVKSEAQKPAEPLIKIIETKVAAPARQIKLSEVRKHQKADSCWIIVRNKVYDCTPFLDDHPGGADSILINGGTDSTEEFDAIHSAKAQAMLEEYYIGDLVASKDDLEVELVKDEKEDIAKLVSSSGRPVALNPRERLPFRLIEKETLSHDVRRLRFALQSENHVLGLPVGKHILLSATINGKFCMRAYTPISNDDDVGYFELVIKVYYKNAHSKFPMGGLFSQYLDSLRIGDTIDVKGPVGHIVYEGKGHFLINGKSKFVKKVSMLAGGTGITPMYQVIRAIVSDPEDQTQICLLYSNRNEGDIMLRKELDTWQQQHENLKVHFTLTGAAPEDWAFSKGRICEAMIKEHIPEGCEASLALLSGPQELIQSACLPSLLNHKFDKSICLEF

SEQ ID NO: 4976 - DNA, 2676 bp, Physcomitrella patens
  CDS (1)..(2676)
atgggagtctccgtagcctcaccggttttgagcaatgaggttcttggacatcacgacgcggatctgctgaagacgaagctagtttccaacggcggcttccaaccccccaagctgctgcaggaagaaatggcaccgtcttcgatcataaagagcctgaccgttgtggacacggacgaattcgacgacgattcgacatccgaggacgagaaggtgatggaatatgtgaaggaaatcccgattaccgacgtcgatgagcgagacaagggcacctcggacgactggattccgcgccaccccgagctggtccgcctcaccggccgacaccccttcaactgcgagccaccgctgtccaccttgatggaggccggattcctgacgccgacgtccctgcactacgttcgaaaccacggggcagtgccgcgggcgtcgtgggacgactggaaagtagacgtctcgggattggtgaagcggcccatgtcgttgacgatgaacgacattctgcggttccgcgcgcgggagttgccggtgacgctggtgtgcgccggcaaccggcggaaggaggagaacatggtgaagcagtccatcgggttcaactggggcgctgcggccgtgagcacgtccatatggcgcggagtgctgttgtgcgacgttctgcggcattgcggagtggtgtccaggaagaagggcgctctgtatgtctgcttcgagggagccgaaatcctgccaggtggcgggggctcgacgtacggcacgagcatcaccatcgaaacggcgatggacgaagcccaggacgtgatgctggcataccagcagaacgggcagtatttggaacccgaccacggtttccccatccggctgatcattccgggctacatcggtggccgcatggtgaagtggctgaacaagatcgaggtgacgtcgcgagagtcggggaactactaccactttcacgacaaccgagtgctaccgtcccatgtggatgctgagacagccaaagccgaaggttggtggtaccggcccgactacatcatcaaccagttgaacatcaactccgcgatcagctcgccggcgcatggagagacgcttcccgtgaatttctcgtcgcttcaggagccttacatcgtgaagggatacgcctacagcgggggcggtcggaaagtgacgagggtggaggtgtcgctggacgatgggaagtcgtggactctgtgcgacgtgaagcatccggaagagccgacgagatatgggaagtattggtgttggtgcttctggcagatcggcgtggacgtgatggatctgctgaaatgcaaggagatcgtggtgcgtgcgtgggacgctggcatgaacacccaacctcagcatctgatatggaacgtcatgggaatgatgaacaactgctggttccgggtgaaggtcgggatatccaagttcgaggacagcggcatccacctggcattcgagcacccgactcggccgggcaaccaggtcgggggctggatgacgaagtcggaagtgccgcaagcagcggcgcctgtgttgagtaaggttgtggaaacgaaggtcacccaacttccggtggccgttcgtcagataccggtgtcggaagtgcggaaacaccagactgaggagtcgtgctggatcatcgtgcgcaacaaagtgtacgattgcacgccgtttctgaacgaccatccgggcggcgcggacagcatcctgatcaacggaggcatggattcgacggaggagttcgacgccattcactccgccaaagcccagaccatgttggaggagtactacattggagacctgtcggcgtcgacggctgaggtggtggatgtggcgcccaagacagaagcggaggcgattccaacagcgttgtctgcatcaggaaggccggttgctctgagcctcaaggaacggatcgccttccgcctgatcgagagggaggttctgagtcacgacgttcggaggctgagattcgcactccagagcgagaatcacgtgctgggactgccggtgggcaagcacgtcctcctgagcgcatccatcaacgggaagctgtgcatgagggcttacactcccaccagcaacgacgacgatgtggggtacctggagctggtgataaaggtgtacttcaaggacgtgcaccccaagtttccgatgggaggcatgttctctcagcacctggacacgctgagagtcggcgacacgatcgaagcgaagggtcccgtggggcacatcgtgtacgagggcaaagggcagttcctcatcaacggcaagccgaagtttgtgaggcgggtggcgatgctggcgggggggacgggcatcacgcccatgtaccaagtgatcagggcgatcgtgagcgaccccgaggacaaaacgcaagtgtggctgctatactcgaaccgcacagaggaggatatcatgttgaggaaggagctggacgcatggcaggagaagcacaacaacctggtggttcggtacacactgacaggaaccgcgtcggagggctggaggttcagcaagggccggataagtgaagccatggtgaaggagcacattccagaagggggcgaggagtcgctagcgttgttgtgcgggccacaggagttgattcaggaggcttgtattccatgccttttgaagcacaagtacgagaagtcggcatgcctagagttttag

SEQ ID NO: 4977 - protein, 891 aa, Physcomitrella patens
MGVSVASPVLSNEVLGHHDADLLKTKLVSNGGFQPPKLLQEEMAPSSIIKSLTVVDTDEFDDDSTSEDEKVMEYVKEIPITDVDERDKGTSDDWIPRHPELVRLTGRHPFNCEPPLSTLMEAGFLTPTSLHYVRNHGAVPRASWDDWKVDVSGLVKRPMSLTMNDILRFRARELPVTLVCAGNRRKEENMVKQSIGFNWGAAAVSTSIWRGVLLCDVLRHCGVVSRKKGALYVCFEGAEILPGGGGSTYGTSITIETAMDEAQDVMLAYQQNGQYLEPDHGFPIRLIIPGYIGGRMVKWLNKIEVTSRESGNYYHFHDNRVLPSHVDAETAKAEGWWYRPDYIINQLNINSAISSPAHGETLPVNFSSLQEPYIVKGYAYSGGGRKVTRVEVSLDDGKSWTLCDVKHPEEPTRYGKYWCWCFWQIGVDVMDLLKCKEIVVRAWDAGMNTQPQHLIWNVMGMMNNCWFRVKVGISKFEDSGIHLAFEHPTRPGNQVGGWMTKSEVPQAAAPVLSKVVETKVTQLPVAVRQIPVSEVRKHQTEESCWIIVRNKVYDCTPFLNDHPGGADSILINGGMDSTEEFDAIHSAKAQTMLEEYYIGDLSASTAEVVDVAPKTEAEAIPTALSASGRPVALSLKERIAFRLIEREVLSHDVRRLRFALQSENHVLGLPVGKHVLLSASINGKLCMRAYTPTSNDDDVGYLELVIKVYFKDVHPKFPMGGMFSQHLDTLRVGDTIEAKGPVGHIVYEGKGQFLINGKPKFVRRVAMLAGGTGITPMYQVIRAIVSDPEDKTQVWLLYSNRTEEDIMLRKELDAWQEKHNNLVVRYTLTGTASEGWRFSKGRISEAMVKEHIPEGGEESLALLCGPQELIQEACIPCLLKHKYEKSACLEF

SEQ ID NO: 4978 - DNA, 2622 bp, Cylindrotheca fusiformis
  CDS (1)..(2622)
atgtgtaaaacaactgaatccggagcagaggcaatgtacgggccttatccttcagcggtccccgttcctcacatcgataaagacggcaacaccccaccacttgatgacgttaagggtgcaaagtcctacaaggatctagacaagtatcctgatcaccgcgacttgaagactcctgatgaatggattcctcgtgatggtcgcctagttcgacttaccggtcgtcaccccttcaacgtcgagcctccaatgagcgagctgaggaaaacaaggtttatcactccttcatcacttcactatgtccgcaaccatggagcttgccctcgtcttacttgggaggatcacactttgttgttgggtggagacgtcactcacaagatggaacttactatggatgaacttgtagcttctggcccacacagagagattcctgtcactttggtttgtgctgggaacagaagaaaggaacagaatatgattcgacagactattgggtttagctggggaccttgtggtgtttctaccaacgtgtacaagggagttctcctcagagaccttctcatcaaagccggtgtcagtgacaagcacatgcgtggcaagcacgtcgaattcatcggggttgaagacctgcccaacaaggtcgggcccggtcctttccctgacgaaccttggggcaaacttgttaagtacggtacttccattcctctttctagagctatgaatgctgcctacgacgttatggttgcctgggaagctaatggcgagcgtctcttgcctgaccacggataccctgtccgtttgattatcccaggatacattggaggtcgaatgatcaagtggctcaaggaaatcaacgtgatagaccacgaaaccaagaatcactaccattaccatgataaccgaatcttgcctccgcatatcaccgctgaagaatctctcaaggggcagtggtggtacaagcccgaatacatcttcaacgagctgaatatcaattctgcaattgcgtcgcctttgcacgacgaagagcttcccatagccaagaacattgacaaatcttataacgtatccgggtacgcgtacactggtggcggccgcatgatcactcgtgtcgaagtcagtactgatggtggaatccactgggaacttgccactcttgacagaaaggagatgccgactgagcacgacatgtactggtgctgggtatggtgggactacgaactcaaggttgccgatctcgttggctgcaaagagatctggtgtcgtgcttgggacgagtcgaatatgtgtcaacctattcatccaacctggaatctcatgggcatgggaaacaatcaagtcttccgcttgaaggtccatatggacaagaaagccagtggacagcatgttttccgctttgagcaacctacccaaccaggacagcttgcaggtggttggatgacaaaacttgcgggcaaacccatctccgccggctttggaaggcttctggatcttgctggtgactctgttccttcgtgcccaccttcggatgccgagaagaaggacacgagtggcaagaagactttcaccatggaggagatcagaaagcacaacactgaggaagactgctggattattgtcaacaacagggtgtatgatgctaccgaatacttggaacttcaccctggtggaacggattcaattgttatcaatgctggtgaagacgcgacagaagatttcgtcgcaatccattcgatgaaagcaacaaagatgcttgaaaagtactatattggtgatttagatacagcggcagcaagtgtcaacaaacgagaagaagaagaccttgttgattccaaaggaaacaagttggctctgaaccctcgcaggaagacacagttccgcctccaaaacaagatagtcctctcccgtgattcattcatgttggatttcgcacttccgaccccgcagcatgttcttgggcttcccacaggaaaacacatgttcatgtctgctgtcatcaacggggagacggttcttagaagatacaccccaatttcatccaactacgatgttggttgtgtgaagtttgtcatcaaggcttaccgcccttgtgaacgcttcccaagtggaggaaagatgagccaatacgttgacaatctcaagatcggcgatgtcatggacttccgcggccctgttggagaatttgaatacgtcgctgatggaaactttttgctggatggtgaggagtgccacggaaccaaattcaacatggttgctggaggaactggtatcactccgtgcatgcaaatagcagctgaaattctgcgtcatcccttggataacacccaaatttctttgatctttgccgccagggaagagggggatcttctaatgcgctccacactcgatgagtgggcggccaacttccccgacaagttcaaggtacactacattttgagtgattcctggcctacagattggaagtattcaacaggatttgttgacaggaagttgttctccgatagatttttcagcgctggtgatggggtttacaaccttatgtgtggacctcctgtaatgttggatcgtggctgcacaccaaatttgactgccttgggtcacaagaaatcatccatcttctcgttctag

SEQ ID NO: 4979 - protein, 873 aa, Cylindrotheca fusiformis
MCKTTESGAEAMYGPYPSAVPVPHIDKDGNTPPLDDVKGAKSYKDLDKYPDHRDLKTPDEWIPRDGRLVRLTGRHPFNVEPPMSELRKTRFITPSSLHYVRNHGACPRLTWEDHTLLLGGDVTHKMELTMDELVASGPHREIPVTLVCAGNRRKEQNMIRQTIGFSWGPCGVSTNVYKGVLLRDLLIKAGVSDKHMRGKHVEFIGVEDLPNKVGPGPFPDEPWGKLVKYGTSIPLSRAMNAAYDVMVAWEANGERLLPDHGYPVRLIIPGYIGGRMIKWLKEINVIDHETKNHYHYHDNRILPPHITAEESLKGQWWYKPEYIFNELNINSAIASPLHDEELPIAKNIDKSYNVSGYAYTGGGRMITRVEVSTDGGIHWELATLDRKEMPTEHDMYWCWVWWDYELKVADLVGCKEIWCRAWDESNMCQPIHPTWNLMGMGNNQVFRLKVHMDKKASGQHVFRFEQPTQPGQLAGGWMTKLAGKPISAGFGRLLDLAGDSVPSCPPSDAEKKDTSGKKTFTMEEIRKHNTEEDCWIIVNNRVYDATEYLELHPGGTDSIVINAGEDATEDFVAIHSMKATKMLEKYYIGDLDTAAASVNKREEEDLVDSKGNKLALNPRRKTQFRLQNKIVLSRDSFMLDFALPTPQHVLGLPTGKHMFMSAVINGETVLRRYTPISSNYDVGCVKFVIKAYRPCERFPSGGKMSQYVDNLKIGDVMDFRGPVGEFEYVADGNFLLDGEECHGTKFNMVAGGTGITPCMQIAAEILRHPLDNTQISLIFAAREEGDLLMRSTLDEWAANFPDKFKVHYILSDSWPTDWKYSTGFVDRKLFSDRFFSAGDGVYNLMCGPPVMLDRGCTPNLTALGHKKSSIFSF

SEQ ID NO: 4980 - DNA, 1017 bp, Leishmania major
  CDS (1)..(1017)
atggccaagttcatgacctttggcgccgcaaccgccctcggcgctgctttccacacctacacctcctcccagcgcatggcggctgagtgcgctgcgaagaaggaggcgttcacgaccaagttcaagccttttgtgctgggagaggtgctcaacctggctgaggatgtcgctatcttccgctttctgctgaacgacccgagcgacgtcttcgacctcgtgccgtgcagtacgctgcaggcacacttcaaggagggcgcgaacatggtggatcagccgatgcgcttctacactcccatcacgccaaacgggacgaagggctactttgaccttctcgtcaagaagcagcggccaggccgcttcaccgagcacctcttctctatggacgtgggtgagtcgctgctgttccgtgccattcagtacaagctaacgtacaagaagaatcgctggaccgatgtgggcatgatctgcggtggcacaggcctgtgccccattctgcagttcatgaacgcctctctggaaacggagggcgattcgacgaggcttaacatgctttttgccaaccgctcagagaagaagatcctgctcaagggcttgcttgatgagaaggcccgcgagcacaaggatcgactgcaaatcttttacacggtggacaactttgacgacccggacatcatcgcgaatccggtgtacaagaaaggcgctcccttgacggtggacgtcgcgagccagccgagcacgagccccgatggccgaaagtacttccacggcttcaagggctacattgacgtgccgatgttgcaggcgacgatgccgaggccgtcaccgtcgacgctgcttctcgtctgcgggcccgacccgatgatggtgaaggtggtcggtgcagcaccgatggtgctgcgtgccatgtccggcggcctcgcgtaccagccctcaggtgcagtgctgaacaacgccgcggatgtctccggcttcctcggcaccctgggctatcagaaggagatggtctaccgcttctga

SEQ ID NO: 4981 - protein, 338 aa, Leishmania major
MAKFMTFGAATALGAAFHTYTSSQRMAAECAAKKEAFTTKFKPFVLGEVLNLAEDVAIFRFLLNDPSDVFDLVPCSTLQAHFKEGANMVDQPMRFYTPITPNGTKGYFDLLVKKQRPGRFTEHLFSMDVGESLLFRAIQYKLTYKKNRWTDVGMICGGTGLCPILQFMNASLETEGDSTRLNMLFANRSEKKILLKGLLDEKAREHKDRLQIFYTVDNFDDPDIIANPVYKKGAPLTVDVASQPSTSPDGRKYFHGFKGYIDVPMLQATMPRPSPSTLLLVCGPDPMMVKVVGAAPMVLRAMSGGLAYQPSGAVLNNAADVSGFLGTLGYQKEMVYRF

SEQ ID NO: 4982 - DNA, 870 bp, Leishmania major
  CDS (1)..(870)
atgaaggcttttatcgcttcggttgtcggctttgctggagccagcatgtaccagtctgggtccgaggtggaggcctggggcagcaggccggcattctcacaagagaagttccagccctacaagctcatccacgtcgagaatgaatcgcacaacacaaagcgctttcgctttgcgctcgcttcgagcaagacgcgcctggacctgcccgtggcgtcttgcatcacgctgcgctacactgacgcccagggacacgaagtgatgtgcccctacacgcccatcaacctggtggaggaagagggccacttcgacctcgtagtgaagtgctacccgaattcaaagatgggctcgcaccttttctctctcaaggtcggcgattccattgacgtgaagggaccgtggcacacattcgacgtgaagccgggccagtacaccagtattggcatgatcgctggtggtacgggtctcacccccatgttccaaatcgcgacaaacgtcctgaacgcgccggaaaataagacgatgatttcgcttctgtacgcaaacaagaccgagggggacattctgctcggcaaggagctggacacactggcgaaagagcaccccgggaagtttgccacgtaccactgcctcacgacgcctccgaagcgctggacgggctactctggccacatcaacaaagtgatcatccaggagacgatgccaggctcggatcaccaaggtgactcgtgcgttctggtgagcggcccaccgtccttcatgaagaccatctgtggcgagaaggattacagctcctacccgcccaagcaaggcccgctcgagggctacctcaaggagttgggctactcatcaagcggcgtcttcaagttctaa

SEQ ID NO: 4983 - protein, 289 aa, Leishmania major
MKAFIASVVGFAGASMYQSGSEVEAWGSRPAFSQEKFQPYKLIHVENESHNTKRFRFALASSKTRLDLPVASCITLRYTDAQGHEVMCPYTPINLVEEEGHFDLVVKCYPNSKMGSHLFSLKVGDSIDVKGPWHTFDVKPGQYTSIGMIAGGTGLTPMFQIATNVLNAPENKTMISLLYANKTEGDILLGKELDTLAKEHPGKFATYHCLTTPPKRWTGYSGHINKVIIQETMPGSDHQGDSCVLVSGPPSFMKTICGEKDYSSYPPKQGPLEGYLKELGYSSSGVFKF

SEQ ID NO: 4984 - DNA, 840 bp, Leishmania major
  CDS (1)..(840)
atgtggagtaccaggcagcagtcggagcgcttagcggccacctgcgccaagaaaccagtggatacgttctcccccgatgcgtacaagccatttaagctgatttcctctcggtacgagtcgcacgatacgcgccgcttttactttgccctcgatagccccgatgatagcttctacatgccagttgcttcgtgcatcatcgcgaagtacaccgatgcagacggcaaggacgttgctcggccatacactcccatctcctctaatagcaccaagggccactttgaacttgttgtgaagaagtatccaaaaggaaaaatgggcaactatctgttctccatgcaaccaggcgacgaactgctcgtcaagggcccttttgagaagtttgcgtacaagcccaacatgtggaagcacgtgggcatgatcgccggtggtaccggcatcgctccaatgtaccaggtgcttcgtgccgtgctagagaatcccagagacaagaccaacatttctctcatctatgccaacaaccagcgccgcgacattctgcttgctaacgaactgattgagatgcagaaggtctacaccaacttcaacatgtatttgacccttctggaggtgccgcaccgatggctaggcggtatcggctatgtgaatagtgccatggtaaccacctttatgccgaagccgggggagaagaacacgaagatcctcgtatgtggcccccctccgatgatgcaggccatcagcggcgacaagctgtttgagcctggcaagccgccccagcagggccaggtaggcggcctgctgaaaacgctaggctacacggaggagcaggtcttcaagtactga

SEQ ID NO: 4985 - protein, 279 aa, Leishmania major
MWSTRQQSERLAATCAKKPVDTFSPDAYKPFKLISSRYESHDTRRFYFALDSPDDSFYMPVASCIIAKYTDADGKDVARPYTPISSNSTKGHFELVVKKYPKGKMGNYLFSMQPGDELLVKGPFEKFAYKPNMWKHVGMIAGGTGIAPMYQVLRAVLENPRDKTNISLIYANNQRRDILLANELIEMQKVYTNFNMYLTLLEVPHRWLGGIGYVNSAMVTTFMPKPGEKNTKILVCGPPPMMQAISGDKLFEPGKPPQQGQVGGLLKTLGYTEEQVFKY

SEQ ID NO: 4986 - DNA, 927 bp, Leishmania major
  CDS (1)..(927)
atggtcggcgttctcgtcatcatcgccttcggcatggcggccttctttgcgttcatgtttacgcgcacgacgaaggtggccatggacccgaccatgttcaagcactttaagctgatcaagcgcaccgaggtgacccatgacaccttcatcttccgcttcgccctcgagaacgagacgcagacgctcggactgccgattgggcagcacattgtgctccgcgccgactgcacgacggctggcaagacggagacagtcacgcactcctacacacccatctccagtgacgacgagaagggctacgtagacttcatgatcaaggtgtactttgccggcgtgcaccccagcttcccgcatggcggccggatgtcgcagcacatgtatcacatgaagcttggcgacaagatagagatgcgtggaccacagggtaagtttatctacctgggcaacggcacctcgcgcatccacaaaccgggcaagggcatcgtcacggagaaagtggacgcctatgcggccattgccggcggcactggcatcaccccgattctgcagatcatccacgccattaagaagaataaggaggaccctacgaaggtgttccttgtgtatggcaaccagacggagcgtgacatcttgctgcgcaaggagctggacgaggcggccgccaacgacagccgctttcacgtatggtacaccgtcgaccgcgaggcgacgccagagtggaaatacgatattggctacgtccgcgaggagatgttccgcaagcacctgcccgtgcccgacatgctcggcaacgacagcgtgccgcagaacgtcgggatcaagaaggtcatggcgctcatgtgcggcccgccgccgatggtccagatggcgatcaagccgaacctagagcgcatcggctacactgccgataacatgttcagcttctaa

SEQ ID NO: 4987 - protein, 308 aa, Leishmania major
MVGVLVIIAFGMAAFFAFMFTRTTKVAMDPTMFKHFKLIKRTEVTHDTFIFRFALENETQTLGLPIGQHIVLRADCTTAGKTETVTHSYTPISSDDEKGYVDFMIKVYFAGVHPSFPHGGRMSQHMYHMKLGDKIEMRGPQGKFIYLGNGTSRIHKPGKGIVTEKVDAYAAIAGGTGITPILQIIHAIKKNKEDPTKVFLVYGNQTERDILLRKELDEAAANDSRFHVWYTVDREATPEWKYDIGYVREEMFRKHLPVPDMLGNDSVPQNVGIKKVMALMCGPPPMVQMAIKPNLERIGYTADNMFSF

SEQ ID NO: 4988 - DNA, 837 bp, Macaca fascicularis
  CDS (1)..(837)
atgaagctgttccggcgctccacgccagccatcaccctcgagagtccggacatcaagtactcgctgcggctcatcgaccgggagatcatcagccatgacacccggcgcttccgctttgccctgccgtcacccgagcatatcctgggcctgcctgtcggccagcacatctacctctcggctcgaattgacggaaacctggtcatccggccctatacacctgtctccagtgatgatgacaagggcttcgtggacctggtcatcaaggtttacttcaaggacactcatcccaagtttcccgccggaggcaagatgtctcagtacctggaaagcatgcagattggagacaccattgagttccggggccccaacgggctgctggtctaccagggcaaagggaagttcgccatccggcctgacaaaaagtccaaccccgtcatcaagacagtgaagtctgtgggcatgatcgcgggagggacaggcatcactccgatgctgcaggtgatccgcgctatcatgaaggaccctgacgaccacaccgtgtgccacctgctctttgccaaccagaccgagaaggacatcctgctgcgacctgagctagaggaactcaggaatgaacattctgcgcgcttcaagctctggtacacgctggacagagcccctgaagcctgggactacagccagggcttcgtgaatgaggagatgatccgggaccaccttccgcccccagaggaggagccgctggtgctgatgtgtggccccccacccatgatccagtatgcctgcctgcccaacctggaccgcgtgggccaccccaaggagcgctgcttcgccttctga

SEQ ID NO: 4989 - protein, 278 aa, Macaca fascicularis
MKLFRRSTPAITLESPDIKYSLRLIDREIISHDTRRFRFALPSPEHILGLPVGQHIYLSARIDGNLVIRPYTPVSSDDDKGFVDLVIKVYFKDTHPKFPAGGKMSQYLESMQIGDTIEFRGPNGLLVYQGKGKFAIRPDKKSNPVIKTVKSVGMIAGGTGITPMLQVIRAIMKDPDDHTVCHLLFANQTEKDILLRPELEELRNEHSARFKLWYTLDRAPEAWDYSQGFVNEEMIRDHLPPPEEEPLVLMCGPPPMIQYACLPNLDRVGHPKERCFAF

SEQ ID NO: 4990 - DNA, 900 bp, Tetraodon nigroviridis
  CDS (1)..(900)
atgctgtcctacatcattggcctgatccgcagcggctttgacggcatccttaacctgatcttcagactgttcttctccaagaggagacccgccatcaccttacaggatcccaacattaaatacgccctgcggctgattgacaaacagatcgtcagtcatgacacccgaaagttccgatttgctctgccgtcccctgaacacgtcctgggcctccccatcgggcaacacatctacttgacagccagaattagcgggaacttggtggtgcgtccgtacacgccggtgtccagcgacgacaacaaaggctttgtggatttggtggtgaaggtttattttaaagacgttaatccaaaattcccagagggcgggaagatgagtcagtacctggagagcctgaagatcggcgacaccgtcgacttccgaggacccagcgggctcctggtgtacaagggcaaaggtgttttcgccatccaggaggataagaagtctcccgctgagacaaagacggccaaacgcctgggcatgatcgcgggagggacaggaatcactcccatgctgcagatcatcacagccatcatgaaagacccaaacgatccaaccatttgtcacctgctcttcgccaaccagactgagaaagacatcctgctgagggaagaactggaggagatccaggtgcagaatccggaccggttcaagctgtggttcactctggacagagcgcctgaaggctgggagtatagtcagggcttcatcagcgaggacatggtgagagaccacctgccgccccccagcgaggacaccctcatcctcatgtgtggacctccacccatgatccagttcgcctgcaacccaaacctggacaaagtgggccacgccgccagccgcaggtttaccttttaa

SEQ ID NO: 4991 - protein, 299 aa, Tetraodon nigroviridis
MLSYIIGLIRSGFDGILNLIFRLFFSKRRPAITLQDPNIKYALRLIDKQIVSHDTRKFRFALPSPEHVLGLPIGQHIYLTARISGNLVVRPYTPVSSDDNKGFVDLVVKVYFKDVNPKFPEGGKMSQYLESLKIGDTVDFRGPSGLLVYKGKGVFAIQEDKKSPAETKTAKRLGMIAGGTGITPMLQIITAIMKDPNDPTICHLLFANQTEKDILLREELEEIQVQNPDRFKLWFTLDRAPEGWEYSQGFISEDMVRDHLPPPSEDTLILMCGPPPMIQFACNPNLDKVGHAASRRFTF

SEQ ID NO: 4992 - DNA, 918 bp, Homo sapiens
  CDS (1)..(918)
atggggatccagacgagccccgtcctgctggcctccctgggggtggggctggtcactctgctcggcctggctgtgggctcctacttggttcggaggtcccgccggcctcaggtcactctcctggaccccaatgaaaagtacctgctacgactgctagacaagacgactgtgagccacaacaccaagaggttccgctttgccctgcccaccgcccaccacactctggggctgcctgtgggcaaacgtatctacctctccacccgaattgatggcagcctggtcatcaggccatacactcctgtcaccagtgatgaggatcaaggctatgtggatcttgtcatcaaggtctacctgaagggtgtgcaccccaaatttcctgagggagggaagatgtctcagtacctggatagcctgaaggttggggatgtggtggagtttcgggggccaagcgggttgctcacttacactggaaaagggcattttaacattcagcccaacaagaaatctccaccagaaccccgagtggcgaagaaactgggaatgattgccggcgggacaggaatcaccccaatgctacagctgatccgggccatcctgaaagtccctgaagatccaacccagtgctttctgctttttgccaaccagacagaaaaggatatcatcttgcgggaggacttagaggaactgcaggcccgctatcccaatcgctttaagctctggttcactctggatcatcccccaaaagattgggcctacagcaagggctttgtgactgccgacatgatccgggaacacctgcccgctccaggggatgatgtgctggtactgctttgtgggccacccccaatggtgcagctggcctgccatcccaacttggacaaactgggctactcacaaaagatgcgattcacctactga

SEQ ID NO: 4993 - protein, 305 aa, Homo sapiens
MGIQTSPVLLASLGVGLVTLLGLAVGSYLVRRSRRPQVTLLDPNEKYLLRLLDKTTVSHNTKRFRFALPTAHHTLGLPVGKRIYLSTRIDGSLVIRPYTPVTSDEDQGYVDLVIKVYLKGVHPKFPEGGKMSQYLDSLKVGDVVEFRGPSGLLTYTGKGHFNIQPNKKSPPEPRVAKKLGMIAGGTGITPMLQLIRAILKVPEDPTQCFLLFANQTEKDIILREDLEELQARYPNRFKLWFTLDHPPKDWAYSKGFVTADMIREHLPAPGDDVLVLLCGPPPMVQLACHPNLDKLGYSQKMRFTY

SEQ ID NO: 4994 - DNA, 2733 bp, Phaeodactylum tricornutum
  CDS (1)..(2733)
  misc_feature (2619)..(2619): s is g or c
atggtaccgaaacctgaagatcccacagtcaaggcagagaacaatgcggcgatggatcaacttagtctcctcgacaaagaagatatatcgtcggcttctcgctcgtgccgagaactctacggaccttaccccaaagctattcctgtgccgttcttgaattctcgtaacgaagctcgcgaaggtgacactcccgccgccagcgtcatcgcgcaagccaaaaccatctttgacgtaccggcggactatcgtgacgtgggaacaccggatgaatgggttccccgcgatggacgcctcgtgcgtctgacgggtaagcatcccctcaacgtcgaaccaccgctggcgattctgaagcagcatcgatttattacgccgtcctcgttgcattacgtacgcaaccatggagcgtgcccgaagctgtcttggaaacaacacactgtttgtgtgggaggaaaactggtaccgaatgccttggagctctcgatggacgaaatcgtagcgatggaaccgcgagagctgcccgtcacgttggtctgtgccggaaatcgtcggaaggaacaaaacatgatccgtcaaacaatcggcttcaactggggcccgagcggcgtctcaaccagcgtttggaagggagtgctcctacgcgatttgttgctccgcgcaggggtttcggaaaagaacatggcagggaagcacgtcgaatttattggtgtcgaagacttgccgaacaaggtgggacccgggccgttccaggaggaaccatggggcaaacttgtcaagtacggaaccagtgtcccgctcgctcgggctatgaatccagcgtacgacatcctcattgcctatgagcagaacggcgaagtcttgcagcccgatcacgggtaccccgtccgtctcatcattcctggttatattggaggacggatgattaaatggcttaaatacatcaacgtgattccgcacgaacccaagaatcactatcattaccacgacaatcgcattttacagggaggttggtggtacaaaccggagtacattttcaatgaactcaacatcaattcggccatcgcggctcctgatcacaatgaaacgctttcgatcgccaagaatattgccaagacgtatgacgttacgggttacgcatatactggtggtggtcgtctcatcaccagggtcgaaatttcagttgatggcggtatccattgggaacttgccaaacgtgaacgcaaggagcagccaacggactacggaatgtactggtgctggacttggtggaactacgaagtaaaggtggccgacttggtgggagccaaggaaattatatgccgcgcctgggatgagtccaacaaccctcagccagttgttccaacatggaatctgatgggtatggggaataatcaagcctttcgtgtcaaggtacacatggacaagacagctagcggcgagcatgtgtttcggtttgagcatccaactcagcctggtcaacaaactggtgggtggatgacaaaggtcgccaccaagcctgagtcggccgggttcggacggttgctggaagtgcaggctgagtccaaagaagacgcggccccggctccacctccgaaggaaaataccaaaattttcacgatggaagagattgaaaagcacaacactgaagaagactgttggattgtggtgaaggatcgtgtctacgactgtaccgagtatctagagctgcaccctggcggcattgactcgattgttatcaacggcggcgcagattccacggaagactttgtggcaatccactctaccaaggctacaaagatgctcgagaagtactacattggccagctcgacaaaagtagtgtggccgaggagaaaaaacaagaagacgaacctctcgtcgatgccgatggcaatgctcttgccttgaacccaaagaagaagacgccatttcgtctccaaaacaaaatcacacttagtcgagacagctacctattggattttgctttgccaagcccaaagcatgttttggggctacccacgggaaagcacatgtttatttcggccctcattaatggagagatggtactccggcgctacactcctatctcatccaattacgacattggatgtgtaaagtttgttgtcaaggcataccgtccgtgtgaacgctttccagacggtggcaagatgagccaatacctagaccagatcaatgttggcgactatgttgatatgcgcggaccagttggggaatttgagtactcggccaacggcagttttacaatcgacgccgaaccttgttttgccaccaggttcaacatgcttgctggggggaccggcataacgcccgtaatgcagattgctgcggaaattttgcgaaacccacaagaccctacacaaatgtcccttatttttgcatgccgcgaggaaggcgatctcttgatgcgaagcactttggacgaatgggctgctaactttcctgacaagttcaagattcactacatcctatctgacagctggtcttccgactggaagtattccacaggattcgtagacaaagcgctattttccgagtacttgtacgaagcaggcgataatgtttacagcctcatgtgcggcccaccaattatgttagagaaaggstgccgtccaaacttgggagagccttggtcacaaaaaggacaaaattttttccttttaaaagttcttggactgattgtcatatcaattttgcactttacaatacattttcaatag

SEQ ID NO: 4995 - protein, 910 aa, Phaeodactylum tricornutum
MVPKPEDPTVKAENNAAMDQLSLLDKEDISSASRSCRELYGPYPKAIPVPFLNSRNEAREGDTPAASVIAQAKTIFDVPADYRDVGTPDEWVPRDGRLVRLTGKHPLNVEPPLAILKQHRFITPSSLHYVRNHGACPKLSWKQHTVCVGGKLVPNALELSMDEIVAMEPRELPVTLVCAGNRRKEQNMIRQTIGFNWGPSGVSTSVWKGVLLRDLLLRAGVSEKNMAGKHVEFIGVEDLPNKVGPGPFQEEPWGKLVKYGTSVPLARAMNPAYDILIAYEQNGEVLQPDHGYPVRLIIPGYIGGRMIKWLKYINVIPHEPKNHYHYHDNRILQGGWWYKPEYIFNELNINSAIAAPDHNETLSIAKNIAKTYDVTGYAYTGGGRLITRVEISVDGGIHWELAKRERKEQPTDYGMYWCWTWWNYEVKVADLVGAKEIICRAWDESNNPQPVVPTWNLMGMGNNQAFRVKVHMDKTASGEHVFRFEHPTQPGQQTGGWMTKVATKPESAGFGRLLEVQAESKEDAAPAPPPKENTKIFTMEEIEKHNTEEDCWIVVKDRVYDCTEYLELHPGGIDSIVINGGADSTEDFVAIHSTKATKMLEKYYIGQLDKSSVAEEKKQEDEPLVDADGNALALNPKKKTPFRLQNKITLSRDSYLLDFALPSPKHVLGLPTGKHMFISALINGEMVLRRYTPISSNYDIGCVKFVVKAYRPCERFPDGGKMSQYLDQINVGDYVDMRGPVGEFEYSANGSFTIDAEPCFATRFNMLAGGTGITPVMQIAAEILRNPQDPTQMSLIFACREEGDLLMRSTLDEWAANFPDKFKIHYILSDSWSSDWKYSTGFVDKALFSEYLYEAGDNVYSLMCGPPIMLEKGCRPNLGEPWSQKGQNFFLLKVLGLIVISILHFTIHFQ

SEQ ID NO: 4996 - DNA, 2706 bp, Dunaliella viridis
  CDS (1)..(2706)
atgcccgcactcgccaacaacacagcggagccctccagctctccaggcgagatgatgctgtctaagctgaaggctaacggcagcagcggcggggacagcgcgaatggtgtgcctcagcagaacggcaaggtggtggtggagagcttcgtgcacaagcacctgggcgcaccctatgagcctcccctctcccctgaagacccagactgggcactacatgtccctgcttccaccgtgaatgacaaggacaagggcaccgcggacgcatggattccccgcgacccgcgcatcctgcgcctgacgggccgccaccccctgaactgcgagccccccatgcacgacctcatggcagcaggcttcatcacgcccccctccatccactacgtgcgcaaccacggtcctgcgcccaagatccgctgggaccagcaccgcctagagatcggtggcctggtggagcggcccatgtccctgaccatggatgagatcgtgtccatgccatccgtcaccatcccagtcaccatggtgtgcgcaggcaacaggcgcaaggaggagaacatgctcaagaagtccatcggctttaactgggggccgtgcgctgtgagcaccggctactggacaggcgtgaagctgtgtgatctgctgaagcacgtgggcgccaagggcccaaagcagggcggtggctaccatgtgggcttcagtgggcccaagggagagctgccagcaggggatggcacgtacggcaccagcattccctggggcaaggccatgaacccggctgaggatgtactggtagcctacaagcacaatgggcgctggctgaccattgatcacggcttccctgtgcgcacaatcatccccggcaacatcggcggccgcaccatcaagtggctgtgtaagatcactgtgcaagagaaggagagcaacaaccactaccactacatggacaaccgtgtgctgcccgcgcacgtggaccaggagattgccacgaaggagggctggtggttcaagccagagtacatcatcaacgacctcaacatcaacagcgcagtcgcgcgcccatggcatgatgaggtggtgtccttcaaggatgccaagaagatgtacaccgtgaagggctacgcatatgcaggtggtggccacaagatcatccgctgcgagatctccctggatggtgcgcagacctggaggctcgcaaacatcaggcgctttgccgagcccaatgagtatggcaagcactggtgctgggtgcactgggacatcgatgtgcccatctttgacttcttcgggcccagggagatgctgctgcgcgcatgggatgagacgcagaacacccagcccgccaccatcacctggaacgtgatgggcatgatgaacaactgccacttccgcgtgctcctgcaccccttcatggacgacaagggcaatgtgggcgttcgttttcaacacccagcacccgtggaagtgggtgagcgcggcaacatcgggtggcgcgaggaggagaatctgcgcatgcaggctctagaagcagctggcatcaccaccaaagagggtcccctgccccccaacagggacatcgctgcagcagcagcagccaagcccgcaacccctaaggccactggcagcggcaaggagtacaccatggaggaggtggcccagcacaccacgcacgacagcgcgtggtttgtgcatgaaggcaaggtgtacgatgcgacagcattcctcgatgagcaccctggaggctccgactccatcctgactgccacaggagctgatgcaaccgaggacttcaacgccatccactccaagaaggccaggaacatgctggcagactactacatcggggagctggtcgcctccaagccgggtgctcccccacagccacaagccaacgggcatgccactgccaacggccacacctcgctcatcacgctgaacccgagggagaaagtgacgctcaagctggcagagcgcattgaggtctcccacaacacgcgcatcttccgctttgccctaccctctccagagcacatcctgggcctacccactggcaagcacctctttgtgtacgcgcacgtcaatggagagttggttgcacgcgcctacacccccatcagcagcgatgaggacaagggccgtttggatctgctgatcaaggtgtacggccccaaccagcacccagcattcccgcagggtggcaagatgagccaacacttggacaagctgaagattggggagacaatccaggtcaagggccctgttggccacttcacatatgagggcaagggcaactatgtgaatggcaagtccaagggcaaggccagcaagctgtccatgctggcgggcggcactggcataacgccaatcctgcaggtgttggaggccatcttcagggacaaggaggaccagacgtgcatgtccctcatctttgccaacaacagtgagcctgacatcctggctcgtgacaggctagataagctggctcaggagaaccctgagcgcttcaaggtgtaccacgtgctgagcaaggcgcccgaaggctggccacagggcaaaggctacgtgacagagcacatgatgcgcgagaggttcttccccccgggagaggacagcctcgccctgatgtgcggtccgcccggcctcatcagcttagttggcggaccaggctttgaaaagatgggctacagcaaagagcgcacggtgagcttctga

SEQ ID NO: 4997 - protein, 901 aa, Dunaliella viridis
MPALANNTAEPSSSPGEMMLSKLKANGSSGGDSANGVPQQNGKVVVESFVHKHLGAPYEPPLSPEDPDWALHVPASTVNDKDKGTADAWIPRDPRILRLTGRHPLNCEPPMHDLMAAGFITPPSIHYVRNHGPAPKIRWDQHRLEIGGLVERPMSLTMDEIVSMPSVTIPVTMVCAGNRRKEENMLKKSIGFNWGPCAVSTGYWTGVKLCDLLKHVGAKGPKQGGGYHVGFSGPKGELPAGDGTYGTSIPWGKAMNPAEDVLVAYKHNGRWLTIDHGFPVRTIIPGNIGGRTIKWLCKITVQEKESNNHYHYMDNRVLPAHVDQEIATKEGWWFKPEYIINDLNINSAVARPWHDEVVSFKDAKKMYTVKGYAYAGGGHKIIRCEISLDGAQTWRLANIRRFAEPNEYGKHWCWVHWDIDVPIFDFFGPREMLLRAWDETQNTQPATITWNVMGMMNNCHFRVLLHPFMDDKGNVGVRFQHPAPVEVGERGNIGWREEENLRMQALEAAGITTKEGPLPPNRDIAAAAAAKPATPKATGSGKEYTMEEVAQHTTHDSAWFVHEGKVYDATAFLDEHPGGSDSILTATGADATEDFNAIHSKKARNMLADYYIGELVASKPGAPPQPQANGHATANGHTSLITLNPREKVTLKLAERIEVSHNTRIFRFALPSPEHILGLPTGKHLFVYAHVNGELVARAYTPISSDEDKGRLDLLIKVYGPNQHPAFPQGGKMSQHLDKLKIGETIQVKGPVGHFTYEGKGNYVNGKSKGKASKLSMLAGGTGITPILQVLEAIFRDKEDQTCMSLIFANNSEPDILARDRLDKLAQENPERFKVYHVLSKAPEGWPQGKGYVTEHMMRERFFPPGEDSLALMCGPPGLISLVGGPGFEKMGYSKERTVSF

SEQ ID NO: 4998 - DNA, 840 bp, Oryza sativa
  CDS (1)..(840)
atggatctcctgcacggggagagcgtccagaccacggtggccatcgccgtcgccgtcgtcgcggtcgccgcgggcggcgccttcctcctcctccggtccaggaagcccaagggctgtttggatcctgagaacttcaagaagtttaaacttgtggaaaagaagcaaataagtcataacgtggccagattcaaatttgctcttccaactccaacctctgtattgggccttccaattggtcagcatatcagttgcagaggacaagatgctacaggcgaagaagtaatcaaaccttatacccctactacattggattctgatctagggcattttgagcttgttattaagatgtaccctcaaggaagaatgtcacaccatttccgtgaaatgaaagttggtgattatatgtctgtgaagggacctaagggtcgtttcagataccaagttgggcaagtgagagcttttggaatgctagctggtggatcaggcatcactcccatgttccaagttgcaagggcaattcttgagaaccctaatgatatcacaaaagttcatttagtctatgcaaatgtcacgcatgacgacattcttctgaaggaagaactggacaacatggccaaaacctaccctgatcgctttaagatctactatgtcttgaatcagcctcctgaagtctggaacggtggcgttgggtttgtgtcacaggacatgattaaagctcatttgccagcacctgccgaggacattcaaatcttgaggtgtggtcctcctccgatgaacaaggcaatggctgcgcaccttgatgagctcgggtacaccaaggagatgcagttccagttctaa

SEQ ID NO: 4999 - protein, 279 aa, Oryza sativa
MDLLHGESVQTTVAIAVAVVAVAAGGAFLLLRSRKPKGCLDPENFKKFKLVEKKQISHNVARFKFALPTPTSVLGLPIGQHISCRGQDATGEEVIKPYTPTTLDSDLGHFELVIKMYPQGRMSHHFREMKVGDYMSVKGPKGRFRYQVGQVRAFGMLAGGSGITPMFQVARAILENPNDITKVHLVYANVTHDDILLKEELDNMAKTYPDRFKIYYVLNQPPEVWNGGVGFVSQDMIKAHLPAPAEDIQILRCGPPPMNKAMAAHLDELGYTKEMQFQF

SEQ ID NO: 5000 - DNA, 891 bp, Xenopus laevis
  CDS (1)..(891)
atgttggtagccctggcagcgataggagtaacagtgttattgttcctgattaaagctctgggatctggggctaagaaagcaccggtcactctgctggaccccaatgcaaagtacccactacctcttatagagaaacaggaaatcagccatgacactaagaaattcaggtttggcctcccctctgcagagcatgtcttggggctccctgtaggtcagcatatttacctctctgccaaggtcaatgggagcctggtcgttcgggcgtatacgccggtgtccagcgatgaagtcaagggccacgtggatctggttgtgaaggtgtattacaaaaacgtaaatcctaaattccccgacggaggcaaaatgtctcagcatctggacagtctcaaaataggggaaacaattgatttccggggtccgaatgggcttcttgtctacaaagggaaggggaaatttgccatcagaccagataagaaggctgaaccaaagatcaaggtggccaaacacgtggggatgcttgctggtggaactgggattacacccatgttgcagctgattcgtcaaatcacccaggatcccaatgataacacaaaatgctacctcatctttgctaatcagacagaagacgacatcttgctacgatatgaactggaaactgtagccaagagccacccggaacagtttaagctttggtacacgctggatcggcccccgcaagggtggaagtacggctctggttttgttactgcagacatgattaaagagcacctgcctcctccgtccgaggatgtccttgtgctgatgtgcgggcctcctccaatgatccagtttgcgtgccaagacaacctgaccaagcttgggtaccccgaggctggaaggtttgcttactag

SEQ ID NO: 5001 - protein, 296 aa, Xenopus laevis
MLVALAAIGVTVLLFLIKALGSGAKKAPVTLLDPNAKYPLPLIEKQEISHDTKKFRFGLPSAEHVLGLPVGQHIYLSAKVNGSLVVRAYTPVSSDEVKGHVDLVVKVYYKNVNPKFPDGGKMSQHLDSLKIGETIDFRGPNGLLVYKGKGKFAIRPDKKAEPKIKVAKHVGMLAGGTGITPMLQLIRQITQDPNDNTKCYLIFANQTEDDILLRYELETVAKSHPEQFKLWYTLDRPPQGWKYGSGFVTADMIKEHLPPPSEDVLVLMCGPPPMIQFACQDNLTKLGYPEAGRFAY

SEQ ID NO: 5002 - DNA, 843 bp, Vernicia fordii
  CDS (1)..(843)
atggatttggaattcttgcaaacacttgatgttcagattctcgtgggtgtagctgtggctgttttagccattggtattggtgctgtttttctcttttcctccaaaaagcctaaaggctgcttagatcctgagaattttaaggattttaaacttgttaatcgcactcagctgagccataatgttgcaaagttctcatttgcacttcctacgcctacttcagttttgggccttccaattggacaacatataagctgcaggggtaaggatagccaaggtgaagaggttattaaaccatataccccaactacattggattcagatgttggacattttgaattagttattaagatgtatccgcaaggaaggatgtcccatcacttccgagagatgcgtgttggtgattatctttctgtaaaaggacccaaggggcgttttaggtatcaacctgggcaggttagagcatttggaatgcttgctggaggctcaggcatcactccaatgttccaagttgccagagcgatattagaaaacccaaatgacaaaacaaaggtatacctcatttatgccaatgttacgtatgaggacattcttttaaagcaagaattggatggccttgctgctaattaccctgatcgcttcaaagtctactacgttttgaatcagcctcctgaagtatgggatggtggcgttggctttgtatcaaaggaaatgattgaaaatcactgccctgctcctgcatctgatatccagattctgagatgtggaccaccacctatgaacaaggccatggctgctcacctcgaagctcttgactacacgtctgatatgcagttccagttctga

SEQ ID NO: 5003 - protein, 280 aa, Vernicia fordii
MDLEFLQTLDVQILVGVAVAVLAIGIGAVFLFSSKKPKGCLDPENFKDFKLVNRTQLSHNVAKFSFALPTPTSVLGLPIGQHISCRGKDSQGEEVIKPYTPTTLDSDVGHFELVIKMYPQGRMSHHFREMRVGDYLSVKGPKGRFRYQPGQVRAFGMLAGGSGITPMFQVARAILENPNDKTKVYLIYANVTYEDILLKQELDGLAANYPDRFKVYYVLNQPPEVWDGGVGFVSKEMIENHCPAPASDIQILRCGPPPMNKAMAAHLEALDYTSDMQFQF

SEQ ID NO: 5004 - DNA, 840 bp, Vernicia fordii
  CDS (1)..(840)
atggagagcatacagtctcatagggcggagatgataaccatcgccgtcgcactctttgctattggcgccggcaccgcctattatttctatatcacctccaagaaacctaaaggttgcttggaccctgaaaaattcaaggaattcaaacttgttaagcgcactgaactcagccataatgtcgctaagtttaaatttgctctccccactccaacttcagttttgggattaccaattggacaacatatgagctgcagaggaaaagacagtctaggtgaagaagttatcaagccgtatactcccacaactttggactctgatcttggatactttgaactagttataaagatgtatccacaaggaaggatgtcccaccactttagggagatgtgtgaaggtgattgcttggctgtgaaggggcccaaggggcgcttcaagtatcaacctaaccaagttagagcttttgggatgcttgctggaggtactggaataactccaatgttccaagttgcccgggccatactagaaaatcctattgacaagaccaacatacaacttatttatgccaatgttacatttgaggacattcttttgaaggaagagctggataaccttgcaaacaattttcctaacctcttcagtgtctactatgttttgaatcagcctcctgaaggatgggatggtggcatagggttcgtatccaaggaaatgattcaaaaccactgccctccactagcaccagatgttcagatattgaggtgtggacctccaccaatgaataaggccatggctgctcacctagatgctcttggatacacttcccaaatgcagttccagttttag

SEQ ID NO: 5005 - protein, 279 aa, Vernicia fordii
MESIQSHRAEMITIAVALFAIGAGTAYYFYITSKKPKGCLDPEKFKEFKLVKRTELSHNVAKFKFALPTPTSVLGLPIGQHMSCRGKDSLGEEVIKPYTPTTLDSDLGYFELVIKMYPQGRMSHHFREMCEGDCLAVKGPKGRFKYQPNQVRAFGMLAGGTGITPMFQVARAILENPIDKTNIQLIYANVTFEDILLKEELDNLANNFPNLFSVYYVLNQPPEGWDGGIGFVSKEMIQNHCPPLAPDVQILRCGPPPMNKAMAAHLDALGYTSQMQFQF

SEQ ID NO: 5006 - DNA, 915 bp, Gallus gallus
  CDS (1)..(915)
atggaagcgttctcgggtacccccgtggtcgtcgccgtggccgcggtggccgcgacggtgctgctgctgctgctgctcagaggggcgggacggaggccgggccgcccggtcacgctgcgggacccgcaggccaaatacccgctgccgctggtgggcaaagaggagatcagccacgacaccaagaaattccggtttgggctcccttcaccagatcatgtcttaggattacctgtaggccaacacgtttacctttctgcaaaaatcaatggtaatctggtgatccgagcctacaccccggtttccagtgatgagacaaaaggctatgttgatttaattataaaggtttactacaaaaatgtgaatcccaagttcccagaaggtgggaagatgtcccagtaccttgacagcatgaagattggagatgttattgacttcagggggccaaatggactgcttgtctacaaggggtcaggtacctttatgatcaagcctgataagaagtctgaagcacagaggaagtttgcaaagcatcttggggtgatagctggaggaacaggaataactcctatgttgcagctgatccgtcatatcacaagtgaccctaaggactctacaaagtgttaccttctttttgctaatcagacagagaaggacatattgctcagagctgagctagaagacattgctaagaggcatcctgatcaggtcaggctctggtatacgctggacaggcctccacaagattggaagtacagttctggtttcgtcactgcagacatgattaaaacccacctccctccccctggtggtgagacgctcattcttatgtgtgggccaccacctatgattcagtttgcctgtcagcccaacctggacaaactcggctatcccaagagcagtacattttcctattaa

SEQ ID NO: 5007 - protein, 304 aa, Gallus gallus
MEAFSGTPVVVAVAAVAATVLLLLLLRGAGRRPGRPVTLRDPQAKYPLPLVGKEEISHDTKKFRFGLPSPDHVLGLPVGQHVYLSAKINGNLVIRAYTPVSSDETKGYVDLIIKVYYKNVNPKFPEGGKMSQYLDSMKIGDVIDFRGPNGLLVYKGSGTFMIKPDKKSEAQRKFAKHLGVIAGGTGITPMLQLIRHITSDPKDSTKCYLLFANQTEKDILLRAELEDIAKRHPDQVRLWYTLDRPPQDWKYSSGFVTADMIKTHLPPPGGETLILMCGPPPMIQFACQPNLDKLGYPKSSTFSY

SEQ ID NO: 5008 - DNA, 849 bp, Oryza sativa
  CDS (1)..(849)
atggagttcctgcaggggcagagcacggagaccgccgtggccgtggcggtggccgtcgtcgccgtggccgccggcgccgccttcctcctcctcctcctccgcagcagcaagaagcccaagggctgcttggaccctgagaacttcaaggagtttaagcttgtggagaagaggcagatcagtcataatgtggccaagttcagatttgctctaccaacccctgcttctgtgctggggcttccaattggccaacatatcagttgcagagggcaggatgctactggcgaggaagtaatcaagccttatactccaactacgctggattctgatcttggacggtttgagcttgttattaagatgtatccccaaggaagaatgtctcatcattttcatgagatgaaagttggtgactatttatctgtgagaggacctaagggtcgcttcaaataccaacctgggcaagtaagagcatttggaatgttagctggaggatcaggcattaccccaatgttccaagtcacaagagcaattcttgaaaacccaagtgacaatacgaaagtgcacttaatctatgccaatgtcacatatgatgacattcttctaaaggaagaattggatagtatggttgaaacctatcccgatcgcttcaagatatactatgtattaaatcagcctccagaaatctggaatggtggtgttgggtttgtgtcaatggaaatgatccaaacccattgcccggcacctgctgctgacattcagatattgagatgcggacctcctcccatgaacaaagccatggctgaacacctggagaatcttggctacacgaaggaaatgcagttccaattctaa

SEQ ID NO: 5009 - protein, 282 aa, Oryza sativa
MEFLQGQSTETAVAVAVAVVAVAAGAAFLLLLLRSSKKPKGCLDPENFKEFKLVEKRQISHNVAKFRFALPTPASVLGLPIGQHISCRGQDATGEEVIKPYTPTTLDSDLGRFELVIKMYPQGRMSHHFHEMKVGDYLSVRGPKGRFKYQPGQVRAFGMLAGGSGITPMFQVTRAILENPSDNTKVHLIYANVTYDDILLKEELDSMVETYPDRFKIYYVLNQPPEIWNGGVGFVSMEMIQTHCPAPAADIQILRCGPPPMNKAMAEHLENLGYTKEMQFQF

SEQ ID NO: 5010 - DNA, 1509 bp, Mus musculus
  CDS (1)..(1509)
atggattggatccgactgaccaagagtggaaaggacttaacaggattgaagggtgggttaattgaagtaactgaagaagagcttaagaagcacaacaagaaagaagattgttggatatgcataagagggtttgtttacaacgtcagcccttatatggagtaccatccgggtggggaggatgaactcatgagagccgcaggagccgatggaacagatctttttaatgaggttcatcgttgggtcaattatgaatccatgctgaaagaatgcctggttggcaggatggctgtgaagcctgctgttccaaaagactgtcatgaaggaaagagagtcttaaatggcatgcttcccaagagccaaatgtcagacacactgcccagggatgtgacagacacactgcccagggatgtgacagacacactgcccagggaaggcctcagttctccaagctatgattggttccaaacagagtcttcagtcaccattgttgtatacaccaaacaaaagaacatcagtttagactcagtaatcgttgacctccaggatgactccttgagagcagaagcagtcatcaaggatcattcttaccttgtacatgttgggctaagccatgaagttcaagaaaatttttctgtacgggttattgaaaatgttggaaaaatagagattgtcctacaaaagaaagaaagtgtttcttggcaatgtcttggtgatcacctggagaaacatgattctttcatcccaaagaaagatacaggcttgtactaccgacggtgccagttaatatctaaggaagatgtcactcatgacacgagacttctctgtctgatgctgcctccaagtactcaccttcaggtgccagttggacaacacgtttacctcaagctcagtgtcacaggtgcagaaatagtaaagccatatacacccgtgtctgactccttactctcagattttaaagaaccagttctttccccaaataaatacatctactttttgatcaaaatctatcctgctggactcttcacaccagagcttgatcgtcttcagattggagattttatttctgtaagcggacctgaaggcaattttaaagtatccaaactccaggaagtagaagatctctttctattggcagccggaacaggattcacaccaatggtcactgtactgaattatgctttgtctcacatgtccagtctcaggaaggtgaagttgatgttcttcaataaaacagaggacgatataatttggagatgtcagctagagaagttggcattaagagaaaaaagatttgatgttgaatttgttctctcggcaccttctccagaatggaatggaaaacagggacacatatcacgagctcttctctctgaatttttgcaaagaagttcagaaaactctagggccttcctttgcatctgcggaccaacaccatttactgacgaggggataaggttgctgcatgatcttaacttttctgatgatgagattcacggattcaccgcttaa

SEQ ID NO: 5011 - protein, 502 aa, Mus musculus
MDWIRLTKSGKDLTGLKGGLIEVTEEELKKHNKKEDCWICIRGFVYNVSPYMEYHPGGEDELMRAAGADGTDLFNEVHRWVNYESMLKECLVGRMAVKPAVPKDCHEGKRVLNGMLPKSQMSDTLPRDVTDTLPRDVTDTLPREGLSSPSYDWFQTESSVTIVVYTKQKNISLDSVIVDLQDDSLRAEAVIKDHSYLVHVGLSHEVQENFSVRVIENVGKIEIVLQKKESVSWQCLGDHLEKHDSFIPKKDTGLYYRRCQLISKEDVTHDTRLLCLMLPPSTHLQVPVGQHVYLKLSVTGAEIVKPYTPVSDSLLSDFKEPVLSPNKYIYFLIKIYPAGLFTPELDRLQIGDFISVSGPEGNFKVSKLQEVEDLFLLAAGTGFTPMVTVLNYALSHMSSLRKVKLMFFNKTEDDIIWRCQLEKLALREKRFDVEFVLSAPSPEWNGKQGHISRALLSEFLQRSSENSRAFLCICGPTPFTDEGIRLLHDLNFSDDEIHGFTA

SEQ ID NO: 5012 - DNA, 2703 bp, Dunaliella salina
  CDS (1)..(2703)
atgcccgcactcgccaacaacacagcggagccctccagctctccaggcgagatgatgctgtctaagctgaaggctaacggcagcagcggcggggacagcgcgaatggtgtgcctcagcagaacggcaaggtggtggtggagagcttcgtgcacaagcacctgggcgcaccctatgagcctcccctctcccctgaagacccagactgggcactacatgtccctgcttccaccgtgaatgacaaggacaagggcaccgcggacgcatggattccccgcgacccgcgcatcctgcgcctgacgggccgccaccccctgaactgcgagccccccatgcacgacctcatggcagcaggcttcatcacgcccccctccatccactacgtgcgcaaccacggtcctgcgcccaagatccgctgggaccagcgccgcctagagatcggtggcctggtggagcggcccatgtccctgaccatggatgagatcgtgtccatgccatccgtcaccatcccagtcaccatggtgtgcgcaggcaacaggcgcaaggaggagaacatgctcaagaagtccatcggctttaactgggggccgtgcgctgtgagcaccggctactggacaggcgtgaagctgtgtgatctgctgaagcacgtgggcgccaagggcccaaagcagggcggtggctaccatgtgggcttcagtgggcccaagggagagctgccagcaggggatggcacgtacggcaccagcattccctggggcaaggccatgaacccggctgaggatgtactggtagcctacaagcacaatgggcgctggctgaccattgatcacggcttccctgtgcgcacaatcatccccggcaacatcggcggccgcaccatcaagtggctgtgtaagatcactgtgcaagagaaggagagcaacaaccactaccactacatggacaaccgtgtgctgcccgcgcacgtggaccaggagattgccacgaaggagggctggtggttcaagccagagtacatcatcaacgacctcaacatcaacagcgcagtcgcgcgcccgtggcatgatgaggtggtgtccttcaaggatgccaagaagatgtacaccgtgaagggctacgcatatgcaggtggtggccacaagatcatccgctgcgagatctccctggatggtgcgcagacctggaggctcgcaaacatcaggcgctttgccgagcccaatgagtatggcaagcactggtgctgggtgcactgggacatcgatgtgcccatctttgacttcttcgggcccagggagatgctgctgcgcgcatgggatgagacgcagaacacccagcccgccaccatcacctggaacgtgatgggcatgatgaacaactgccacttccgcgtgctcctgcaccccttcatggacgacaagggcaatgtgggcgttcgttttcaacacccagcacccgtggaagtgggtgagcgcggcaacatcgggtggcgcgaggaggagaatctgcgcatgcaggctctagaagcagctggcatcaccaccaaagagggtcccctgccccccaacagggacatcgctgcagcagcagcagccaagcccgcaacccctaaggccactggcagcggcaaggagtacaccatggaggaggtggcccagcacaccacgcacgacagcgcgtggtttgtgcatgaaggcaaggtgtacgatgcgacagcattcctcgatgagcaccctggaggctccgactccatcctgactgccacaggagctgatgcaaccgaggacttcaacgccatccactccaagaaggccaggaacatgctggcagactactacatcggggagctggccgcctccaagccgggtgctcccccacagccacaagccaacgggcatgccactgccaacggccacacctcgctcatcacgctgaacccgagggagaaagtgacgctcaagctggcagagcgcattgaggtctcccacaacacgcgcatcttccgctttgccctaccctctccagagcacatcctgggcctacccactggcaagcacctctttgtgtacgcgcacgtcaatggagagttggttgcacgcgcctacacccccatcagcagcgataaggacaagggccgtttggatctgctgatcaaggtgtacggccccaaccagcacccagcattcccgcagggtggcaagatgagccaacacttggacaagctgaagattggggagacaatccaggtcaagggccctgttggccacttcacatatgagggcaagggcaactatatgaatggcaagtccaagggcaaggccagcaagctgtccatgctggcgggcggcactggcataacgcccatcctgcaggtgttggaggccatcttcagggacaaggaggaccagacgtgcatgtccctcatctttgccaacaacagtgagcctgacatcctggctcgtgacaggctagataagctggctcaggagaaccctgagcgcttcaaggtgtaccacgtgctgagcaaggcgcccgaaggctggccacagggcaaaggctacgtgacagagcacttgatgcgcgagaggttcttccccgcggagaggacagcctcgcctgatgtgcggtccgcccggcctcatcagcttagtggcggaccaggctttgaaaagatgggctacagcaaagagcgcacggtgagcttctga

SEQ ID NO: 5013 - protein, 900 aa, Dunaliella salina
MPALANNTAEPSSSPGEMMLSKLKANGSSGGDSANGVPQQNGKVVVESFVHKHLGAPYEPPLSPEDPDWALHVPASTVNDKDKGTADAWIPRDPRILRLTGRHPLNCEPPMHDLMAAGFITPPSIHYVRNHGPAPKIRWDQRRLEIGGLVERPMSLTMDEIVSMPSVTIPVTMVCAGNRRKEENMLKKSIGFNWGPCAVSTGYWTGVKLCDLLKHVGAKGPKQGGGYHVGFSGPKGELPAGDGTYGTSIPWGKAMNPAEDVLVAYKHNGRWLTIDHGFPVRTIIPGNIGGRTIKWLCKITVQEKESNNHYHYMDNRVLPAHVDQEIATKEGWWFKPEYIINDLNINSAVARPWHDEVVSFKDAKKMYTVKGYAYAGGGHKIIRCEISLDGAQTWRLANIRRFAEPNEYGKHWCWVHWDIDVPIFDFFGPREMLLRAWDETQNTQPATITWNVMGMMNNCHFRVLLHPFMDDKGNVGVRFQHPAPVEVGERGNIGWREEENLRMQALEAAGITTKEGPLPPNRDIAAAAAAKPATPKATGSGKEYTMEEVAQHTTHDSAWFVHEGKVYDATAFLDEHPGGSDSILTATGADATEDFNAIHSKKARNMLADYYIGELAASKPGAPPQPQANGHATANGHTSLITLNPREKVTLKLAERIEVSHNTRIFRFALPSPEHILGLPTGKHLFVYAHVNGELVARAYTPISSDKDKGRLDLLIKVYGPNQHPAFPQGGKMSQHLDKLKIGETIQVKGPVGHFTYEGKGNYMNGKSKGKASKLSMLAGGTGITPILQVLEAIFRDKEDQTCMSLIFANNSEPDILARDRLDKLAQENPERFKVYHVLSKAPEGWPQGKGYVTEHLMRERFFPAERTASPDVRSARPHQLSGGPGFEKMGYSKERTVSF

SEQ ID NO: 5014 - DNA, 906 bp, Xenopus laevis
  CDS (1)..(906)
atgggggcccagctaagcacggtgtccaggatcctcacctccccgttttggtttatcttcagcattttccagagattcttcgggaagccgcgtcctgccatcaccttagagagccccgatatcaaatatgcgctgaggctgatcgatagagaggagatcagccatgacaccaggaggtttcggtttgctctcccctcccccgagcatgtcctcggcctccccattgggcagcatatttacctctcggcgagggtggacggcaatctggtggtcagaccctacaccccagtttccagcgatgataataaaggttatgttgaccttgttgtgaagatctactttaaaaacgtccaccccaaattcccagagggtggaaagatgtcccagtatctggactccctgaggaaagacgaaaccattgatttccgaggaccaagcggccttctcgtgtacagtggcaaagggaccttccagatccgcccagacaagaagtcccccccggtccccaaaaaagcaaatcacctgggaatgatcgctggtgggacagggatcaccccaatgctgcagctcattcgagccatcctaaaggacaaggaggataaaaccatctgctacttgctctttgccaaccagacggagaaagacatcctgctccgctcagaactggaggagatccgcgccaaccacccgtcccgcttcaaactgtggtacacgctagaccgagcccctgaagattgggactacagccagggctttgtcaatgaagacatgatcagctcctttatgcctccccccggggacgacgtcctgatcctgatgtgcggcccccctcccatggtccaatatgcaatcaaccccagcctggacaagctgtcgtacccccaggacaggagattcgcctactag

SEQ ID NO: 5015 - protein, 301 aa, Xenopus laevis
MGAQLSTVSRILTSPFWFIFSIFQRFFGKPRPAITLESPDIKYALRLIDREEISHDTRRFRFALPSPEHVLGLPIGQHIYLSARVDGNLVVRPYTPVSSDDNKGYVDLVVKIYFKNVHPKFPEGGKMSQYLDSLRKDETIDFRGPSGLLVYSGKGTFQIRPDKKSPPVPKKANHLGMIAGGTGITPMLQLIRAILKDKEDKTICYLLFANQTEKDILLRSELEEIRANHPSRFKLWYTLDRAPEDWDYSQGFVNEDMISSFMPPPGDDVLILMCGPPPMVQYAINPSLDKLSYPQDRRFAY

SEQ ID NO: 5016 - DNA, 2697 bp, Chlorella ellipsoidea
  CDS (1)..(2697)
atggtacgcgtatcagaaaacggagtggtcgagaatgtgtcgctcgacgacaagtttgcggtgaagaaatctaagccgagtgccacgctcagtgctatggagcttcatggtgctccaggggcatgcaagaatggggagctgcctgagggaaaccttccatgggagcctgtcaccgagatagacaccaaggacgtcggaacgcctgatcaatggattccaaggcacccagatctgatcagattgactggcaggcaccccctgaatgtcgagccacctcctaccacgctgatggaccggggattcatcacgccttcctccctgcactacgtgcgcaaccacgggccggtgcccaagatgacgtgggcggaccacaaggtcaccatctgcgggctggtagacaagcccctggtgctgtccatggacgaaattgccgccatgccccaggtgactatgctggcgaccctgacatgtgcgggaaaccggcgcaaggaggaaaacatggtgaagaagacgatcgggttcagctggggccctgctggcacggggtgctcctactggacaggcgtgcgcatgtcccacctgctcaagctggcaggggtggatgaggatagagaggatctgcacgtgaggttcagggggcccaagggcgagctccccaagggcaaggatggctcctatgccacctccctgcccctgtggaagtgcatgtgggacggcagcgacgtcatcgtggcctggaagcagaacggcaggattttggatcccgatcacggcttcccggtgcgcatgatcattccagggcacatcggtgggcgcatggtcaagtggctggaggagatcgaggtggcagactccgaatcggacaaccactaccacttcatggacaacagggtgttgccttcccatgtggacgaggccctggccaaggaggaaggctggtggttcaagccggacttcatcatcaacgagctcaacatcaactctgccatcaccaccccagcacatgacgagagcgtgccctacgcacagaacacagttgtgaagggctatgcctacgcaggcgggcagaaggtgattcgctgcgagctgtctgtggatgacgccaagtcctggaaactggccaagatcaaccgggtgcaggacacccccaaccgcggcggcaagttctgggcctgggtacactgggagattagtgttccgacagttgagctgctgcagaccaaggagatctgctgccgtgcgtggtcctccgacatgaacacgcagcccaactcgttcacctggaacctgatgggcatgatgaacaactgcgtgtaccgcgtcaaggtgcacccctccgtgaccaacggcgccctggccctgcggtacgagcaccccaccctggcgggacctgccctgggcggctggatgaaccgcgcggaggacaaacctgctgtcgaggaggagaaggtggtggcagctgcgcccaaggagggtgggcggcgctactgcatggcagagatcgagcagcacgccagcaaggagtctgcctggtttgtcagagatggcaaggtgtacgatggcacagcattcctgaaggaccacccaggtggtgccgagagcatcctgctggccagcggcatggactcctccgacgacttcaacgccatccactctgccaaggccaagcgcatgctgaacgactacgagatcggcatcttcgatgacactgctcccatgtcgtcagggtcagcccctccccctcccatggcaaatgggcacacagcagcagccgagaagctggagcagggtgaactcatcgccctcaaccccaggaagaagcagcagttcaagctgattgagaaggctgagctgagccacaatgtccggagattcagatttgagctccagtctcccaagcacaagctggggctgccatgcggaaagcacgtctacatctacggcaaggtgggaggcgagccggtgatgagggcatacactcctaccagcagtgacgatgacctgggcatctttgacctggtcatcaaggtgtactgggcgaatgagcaccccagcttcccccagggtgggaagctctcgcagtggctggcagagcagcccataggcgccatggtggaggccaaggggcccaccggtcacttccactacctgggcaggggcaggtacaagatggacgacaaggagggcttcacctcccacatgtccatgtgcgctggagggactggcatcacgccttgctaccaggtggcgaaggccatcctgaaggaccctgaggacaagacacagatctcgctcatctatgcaaaccagacgccggacgacatcctgctctgggatgagctcgatgagatggctgcaaagcacgacaacttcaaggtccactatgtcgtgtctgcatttgccaagggggacaccaaccccaagacttcggaggcggggtggacccacagcatcggccgcatgacccaggaaatggccaaggagcacctgttccaggccaccgacaacgccctggccctcttctgcggcccgccccccatgatcacatacgcctgcaagcccttctgcagcgcgatggggtacaccgacgagaccatggtcattcttctgatcgatccatcgataccccggccagtatcactgtcttctttgaagtttgactggtgcaacgaggcggccacgatggtgcaatcatag

SEQ ID NO: 5017 - protein, 898 aa, Chlorella ellipsoidea
MVRVSENGVVENVSLDDKFAVKKSKPSATLSAMELHGAPGACKNGELPEGNLPWEPVTEIDTKDVGTPDQWIPRHPDLIRLTGRHPLNVEPPPTTLMDRGFITPSSLHYVRNHGPVPKMTWADHKVTICGLVDKPLVLSMDEIAAMPQVTMLATLTCAGNRRKEENMVKKTIGFSWGPAGTGCSYWTGVRMSHLLKLAGVDEDREDLHVRFRGPKGELPKGKDGSYATSLPLWKCMWDGSDVIVAWKQNGRILDPDHGFPVRMIIPGHIGGRMVKWLEEIEVADSESDNHYHFMDNRVLPSHVDEALAKEEGWWFKPDFIINELNINSAITTPAHDESVPYAQNTVVKGYAYAGGQKVIRCELSVDDAKSWKLAKINRVQDTPNRGGKFWAWVHWEISVPTVELLQTKEICCRAWSSDMNTQPNSFTWNLMGMMNNCVYRVKVHPSVTNGALALRYEHPTLAGPALGGWMNRAEDKPAVEEEKVVAAAPKEGGRRYCMAEIEQHASKESAWFVRDGKVYDGTAFLKDHPGGAESILLASGMDSSDDFNAIHSAKAKRMLNDYEIGIFDDTAPMSSGSAPPPPMANGHTAAAEKLEQGELIALNPRKKQQFKLIEKAELSHNVRRFRFELQSPKHKLGLPCGKHVYIYGKVGGEPVMRAYTPTSSDDDLGIFDLVIKVYWANEHPSFPQGGKLSQWLAEQPIGAMVEAKGPTGHFHYLGRGRYKMDDKEGFTSHMSMCAGGTGITPCYQVAKAILKDPEDKTQISLIYANQTPDDILLWDELDEMAAKHDNFKVHYVVSAFAKGDTNPKTSEAGWTHSIGRMTQEMAKEHLFQATDNALALFCGPPPMITYACKPFCSAMGYTDETMVILLIDPSIPRPVSLSSLKFDWCNEAATMVQS

SEQ ID NO: 5018 - DNA, 834 bp, Gibberella zeae
  CDS (1)..(834)
atgaagagcaagcctttcacaagctatcctgcgcacatgaaggttccaaagcgaactcagcaagacacccttctccagagaggactgttagaccccgttgtctattctcccctacctctggtaaagaagactcaagtcacgccaaatgtcctccacttaaccttcagtctaccaacaacaagcacggtgcttggattgcctattggacagcatgtcacaattaaggctgacgtacggggagaaactgtcgctcgttcatacacgcctgtgtcaaacaactcagaccttggcatccttgagctggttatcaaagtgtacccggacggaaaactgactaacaattatctagctcaccttcaggttggagatgaagttctctttcgaggtcccaaaggagcgatgaaatatcaacccaacatttgcaagaagatcgggctgattgctggcggcacgggtattacacccatgttccaagtcattcgcgccgtttgcgagcatgaccgtgacacgacagagatttccctgatctacgcgaataggacagagcaggatattcttttgcgggaggaactagacaggtttgccagacggtacccaaagaacttcaaagtttattacatgttagatgaaccgcctagcgattgggagtatggctcgggctatgtcacgcaggaattgatgaaggataaaatgcctgctcccagtatggactccaaggtattcttatgtggtccgccagggatggtaaatgcatctaagaagggacttgttgacttgggctatcagcaacctggagcttcggcaaagatgtcggatcagatctttgtattttaa

SEQ ID NO: 5019 - protein, 277 aa, Gibberella zeae
MKSKPFTSYPAHMKVPKRTQQDTLLQRGLLDPVVYSPLPLVKKTQVTPNVLHLTFSLPTTSTVLGLPIGQHVTIKADVRGETVARSYTPVSNNSDLGILELVIKVYPDGKLTNNYLAHLQVGDEVLFRGPKGAMKYQPNICKKIGLIAGGTGITPMFQVIRAVCEHDRDTTEISLIYANRTEQDILLREELDRFARRYPKNFKVYYMLDEPPSDWEYGSGYVTQELMKDKMPAPSMDSKVFLCGPPGMVNASKKGLVDLGYQQPGASAKMSDQIFVF

SEQ ID NO: 5020 - DNA, 2595 bp, Penicillium griseoroseum
  CDS (1)..(2595)
atggccagcataaccacacaaacgataacagaatccgaaacaatctctttcaaaaatgcccaaatcacagtcgaggacatcattccaagtccaggggagcccgacatcccactcccaccaccatcaaagaaccccgtcgacatcttggacgtggataaaggcacaccagataaccatgtacctcgcgatccacgattgattcggttgacgggagttcacccattcaatgtggaaccaccattgacagcattgtataaagaaggctttctcacatccccggaactgttctatgttcggaaccacgggccagtgccccaggtccgcgatgaggatatcccggattgggagattagtatagaagggttggttgagaaaccattagtcctgaacttccgagaagtacttcagaagtacaaccagatcaccgcaccaatcacactcgtttgtgcgggcaacaggcgcaaagaacaaaacacagtccgaaagtcaaagggcttctcatggggtccagctggtttatccacggcactattcacaggacctatgatggcagatattctgcgcagtgcgaagccacttcgacgagcgaaatatgtctgtatggagggtgctgataaactgccgaatggattttatggaacttcagtcaaattgaactgggccatggacccaaatcgaggaatcatgttggctcataagatgaatggcgaagaccttcgaccagaccatggccgtcctttgagggcagtggtgcctggccaaatcggaggtcggagcgtgaagtggctgaagaagttgattctgactgatgccccaagtgacaactggtatcatatcaatgataaccgagtactcccgacaatggtgtcgccggagatgtccgccctagatcgcaagtggtggaccgatgagcgatatgccatctatgaacttaacgtgaatgcggcggctgtgtatccacaacacgaggaagagatcgatttatccacagccggacccacgtatacagtcaaaggatatgcatacgctggcggtggccggagaataacaaaggttgagatttctctagacagaggcaaatcgtggcgcctctcagagatcgaatacgcagaagataaatcccgcgactttgacggcgacctgttcggcggcaaggtagacatgtggtggagggaggcatctttctgctggtctttctggtcgctggatgtcccagtggcagacctagagactagcgatgcaatcctagtccgtgcagtggacgaggcgctgagtgccatgccgcgtgacatgtactggtctgtcctgggaatgatgaataacccatggttcaaagtggcgatcaccaaagaaggaaatccccttgaatttgagcacccaacacatcccagcaagggtggaaggtggatggaaagagtcaagaagactggtggtgacttgctcaatggtaactggggtgaaagggttaaaggcgaggaacttgtcgagcctgagcccgtgaaggaaatcaacatgaagaaagacggcgtgaacagacaaatagacttgcaagagctgaaagctaatagcaccagcgagaagccctggtttgttgtcaatggcgaagtgtatgatggtacaggcttcctcgaaggtcatcccggaggagcgatcagtattacatcttctgctggtttggatgtatccgaagacttccttgcaattcatagtgaaaccgccaaagcaatgatgccggactaccatattggcacattagacaaggcatctctccaagcgttgaagagcgattcagctgggggttctagtgaaccacgtgaagtgttccttcagtcgcggacatggacaaaagccaccctcacagagaagagggatgtgtcctgggatactcggctattcgtattcgacctggaacataacaagcagacactcggcctaccaatcggccagcatctgatgatcaaagtccaagacccatcaaataacgaggcagtcatcagatcctatacaccaatgtcagacacaaacctgataggcaaaatggagttgctcataaaggtctacttcccaacggatagcattccaggagggaaaatgaccatggctctcgacaagctgccgctcggctcagaaattgactgcaagggtccgacagggcggtttgaatatctcggcaacggccgggtctcaatcagcggcaaagagcgccatctccgctctttcaagatgatctgtggaggaactggcatcacaccagtcttccaggttctgcgggctgtcatgcaagacgcgcaagatcccacgacgtgtgttgtgctagacggaaacaggcaggaggaagatattttgtgtcgttctgatcttgatgcttatgtggaaaccgattctcggaaatgcactgtcgtgcatacgttgactaaagggtctgatacctggactggtcgtcggggcccgcatttccgaggaacttctccggagtatgcgcctccagaagagcagagtatggttttggtctgtggccctgggcctatggagaagtctgctcgcaatattcttcttgcccaaggctgggccaggtcggatcttcactttttctag

SEQ ID NO: 5021 - protein, 864 aa, Penicillium griseoroseum
MASITTQTITESETISFKNAQITVEDIIPSPGEPDIPLPPPSKNPVDILDVDKGTPDNHVPRDPRLIRLTGVHPFNVEPPLTALYKEGFLTSPELFYVRNHGPVPQVRDEDIPDWEISIEGLVEKPLVLNFREVLQKYNQITAPITLVCAGNRRKEQNTVRKSKGFSWGPAGLSTALFTGPMMADILRSAKPLRRAKYVCMEGADKLPNGFYGTSVKLNWAMDPNRGIMLAHKMNGEDLRPDHGRPLRAVVPGQIGGRSVKWLKKLILTDAPSDNWYHINDNRVLPTMVSPEMSALDRKWWTDERYAIYELNVNAAAVYPQHEEEIDLSTAGPTYTVKGYAYAGGGRRITKVEISLDRGKSWRLSEIEYAEDKSRDFDGDLFGGKVDMWWREASFCWSFWSLDVPVADLETSDAILVRAVDEALSAMPRDMYWSVLGMMNNPWFKVAITKEGNPLEFEHPTHPSKGGRWMERVKKTGGDLLNGNWGERVKGEELVEPEPVKEINMKKDGVNRQIDLQELKANSTSEKPWFVVNGEVYDGTGFLEGHPGGAISITSSAGLDVSEDFLAIHSETAKAMMPDYHIGTLDKASLQALKSDSAGGSSEPREVFLQSRTWTKATLTEKRDVSWDTRLFVFDLEHNKQTLGLPIGQHLMIKVQDPSNNEAVIRSYTPMSDTNLIGKMELLIKVYFPTDSIPGGKMTMALDKLPLGSEIDCKGPTGRFEYLGNGRVSISGKERHLRSFKMICGGTGITPVFQVLRAVMQDAQDPTTCVVLDGNRQEEDILCRSDLDAYVETDSRKCTVVHTLTKGSDTWTGRRGPHFRGTSPEYAPPEEQSMVLVCGPGPMEKSARNILLAQGWARSDLHFF

SEQ ID NO: 5022 - DNA, 2685 bp, Tilia platyphyllos
  CDS (1)..(2685)
  misc_feature (88)..(88): y is t or c
  misc_feature (1024)..(1024): w is a or t
  misc_feature (1140)..(1140): r is g or a
  misc_feature (1263)..(1263): s is g or c
  misc_feature (1269)..(1269): y is t or c
  misc_feature (1314)..(1314): s is g or c
  misc_feature (1317)..(1317): y is t or c
  misc_feature (1326)..(1326): r is g or a
  misc_feature (1330)..(1330): r is g or a
  misc_feature (2604)..(2604): s is g or c
atggcggcttccgtcgataatcggaaattcaggcgccttgaaccggctttgaacggtgtttttacacccctgaagcccggtccaacaytaactcaccgccctgtgaaacatgttttcgtagaccatgcttatgactcttccagcgaagatgaagaaaatgagatcaacctttacaaaaacatgattatcaaatccaacaacgagcttgaaccctccatcttggacactagagatgaagcaaccgctgataactggatcgagcgtaacccttccatggttcgtctcacagggaaacatcctttcaactctgaagcccccttgaaccgcctcatgcaccacggctttatcacccctgttcctctccactacgttcgtaaccatggtccggttcctaaagcttcgtgggatgactggaccgtcgaagtaactggtttagttaaaaagccgatgaagttgaccatggtccagctagtgaacgagtttcaaagccgtgagttccccgttaccctggtttgcgctgggaacagacgtaaagaacaaaacatgatcaaaaaaacgataggttccaattggggagctgctggcatttccacttcagtgtggagaggtgtactattgtgtgacgtgctcaagcgatgtgggatctttagcaaaaaacaccgggccctcaatgtgtgctttgaaggggccgaggatttgccaggtggtggtgggcccaagtatggaactagcatcaagaaggaatttgccatggacccgtctcgggatattatcttagcttacatgcaaaacggtgagcgattagctcccgatcatggcttccctgttcgaatgatcattccagggtttatcggtgggcgaatggtgaaatggttgaagagaattatcgttacaaccaaagaatccgagagttattatcactataaagataatagagtactcccttctcatgtagatgcagagctagccaacgctgaagcttggtggtataaaccagaatacatcatcaatgagttgaacatcwactcggtgataacgatgccttgtcatgacgagatcttgccaatcaactcgtggacgactcagatgccgtacactttgaggggctatgcatattccgggggtggaaaaaaggtgatrcgtgtggaggttacaatggacgatggtgaaacgtggcaagtgtgcacgctggaccaccctgagaaaccaaacaaatatggcaacttctggtgttggtgcttctggtcgctggaggtggaggtscttgayctgctcggagccaaggagatatcggttcgagcctgggatgagacsctyaacacccarcccragaagctcatttggaatgtcatgggaatgatgaacaactgctggttccgtataaaaacaaacgtatgcaagccacacaaaggagaaatcggcattgttttcgagcacccaacgttgccaggcaaccaatccggtggatggatgactaaggcacgacaccttgaaaaatcaatcgatgcaaacccgaccttaaagaagagtgtctcatctcctttcatgaacactgactccaaaacattttcaatgtctgaagtcaggaaacacaactctgctgattctgcttggatcgtcgtccatggtaatatctacgattgcactcggttcctcaaggatcaccctggtggcgctgacagtattttgatcaacgctggaacggattgtactgaggaatttgacgcaattcactctgataaagccaagaaactgctagaagattatcgagtcggagagttaatcacgactggttatgcttccgactcttccatgtcgtcgcctaataactccgtgcatggggcatcgaacatgagctttttagctcctattaaagaagatgcgcctacaagacctgttgcgctggttccacgtgagaaaatcccatgcaaactcgttgaaaaaacatcgatctctcacgatgttcgtttgtttagatttgcattgccatcggatgatcaagtgctaggattacccgtagggaagcacatatttttgtgtgtcacgattgatgataagctttgcatgagagcctacaccccaactagcaccattgatgaagtggaccactttgatctagtggtcaaggtttatttcaaaggggtgcacccgaaattccctaatggcgggctcatgtcacaatatttggactctctgccactagggtcattgcttgacgtgaagggtcctttgggtcacattgaatacactggtcgtggcaacttttcagttcatggcaaacccaagtttgccaagaagctggcaatgttggctggtgggacagggatcacaccaatttatcaagtcatccaagctatcttgaaggaccctgaggacgagacagagatgtatgtggtgtatgcgaatcgaaccgaagacgatattttgctgaaagaagagcttgacggttgggctaagaagcatgatcggttgaaggtgtggtacgtggtgcaagaatcaaccaggaaaggatgggaatatagcttgggtttcatcacggaaaggatactgagggatcacatcccggagggctccaaggacactcttgcgttggcttgtgggccsccgccaatgattcagtttgctgtgcagcctaaactggagaagatgaactatgacgtcaaggattcattgttggtattttag

SEQ ID NO: 5023 - protein, 894 aa, Tilia platyphyllos
  misc_feature (342)..(342): The Xaa at location 342 stands for Asn, or Tyr.
  misc_feature (380)..(380): The Xaa at location 380 stands for Ile, or Met.
  misc_feature (444)..(444): The Xaa at location 444 stands for Glu, or Lys.
MAASVDNRKFRRLEPALNGVFTPLKPGPTLTHRPVKHVFVDHAYDSSSEDEENEINLYKNMIIKSNNELEPSILDTRDEATADNWIERNPSMVRLTGKHPFNSEAPLNRLMHHGFITPVPLHYVRNHGPVPKASWDDWTVEVTGLVKKPMKLTMVQLVNEFQSREFPVTLVCAGNRRKEQNMIKKTIGSNWGAAGISTSVWRGVLLCDVLKRCGIFSKKHRALNVCFEGAEDLPGGGGPKYGTSIKKEFAMDPSRDIILAYMQNGERLAPDHGFPVRMIIPGFIGGRMVKWLKRIIVTTKESESYYHYKDNRVLPSHVDAELANAEAWWYKPEYIINELNIXSVITMPCHDEILPINSWTTQMPYTLRGYAYSGGGKKVXRVEVTMDDGETWQVCTLDHPEKPNKYGNFWCWCFWSLEVEVLDLLGAKEISVRAWDETLNTQPXKLIWNVMGMMNNCWFRIKTNVCKPHKGEIGIVFEHPTLPGNQSGGWMTKARHLEKSIDANPTLKKSVSSPFMNTDSKTFSMSEVRKHNSADSAWIVVHGNIYDCTRFLKDHPGGADSILINAGTDCTEEFDAIHSDKAKKLLEDYRVGELITTGYASDSSMSSPNNSVHGASNMSFLAPIKEDAPTRPVALVPREKIPCKLVEKTSISHDVRLFRFALPSDDQVLGLPVGKHIFLCVTIDDKLCMRAYTPTSTIDEVDHFDLVVKVYFKGVHPKFPNGGLMSQYLDSLPLGSLLDVKGPLGHIEYTGRGNFSVHGKPKFAKKLAMLAGGTGITPIYQVIQAILKDPEDETEMYVVYANRTEDDILLKEELDGWAKKHDRLKVWYVVQESTRKGWEYSLGFITERILRDHIPEGSKDTLALACGPPPMIQFAVQPKLEKMNYDVKDSLLVF

SEQ ID NO: 5024 - DNA, 2790 bp, Tuber borchii
  CDS (1)..(2790)
atgtttggctcgatttaccagttagaaatgaagtacctcgacattatcgttggatgggttttcagcctgctttctctaatccgggtttttatggcgaagaagttggctgctgttaatactactccctctatcagcattcccaacccggaagccaattctcatatacccccaagaacgagctttgtaggggatacaaaccaattagctccacctactcccccagagtcagacaaaggcgacgatgaatgcgattatttggaaaatattccacttccagcaccatcggtaaacccaacaaaggttcttgatattgacgttggaacgcctgatgcacatgtacccagggatccaaggctgatacgactaacgggagtgcatccatttaacgttgagccacctctttcggcattgtttgactctggatttttaacacctacggaactcttttatgtccgaaaccatggagccgttccagaagtcagggatgacgaagtgctggactggacaataacggttgaagggttggtagccaaccccctaactctgaccttacgtcaaattatggaagagttcgagcaggttacccttcctgtcacttttgtctgcgccggaaaccgtcgaaaagagcaaaatcaggttcgcaaatctcaaggtttctcatggggtgccgcgggtgtctccacatcactcttcacaggcccacttttggcgtccgttattgccactgcaaggcctcaaagaaacgccagatatctctgtatggagggggcagacgagctaccaaatggaaactacgggacttcagttcgtctttctcaaatatacgatccgaaccgcggaattatgcttgcacacaaaatgaatggggaagaacttcgccctgatcacggacgccccctcagagtggttgtcccatccatgattggtgggagatctgtaaagtggttaaagaggcttatactcacggagggtccgagtgataattggtatcatatttacgataatagggttctaccaaccatggtcacaccggagatggggaaggagaacaaggactggtggaccgatgagcggtacgcaatttatgatctttctgttaattcagcgattgcatatcccgcgcacgacgagaaactgtcgctagagacaacaaaagaagaatacaatctgaaggggtatgcctatgctggggctgggaggaggattactcgtgttgagatttcccttgacaaaggccgaagctggaccctatcctccatagaataccccgaagacttgtaccgagctgttcctgaagacgccactctgtttggaggtcgcctcgatgttggcgcacgagacacttgtttgtgctggtgtttttggtctctgggtgttcctgtctctgccttgcttgctgcggatgatgtcgttgttagagccatggacgatagcatgaacacccagcccagagatacctattggtcggtattgggcatgatgcacaattcatggttcagggtcgcagtccgtaaggaaagtggccatgttagatttgaacatccgacccagccggccctgcaaaagggtggatggatggaaagggtgaaaaaagaaggaggtgatctattgggccccaattggggtgagaaggtggttggacaagagttttctactgatgaaattgtcaaagcccctaaagtacgagatgctgtgaagatgacgaacgattccgtgaagaggacaattgaaatcgaggaactcagaagccatgacaacgccactgagccatggtttattgttgaaggagaagtatatgatggaaagccttttcttgaagaacatccaggaggagctacgagcatcatatcggccgcaggacaagatgccactgatgagtttgtggggattcatagcgagagcgcaaaagcaatgatgccaaaataccacattggtaccctaagtcctgcagcacgcgaagctctccttgagcaggccacatcgtccaagaaggagccctcggaaacattcctggatcctcgagcatggtgcgaagcaacccttgtacagaaaaaagtggtatcatgggataccagaatattcaccttcaagctcgatagcccagcacaaacactgggtcttcccgtcggacagcatcttctcatcaagatacgggacgaaaagacgggagaggtgattacacggccgtacactcccatctcaagtaacacggaaaagggggttgttcatctgcttgttaaagtatacttcgatacaccaactgctccgggtgggaagatgacacaagctatggatagactacaaatgggtcatacctcttccttcaaaggtcccgttggtaaacttatttatcacgggcaaggtgttgtctctctcctggacaatcggatcaacgtcgcatcatttcttatgatctgtggtggaagtggaataactcctattttccaagtcctcagggcagtcctctccaaccctacggaccctacaacatgcgttgtcctcgacggaaaccgaacagaagaagatattctgtgcagagaagaactggattcatttgcagcaacatatccggagagatgcaagattattcacacactttcaaaaccttctgaggggtggcagggtgagaggggtagaattgggtgggatctcatcaaacagaattacccgcgggggagcaagggtggtaagcccttaacgctgatatgtgggcctgagccattagagaagagcgttaaggagctactaacagctgccgggtggggggaaaatgacatggtatttttctag

SEQ ID NO: 5025 - protein, 929 aa, Tuber borchii
MFGSIYQLEMKYLDIIVGWVFSLLSLIRVFMAKKLAAVNTTPSISIPNPEANSHIPPRTSFVGDTNQLAPPTPPESDKGDDECDYLENIPLPAPSVNPTKVLDIDVGTPDAHVPRDPRLIRLTGVHPFNVEPPLSALFDSGFLTPTELFYVRNHGAVPEVRDDEVLDWTITVEGLVANPLTLTLRQIMEEFEQVTLPVTFVCAGNRRKEQNQVRKSQGFSWGAAGVSTSLFTGPLLASVIATARPQRNARYLCMEGADELPNGNYGTSVRLSQIYDPNRGIMLAHKMNGEELRPDHGRPLRVVVPSMIGGRSVKWLKRLILTEGPSDNWYHIYDNRVLPTMVTPEMGKENKDWWTDERYAIYDLSVNSAIAYPAHDEKLSLETTKEEYNLKGYAYAGAGRRITRVEISLDKGRSWTLSSIEYPEDLYRAVPEDATLFGGRLDVGARDTCLCWCFWSLGVPVSALLAADDVVVRAMDDSMNTQPRDTYWSVLGMMHNSWFRVAVRKESGHVRFEHPTQPALQKGGWMERVKKEGGDLLGPNWGEKVVGQEFSTDEIVKAPKVRDAVKMTNDSVKRTIEIEELRSHDNATEPWFIVEGEVYDGKPFLEEHPGGATSIISAAGQDATDEFVGIHSESAKAMMPKYHIGTLSPAAREALLEQATSSKKEPSETFLDPRAWCEATLVQKKVVSWDTRIFTFKLDSPAQTLGLPVGQHLLIKIRDEKTGEVITRPYTPISSNTEKGVVHLLVKVYFDTPTAPGGKMTQAMDRLQMGHTSSFKGPVGKLIYHGQGVVSLLDNRINVASFLMICGGSGITPIFQVLRAVLSNPTDPTTCVVLDGNRTEEDILCREELDSFAATYPERCKIIHTLSKPSEGWQGERGRIGWDLIKQNYPRGSKGGKPLTLICGPEPLEKSVKELLTAAGWGENDMVFF

SEQ ID NO: 5026 - DNA, 2736 bp, Solanum tuberosum
  CDS (1)..(2736)
atggcggcatccgttgaaaacaggcagttccctcaccttgaaccgggtttatcaggtgtaggccgtaatttcaagcctaggcctgattccccggttcgtggttgcaacttccctccgtcatccaaccatgaactccctttccaaaaacaacaaaatctccccatttaccttgattactcgtctagtgaagacgaagatgacgatgacgaaaaaaatgaatacgttcaaatgatcaaaaaaggtaaaactgaattagaaccatcaattcacgatactagagacgaaggtaccgctgataattggatccaacgaaacttttccttaatacgtctcaccggtaaacacccattcaactccgaaccccctttggctcgacttatgcatcacggtttcatcaccccagtcccacttcattacgtccgtaaccatggccccgttcccaaagcctcctgggctgactggagcgtcgaagttaccgggctagtaaaacgaccaatgaaattcacaatggatcagctggttaacgaatttccttcacgtgaattgcctgtcacacttgtatgtgctggtaatcgtcgtaaagagcagaatatggttaagcagacaattggtttcaactggggtgctgctgccgtttcaactaccgtatggcgcggagtacccctccgcgccttgttgaaacggtgcggtgttcatagtaagaaaaaaggcgcgcttaacatctgtttcgaaggttcagatgttttacctggaggtggaggttcaaagtacggaacgagtataaagaaggaattcgccatggatccatctcgtgatattattgtagcttacatgcaaaacggagaaatgttgagcccggatcacgggtttccggtaaggatgattattccgggattcatcggtggaagaatggtgaaatggttaaagaggattgtggtcactacacaagaatctgaaagctattatcactacaaggataatagagttctccctccacatgttgacgctgaacttgctaacgctgaagcatggtggtacaaaccagagtacatcatcaatgagctcaacatcaactctgtcattacaactccgtgccatgaagaaattttgcctatcaatgcgtggactactcagcgaccttacacgttgagaggctatgcttattctggtggaggtaaaaaggtaactcgagtggaagtgactttggatggaggagagacatggagtgtgtgtacacttgatcacccagagaagccaactaagtatggcaagtactggtgttggtgcttttggtcactcgaggttgaggtgctcgacttgcttagtgctaaagaaattgctgtacgagctatcgatgagacccacaatactcaacccgagaagcttatttggaacgtcatgggaatgatgaacaattgttggtttcgagtgaagatgaatgtgtgcaagcctcacaagggagagattggtatagtgtttgagcacccgacccaacctggaaaccaatcaggtggatggatggcaaaggagagacacttggagatatcagcagtggctcctccaacactaaagaagagtatttcaactcctttcatgaacacagcttcgaagatgtattccatgtctgaggtgaggaagcacaactcttcagactctgcttggatcatagtccatggacatatctacgatgcctcacgtttcttgaaagaccatcccggtggtgttgacagcattctcatcaatgctggaactgattgtactgaggaatttgatgcaattcattctgataaggctaagaagctattggaggactttaggattggtgaactcataactactggttacacgtctgattcgtctccaaacacttctgtccatggatcctcttccattagtagcttcttagcacctattaaggaacttgttcaaacaccaacaaggagtgtagccctcatcccaagggaaaaaatcccttgcaaactcgtcgacaagcaatccatctcccatgatgttagaaaattcaaatttgcattaccctctgaggatcaagtcttaggtttacctgttggcaaacacattttcctctgtgccacagttgatgacaaactctgcatgcgtgcctacacgcctactagcacagtcgatgaagtagggttcttcgagttggttgtcaaaatctacttcaaaggtgttcaccctaaattccctaatggaggtcaaatgtcacaacatcttgattctctcccaataggtgcattcctcgacgttaaaggtccattaggtcacattgaatatcaaggcaagggtaatttcttagtccatggtaaacaaaagtttgccaagaagttagctatgatagctggtggaacaggtataactcctgtatatcaagtaatgcaatcaattttgaaagatccagaagacgacacagaaatgtatgtggtgtatgcaaacagaacagaggacgatattttgctcaaagaggaactcgatgcatgggcagagcaaataccagatagagttaaagtttggtatgtcgttcaagaatcgattacagaaggatggaagtatagtacaggatttgttacagaagcaattctcagagaacatatacctcaaccatctcatacaacattggcattggcttgtggaccacctcctatgatacaatttgctattaatccaaacttggagaaaatgggatatgacattaaggaggaattattggtgttctaa

SEQ ID NO: 5027 - protein, 911 aa, Solanum tuberosum
MAASVENRQFPHLEPGLSGVGRNFKPRPDSPVRGCNFPPSSNHELPFQKQQNLPIYLDYSSSEDEDDDDEKNEYVQMIKKGKTELEPSIHDTRDEGTADNWIQRNFSLIRLTGKHPFNSEPPLARLMHHGFITPVPLHYVRNHGPVPKASWADWSVEVTGLVKRPMKFTMDQLVNEFPSRELPVTLVCAGNRRKEQNMVKQTIGFNWGAAAVSTTVWRGVPLRALLKRCGVHSKKKGALNICFEGSDVLPGGGGSKYGTSIKKEFAMDPSRDIIVAYMQNGEMLSPDHGFPVRMIIPGFIGGRMVKWLKRIVVTTQESESYYHYKDNRVLPPHVDAELANAEAWWYKPEYIINELNINSVITTPCHEEILPINAWTTQRPYTLRGYAYSGGGKKVTRVEVTLDGGETWSVCTLDHPEKPTKYGKYWCWCFWSLEVEVLDLLSAKEIAVRAIDETHNTQPEKLIWNVMGMMNNCWFRVKMNVCKPHKGEIGIVFEHPTQPGNQSGGWMAKERHLEISAVAPPTLKKSISTPFMNTASKMYSMSEVRKHNSSDSAWIIVHGHIYDASRFLKDHPGGVDSILINAGTDCTEEFDAIHSDKAKKLLEDFRIGELITTGYTSDSSPNTSVHGSSSISSFLAPIKELVQTPTRSVALIPREKIPCKLVDKQSISHDVRKFKFALPSEDQVLGLPVGKHIFLCATVDDKLCMRAYTPTSTVDEVGFFELVVKIYFKGVHPKFPNGGQMSQHLDSLPIGAFLDVKGPLGHIEYQGKGNFLVHGKQKFAKKLAMIAGGTGITPVYQVMQSILKDPEDDTEMYVVYANRTEDDILLKEELDAWAEQIPDRVKVWYVVQESITEGWKYSTGFVTEAILREHIPQPSHTTLALACGPPPMIQFAINPNLEKMGYDIKEELLVF

SEQ ID NO: 5028 - DNA, 2256 bp, Solanum tuberosum
  CDS (1)..(2256)
atggtaaaacgaccaatgaaattcacaatggatcagctggttaacgaatttccttcacgtgaattgcctgtcacacttgtatgtgctggcaatcgtcggaaagagcagaatatggttaagcagacgattggtttcaactggggtgctgctgcagtttcaactaccgtatggcgcggagtacccctccgcgccttgttgaaacggtgcggtgttcagagtaagaaaaaaggtgcgcttaacgtctgtttcgaaggttcagatgttttacctggaggtggaggttcaaagtacggaacgagtataaagaaggaattcgccatggatccatctcgtgatattattgtagcttacatgcaaaacggagaaatgttgagcccggatcacgggtttccggtaaggatgattattccgggattcataggtggaagaatggtgaaatggttaaagaggattgtggtcactacacaagaatcagaaagctattatcattacaaggataatagagtcctccctccacatgttgacgctgaacttgctaacgctgaagcatggtggtacaaaccagagtacatcatcaatgagctcaacatcaactctgtcattacaactccgtgccatgaagaaattttgcctattaatgcgtggactactcagcgaccttacacgttgagaggctatgcttattctggtggaggtaaaaaagtaactcgagtggaagtgactttggatggaggagagacatggagtgtgtgtacacttgatcacccagagaagccaactaagtatggcaagtactggtgttggtgcttttggtcactcgaggttgaggtgctcgacttgcttagtgctaaagaaattgctgtacgagctatcgatgagacccacaatactcaacccgagaagcttatttggaacgtcatgggaatgatgaacaattgttggtttcgagtgaagatgaatgtgtgcaagcctcacaagggagagattggtatagtgtttgagcacccgacccaacctggaaaccaatcaggtggatggatggcaaaggagagacacttggagatatcagcagtggctcctccaacactaaagaagagtatttcaactcctttcatgaacacagcttcgaagatgtattccatgtctgaggtgaggaagcacaactcttcagactctgcttggatcatagtccatggacatatctatgatgcctcacgtttcttgaaagaccatcctggtggtgttgacagcattctcatcaatgctggaactgattgtactgaggaatttgatgcaattcattctgataaggctaagaagctattggaggactttaggattggtgaactcataactactggttacacgtctgattcgtctccaaacacgtctgtccacggatcctcttccattagtagcttcttagcacctattaaggaacttgttcaaacaccaacaaggagtgtagccctcatcccaagggaaaaaatcccttgcaaactcgtcgacaagcaatccatctcccatgatgttagaaaattcaaatttgcattaccctctgaggatcaagtcttaggcttacctgttggcaaacacattttcctctgggccccagttgatgacaaactctgcatgcgtgcctacacacctactagcacagtcgatgaagtagggttcttcgagttggttgtcaaagtctacttcaaaggtgttcaccctaaattccctaatggaggtcaaatgtcacaacatcttgattctctcccaataggtgcattccttgacgttaaaggtccattaggtcacattgaataccaaggcaagggtaatttcttagtccatggtaaacaaaagtttgccaagaagttagctatgatagctggtggaacaggtataactcctgtatatcaagtaatgcaatcaattttgaaagatccagaagacgacacagaaatgtatgtggtgtatgcaaacagaacagaggacgatattttgctcaaagaggaactcgatgcatgggcagagcaaatcccagatagagttaaagtttggtatgtcgttcaagaatcaattacagaaggatggaagtatagtacaggatttgttacagaagcaattctcagagaacacatacctcaaccatctcatacaacattggcattggcttgtggaccacctcctatgatacaatttgctattaatccaaacttggagaaaatgggatatgacattaaggaggaattattggtgttctaa

SEQ ID NO: 5029 - protein, 751 aa, Solanum tuberosum
MVKRPMKFTMDQLVNEFPSRELPVTLVCAGNRRKEQNMVKQTIGFNWGAAAVSTTVWRGVPLRALLKRCGVQSKKKGALNVCFEGSDVLPGGGGSKYGTSIKKEFAMDPSRDIIVAYMQNGEMLSPDHGFPVRMIIPGFIGGRMVKWLKRIVVTTQESESYYHYKDNRVLPPHVDAELANAEAWWYKPEYIINELNINSVITTPCHEEILPINAWTTQRPYTLRGYAYSGGGKKVTRVEVTLDGGETWSVCTLDHPEKPTKYGKYWCWCFWSLEVEVLDLLSAKEIAVRAIDETHNTQPEKLIWNVMGMMNNCWFRVKMNVCKPHKGEIGIVFEHPTQPGNQSGGWMAKERHLEISAVAPPTLKKSISTPFMNTASKMYSMSEVRKHNSSDSAWIIVHGHIYDASRFLKDHPGGVDSILINAGTDCTEEFDAIHSDKAKKLLEDFRIGELITTGYTSDSSPNTSVHGSSSISSFLAPIKELVQTPTRSVALIPREKIPCKLVDKQSISHDVRKFKFALPSEDQVLGLPVGKHIFLWAPVDDKLCMRAYTPTSTVDEVGFFELVVKVYFKGVHPKFPNGGQMSQHLDSLPIGAFLDVKGPLGHIEYQGKGNFLVHGKQKFAKKLAMIAGGTGITPVYQVMQSILKDPEDDTEMYVVYANRTEDDILLKEELDAWAEQIPDRVKVWYVVQESITEGWKYSTGFVTEAILREHIPQPSHTTLALACGPPPMIQFAINPNLEKMGYDIKEELLVF

SEQ ID NO: 5030 - DNA, 918 bp, Homo sapiens
  CDS (1)..(918)
atggggatccagacgagccccgtcctgctggcctccctgggggtggggctggtcactctgctcggcctggctgtgggctcctacttggttcggaggtcccgccggcctcaggtcactctcctggaccccaatgaaaagtacctgctacgactgctagacaagacgactgtgagccacaacaccaagaggttccgctttgccctgcccaccgcccaccacactctggggctgcctgtgggcaaacatatctacctctccacccgaattgatggcagcctggtcatcaggccatacactcctgtcaccagtgatgaggatcaaggctatgtggatcttgtcatcaaggtctacctgaagggtgtgcaccccaaatttcctgagggagggaagatgtctcagtacctggatagcctgaaggttggggatgtggtggagtttcgggggccaagcgggttgctcacttacactggaaaagggcattttaacattcagcccaacaagaaatctccaccagaaccccgagtggcgaagaaactgggaatgattgccggcgggacaggaatcaccccaatgctacagctgatccgggccatcctgaaagtccctgaagatccaacccagtgctttctgctttctgccaaccagacagaaaaggatatcatcttgcgggaggacttagaggaactgcaggcccgctatcccaatcgctttaagctctggttcactctggatcatcccccaaaagattgggcctacagcaagggctttgtgactgccgacatgatccgggaacacctgcccgctccaggggatgatgtgctggtactgctttgtgggccacccccaatggtgcagctggcctgccatcccaacttggacaaactgggctactcacaaaagatgcgattcacctactga

SEQ ID NO: 5031 - protein, 305 aa, Homo sapiens [sequence omitted]

SEQ ID NO: 5032 - DNA, 2631 bp, Dunaliella tertiolecta
  CDS (1)..(2631)
atgctgaccaacgggcacggcgtgcatcaaaatggccatcaaaacggcactggtgcaactttgcctggagctgtcccctcctttgcacacaccgtgctgggtgccccctacgagccccccctgagccctgaggacccagactggacactgcatgtccctaccgctgacctggatgccaaggacaaggggactgctgatgcctggatcccacgagaccctagaatcctgcgcctcacaggccgccaccccctgaactgtgagccccccatgcacgacctcatggcagcaggcttcatcacccctccctccatccactacgtacgcaaccatggtcctgcccctcgcatccgatgggaagagcaccggctgcagatcaatggtctggtggagaggcccatgaccctgaccatggacgagatcgtggcgatgccctctgtgaccatcccggtcacaatggtgtgcgcaggaaacaggcgcaaggaggagaacatgcacaagaagtcgatcggcttcaattggggcccctgtgctgtgagcacgagctactggactggagtgaagctgagtgacctgctgaagcatgtgggcgccaaggggcctaaggagggaggcaagcatgtgtgctttgtaggcccacagggcgagctgccagccggagacggcacctacggcacgagcatgccaatgggcaaagccatggaccctgccaacgatgtcttaattgcctacaagcagaatgggcggtggctgaacgtcgaccatggcttccccgtgcgcaccatcatccctggttacatcgggggccgcaccatcaagtggctgtgcaccatcaaggtacaagagcaggagagcagcaaccactaccactacatggacaaccgtgtgctgccctcacacgtggaccaagagctggcaaacaaggagggttggtggtacaagccagagtacatcatcaacgacttgaacatcaacagtgctattgcacgtccgtggcatgacgaggttgtgatgctgaaagatagcaaccagccctacacggtcaagggctatgcgtatgcaggtggaggccacaaaatcattcgctgcgagatctccttggatggtggcaagagctggaggctggccaacatcaggcgctttgctgagccaaacgagtatggcaagcactggtgctgggtacactgggacattgaggtgtctgtgtttgatttctttgtgtttaaggagatgctgctacgcgcctgggatgaaacacagaacacccagcctgcattgctgacttggaatgtcatgggcatgatgaacaactgccacttccgggtgctgctgcacccttttaaggatcagaggggtgagattggcgtgcgattccagcacccagcacccgtggaagtgggggagcttggcaacattggctggagggaggaagacaacctgcggcaacaggctttggaggctgctggcatcactaccaaggagggccccctgccgcccatcaaggagctagcagcagtacccaaggctgcagctgcagcacctaagccacccccagggtctgccaaggagttcacaatggaggaggtggctgagcacacctcccctgagagcgcgtggtttgtgcacgagggcaaagtgtacgatgcgactcccttcttggaggaccaccctggtggcccagactcgatattgatcgccactggtgctgacgctacagaggatttcaatgccatccactccaaaaaggcaaaaaatatgctgaaggactactacattggggagctggtggcctcaaagggtgctgccgccgagcccaaggcagagaacggtgcagggacaagaagcctcatcaccctcaaccccagggagaaggtgcccctcaagctggcagagcgcattgaggtgtctcacaacacccgcatcttccgctttgccctgcccagcccaaagcacatcctaggtctgcccactggacgccatctgtttgtatatgcccagattcatggagaggtggttgcacgagcctatacccctatcagctgcgatgatgatgtaggtcgactggacctgctgatcaaggtgtatggccctaatgtccacccagcgttcccccagggcggcaaaatgagccagcacctagactccccgaagattggcgatgagatcatggtcaagggccctgtaggccacttcacatacgagggcaagggcaagtatgtgaatggcaagaacaagggtgtggccaagcagatgtctatgctggctggtgggacaggcatcacccccatcctgcaggtgctggaggcagtgctcaaggacaaggaggacccaacctgcatgtccctgatctacgccaacaacagctttgatgacattctggtaaaagacagactggatgcctatgccaaggagaatcccaaccgcttcaaggtgtggtacgtgctggccaggccccctgagaactggcccttcacaaagggccacgtcactgaggccctcatgcgcgagcgtttctttgatgcatccccccagaccctgggaatgatgtgcggcccccctgggctgctcaactttgtggctgtgccaggctttgaaaagatgggctactccaaggaaaaccaggtgtctttctga

SEQ ID NO: 5033 - protein, 876 aa, Dunaliella tertiolecta
MLTNGHGVHQNGHQNGTGATLPGAVPSFAHTVLGAPYEPPLSPEDPDWTLHVPTADLDAKDKGTADAWIPRDPRILRLTGRHPLNCEPPMHDLMAAGFITPPSIHYVRNHGPAPRIRWEEHRLQINGLVERPMTLTMDEIVAMPSVTIPVTMVCAGNRRKEENMHKKSIGFNWGPCAVSTSYWTGVKLSDLLKHVGAKGPKEGGKHVCFVGPQGELPAGDGTYGTSMPMGKAMDPANDVLIAYKQNGRWLNVDHGFPVRTIIPGYIGGRTIKWLCTIKVQEQESSNHYHYMDNRVLPSHVDQELANKEGWWYKPEYIINDLNINSAIARPWHDEVVMLKDSNQPYTVKGYAYAGGGHKIIRCEISLDGGKSWRLANIRRFAEPNEYGKHWCWVHWDIEVSVFDFFVFKEMLLRAWDETQNTQPALLTWNVMGMMNNCHFRVLLHPFKDQRGEIGVRFQHPAPVEVGELGNIGWREEDNLRQQALEAAGITTKEGPLPPIKELAAVPKAAAAAPKPPPGSAKEFTMEEVAEHTSPESAWFVHEGKVYDATPFLEDHPGGPDSILIATGADATEDFNAIHSKKAKNMLKDYYIGELVASKGAAAEPKAENGAGTRSLITLNPREKVPLKLAERIEVSHNTRIFRFALPSPKHILGLPTGRHLFVYAQIHGEVVARAYTPISCDDDVGRLDLLIKVYGPNVHPAFPQGGKMSQHLDSPKIGDEIMVKGPVGHFTYEGKGKYVNGKNKGVAKQMSMLAGGTGITPILQVLEAVLKDKEDPTCMSLIYANNSFDDILVKDRLDAYAKENPNRFKVWYVLARPPENWPFTKGHVTEALMRERFFDASPQTLGMMCGPPGLLNFVAVPGFEKMGYSKENQVSF

SEQ ID NO: 5034 - DNA, 2610 bp, Aspergillus fumigatus
  CDS (1)..(2610)
atggccaccataacccaagttcagacacaggagacacacacggtcttgccgaagagccttacggtagtgccaggccagatcaccgtcaaggagatctcgaatctcgacctgccagatatcccccttccaccaccatccacgaacccaactgagatcctcgctcaagacaagggcacaccagacaatcatgttcctcgagaccctcggctcatcagattaacgggcgtccacccattcaatgtcgagcctccactgacagctttgttcaatgaaggtttcttgacatcaccggaactcttctacgtcaggaaccatggccctgtccctctggtccgcgacgaggatattccaaactgggagatcagcatcgaagggctagttgagcggcccgtcgtcttgaactttcgtcagattttgcagaaatttaatcagatcacagccccaattacactcgtatgcgccggaaacagacgtaaggagcaaaacacagtgcggaaatcaaaaggtttttcttggggaccagctggtctttcaactgccctttttaccgggcccttgatggcggatgttctgcggtatgcgaagccactgcgtcaagccaagtacgtctgcatggagggagcagataagctgcctaatggctactatggcacatcagtcaagctcaattgggccatggatccaaacaaattgatcatgcttgcgcataagatgaatggcgagcctcttcgtccggatcacggtcgtcccttgagagccgttgtacctggccaaatcggcggccgaagcgtgaagtggatcaagaaactgatcttgactgatgcacccagtgacaactggtaccacatctatgacaaccgagtattaccaacgaccgtctctcccgaaatggcagcttcagatccgatgtggtggcgtgacgagcgctatgcaatttatgatctcaatgtgaattctgctgctgcgtaccctcaacacaacgaagttcttgatcttgcgacggctgggccatcctataccgccaagggttatgcatatgctggaggaggccgaagagtcactagagtcgagatctcgctgaacaaaggcaaatcttggcgtttggcgaacattcagtatgctgaagacagataccgcgactttgatggcgagttgttcggcggcaaagtggacatgccttggcgtgaaacatgttactgctggtgtttctggtctctggatattcctgtacctgacctagaggctagtgacgccctgctagtgagaagtatggatgaagcaatgagcgtccaaccgcgcgacatgtactggtccgttctcggaatgatgaacaatccttggttccgagtgacgattacaaaacagaatggaaccttgttgttcgaacaccctactcatcctgtcatggctggcggctggatggaacgcgtcaaaaaggctggtggcgatctgactaacggcaactggggagagaggcaagaaggagagatattggcagaacccgaacctgtgaaggaaatcaacatgaagaaggaaggcttgaatcgaactattagtctcgaagagttcaaaaaaagcaacgaagagggcgcccaatggtttattgtgaagggagaagtatacgacggcaagccgttccttgaaggtcaccccggaggagcacagagcatcatctcttccatcggattggacgtgactgaggatttttctgaaatccatagcgagacggcgaaagcaatgatgcctgactatcacatcggcacaatggacgaggcgtccctcaagatgctcaaagaagctcgcaaggaagaagagcccagcaagcctcgtgcactcttcctccaaccacggtcatggacaaaagcgaaactcgcagcaaagcgggatgtttcctgggatacgcgcatcttcaccttcgaactggaacaccagaagcaaaagctgggcctaccgattggacagcatatgatgatcagagtccaggattctacaaccaaagaaaaaattattcgatcatacactccgctctccgaccccaacaaagaggggtcagttgatgtgcttatcaaggtctacttcccaacgccacttgtacccggtggaaaaatgacaatggccctcgatcagcttcccctgggctcaatgattgagtgcaaaggccctacaggccgatttgagtatctcggaaacggcagggttattatcagcggaaaggagcggcgcgtacgctccttcaagatgatctgcggcggtactggtatcactccgatctttcaggttctccgcgcagtgatgcaagaccctcaagatcccacttcatgcgttgtcctctttgggaacagacaagaggaggatatcctgtgtcgagccgaacttgatgcatttgaagcgtcagataagaacaagtgtaagattgtacatacactcagcaaagcaccagacacgtgggctggtcggagagggcgcatcggtgaagcacttctgaaggagttcgctgtacctgacgatgagagcatggtactcatctgcgggcctgaggcgatggaaaactctgccaagacaatccttttagcccaggggtggaaagagtcaaatcttcattttttctag

SEQ ID NO: 5035 - protein, 869 aa, Aspergillus fumigatus
MATITQVQTQETHTVLPKSLTVVPGQITVKEISNLDLPDIPLPPPSTNPTEILAQDKGTPDNHVPRDPRLIRLTGVHPFNVEPPLTALFNEGFLTSPELFYVRNHGPVPLVRDEDIPNWEISIEGLVERPVVLNFRQILQKFNQITAPITLVCAGNRRKEQNTVRKSKGFSWGPAGLSTALFTGPLMADVLRYAKPLRQAKYVCMEGADKLPNGYYGTSVKLNWAMDPNKLIMLAHKMNGEPLRPDHGRPLRAVVPGQIGGRSVKWIKKLILTDAPSDNWYHIYDNRVLPTTVSPEMAASDPMWWRDERYAIYDLNVNSAAAYPQHNEVLDLATAGPSYTAKGYAYAGGGRRVTRVEISLNKGKSWRLANIQYAEDRYRDFDGELFGGKVDMPWRETCYCWCFWSLDIPVPDLEASDALLVRSMDEAMSVQPRDMYWSVLGMMNNPWFRVTITKQNGTLLFEHPTHPVMAGGWMERVKKAGGDLTNGNWGERQEGEILAEPEPVKEINMKKEGLNRTISLEEFKKSNEEGAQWFIVKGEVYDGKPFLEGHPGGAQSIISSIGLDVTEDFSEIHSETAKAMMPDYHIGTMDEASLKMLKEARKEEEPSKPRALFLQPRSWTKAKLAAKRDVSWDTRIFTFELEHQKQKLGLPIGQHMMIRVQDSTTKEKIIRSYTPLSDPNKEGSVDVLIKVYFPTPLVPGGKMTMALDQLPLGSMIECKGPTGRFEYLGNGRVIISGKERRVRSFKMICGGTGITPIFQVLRAVMQDPQDPTSCVVLFGNRQEEDILCRAELDAFEASDKNKCKIVHTLSKAPDTWAGRRGRIGEALLKEFAVPDDESMVLICGPEAMENSAKTILLAQGWKESNLHFF

SEQ ID NO: 5036 - DNA, 840 bp, Zea mays
  CDS (1)..(840)
atggagttcctgcagggccagaggctggagaccacgctggccgtcgcggccgctgtcgttgccgtcgcagccggctccgcctacctcttcctccgcagtaggaagcccaggggatgcctagaccccgagaacttcaaggagttcaaacttgttgagaagaagcagctgagtcataatgttgccaagttcaagtttgcgctcccaacacctacttctgtattgggtcttccaatcggacagcatataagctgcagaggacaggatgcttctggcgaggaagtgatcaagccttatactccaactactctggactctgatattggatcttttgagcttgttataaagatgtatccccaaggaagaatgtctcatcatttccgtgagacgaaagttggtgattatatgtctgtgaagggacctaagggccgtttcaagtacctacctggacaagtgagagcatttggaatggtagctggaggatcaggcattactccaatgttccaagtgacaagggcaatccttgagaacccaaaggacaacacgaaagtacacttaatctatgcaaatgtcacgtatgaggatattcttctgaaggaagaacttgacggcatggccaaaaactatcctgatcgtttcaagatctactatgtcttgaatcagcctcctgaagtctgggacggtggcgtcgggttcgtgtcgaaggaaatgatccagactcattgcccagcgcctgccgccgacattcaggtattgcgatgtggacctcctcccatgaacaaagccatggccgcgcacctggacggccttggctacacgaaggagatgcagtttcagttctaa

SEQ ID NO: 5037 - protein, 279 aa, Zea mays
MEFLQGQRLETTLAVAAAVVAVAAGSAYLFLRSRKPRGCLDPENFKEFKLVEKKQLSHNVAKFKFALPTPTSVLGLPIGQHISCRGQDASGEEVIKPYTPTTLDSDIGSFELVIKMYPQGRMSHHFRETKVGDYMSVKGPKGRFKYLPGQVRAFGMVAGGSGITPMFQVTRAILENPKDNTKVHLIYANVTYEDILLKEELDGMAKNYPDRFKIYYVLNQPPEVWDGGVGFVSKEMIQTHCPAPAADIQVLRCGPPPMNKAMAAHLDGLGYTKEMQFQF

SEQ ID NO: 5038 - DNA, 2724 bp, Gibberella fujikuroi
  CDS (1)..(2724)
atggagactccaacaacaacaataacaaccctcctacatcaggaaaagatccctgaaaactctgaaccaatctcagcccatacacatacccatagccttcctcctactcctccaggaacagcaaagccatctcggataggtagcttccacgatctacgagaactctcatcaatcgaatcccctcgtctcgaccatatcaagccttatcctctacctccaaaatgctctccaaagtctgtccttaaggaggatctcaaaaccccggacaactttgttgagagagatccacgcctcattcgtctaactggagtccacccgttcaacgttgaggcacccctgagcgacttatacgacgaaggtttcctaaccagcgagaatcttcactatgtccgtaaccacggacacgtgcctagatgtgaagacgatgatatcctcgactgggagttcgaaacaggtggccttgtcgaaaaccccatcaagatgaacgtacgagatctcatcaacgcataccagcaattgacttatccagtaacattcgtgtgtgctggaaaccgtcgcaaagagcagaacattgttcgcaagaccaagggtttctcttggggagctgccggcctgtcaacagctctctggaccggtgttgccatcggagatctgctttctgcaggcaaacccctgcgtggagcccggtatgtttgcttcgagggagcagacaagttacccaatggctattatggtacctccatcaagctcaactggtgcatggatcctaacagaggtgttatggtggctcacaagatgaacggcaagaccttacatccagaccacggcaagcctgttcgtatcgtcattcctgggcaaataggtggtcgaagcattaagtggctcaagaagattactgtcacacaagaacccagcgacaactggtaccacatctatgacaaccgagtcctacccaccatgatctcgccggaagagagtgcaaacttgcccgaggtctggaaggatgagaagtatgccatttatgacctaagcactaatagtgccatttgctaccctgcccatgaagagaaagtctcgctcacgggcgctccggcaagttataaggtgcgaggttatgcctacggtggtggcggaagacgcattacacgagtcgaagttacccttgacaaaggtaaatcttggagacttgccaacatccgatacccagaggatgactaccgcaacgcccctgagggtgataccctctacggggggcgtgtcgacatgtggtggcgtgagacatcattctgctggtgcttctgggatcttgacattcctctggatgagttaaagagtgcagatgatataatgatgcgtgctatggacgaggctatgaacgtacagcctcgagatatgtactggagcgtactgggtatgatgaacaacccatggttccgaatcgtgatccatcaggaggatgatgcacttcgcttcgagcatcccacccacgctactctaaagatcaagggctggatggagcgagtcaaggaggccggcggtaatcttaccaacggctactggggcgagaaggcccctggtgaagttcaagaggtggtggtaaaggagcctgagaagcagatctgcatgaccaaccctcagatcaaccgaaagatcaccatagaagagctcaaggcgcacagtggtgaagaagagccttggttcgttgtcaagggcgaagtgtacgatggcactccttacctctctggtcaccccggtggtgcagcatcaatctttggtgccgctggtcaagatgctactgaagaatttatggccattcacagcgagaatgcaaaagccatgttgcccacatatcatatcggcaccctcgatgaagaatcccgtgccattctcagtggcgatgctaccaagacgagcgatgaccgaaaccgagaagtattcctccaagtcaagacatggagcaaggctattctggataaaaagacatccatctcaggtgatacaaagatcttctccttcaagctcaaccacgaaggccagaagatcggcctccccactggccagcatcttatgatgcgtctccgcgaccctgccacccgtgaggcagtcatacgctcatacacacggtactccgacggctcagattgtggtcgtctagatattcttatcaagatctactatgacactcctcagcgaaagggcggtgtcatgacacaagcgctcgatgcccttcctattggtcactgggttgacttcaaagggcctacgggcaaatttgtctaccaaggcaatgggctctgcacaatcaatgacagagaacgtcgtgttcgccgtttcatcatggtctgtggtggttctggaattactcctatccgccaagtactccgcgccatcatgcataatcctaacgacacgacaccatgcctagtcttcaacggcaaccggagtgttgacgatattctttgcaaggaagagctcgaccaactggaggctgccaaccctgcaagatgccgagtcgtcaatgccctctctaaccctccaccaaaatggaatggcctcaagggttttgtgaaccaagccctggttcctgaagaaatgaccctacccaaggcaagcggcgagggtgacgagttggtgcttgtttgtgggcctccaccgatggttaaggctgttgaggcctcatttctgggcatgggtttcaaatcagatgattttgtattcttctaa

SEQ ID NO: 5039 - protein, 907 aa, Gibberella fujikuroi
METPTTTITTLLHQEKIPENSEPISAHTHTHSLPPTPPGTAKPSRIGSFHDLRELSSIESPRLDHIKPYPLPPKCSPKSVLKEDLKTPDNFVERDPRLIRLTGVHPFNVEAPLSDLYDEGFLTSENLHYVRNHGHVPRCEDDDILDWEFETGGLVENPIKMNVRDLINAYQQLTYPVTFVCAGNRRKEQNIVRKTKGFSWGAAGLSTALWTGVAIGDLLSAGKPLRGARYVCFEGADKLPNGYYGTSIKLNWCMDPNRGVMVAHKMNGKTLHPDHGKPVRIVIPGQIGGRSIKWLKKITVTQEPSDNWYHIYDNRVLPTMISPEESANLPEVWKDEKYAIYDLSTNSAICYPAHEEKVSLTGAPASYKVRGYAYGGGGRRITRVEVTLDKGKSWRLANIRYPEDDYRNAPEGDTLYGGRVDMWWRETSFCWCFWDLDIPLDELKSADDIMMRAMDEAMNVQPRDMYWSVLGMMNNPWFRIVIHQEDDALRFEHPTHATLKIKGWMERVKEAGGNLTNGYWGEKAPGEVQEVVVKEPEKQICMTNPQINRKITIEELKAHSGEEEPWFVVKGEVYDGTPYLSGHPGGAASIFGAAGQDATEEFMAIHSENAKAMLPTYHIGTLDEESRAILSGDATKTSDDRNREVFLQVKTWSKAILDKKTSISGDTKIFSFKLNHEGQKIGLPTGQHLMMRLRDPATREAVIRSYTRYSDGSDCGRLDILIKIYYDTPQRKGGVMTQALDALPIGHWVDFKGPTGKFVYQGNGLCTINDRERRVRRFIMVCGGSGITPIRQVLRAIMHNPNDTTPCLVFNGNRSVDDILCKEELDQLEAANPARCRVVNALSNPPPKWNGLKGFVNQALVPEEMTLPKASGEGDELVLVCGPPPMVKAVEASFLGMGFKSDDFVFF

SEQ ID NO: 5040 - DNA, 984 bp, Cucurbita maxima
  CDS (1)..(984)
atggcggcgttcctcagaaggcttgcaactgctgctccagctctacgctacaatgcattatgtggccaatcaaggattgagtcctccaagttcaggttccctattggaactatcactgcagttaccgccggattctcgtatatgttttacgcttcgacttcgaatttggttcatctcgctccaaactgcgaagaggatggtcagaaagtcgctcttaagcctgataagtggattgaattcgagttgcaagacgttgcacgtgtttctcacaatactaatttatacagattttcatttgatccatctgaaaattgggggtggatgttgctccatgcatcgttacaagagctccaattgataaagacgaacaggggggaagtaaaatacgttgcacgctcttatacacctatatcagatcccgaggccaagggatactttgatctactaattaagatatatcctcaaggaaaaatgactcagcattttgctaaattgaaacctggtgataaacttgaagtgaaaggccccattcgaaagctcaaatactctccaaacatgaagaaacacattggcatgatcgctggtggcacaggaattactccaatgcttcaggtcattgatgctatagcaaaaaaccaagatgacattacacaggtctcgctgatttttgcgaatgtgtctgccgatgacatattgcttaaagagaagcttgacaaacttgcagcttgccacccaaatataaaggtattctacactgttagtaatccaccaaggggttggaagggagggaagggacatgtatcaaaggatatgatcatcaaatgcttaccttcccctggaaatgacgcactaatcctcgtatgtggtccaccaggcatgatgaaacatatatgtgggccgaagaataaagatttcacacagggagagcttggtggcttacttaaggatcttggatattctaaggatatggttttcaaattctaa

SEQ ID NO: 5041 - protein, 327 aa, Cucurbita maxima
MAAFLRRLATAAPALRYNALCGQSRIESSKFRFPIGTITAVTAGFSYMFYASTSNLVHLAPNCEEDGQKVALKPDKWIEFELQDVARVSHNTNLYRFSFDPSENWGWMLLHASLQELQLIKTNRGEVKYVARSYTPISDPEAKGYFDLLIKIYPQGKMTQHFAKLKPGDKLEVKGPIRKLKYSPNMKKHIGMIAGGTGITPMLQVIDAIAKNQDDITQVSLIFANVSADDILLKEKLDKLAACHPNIKVFYTVSNPPRGWKGGKGHVSKDMIIKCLPSPGNDALILVCGPPGMMKHICGPKNKDFTQGELGGLLKDLGYSKDMVFKF

SEQ ID NO: 5042 - DNA, 2721 bp, Prunus persica
  CDS (1)..(2721)
atgacggcctccgtccagaaccgccaattcacccgtctcgacgcccccataaacggcgtcgtccgctccttcaacttctcggatctcactcgcccgaaaaccacggcaaacttcgtcgaaatcgatgacgcttcttacttttcttcttccgacgacgatgacgaaaatgacaaccccggcggcgagtacggggatttaatccgcaagggcaacagcgaactagagccgtcgatcttggaccccagagatgaggccacgtcggacagctgggtgcaccgaaacccatccatggtccgcctcaccggaaaacaccccttcaactgcgaagccccgttggcccgcctcatgcaccacggcttcatcacaccggtgccgctccactacgtccgcaaccatggcgtggtccccaagggcacgtggcaggactggaccgtggaggtcaccggcctggtccgccgcccagcccggttcaccatggagcagctcgtccgcgagttcaagtcacgtgagttccccgtgaccctggtctgcgcgggaaaccgccggaaggagcagaacatggtgaagcagaccatcggcttcaactggggccccgccggagtctccaactctgtgtggcgcggcgtgccgctttgcgacgtgctcaagcggtgcgggatctacgggcgcaagagcggggccctcaacgtgtgcttcgagggagccgaggacctgccaggtggcggcggcagcaagtacggcacgagcgtgaagaaagaggtggcgatggacccgtcgagggatataattgtggcgtacatgcagaacggcgagcagctgatgccggatcacgggtttccggttcgggtcatcatacccgggttcatcggcggccggatggtgaagtggctgaaacgcatcgtcgtaacgacgcgggaatcggataattattatcattataaggacaacagagtgctgccgtcgcatgtcaatgcggagcttgctaacgctgaagcgtggtggtacaagccggagtatataattaacgagctgaatataaactcggtcataacgacgccgtgtcatgaggagattctgcctataaactcgtggaccagtcagaggccgtataccatgaaaggctacgcgtactcagggggcgggaagaaagtgacacgagtagaggtgacaatggacggaggggacacgtggcaggtgtgcacactagaccaccaggaaaaaccaaacaagtatggaaagtactggtgctggtgcttttggtcactggaggtggaggtcctcagcctgcttgtagctaaagagattgcagtgagggcttgggacgagacccaaaacacccagcctgagaaactcatttggaatgtcatgggaatgatgaacaattgttggtttcgagttagaagcaatgtgtgtaagcgacacaaaggagagattgggatcgtgttcgagcacccaactcaacctggaaaccaatcgggcggttggatggccaaagaaaaacacttggattctgaatccaacacaaccctcaagaagagtgtctccacacctttcatgaacaccacttcctccaaaacctactcactgtccgaagtcgagaagcataactctcctcagtccgcctggatcatcattcaaggccacatctatgactgcactcgcttcctcaatgaccatcctggtggcgctgacagcatcctcatcaacgccggcacagattgcaccgaagagtttgatgccatccactcggacaaggccaagaaaatgcttgaggactatagaataggcgagttggtaaccacaacttacgcttctgactccacatccaattcccctaacatatctgtgcatgggccacatagaacatcatcagaagatatttcatttctcgtaaccccattagccccgatcaaagaaatcacgccggttaaaagcgtcgcgcttactccacgcgagaagatcccatgcaagctcgtggccaagacatccatttctcatgacgtgaggctctttaggtttgcgttgccttcagaagaccaagttctgggattgccggtaggcaagcacatttttgtgtgtgccacaattgagggcaagctttgcatgcgggcttacacaccaagtagctcaattgatgaagttggctactttgatttggtggtcaagatttacttcaaaaatgttcaccctaaattccccgatggggggctcatgtcacagcacttggactctctgccaataggtgcagccatagacataaagggtccattggggcacatagagtacactggccgtggtcactttttggtcaacggcaagcccaagtttgcaaagaagcttgccatgctggcaggtgggaccgggatcacgcccatttaccaagtggctcaagccatattgaaggacccagaagacgagactgaaatgtatgtggtctatgcgaaccgtacagtagacgacattttgctgagggaagagcttgatgcttgggctaagaagtatgagaggttcaaggtttggtatgtggtggagaatggcagggaagggtgggaatacagcgtgggcttcatcaccgatactataatgagggagcaccttccagatggatcggacggttctcttgcattggcatgtgggcccccaccgatgatcaagtttgctgtgcagcccaatttgttgaagatgaactatgataccacagattcgttgctggtgttttga

SEQ ID NO: 5043 - protein, 906 aa, Prunus persica
MTASVQNRQFTRLDAPINGVVRSFNFSDLTRPKTTANFVEIDDASYFSSSDDDDENDNPGGEYGDLIRKGNSELEPSILDPRDEATSDSWVHRNPSMVRLTGKHPFNCEAPLARLMHHGFITPVPLHYVRNHGVVPKGTWQDWTVEVTGLVRRPARFTMEQLVREFKSREFPVTLVCAGNRRKEQNMVKQTIGFNWGPAGVSNSVWRGVPLCDVLKRCGIYGRKSGALNVCFEGAEDLPGGGGSKYGTSVKKEVAMDPSRDIIVAYMQNGEQLMPDHGFPVRVIIPGFIGGRMVKWLKRIVVTTRESDNYYHYKDNRVLPSHVNAELANAEAWWYKPEYIINELNINSVITTPCHEEILPINSWTSQRPYTMKGYAYSGGGKKVTRVEVTMDGGDTWQVCTLDHQEKPNKYGKYWCWCFWSLEVEVLSLLVAKEIAVRAWDETQNTQPEKLIWNVMGMMNNCWFRVRSNVCKRHKGEIGIVFEHPTQPGNQSGGWMAKEKHLDSESNTTLKKSVSTPFMNTTSSKTYSLSEVEKHNSPQSAWIIIQGHIYDCTRFLNDHPGGADSILINAGTDCTEEFDAIHSDKAKKMLEDYRIGELVTTTYASDSTSNSPNISVHGPHRTSSEDISFLVTPLAPIKEITPVKSVALTPREKIPCKLVAKTSISHDVRLFRFALPSEDQVLGLPVGKHIFVCATIEGKLCMRAYTPSSSIDEVGYFDLVVKIYFKNVHPKFPDGGLMSQHLDSLPIGAAIDIKGPLGHIEYTGRGHFLVNGKPKFAKKLAMLAGGTGITPIYQVAQAILKDPEDETEMYVVYANRTVDDILLREELDAWAKKYERFKVWYVVENGREGWEYSVGFITDTIMREHLPDGSDGSLALACGPPPMIKFAVQPNLLKMNYDTTDSLLVF

SEQ ID NO: 5044 - DNA, 2754 bp, Arabidopsis thaliana
  CDS (1)..(2754)
atggcggcctctgtagataatcgccaatacgctcgtctcgagccaggtttgaacggcgtggttcgttcttacaaacctcccgttccaggccggtccgattcccctaaggcgcaccagaaccaaaccaccaaccaaaccgtgttcttgaaaccagccaaggttcatgacgatgacgaagacgtgtcgagcgaagacgagaacgagacacacaacagcaacgccgtgtactacaaggagatgataagaaaatccaacgccgagcttgaaccgtccgttttggacccgagggacgaatacacggctgatagctggatcgagcgtaacccttccatggtacgtctcacagggaaacatcccttcaactccgaggcgcctcttaaccgtttaatgcaccacgggtttatcacccctgtcccgttgcactacgttcgtaaccacggccacgtccctaaagcccaatgggccgaatggacggtcgaggtgaccggattcgtcaaacggcccatgaaattcaccatggaccagctcgtctccgagtttgcttaccgcgagttcgccgcgacgctagtctgcgcggggaaccgccgtaaggaacaaaacatggtgaagaagtcaaagggattcaactggggatccgccggagtttccacctccgtgtggcgtggtgtccctctctgcgacgtactgcgtcgctgcgggatctttagccgaaaaggcggcgctctcaacgtctgcttcgaagggtcggaggatcttccgggcggtgccggaactgctggttccaaatacggaacgagcatcaagaaggaatatgccatggatccatcaagagacatcattttggcttatatgcaaaacggagagtatctaacaccagaccacggttttccggttcggatcatcatccccggtttcattggtggccggatggttaaatggttgaaacgaatcattgtcacaactaaagaatccgacaatttctaccatttcaaggacaacagagttttaccttctttggtagacgccgaactcgccgacgaagaaggttggtggtataagccagagtacataatcaacgagctaaacataaactccgtgattacgacgccatgtcacgaggagattcttcccatcaacgctttcacaacccaaagaccttatactttaaagggttacgcatattccggaggtggaaaaaaagtgacccgtgtggaggtcacggtagatggtggagagacatggaacgtatgtgcacttgaccatcaagagaagccaaacaagtatgggaagttctggtgttggtgtttttggtcacttgaggttgaggttttggacttgcttagtgccaaagagattgctgttcgtgcatgggacgagactctcaacacgcagcccgagaaaatgatatggaatctcatggggatgatgaataactgctggtttagagtgaagactaacgtgtgcaagccacacaagggagagattgggattgtgttcgagcatccaacgcttcctggtaatgaatctggtggatggatggcgaaggaacgtcacctcgaaaaatcggctgacgcgcctcctagtctaaagaagtctgtctcgacgccgtttatgaacacaactgcgaagatgtactcgatgtacgaggtcaagaagcataattcggctgactcttgctggatcattgtccatggacatatctatgattgtacacgattccttatggatcacccgggtggttcggattcaatcttgatcaatgctggtacggattgtacggaggagtttgaagccattcactcggataaagccaagaagatgcttgaggattaccgtatcggtgagctcatcaccactggttattcctctgactcttcctcgcctaacaactcggttcacggttcatccgccgtgttctcgctgttggctcccattggagaggcgactccggttaggaacctcgctttggttaatccccgggctaaagtcccggttcaactcgtcgaaaagacttccatttctcatgatgttcgtaaattccggtttgctttaccggttgaggatatggttctaggcttaccggttggtaagcacattttcctttgcgccaccatcaatgacaagctctgcctcagagcttacacaccaagcagcaccgttgatgtggttggctacttcgagctcgtggtcaagatttactttggcggtgtccacccaagattccctaacggcgggctcatgtctcagtacctagactctttgcctatagggtcaactttggagattaaaggaccattgggtcacgttgagtatctcggcaagggtagtttcacggttcacggtaaaccaaagtttgctgataaattggcaatgttggcaggtggaaccggaataactccggtttaccaaattatccaagccattctcaaggatccagaggatgagactgaaatgtacgtcatttatgctaaccggaccgaggaagatattctcctaagggaggaactggatggttgggcagagcaatacccggaccggttaaaggtttggtacgtagtggaatcagctaaggaaggttgggcatacagtaccgggtttatttccgaggcgattatgcgagaacatatccctgatggattagatggctcagcccttgccatggcttgcggaccaccaccgatgattcagtttgcggttcagccgaatttggagaagatgcaatataacatcaaggaggatttcttgatattctag

SEQ ID NO: 5045 - protein, 917 aa, Arabidopsis thaliana
MAASVDNRQYARLEPGLNGVVRSYKPPVPGRSDSPKAHQNQTTNQTVFLKPAKVHDDDEDVSSEDENETHNSNAVYYKEMIRKSNAELEPSVLDPRDEYTADSWIERNPSMVRLTGKHPFNSEAPLNRLMHHGFITPVPLHYVRNHGHVPKAQWAEWTVEVTGFVKRPMKFTMDQLVSEFAYREFAATLVCAGNRRKEQNMVKKSKGFNWGSAGVSTSVWRGVPLCDVLRRCGIFSRKGGALNVCFEGSEDLPGGAGTAGSKYGTSIKKEYAMDPSRDIILAYMQNGEYLTPDHGFPVRIIIPGFIGGRMVKWLKRIIVTTKESDNFYHFKDNRVLPSLVDAELADEEGWWYKPEYIINELNINSVITTPCHEEILPINAFTTQRPYTLKGYAYSGGGKKVTRVEVTVDGGETWNVCALDHQEKPNKYGKFWCWCFWSLEVEVLDLLSAKEIAVRAWDETLNTQPEKMIWNLMGMMNNCWFRVKTNVCKPHKGEIGIVFEHPTLPGNESGGWMAKERHLEKSADAPPSLKKSVSTPFMNTTAKMYSMYEVKKHNSADSCWIIVHGHIYDCTRFLMDHPGGSDSILINAGTDCTEEFEAIHSDKAKKMLEDYRIGELITTGYSSDSSSPNNSVHGSSAVFSLLAPIGEATPVRNLALVNPRAKVPVQLVEKTSISHDVRKFRFALPVEDMVLGLPVGKHIFLCATINDKLCLRAYTPSSTVDVVGYFELVVKIYFGGVHPRFPNGGLMSQYLDSLPIGSTLEIKGPLGHVEYLGKGSFTVHGKPKFADKLAMLAGGTGITPVYQIIQAILKDPEDETEMYVIYANRTEEDILLREELDGWAEQYPDRLKVWYVVESAKEGWAYSTGFISEAIMREHIPDGLDGSALAMACGPPPMIQFAVQPNLEKMQYNIKEDFLIF

SEQ ID NO: 5046 - DNA, 792 bp, Drosophila melanogaster
  CDS (1)..(792)
atggcccgcatcgttgaaagcaattttgtgccactcgccgtgggtgtggtagccgtactcgccggcgccctgatcgtccactatctgctgaataagaagtccacgaaaccacgccgggaacccaatcgcaccgctcggctgcgcacacttgtggatcccaatgacaagtacctgctgcctctcatcgaaaaggagaatctgagccatgacactaggagattccagtttggattgccctccaagcagcatgtccttggcctgcccgttggccagcacattcatctgatcgccaccatcgacaatgagctaataattcggccatacactccgatatcgtctgatgaggatgtgggctacgtggacctagtcgtcaaggtgtacttcaaggattcgcatcccaagttcccggccggcggcaaaatgacacaacacctggagcagctcgagttgggggacaagatctcgttccgtggtccctcgggtaggctacaatatctcggcaatggcaccttctccatcaaaaagttgcgcaaggatcctccaaagcacgtgaccgccaagcgggtcaacatgattgccggcggcactggcattactccaatgcttcaattggccagggaagttctcaagcgcagcgataaggataagactgaactggcgttgctgttcgccaatcagagcgaaaaggacattctactgcgtgcagagttggacgaactggcccagaagcatcctgaccagttcaagatctggtacacagtcgacaaggcaaacgaaggtgagttgcagtaa

SEQ ID NO: 5047 - protein, 263 aa, Drosophila melanogaster
MARIVESNFVPLAVGVVAVLAGALIVHYLLNKKSTKPRREPNRTARLRTLVDPNDKYLLPLIEKENLSHDTRRFQFGLPSKQHVLGLPVGQHIHLIATIDNELIIRPYTPISSDEDVGYVDLVVKVYFKDSHPKFPAGGKMTQHLEQLELGDKISFRGPSGRLQYLGNGTFSIKKLRKDPPKHVTAKRVNMIAGGTGITPMLQLAREVLKRSDKDKTELALLFANQSEKDILLRAELDELAQKHPDQFKIWYTVDKANEGELQ

SEQ ID NO: 5048 - DNA, 1461 bp, Rattus norvegicus
  CDS (1)..(1461)
atggattggttccgattgaccaaaagtggaaaggacttcacgggattgaagggcgggttaattgaagtaacagaagaagaacttaagaagcacaacaagaaagacgactgttggatatgcataagagggtttgtttacaatgtcagcccatatatggagtatcatcctggtggggaggatgagcttatgagagccgcaggagcagatggaacggatctttttaatgaggtgcatcgttgggtcaattatgaatccatgctgaaagagtgcctggttggcaggatggctgtgaagcccgctgttccgaaagactgtcatgaaggaaagagagtcttaaatggcatgcttcccaagagccaagtgacagacacactgcccagggaaggccccagttctccaagctatgattggttccaaacagagtcttcagtgaccattgttatatacaccaagcagaagaatatcaatttagactcagtaatcgttgacctccaggatgactccttgagagcagaagcagtcatcaaggatcattcttatcttatacatattgggttaagccatgaagttcaagaaaatttttctgtacgggttattgagaatgttggaaaaatagagattgtcctactaaagaaagaaactgtttcttggaaatgtcttggtgatcccctggagaaacatgattcttttattccaaagaaagatacaggcttgtactatagacagtgccagttaatttccaaggaagacgttactcatgacacaaggctcttctgtctgatgctgcctcccagtactcaccttcaggtgccagttgggcaacatgtttacctcaagctcagtgtcacaggtgcagaaatagtaaagccatatacacccgtgtctgagtccttactctcagattttaaagaaccagttctttccccaaataagtacatctactttttgatcaaaatctatcctgctggactcttcacgccagaacttgatcgtcttcagattggagattttgtttctgtaagtggtcctgagggcaattttaaagtttccaaactccaggaagtggaagatctctttttattggcagccggaacaggcttcacaccaatggttactgtactgaatcacgctttaactcacatgtccagtctcaggaaggtgaagttaatgttcttcaataaaacagaggatgacataatttggagatgccagctagagaaattggcattaaaagataaaagatttcatgttgaatatgttctctcggcaccttccccagaatggaatggcaaacagggacacgtgtcacgagctcttctctctgaatttttgcaacgaagtttagaaaattctaaagtcttcctttgcatctgtggaccaaccccatttacagatgaggggataaggttgctgcatgatcttaacttttccgatgatgagattcatggttttacagcataa

SEQ ID NO: 5049 - protein, 486 aa, Rattus norvegicus
MDWFRLTKSGKDFTGLKGGLIEVTEEELKKHNKKDDCWICIRGFVYNVSPYMEYHPGGEDELMRAAGADGTDLFNEVHRWVNYESMLKECLVGRMAVKPAVPKDCHEGKRVLNGMLPKSQVTDTLPREGPSSPSYDWFQTESSVTIVIYTKQKNINLDSVIVDLQDDSLRAEAVIKDHSYLIHIGLSHEVQENFSVRVIENVGKIEIVLLKKETVSWKCLGDPLEKHDSFIPKKDTGLYYRQCQLISKEDVTHDTRLFCLMLPPSTHLQVPVGQHVYLKLSVTGAEIVKPYTPVSESLLSDFKEPVLSPNKYIYFLIKIYPAGLFTPELDRLQIGDFVSVSGPEGNFKVSKLQEVEDLFLLAAGTGFTPMVTVLNHALTHMSSLRKVKLMFFNKTEDDIIWRCQLEKLALKDKRFHVEYVLSAPSPEWNGKQGHVSRALLSEFLQRSLENSKVFLCICGPTPFTDEGIRLLHDLNFSDDEIHGFTA

SEQ ID NO: 5050 - DNA, 2745 bp, Ricinus communis
  CDS (1)..(2745)
atggcggcctctgtggacaacaggcaattccaccttgaacccaccttaaacggcgtcgttcgtcctttcaaatccggtccaacccaccggtctgattctcccattcgaaacggcttcaacttcactaaccaagatttcactcgcagcagctccaacaagaaaccaactcctataatggatgatgatttttccagcgatgacgatgaagctgattatggtgatctaatacgcaaaggcaacagcgaattacagccttccattttggacccaagagatgaaggaaccgctgataactgggtcgaacgtcacccgtccatgatccgtctcacgggtaaacacccatttaactctgaggctccattgacgcaactcatgcaccacggcttcatcactccagtcccgctccattacgtccgtaaccacggacccgtcccaaaggctagctggaaagactggaccgttgagatttgcgggctggttaagaaaccgacccgattcaccatggaccagctggtaaacgacttcccgagccgggaattaccggtcactttggtttgcgcggggaatagaagaaaagagcagaatatggttaaacagaccataggttttaattggggtgcagcgggagtttccaactcggtgtggcgcggcgtaccattacattttgtgctgaagcgatgtgggatctacagccgtaaaaagggagccctcaatgtgtgctttgaaggggctgaggatttgccaggtggcggtgggtccaagtatgggaccagtatcaagaaggagtatgccatggttccatctcgtgatataatcttggcttacatgcaaaacggtgagcttttggcggcggatcatggtttccctgttcgaatgattattcccggcttcattggtggcagaatggtgaaatggttaaaaagaattattgtcactacaaaagaatctgataactattatcattacaaggataatcgagttcttccttctcatgttgacgctgagcttgctaatgctgaagcatggtggtataagccggaatatatcatcaacgagttgaacataaactcggtgataacgacaccgtcccatgaagaggtcttgcctattaactcgtggacaactcagaggccgtatacgttgaagggttatgcatattccggtggtgggaagaaagtgacacgagttgaagtgactatggatggcggtgacacttggcaagtgtgctccttagatcatcctgagaagcctaacaaatatggcaaatactggtgctggtgcttctggtcattggaagttgaggttctggacctccttggagccaaagagattgctgttcgggcctgggatgagacccttaacacccagccggaaaagctcaattggaatgttatgggaatgatgaacaattgctggttccggataaaaacaaatgtatgcaaacgacacaagggtgaaatcggtattgtcttcgagcaccccaccgtgccggccaaccagtccggcggatggatggccaaagaaagacacctagaaatatcatcagaaaaccatcccatcttaaagaaaagtgtttcaacacctttcatgaatacttcgtcaaagacagtttcaatggctgaggtcaagaaacacaattccgctgattcttgttggataattgtccatggccacgtctatgattgcactcgcttcctaaaagatcaccctggcggcactgatagcattctgatcaatgcaggcactgactgcactgaagaattcgatgcaatccattctgataaggccaagaaaatgctcgaggattatcgaattggagagctagtcgattcgacagcttatacaactgattccaatgcatcctccccgaacaattcagtgcatggtgcatccaatatgtcacaaacacctttagctccaatcaaggaaattacacctactccagcaagaaatgttgcccttgttccacgagaaaaaatcgcatgcaagctggtgaagaaagagtcactttcacatgatgtgcgtctctttcgatttgcattaccatccgatgatcaagtgttagggttaccagttgggaaacacatttttctgtgtgctactattgatgaaaagctatgcatgcgagcttatacgccaactagcaccattgatgtggtggggtactttgatcttgtgatcaaggtttacttcaagggcgttcatccaaagtttcctaatggagggctcatgtctcagcatctggactcactacagctcgggtctgtaatagacgtgaagggtcctttgggtcatatcgagtatgctgggcgtggcaatttcatggttcatggtaaacctaaattcgccaagaagctaaccatgttggcaggaggaacaggaataacaccaatttatcaagtaattcaagctattctgaaagatccagaagacgatacagagatgtatgtggtgtacgctaatcgtacggaagatgatattttgttaagagaagagcttgattcctgggcaaaagagcatcatgaaagattaaaggtatggtatgttgtccaagaatctatcaaggaagggtggcaatatagtgttgggttcatcacagaaaatatcttgagggagcatgttcccgaaggatcagatgatactcttgctttggcttgtggacctccacctatgattcagtttgctgtccagccaaatttagagaagatgaactatgatatcaagaattcattgctagtattctag

SEQ ID NO: 5051 - protein, 914 aa, Ricinus communis
MAASVDNRQFHLEPTLNGVVRPFKSGPTHRSDSPIRNGFNFTNQDFTRSSSNKKPTPIMDDDFSSDDDEADYGDLIRKGNSELQPSILDPRDEGTADNWVERHPSMIRLTGKHPFNSEAPLTQLMHHGFITPVPLHYVRNHGPVPKASWKDWTVEICGLVKKPTRFTMDQLVNDFPSRELPVTLVCAGNRRKEQNMVKQTIGFNWGAAGVSNSVWRGVPLHFVLKRCGIYSRKKGALNVCFEGAEDLPGGGGSKYGTSIKKEYAMVPSRDIILAYMQNGELLAADHGFPVRMIIPGFIGGRMVKWLKRIIVTTKESDNYYHYKDNRVLPSHVDAELANAEAWWYKPEYIINELNINSVITTPSHEEVLPINSWTTQRPYTLKGYAYSGGGKKVTRVEVTMDGGDTWQVCSLDHPEKPNKYGKYWCWCFWSLEVEVLDLLGAKEIAVRAWDETLNTQPEKLNWNVMGMMNNCWFRIKTNVCKRHKGEIGIVFEHPTVPANQSGGWMAKERHLEISSENHPILKKSVSTPFMNTSSKTVSMAEVKKHNSADSCWIIVHGHVYDCTRFLKDHPGGTDSILINAGTDCTEEFDAIHSDKAKKMLEDYRIGELVDSTAYTTDSNASSPNNSVHGASNMSQTPLAPIKEITPTPARNVALVPREKIACKLVKKESLSHDVRLFRFALPSDDQVLGLPVGKHIFLCATIDEKLCMRAYTPTSTIDVVGYFDLVIKVYFKGVHPKFPNGGLMSQHLDSLQLGSVIDVKGPLGHIEYAGRGNFMVHGKPKFAKKLTMLAGGTGITPIYQVIQAILKDPEDDTEMYVVYANRTEDDILLREELDSWAKEHHERLKVWYVVQESIKEGWQYSVGFITENILREHVPEGSDDTLALACGPPPMIQFAVQPNLEKMNYDIKNSLLVF

SEQ ID NO: 5052 - DNA, 2613 bp, Hansenula anomala
  CDS (1)..(2613)
atgagctcagaatccccaagcagtgtttttagtgagacgtccagtattcagatcagtgagactgatgtggagcctgaactcaactttcctttaagaaaagatgtcccaaagtcaaaagtgctggagttggatataaacaccaaagattatagagttccaagagaccctcgtctgttgagattgactggttctcatcctttcaattgtgaagctccattgactacattgtttgaggatggctttataacttcatcagacttacattttgttagaaatcatgggcctgttcctcatgttgaagatgaagaaattatgaattggacattctctgtggaaggtttagttgatgaaccatttgaaatgaagttatctgatatgatccaagaattccctcaatacactaatccaatcactttatgttgtgcaggaaatcgtcgtaaggaacaaaatcaagttaaaaaggggaaaggtttcaattggggagctgctggtgtttcaacttctttatggactggtgcatttttatgggatgttatatcaaaagctaaaccttctaaaaaggcaagatatgtttggatggaaggttgtgatgatcctgcaaaaggtgcttatggtacatgtgtccctttacctatggttaaagaccctgaaagaaatataatgctgtgttataaacaaaatggtatctatttggaacctgatcatggtaaacccctaagaatcgttataccaggtgttattggtggtagatctgttaaatggttaaagaaattagtggttagtgataaaccaagtgataattggtatcatttctttgataatagagttttaccaactatggttacacctgaaatggctgcatctgatgaatcatggtggaaagatgaaagatatgcaatttatgatttgaatctacaaagtattacggtttatcctgaaaatgatgaaactttaattgttgattcttcaaatgaagatgaattatacaatgttaaaggttttgcttataatggtggtggtaaaagagttggtagagtagaaatctcattagatggtgggaaaacttggaaactatgtgaaatagattatccagaagattcatatcgtgatgcaggctatattgaattatatggtgggactataaatgtttgtgatagaatgtcttgtttatgttggtgtttttggaatttacaaatacctaaaagggaattgaaatgtgcaaaagatctagttgttagagctatggatatctcaatgactgttcaaccaagaaatatgtattggaatgttacttcaatgttaaataattggtggtatagaattgctatccaaccaggttcacaaaatgatgaaattagatttgaacatccaactttagctaacaaacctggtggttggatggatagagttaaaaaggaaggtggtgatatattaaatccaaattatggtgaaagagttgcaaatggggaacaagaagaagaacgtaaaccatatgttgatgaagaattacaaatgattttaaacccagataaagtcaacattatcatcacaaaagaacaattagctcaacattcaaatgaacaggacccatggtttattgttaaaggtcatgttttcgatggtactccattcttacaagaacatcctggtggtgctcaatcgattactatggttgcaggtgaagatgctactgaagactttatggctatccattcagataattctaaaagaatgttacaaaaattccatctgggtaaattggaagatcagtcttctacaacaacatcagtcccaattgttgaaataattgaaaaaacaccaactttattaaatccaaagaaatggaaaaagatcaaacttgtcaataaagaaatcatttctcatgattcaagaatctttcattttgaattagaacatccagagcaaaccactggattacctgttggtaagcatttcttcattcgttcaaaagattcaactggttcattagttatgagagcttatacacctaaatcaaatcataagatcatggggaaattagaagtccttgttaaagtgtattttgctaaagaaggtattcctggtggtaaaatgacaaatattttagaaaatatggatattggatcattcattgaaattaaaggtccaactggtgaatttgaatatttgagtaatggtgaatatttgttggataataaacctggtaaagttgattcattcttgatgattgctggtggatctggtattactccctgctatcaagtgattaaagaaattgttgataatgaacaagataacacaaagatgaagttattttatggaaataggaaacctgaagatattttgtgtctccaagatcttgatgattttgttgctacaaaaaattcaaacttatctgtggtacattgtctatctgattatcgtggtataccaaatgaatgggaaggactaactggtcgtatgaacaagttgttatggaaccaatacattgaagaacaaaacaagattggtgacttcttggttcttgtttgtggtcctcctggaatggttgaaggtgtcaagaccattgtgaaggagacaggttttgatccatcaagggttgtgtatttctga

SEQ ID NO: 5053 - protein, 870 aa, Hansenula anomala
MSSESPSSVFSETSSIQISETDVEPELNFPLRKDVPKSKVLELDINTKDYRVPRDPRLLRLTGSHPFNCEAPLTTLFEDGFITSSDLHFVRNHGPVPHVEDEEIMNWTFSVEGLVDEPFEMKLSDMIQEFPQYTNPITLCCAGNRRKEQNQVKKGKGFNWGAAGVSTSLWTGAFLWDVISKAKPSKKARYVWMEGCDDPAKGAYGTCVPLPMVKDPERNIMLCYKQNGIYLEPDHGKPLRIVIPGVIGGRSVKWLKKLVVSDKPSDNWYHFFDNRVLPTMVTPEMAASDESWWKDERYAIYDLNLQSITVYPENDETLIVDSSNEDELYNVKGFAYNGGGKRVGRVEISLDGGKTWKLCEIDYPEDSYRDAGYIELYGGTINVCDRMSCLCWCFWNLQIPKRELKCAKDLVVRAMDISMTVQPRNMYWNVTSMLNNWWYRIAIQPGSQNDEIRFEHPTLANKPGGWMDRVKKEGGDILNPNYGERVANGEQEEERKPYVDEELQMILNPDKVNIIITKEQLAQHSNEQDPWFIVKGHVFDGTPFLQEHPGGAQSITMVAGEDATEDFMAIHSDNSKRMLQKFHLGKLEDQSSTTTSVPIVEIIEKTPTLLNPKKWKKIKLVNKEIISHDSRIFHFELEHPEQTTGLPVGKHFFIRSKDSTGSLVMRAYTPKSNHKIMGKLEVLVKVYFAKEGIPGGKMTNILENMDIGSFIEIKGPTGEFEYLSNGEYLLDNKPGKVDSFLMIAGGSGITPCYQVIKEIVDNEQDNTKMKLFYGNRKPEDILCLQDLDDFVATKNSNLSVVHCLSDYRGIPNEWEGLTGRMNKLLWNQYIEEQNKIGDFLVLVCGPPGMVEGVKTIVKETGFDPSRVVYF

SEQ ID NO: 5054 - DNA, 2649 bp, Chlamydomonas reinhardtii
  CDS (1)..(2649)
atgaccgttgccgagcagcccgtggcactcgtgcccagcggcaaggtgcaggcgcccgacgctatcgtatcgcaagcggtcgagctcggcgctccgtatgagcctccgctctcgcccgaggatgccgactggtcgcagcacgttcttccctcagctgtggacaagcgcgaccaggacacgcccgacaactgggtgcggcgcgacccccgcatcctgcgcctcaccggccggcacccgctcaactgcgagccgcccatgtccgtgctcatgcagtacggtttcatcacgccgccggccgtacacttcgtgcgcaaccacggcgccgcgccgcgcatccgctgggatgagcaccgcatcgagatcaacggcctggtcaacaagccgttgactttgaccatggacgagctggtggcgctgccctccgtcaccttcccggtgacgctggtgtgcgctggcaaccgccgcaaggaggagaacatgctgaagaagagcattggcttcaactggggcccttgtgccaccagcaccacctactggacgggcgtgcggctgcgcgacctgttgcagcacgccggcatcaagacgccggccgagggcgcccgcttcgtgtgcttccgcggccccaagggcgagctgccacgtggcgaggacggctcgtacggcacctctctgacgtacgccaaggccatggaccccgcctcggacgttatcatcgcatacaagcagaaccacaggtggctgacgcccgaccacggcttcccggtgcgcatcatcatcccgggcttcatcggcggccgcatggtcaagtggctgagcgagatcaccgtcatggacacggagtcgcagaacttctaccacttcatggacaaccgcgtgctgcccagccacgtggacgaggagctggccaagaaggagggctggtggtacaagcccgagttcatcatcaacgacctcaacatcaacagcgcgatggctcggccctggcacgacgagctggtcccgctggacgccaaccggccctacaccatcaagggttacgcctacgccggcggcggccgcaagatcatccgctgcgaggtctcgctggacgacggcaagacctggcgcctgggcgacatccagcgcttcgaggagcccaacgagtacggcaagcactggtgctgggtgcactggacgctggaggtgaacacgtttgacttcctgtccgccaaggaggtgctgtgccgcgcctgggatgagaccatgaacacgcagccggcggtgatcacctggaacctgatgggcatgatgaacaactgctacttccgcatcaagatccacccggaggtggacccagccacgggcgtcatgggcctgcgcttccagcacccggcccccgtggagctgggcgacaagggcaacatgggctggcgcgaggaggacaacctggtggcgcaggccgtggcggcggcgcgcgacggcggaggcgcggcggcggcaccgccgccgccgcctccggcggcgctgctggcgaatggcggccccaagcagtacacgctggaggaggtggcggagcacgcgagcgaggagagctgctggttcgtgcacgagggccgggtgtacgacgccacgccctacctgaatgaccacccgggtggcgccgagtccatcctgatcactgcgggcgcggacgccacagacgagttcaacgccatccacagctccaaagccaaggccatgctggcccagtactacatcggtgacctcgtggcatcaaaaccagcaaccgccaacggcacggcaaccgccaacggcaacggcacggcaactgccaacggcaccgcggcggcggcgccgcccgccgaccctctggttgtgctgacgggtcgcgccaaggtgaagctaccgctggtggagcggattgagctcaaccgcaacacgcgcatattccggttcggcctgccctcgccggagcaccgcatcggcctgccggtgggcaagcacgtgttcgtgtacgcgcaggtgggcggcgagaacgtgatgcgcgcctacacgcccatcagcggggacgaggagaagggccggctggacatgctcatcaaggtgtactttaagggcgagcacgcgtcctaccccgagggcggcaagatgagccagcatttcgactcgctcgccatcggcgactgcctggagttcaaggggccgctggggcacttcgtgtacaacggccgcggaagctacacgctcaacggcaaggtgaccaagcacgccagtcacatgtcgtttgttgcgggcggcacgggcatcacgccctgctacgcggtcatcaaggccgcactgcgcgaccccgaggacaacaccaagctggcgctgctgttcgccaacacacacgaggacgacattctgctgcgcgaggagctggacgagctcgcaaacaaccaccccgagcgcttccggctgtggtacacggtgtcacagcccaaggacgcggcgacctggaagtacgacgtggggcgtgtgagcaaggacatgttcacggagcacctcttcgccagcacgggcgaggactgcctcagcctcatgtgcgggccgcacggcatgatcgagcactgctgcgtgccgttcctggaggccatgggctacagcaaggaccgccagatccagttctag

SEQ ID NO: 5055 - protein, 882 aa, Chlamydomonas reinhardtii
MTVAEQPVALVPSGKVQAPDAIVSQAVELGAPYEPPLSPEDADWSQHVLPSAVDKRDQDTPDNWVRRDPRILRLTGRHPLNCEPPMSVLMQYGFITPPAVHFVRNHGAAPRIRWDEHRIEINGLVNKPLTLTMDELVALPSVTFPVTLVCAGNRRKEENMLKKSIGFNWGPCATSTTYWTGVRLRDLLQHAGIKTPAEGARFVCFRGPKGELPRGEDGSYGTSLTYAKAMDPASDVIIAYKQNHRWLTPDHGFPVRIIIPGFIGGRMVKWLSEITVMDTESQNFYHFMDNRVLPSHVDEELAKKEGWWYKPEFIINDLNINSAMARPWHDELVPLDANRPYTIKGYAYAGGGRKIIRCEVSLDDGKTWRLGDIQRFEEPNEYGKHWCWVHWTLEVNTFDFLSAKEVLCRAWDETMNTQPAVITWNLMGMMNNCYFRIKIHPEVDPATGVMGLRFQHPAPVELGDKGNMGWREEDNLVAQAVAAARDGGGAAAAPPPPPPAALLANGGPKQYTLEEVAEHASEESCWFVHEGRVYDATPYLNDHPGGAESILITAGADATDEFNAIHSSKAKAMLAQYYIGDLVASKPATANGTATANGNGTATANGTAAAAPPADPLVVLTGRAKVKLPLVERIELNRNTRIFRFGLPSPEHRIGLPVGKHVFVYAQVGGENVMRAYTPISGDEEKGRLDMLIKVYFKGEHASYPEGGKMSQHFDSLAIGDCLEFKGPLGHFVYNGRGSYTLNGKVTKHASHMSFVAGGTGITPCYAVIKAALRDPEDNTKLALLFANTHEDDILLREELDELANNHPERFRLWYTVSQPKDAATWKYDVGRVSKDMFTEHLFASTGEDCLSLMCGPHGMIEHCCVPFLEAMGYSKDRQIQF

SEQ ID NO: 5056 - DNA, 2673 bp, Glycine max
  CDS (1)..(2673)
atggcggcttccgtcgaccagcgtccgtaccccggcctccacaatggcgtcgttcggcccctcaaaccaggcccggatatcccgcgtcccaagaagctaccccagccgccgccgccactctcggattcctcaagcgacgaagaagaagacaccaccttgaacttgaaggacctgattcgcaagggaacaacggaagttgaatcctccattttcgacccgcgcgacgatggaacctctgaccactggatccaacggaactcttcccttgtccgtttaacgggaaagcacccgtttaactcggagccacccctccctcgcctcatgcaccacggcttcatcaccccggtccccctccactacgtccgcaaccacgggccagtcccccgggcccgctgggaggactggaccgtggaagtcacgggcctggtcaccaggcccacatgcttcaccatggagcaactcctccacgatttccccagtcgcgagttcccagccacactcgtctgcgctgggaaccggcggaaggaacagaacatggtgaaacagagcatcggcttcaactggggggcagccgccatctccacttcggtgtggcgcggcgtgcccttgcgcaccctgctcaagagctgcgggatctacacccgcaccaagggcgcgctccacgtgtgcttcgaaggggccgaggatctgccaggtggaggtgggtccaagtacggaaccagtatcctgagggaggttgcactggatccctcccgcgacatcattctcgcctacatgcaaaacggggagcctttgtccccggatcacggcttccccgttagaatgataatacccggtttcattggtggccgcatggtcaaatggttgaagcgcatcattgttactaccgaccaatctcaaaactattaccattataaggataacagggtactcccttctcacgttgatgccgaacttgccaatgctcaagcttggtggtacaagccggactatattatcaacgagcttaacataaactccgtgataaccacgccttgccacgaggagatcttgcccatcaactcatggactactcagatgccttatttcatcagaggctatgcgtattccggtggtgggagaaaggtgacacgtgttgaggtaaccctggacggaggtgaaacgtggcaagtgtgcacactggactgtccggagaaacccaacaaatatggaaagtactggtgttggtgtttttggtctgtggaggttgaggttttggacctgctcggagccagggagattgcggtgcgtgcttgggacgaggccctcaacacccaacctgaaaagctcatttggaatgttatgggcatgatgaacaactgctggttcagagtgaaaaccaatgtgtgcaggccccacaagggtgagataggtatagtgtttgaacaccccacccaaccaggcaaccaatccggcggatggatggcaaaagaaaaacacctagagaaatcatctgagtccaacccaaccctcaagaagagtgtctcctccccattcatgaacaccacctcaaaaacctataccatgtctgaagtcagaaggcacaacaacgccgattcggcttggatcatagtccacggtcatgtctatgattgcacccgcttcctcaaagaccatcccggtggcacagacagcatcctcatcaacgccggcaccgactgcaccgaggagttcgaagccatccactccgacaaagccaagcaaatgcttgaagactaccgaatcggcgagctcaccaccacctgctacaactctgattcttcatcgtcaaacccctccgtgcatggcagctccgacaccatccctttgacccccatcaaggaagtgattacaccaatgcgaagcgtggctcttaacccacgcgagaaaatcccatgcaagctcatctccaaaacctccatctctcacgacgttaggcttttccgctttgccctcccctccgacgacctactcatgggtttgccagttgggaagcacatattcctatgtgccaccgttgacgagaaactatgcatgcgagcctacactccaacaagcagcgttcacgaagtgggatacttcgacctcgtcgttaaggtttacttcaaaggggtgcaccctaagttccccaacggtgggatcatgtctcaacacttggactctctccccattggttctgtcttggacgtgaaaggcccacttggccacattgaatacactggcagaggaaacttcctcgttcatgggaaaccaaggtttgccacgaggctagccatgttggctggtggcacaggaatcacacccatttaccaagtggttcaagccattctaaaggatccagaggactgcaccgagatgcatgtggtttacgcgaaccgaaccgaggatgatatattgctgaaggaagagcttgatgagtgggctaagaagtatgataggttgaaggtgtggtacgtgatacaagaaagcataagagaagggtgggaatacagtgtgggattcatcactgaaagtatcctgacggagcatattccaaatgcatctcctgataccttggcattgacttgtggaccaccacctatgattcaatttgcagtccagccgaatttggagaagttgggctacgacacccagaataacttgctcgtgttttag

SEQ ID NO: 5057 - protein, 890 aa, Glycine max
MAASVDQRPYPGLHNGVVRPLKPGPDIPRPKKLPQPPPPLSDSSSDEEEDTTLNLKDLIRKGTTEVESSIFDPRDDGTSDHWIQRNSSLVRLTGKHPFNSEPPLPRLMHHGFITPVPLHYVRNHGPVPRARWEDWTVEVTGLVTRPTCFTMEQLLHDFPSREFPATLVCAGNRRKEQNMVKQSIGFNWGAAAISTSVWRGVPLRTLLKSCGIYTRTKGALHVCFEGAEDLPGGGGSKYGTSILREVALDPSRDIILAYMQNGEPLSPDHGFPVRMIIPGFIGGRMVKWLKRIIVTTDQSQNYYHYKDNRVLPSHVDAELANAQAWWYKPDYIINELNINSVITTPCHEEILPINSWTTQMPYFIRGYAYSGGGRKVTRVEVTLDGGETWQVCTLDCPEKPNKYGKYWCWCFWSVEVEVLDLLGAREIAVRAWDEALNTQPEKLIWNVMGMMNNCWFRVKTNVCRPHKGEIGIVFEHPTQPGNQSGGWMAKEKHLEKSSESNPTLKKSVSSPFMNTTSKTYTMSEVRRHNNADSAWIIVHGHVYDCTRFLKDHPGGTDSILINAGTDCTEEFEAIHSDKAKQMLEDYRIGELTTTCYNSDSSSSNPSVHGSSDTIPLTPIKEVITPMRSVALNPREKIPCKLISKTSISHDVRLFRFALPSDDLLMGLPVGKHIFLCATVDEKLCMRAYTPTSSVHEVGYFDLVVKVYFKGVHPKFPNGGIMSQHLDSLPIGSVLDVKGPLGHIEYTGRGNFLVHGKPRFATRLAMLAGGTGITPIYQVVQAILKDPEDCTEMHVVYANRTEDDILLKEELDEWAKKYDRLKVWYVIQESIREGWEYSVGFITESILTEHIPNASPDTLALTCGPPPMIQFAVQPNLEKLGYDTQNNLLVF

SEQ ID NO: 5058 - DNA, 816 bp, Homo sapiens
  CDS (1)..(816)
atggagccaatcaccttacaggaccctgaagccaagtacccgctgcccttgattgagaaagagaaaatcagccacaacacccggaggttccgctttggactgccttcgccggaccatgtcttagggcttcctgtaggtaactatgtccagctcttggcaaaaatcgataatgaattggtggtcagggcttacacccctgtctccagtgatgatgacagaggctttgtggacctaattataaagatctacttcaaaaatgtacacccccaatatcctgaaggtgggaagatgactcagtatttggagaacatgaaaatcggggagaccatcttttttcgagggccaaggggacgcttgttttaccatgggccagggaatcttggaatcagaccagaccagacgagtgagcctaaaaaaacactggccgatcacctgggaatgattgctgggggcacaggcatcacacccatgttgcagctcattcgccacatcaccaaggaccccagtgacaggaccaggatgtccctcatctttgccaaccagacagaggaggatatcttggtcagaaaagagcttgaagaaattgccaggactcacccagaccagttcgacctgtggtacaccctggacaggcctcccattggctggaagtacagctcaggcttcgttactgccgacatgatcaaggagcaccttcctcctccagcgaagtccacgctcatcctggtgtgtggcccgccaccactgatccagacggcggctcaccctaacctggagaagctgggttatacccaggacatgattttcacctactaa

SEQ ID NO: 5059 - protein, 271 aa, Homo sapiens
MEPITLQDPEAKYPLPLIEKEKISHNTRRFRFGLPSPDHVLGLPVGNYVQLLAKIDNELVVRAYTPVSSDDDRGFVDLIIKIYFKNVHPQYPEGGKMTQYLENMKIGETIFFRGPRGRLFYHGPGNLGIRPDQTSEPKKTLADHLGMIAGGTGITPMLQLIRHITKDPSDRTRMSLIFANQTEEDILVRKELEEIARTHPDQFDLWYTLDRPPIGWKYSSGFVTADMIKEHLPPPAKSTLILVCGPPPLIQTAAHPNLEKLGYTQDMIFTY

SEQ ID NO: 5060 - DNA, 831 bp, Homo sapiens
  CDS (1)..(831)
atgaactccaggaggagagagccaatcaccttacaggaccctgaagccaagtacccgctgccattgattgagaaagagaaaatcagccacaacacccggaggttccgctttggactgccttcgccggaccatgtcttagggcttcctgtaggtaactatgtccagctcttggcaaaaatcgataatgaattggtggtcagggcttacacccctgtctccagtgatgatgacagaggctttgtggacctaattataaagatctacttcaaaaatgtacacccccaatatcctgaaggtgggaagatgactcagtatttggagaacatgaaaatcggggagaccatcttttttcgaggcccaaggggacgcttgttttaccatgggccacggaatcttggaatcagaccagaccagacgagtgagcctaaaaaaacactggccgatcacctgggaatgattgctgggggcacaggcatcacacccatgttgcagctcattcgccacatcaccaaggaccccagtgacaggaccaggatgtccctcatctttgccaaccagacagaggaggatatcttggtcagaaaagagcttgaagaaattgccaggactcacccagaccagttcgacctgtggtacaccctggacaggcctcccattggctggaagtacagctcaggcttcgttactgccgacatgatcaaggagcaccttcctcctccagcgaagtccacgctcatcctggtgtgtggcccgccaacactgatccagacggcggctcaccctaacctggagaagctgggttatacccaggacatgattttcacctactaa

SEQ ID NO: 5061 - protein, 276 aa, Homo sapiens
MNSRRREPITLQDPEAKYPLPLIEKEKISHNTRRFRFGLPSPDHVLGLPVGNYVQLLAKIDNELVVRAYTPVSSDDDRGFVDLIIKIYFKNVHPQYPEGGKMTQYLENMKIGETIFFRGPRGRLFYHGPRNLGIRPDQTSEPKKTLADHLGMIAGGTGITPMLQLIRHITKDPSDRTRMSLIFANQTEEDILVRKELEEIARTHPDQFDLWYTLDRPPIGWKYSSGFVTADMIKEHLPPPAKSTLILVCGPPTLIQTAAHPNLEKLGYTQDMIFTY

SEQ ID NO: 5062 - DNA, 918 bp, Homo sapiens
  CDS (1)..(918)
atggggatccagacgagccccgtcctgctggcctccctgggggtggggctggtcactctgctcggcctggctgtgggctcctacttggttcggaggtcccgccggcctcaggtcactctcctggaccccaatgaaaagtacctgctacgactgctagacaagacgactgtgagccacaacaccaagaggttccgctttgccctgcccaccgcccaccacactctggggctgcctgtgggcaaacatatctacctctccacccgaattgatggcaacctggtcatcaggccatacactcctgtcaccagtgatgaggatcaaggctatgtggatcttgtcatcaaggtctacctgaagggtgtgcaccccaaatttcctgagggagggaagatgtctcagtacctggatagcctgaaggttgggcatgtggtggagtttcgggggccaagcgggttgctcacttacactggaaaagggcattttaacattcagcccaacaagaaatctccaccagaaccccgagtggcgaagaaactgggaatgattgccggcgggacaggaatcaccccaatgctacagctgatccgggccatcctgaaagtccctgaagatccaacccagtgctttctgctttttgccaaccagacagaaaaggatatcatcttgcgggaggacttagaggaactgcaggcccgctatcccaatcgctttaagctctggttcactctggatcatcccccaaaagattgggcctacagcaagggctttgtgactgccgacatgatccgggaacacctgcccgctccaggggatgatgtgctggtactgctttgtgggccacccccaatggtgcagctggcctgccatcccaacttggacaaactgggctactcacaaaagatgcgattcacctactga

SEQ ID NO: 5063 - protein, 305 aa, Homo sapiens
MGIQTSPVLLASLGVGLVTLLGLAVGSYLVRRSRRPQVTLLDPNEKYLLRLLDKTTVSHNTKRFRFALPTAHHTLGLPVGKHIYLSTRIDGNLVIRPYTPVTSDEDQGYVDLVIKVYLKGVHPKFPEGGKMSQYLDSLKVGHVVEFRGPSGLLTYTGKGHFNIQPNKKSPPEPRVAKKLGMIAGGTGITPMLQLIRAILKVPEDPTQCFLLFANQTEKDIILREDLEELQARYPNRFKLWFTLDHPPKDWAYSKGFVTADMIREHLPAPGDDVLVLLCGPPPMVQLACHPNLDKLGYSQKMRFTY

SEQ ID NO: 5064 - DNA, 897 bp, Mortierella alpina
  CDS (1)..(897)
atgactctgtccaaccctgccatcgctgctgcctcgggcgtcattctcgccggcgcatacctgatcgacccctccgcattgccctttgtcgccgccggtgtcgccgccacctgggccagagttctcttcaagaagaccgctgtcaaaactcccccaatggatcccaaggagtaccgcaagttcaagctggttgacaaggtccactgcagccccaacactgccatgtacaagttcgcgctcccacatgaggatgatcttttgaacttgcccattggccagcatatctcgatcatggccaacattaacggcaaggatatctcgcgcagctacactcccaccagcagcagcgacgatgttggacactttgttctctgcatcaagtcctaccctcaaggaaacatctccaagatgtttagcgaactttcgatcggtgattctatcaatgctcgtggacccaagggccagttcagctacacccccaacatgtgccgcgccattggtatgattgccggcggtactggtctcacccccatgctccagattattcgtgccattgtcaagaaccccgaggacaagacccaggtcaacttcatctttgccaacgtcacagaggaggacatcatcttgaaggctgagctcgacctcctgtcacagaagcaccctcagttcaaggtttactacgttttgaacaacgctcccgagggctggaccggcggcgttggatttgttaacgctgatatgatcaaggagcacatgcctgcgcctgctgccgacatcaaggtcttgctttgcggtccccctcccatggtctccgccatgtccaagatcacccaggatctcggatacgacaaggtcaatgccgtctcgaagctccccgaccaggtcttcaagttttaa

SEQ ID NO: 5065 - protein, 298 aa, Mortierella alpina
MTLSNPAIAAASGVILAGAYLIDPSALPFVAAGVAATWARVLFKKTAVKTPPMDPKEYRKFKLVDKVHCSPNTAMYKFALPHEDDLLNLPIGQHISIMANINGKDISRSYTPTSSSDDVGHFVLCIKSYPQGNISKMFSELSIGDSINARGPKGQFSYTPNMCRAIGMIAGGTGLTPMLQIIRAIVKNPEDKTQVNFIFANVTEEDIILKAELDLLSQKHPQFKVYYVLNNAPEGWTGGVGFVNADMIKEHMPAPAADIKVLLCGPPPMVSAMSKITQDLGYDKVNAVSKLPDQVFKF

SEQ ID NO: 5066 - DNA, 2727 bp, Hebeloma cylindrosporum
  CDS (1)..(2727)
atggccacggtacattcactaattacgaaatacactccaaacctctacggaaacctcgacatccccaacctccgtcgactcagaaccataccaaaaaacaaatttagcattagcaaaccctatgatgccaagcgcatcgtaccccgaggtcttccttcttccttggaccttccacgcattcccgacgaaccagcgtgtggggaaatagacacgcgagacttagccacccccgatgcatggatccctcgagatccccgaatggttcgcctaaccggaaaacacccattcaacgcagaagcaaatcttcgagacttatacgcccaaggattcatcacccccagcaacctcttcttcgttcgcaaccatggcgccgtacccatcataaaccaggacaaggcagacgaatggacattgaagctccacggattatgttcgaatccgacaacgctctccttggcagatctacgaactatgtttagagtggtgactgtccccgtaacattagtctgtgccgggaatcgtcgcaaggaacaaaacgtggtgcagaaatcgctcggattctcatggggacccgggggcatatcaaccgcgctcttcacaggtgtttatctcgcggacgtgttggatttcgttcagcccgcgcgccaggcaaaacacgtcgtgttcgaaggcagtgacgatctcccaaacggaccttacgggacgagccaactcaccagctgggcacgagataaacgaaaaggaatgatgctagcatgggcaatgaacgggctgccgctcgaacccgaccacggcttcccactccgcctcgtcgtcccatcccaaatcgggggcagatccgtgaaatggctgtcaaggatcgagttatccgcgatcgaaagccaacatcacctccatttccacgataacaaagtcctaccgatgccgttgggcccagaccaagcacgcgcagagaaacaatggtggtacgatccaagatacatcatccgcgacttaaacgcgaacagcgccatcgcctctccagatcacgacgaaatcctagacaccaccaagtccgcaccaaacgcaacgtacacggtgaaaggatacgcttacgccggtggtgggcgaagagtcacacgcgtcgaggtatcctcagataacggcgactcctggaaactcgccaacatatcctaccctgaagaccttttccgggaagtggcgcacttcgatcccatctatggcgacctagatatgaccgattccgacgcctgtttctgctggtgtttctggtcgttcgatatcgatatatccgcgttgaaagcgagtcgcgcaatcatggtaaggtgcatggacgaatcgctcgctttacaaccacgcgacatgtactggaacgcgaccgggatgatgaacaactggtggttccgcgtgtgcatccaccagctggacggcggaaaactccgtttcgagcatcccactagcaagtttcctttggcgggaacccaaccaggcggttggatgcagaggttaaaagaccaagggctcgatccatcaaaacccgacttttctaacgatgcaacgacagcttcgacttccaagattgagatctccaaaccagccgaaacagtcatgaccaagcaaggagtcgatcgtaaaatcaccatcgcagagctagagtcgtcagaagcgaaagaggaggcgtggttcgtcgtgcgaggagaggtatacaacggcagcgggtttttcaaagaccacccaggcggagcagagtcgatcatgcttgtcgcaggggaagacgcaaccgaggactttatggccatccatagctctgacgcccggaaacagctcgccgatttccacatcggcaccctcatcggtatccagagcagtaacaaagtcaaagaagacgaccaagaaacgagcggctccttcctccacccgaagaaatggaaagaagtcaagctttcgaggatcgacgatgtgtcgaaggacgccaagatcttccggttccagcttacccacgctgagcaggaattgggattacctttcggccagcacgtctacgtccgtctgcgaagaaaggttccctacaaagaaaggggtgagatcgttcaaggagagctggtgcaaagagcgtatacaccactgtcggagagaaacgcgaaggggttcatcgacctgcttatcaaaatttactaccccagcgccgaatttccccaaggaggacgcatgacagtcgggttcgcagagcttgtcgtcggcgacgtggtggagctcaaaggtcctatcgggcatctcatctggaagggaaacggtatcgcctcgctacatggcaaagaaaggcgcattaacgagatcggcttggtttgcggtggaagtgggataacgccgattcttcaagtcctccgtgcgattctaaccgatccagcgggataccatacgaaggtgtgggtcttggacgtcaatcgattcctagatgacatcctttgtcgagaagagctcgaccgactcgcggtggaacacaactcacatttcaagcttcattacagtctaacgggtaagcctcttcccgaagattggcgttattcaacaggacgcattaccgatgcaatgttggtatctcatctgcctgcgccgggggaagatacgttagtctgcatttgcgggccacctccgatggaagaatcagtaaaagcttctctcagctgcatgggttgggacctatcgaaacaagtcattctcttttga

SEQ ID NO: 5067 - protein, 908 aa, Hebeloma cylindrosporum
MATVHSLITKYTPNLYGNLDIPNLRRLRTIPKNKFSISKPYDAKRIVPRGLPSSLDLPRIPDEPACGEIDTRDLATPDAWIPRDPRMVRLTGKHPFNAEANLRDLYAQGFITPSNLFFVRNHGAVPIINQDKADEWTLKLHGLCSNPTTLSLADLRTMFRVVTVPVTLVCAGNRRKEQNVVQKSLGFSWGPGGISTALFTGVYLADVLDFVQPARQAKHVVFEGSDDLPNGPYGTSQLTSWARDKRKGMMLAWAMNGLPLEPDHGFPLRLVVPSQIGGRSVKWLSRIELSAIESQHHLHFHDNKVLPMPLGPDQARAEKQWWYDPRYIIRDLNANSAIASPDHDEILDTTKSAPNATYTVKGYAYAGGGRRVTRVEVSSDNGDSWKLANISYPEDLFREVAHFDPIYGDLDMTDSDACFCWCFWSFDIDISALKASRAIMVRCMDESLALQPRDMYWNATGMMNNWWFRVCIHQLDGGKLRFEHPTSKFPLAGTQPGGWMQRLKDQGLDPSKPDFSNDATTASTSKIEISKPAETVMTKQGVDRKITIAELESSEAKEEAWFVVRGEVYNGSGFFKDHPGGAESIMLVAGEDATEDFMAIHSSDARKQLADFHIGTLIGIQSSNKVKEDDQETSGSFLHPKKWKEVKLSRIDDVSKDAKIFRFQLTHAEQELGLPFGQHVYVRLRRKVPYKERGEIVQGELVQRAYTPLSERNAKGFIDLLIKIYYPSAEFPQGGRMTVGFAELVVGDVVELKGPIGHLIWKGNGIASLHGKERRINEIGLVCGGSGITPILQVLRAILTDPAGYHTKVWVLDVNRFLDDILCREELDRLAVEHNSHFKLHYSLTGKPLPEDWRYSTGRITDAMLVSHLPAPGEDTLVCICGPPPMEESVKASLSCMGWDLSKQVILF

SEQ ID NO: 5068 - DNA, 2733 bp, Zea mays
  CDS (1)..(2733)
atggccgctgtggagccccggcagttcgggcgtctggagccgggctcctcgccagtgcgcgtggccacgaacggcgccaaggcgtaccctcctccggcaagccacctcccgcggcgcgctgactcccctgtccgcggctgcagcttccctcccctcgtctccccgccgcgcaggctggacgacgcgtcggacgacgaggacgaggagcaggaggactggcgagagctgtacggctcgcacctgcagctggaggtggagcccgcggtgcaggacgcgcgcgacgaaggcaccgcggacgcgtggatcgagcggaacccgtgcctggtgaggctgacggggaagcacccgctcaactgcgagccgccgctagcgcggctgatgcaccacggcttcatcaccccggcgccgctgcactacgtgcgcaaccacggcgccgtgccgcggggggactgggcgacgtggaccgtggaggtgacgggcctcgtgaggcggcccgcgcggctcaccatggaggagctggcgcgcgacttccccgccgtggagatccccgtgacgctggcgtgcgcgggcaaccggcgcaaggagcagaacatggtgcagcagacggtgggcttcaactggggcgccgccggcgtgtccacgtccgtgtggcgcggcgcgcgcctccgcgacgtgctccgccgctgcggcatcgtgccccgcaagggcggcgccctcaacgtgtgcttcgagggcgccgaggacctccccggcggcggggggtccaagtacggcaccagcgtcacgcgcgagtgggccctggacccgtcgcgggacatcatgctcgcctacatgcagaacggcgagccgctgctgccggaccacggcttccccgtgcgcgtcatcatccccggctgcatcggtggccgcatggtcaagtggctcaagcgcatcatcgtcacccccgccgagtccgacaattactaccatttcaaggacaaccgcgtcctgccgtcgcacgtcgacgccgagctcgccaacgcagaagcgtggtggtacaagccggagtacatcatcaacgagctgaacataaactcggtgataacgacgccggggcacgacgagatcctgcccatcaacagcattaccacacagcgcggctacaccatgaaaggatacgcctactccggcggcggcaagaaggtgacgcgggtggaggtgacgctggacggcggcgagacatggctggtgtgccacctcgaccacccggagaagcccaacaagtacggcaagtactggtgctggtgcttctggtccgtcgaggtggaggtcctcgacctgctcggcgccaaggagatcgccgtgcgcgcatgggaccagtcgctcaacacccagcccgagaagctcatatggaacctcatggggatgatgaacaactgctggttcaaggtgaaggtgaacgtgtgccgtccgcacaagggcgagatcgggctggtgttcgagcacccgacgcagcccggcaaccagcccggcgggtggatggcgcggcagaagcacctggagacggcggaggcggccgcgccgggcctcaagcgcagcacgtccacgccgttcatgaacaccaccgacgtcggcaagcagttcaccatgtccgaggtgcgcaagcacgcgtcgcaggagtcggcgtggatcgccgtgcacggccacgtctacgactgcaccaagttcctcaaggaccacccgggcggcgccgacagcatcctcatcaacgccggcaccgactgcaccgaggagttcgacgccatccactccgacaaggccaaggcgctcctcgacacctaccgcatcggcgagctcatcaccacgggcaccggctacagctccgacaactccgtccacggcggctccgtcctgtcgcacctcgcgcccatccgcgaggccgtcagggcccccgcgctctccaacccgcgcgataagatccactgccgcctcgtcggcaagaaggagctgtcccgcgacgtccgcctcttccgcttctcgctgccgtcgcccgaccaggtgctcggcctccccatcggcaagcacatcttcgtctgcgccagcattgaagggaagctgtgcatgcgggcgtacacgcccacgagcatggtggacgagatcggccacttcgacctcctcgtcaaggtctacttcaagaacgagcaccccaagttccccaacggcggcctcatgacccagtacctcgactcgcttcccgtcggctcctacatcgacgtcaagggcccgcttggccacgtggagtacaccggccgcggcagcttcgtcatcaacggcaagcagcgccatgcgagccgcctcgccatgatctgcggcggaagtgggatcacgcccatgtaccagatcatccaggcggtgctgcgcgaccagccggaggaccacacggagatgcacctcgtgtacgccaaccggacggaggacgacatcctcctccgcgacgagctcgaccggtgggcggccgagtacccggacaggctcaaggtgtggtacgtcatcgaccaggtaaagcgcccggaggaggggtggaagtacagcgttgggttcgtcacggaggccgtcctgcgggagcacgttccggaaggtggggacgacacgctggcccttgcctgcggaccaccgccgatgatccagttcgccatctcgcccaacttggagaagatgaagtacgacatggccaattctttcgtcgtgttctaa

SEQ ID NO: 5069 - protein, 910 aa, Zea mays
MAAVEPRQFGRLEPGSSPVRVATNGAKAYPPPASHLPRRADSPVRGCSFPPLVSPPRRLDDASDDEDEEQEDWRELYGSHLQLEVEPAVQDARDEGTADAWIERNPCLVRLTGKHPLNCEPPLARLMHHGFITPAPLHYVRNHGAVPRGDWATWTVEVTGLVRRPARLTMEELARDFPAVEIPVTLACAGNRRKEQNMVQQTVGFNWGAAGVSTSVWRGARLRDVLRRCGIVPRKGGALNVCFEGAEDLPGGGGSKYGTSVTREWALDPSRDIMLAYMQNGEPLLPDHGFPVRVIIPGCIGGRMVKWLKRIIVTPAESDNYYHFKDNRVLPSHVDAELANAEAWWYKPEYIINELNINSVITTPGHDEILPINSITTQRGYTMKGYAYSGGGKKVTRVEVTLDGGETWLVCHLDHPEKPNKYGKYWCWCFWSVEVEVLDLLGAKEIAVRAWDQSLNTQPEKLIWNLMGMMNNCWFKVKVNVCRPHKGEIGLVFEHPTQPGNQPGGWMARQKHLETAEAAAPGLKRSTSTPFMNTTDVGKQFTMSEVRKHASQESAWIAVHGHVYDCTKFLKDHPGGADSILINAGTDCTEEFDAIHSDKAKALLDTYRIGELITTGTGYSSDNSVHGGSVLSHLAPIREAVRAPALSNPRDKIHCRLVGKKELSRDVRLFRFSLPSPDQVLGLPIGKHIFVCASIEGKLCMRAYTPTSMVDEIGHFDLLVKVYFKNEHPKFPNGGLMTQYLDSLPVGSYIDVKGPLGHVEYTGRGSFVINGKQRHASRLAMICGGSGITPMYQIIQAVLRDQPEDHTEMHLVYANRTEDDILLRDELDRWAAEYPDRLKVWYVIDQVKRPEEGWKYSVGFVTEAVLREHVPEGGDDTLALACGPPPMIQFAISPNLEKMKYDMANSFVVF

SEQ ID NO: 5070 - DNA, 840 bp, Zea mays; identical to SEQ ID NO: 2563
  CDS (1)..(840)

SEQ ID NO: 5071 - protein, 279 aa, Zea mays; identical to SEQ ID NO: 2564

SEQ ID NO: 5072 - DNA, 987 bp, Arabidopsis thaliana
  CDS (1)..(987)
atggctacttccttcttccggcgactcgctaggtcagctccgattacattccctgtcgcatttggatctcaaagcaaatctggttctggcgctttccgattctccaccggtgcaatcgcggcactttccggtggattctcctattactacttgacatccggcaacaatctggtttatctggatcaagctaaggaagagacaggaccaaaaaccgctctaaaccctgataaatggctcgagttcaagcttcaagacactgctagagttagccacaacactcagttgttcaggttctcatttgacccctcagctgagttgggtctacatgttgcttcttgtctcctgacaagggctcctttaggctataatgctgaagggaaaacgaaatatgtcattagaccttacactcctatatcagatccagaggctaagggctattttgatttactgattaaggtatatcctgacggaaaaatgagtcagcattttgccagcttaaaaccgggggatgtgttggaagtaaaaggacccgttgaaaagttcaaatactcgccgaatatgaagaaacatattggcatgattgccggtggaagtgggattactccaatgcttcaggtgattgatgccattgtgaagaatcctgaggacaacacgcagatatcattgctttatgccaatgtgtctccagatgatatactcctgaagcagaagcttgatgtacttcaggctaaccacccaaatttgaagatattctatactgttgacaaccctactaaaaactggaaaggaggagtaggttacatttcaaaggatatggctctgaaaggcttacctcttcctaccgacgatactcttatccttgtatgcggtcctcctgggatgatggagcatatatctggaggcaaagctccagactggtcacaaggagaggtcaaggggattctcaaggaactcggatacacagaggaaatggtgttcaaattctga

SEQ ID NO: 5073 - protein, 328 aa, Arabidopsis thaliana
MATSFFRRLARSAPITFPVAFGSQSKSGSGAFRFSTGAIAALSGGFSYYYLTSGNNLVYLDQAKEETGPKTALNPDKWLEFKLQDTARVSHNTQLFRFSFDPSAELGLHVASCLLTRAPLGYNAEGKTKYVIRPYTPISDPEAKGYFDLLIKVYPDGKMSQHFASLKPGDVLEVKGPVEKFKYSPNMKKHIGMIAGGSGITPMLQVIDAIVKNPEDNTQISLLYANVSPDDILLKQKLDVLQANHPNLKIFYTVDNPTKNWKGGVGYISKDMALKGLPLPTDDTLILVCGPPGMMEHISGGKAPDWSQGEVKGILKELGYTEEMVFKF

SEQ ID NO: 5074 - DNA, 906 bp, Bos taurus
  CDS (1)..(906)
atgggcgcccagctgtccacacttggtcatgtggtcctctccccagtctggttcctgtacagcctgatcatgaagctgttccagcgctccaccccggccatcacgctcgagaatccagacatcaagtacccgctgcggctgattgacaaggaggtcatcagccatgacacgcggcggttccgctttgcactgccgtcgcctgagcacatcctgggcctccctgtcggccagcacatctacctctcggctcgaatcgatgggaacctggttattcggccctacacgcccgtctccagcgatgacgacaagggctttgtggacctggtcatcaaggtttacttcaaagacacccatcccaagtttcccgctggagggaagatgtcccagtacctggaaagcatgaagattggcgacaccattgagttccggggccccaacgggctgctggtctaccagggcaaaggaaagtttgccatccgtccagacaagaagtccgaccctgtcatcaagacggtgaaatctgtgggcatgattgcaggaggaacgggcatcaccccaatgcttcaggtgatccgcgccatcatgaaggatccagatgatcacaccgtgtgccacctgctctttgccaaccagaccgagaaggacatcctgctgcgccccgagctggaggaactgaggaacgagcactctgcacgcttcaagctctggtacacggtggacaaagcccctgaagcctgggactacagccagggcttcgtgaacgaggagatgatccgggaccacctgccgcccccagaggaggaaccgctggtgctgatgtgtggacccccacccatgatccagtacgcctgcctgcccaacctggaccgcgtgggtcatcctaaagaacgctgcttcgccttctag

SEQ ID NO: 5075 - protein, 301 aa, Bos taurus
MGAQLSTLGHVVLSPVWFLYSLIMKLFQRSTPAITLENPDIKYPLRLIDKEVISHDTRRFRFALPSPEHILGLPVGQHIYLSARIDGNLVIRPYTPVSSDDDKGFVDLVIKVYFKDTHPKFPAGGKMSQYLESMKIGDTIEFRGPNGLLVYQGKGKFAIRPDKKSDPVIKTVKSVGMIAGGTGITPMLQVIRAIMKDPDDHTVCHLLFANQTEKDILLRPELEELRNEHSARFKLWYTVDKAPEAWDYSQGFVNEEMIRDHLPPPEEEPLVLMCGPPPMIQYACLPNLDRVGHPKERCFAF

SEQ ID NO: 5076 - DNA, 906 bp, Homo sapiens; identical to SEQ ID NO: 4874
  CDS (1)..(906)

SEQ ID NO: 5077 - protein, 301 aa, Homo sapiens; identical to SEQ ID NO: 4875

SEQ ID NO: 5078 - DNA, 906 bp, Macaca fascicularis
  CDS (1)..(906)
atgggggcccagctgagcacgttgggccatgtggtgctctccccagtctggttcctatacagtctgctcatgaagctgttccggtgctccacgccagccatcaccctcgagagtccggacatcaagtactcgctgcggctcatcgaccgggagatcatcagccatgacacccggcgcttccgctttgccctgccgtcaccccagcatatcctgggcctgcctgtcggccagcacatctacctctcggctcgaattgacggaaacctggtcatccggccctatacacctgtctccagtgatgatgacaagggcttcgtggacctggtcatcaaggtttacttcaaggacactcatcccaagtttcccgccggaggcaagatgtctcagtacctggaaagcatgcagattggagacaccattgagttccggggccccaacgggctgctggtctaccagggcaaagggaagttcgccatccggcctgacaaaaagtccaaccccgtcatcaagacagtgaagtctgtgggcatgatcgcgggagggacaggcatcactccgatgctgcaggtgatccgcgctatcatgaaggaccctgacgaccacaccgtgtgccacctgctctttgccaaccagaccgagaaggacatcctgctgcgacctgagctagaggaactcaggaatgaacattctgcgcgcttcaagctctggtacacgctggacagagcccctgaagcctgggactacagccagggcttcgtgaatgaggagatgatccgggaccaccttccgcccccagaggaggagccgctggtgctgatgtgtggccccccacccatgatccagtacgcctgcctgcccaacctggaccgcgtgggccaccccaaggagcgctgcttcgccttctga

SEQ ID NO: 5079 - protein, 301 aa, Macaca fascicularis
MGAQLSTLGHVVLSPVWFLYSLLMKLFRCSTPAITLESPDIKYSLRLIDREIISHDTRRFRFALPSPQHILGLPVGQHIYLSARIDGNLVIRPYTPVSSDDDKGFVDLVIKVYFKDTHPKFPAGGKMSQYLESMQIGDTIEFRGPNGLLVYQGKGKFAIRPDKKSNPVIKTVKSVGMIAGGTGITPMLQVIRAIMKDPDDHTVCHLLFANQTEKDILLRPELEELRNEHSARFKLWYTLDRAPEAWDYSQGFVNEEMIRDHLPPPEEEPLVLMCGPPPMIQYACLPNLDRVGHPKERCFAF

SEQ ID NO: 5080 - DNA, 906 bp, Mus musculus; identical to SEQ ID NO: 4892
  CDS (1)..(906)

SEQ ID NO: 5081 - protein, 301 aa, Mus musculus; identical to SEQ ID NO: 4893

SEQ ID NO: 5082 - DNA, 906 bp, Rattus norvegicus; identical to SEQ ID NO: 4904
  CDS (1)..(906)

SEQ ID NO: 5083 - protein, 301 aa, Rattus norvegicus; identical to SEQ ID NO: 4905

SEQ ID NO: 5084 - DNA, 969 bp, Saccharomyces cerevisiae
  CDS (1)..(969)
atgtataaatattcttattatataaggcgaaaaaatgaacgagaaaaaaaagtgttgaaagtatgcattcaactggctcttcaacaagagactcaatcaattaagcaatcgaagatggctattgatgctcaaaagcttgtggtggtcatcgtgatcgtggtcgtgcctttgctcttcaagttcattatcggaccgaagaccaagcctgtgctggatcccaaaaggaatgacttccaatcatttccgctggttgaaaaaaccatcttaacgcataatacttcgatgtacaagttcgggctacctcatgctgacgacgtactcggtttaccaattggtcagcatatcgtaattaaggccaatatcaatggtaaggatattaccagatcgtatacgcccacatcgttggatggagatacaaagggaaactttgaattactagtgaagtcttaccccacaggtaacgtttctaagatgattggagagttgaagataggtgactcgatccagatcaagggccctcgtgggaactatcattatgagagaaactgccgttcccatctagggatgattgctggtggtactggtattgcgcccatgtatcagatcatgaaagctattgccatggaccctcacgacactaccaaggtctctctagtctttgggaacgtccatgaggaggatattctgttgaagaaggaactggaagcgttggtggccatgaagccttcccaatttaagatagtttactacttagactctcctgaccgtgaagactggactggtggtgtaggatacattaccaaggatgtcatcaaggaacacttgcccgctgctacaatggacaacgttcaaattttgatctgtggtcctccagccatggttgcctcagttagaagaagtaccgtggacttggggttcagacgttccaaaccgctttccaagatggaagaccaggtgtttgtgttttaa

SEQ ID NO: 5085 - protein, 322 aa, Saccharomyces cerevisiae
MYKYSYYIRRKNEREKKVLKVCIQLALQQETQSIKQSKMAIDAQKLVVVIVIVVVPLLFKFIIGPKTKPVLDPKRNDFQSFPLVEKTILTHNTSMYKFGLPHADDVLGLPIGQHIVIKANINGKDITRSYTPTSLDGDTKGNFELLVKSYPTGNVSKMIGELKIGDSIQIKGPRGNYHYERNCRSHLGMIAGGTGIAPMYQIMKAIAMDPHDTTKVSLVFGNVHEEDILLKKELEALVAMKPSQFKIVYYLDSPDREDWTGGVGYITKDVIKEHLPAATMDNVQILICGPPAMVASVRRSTVDLGFRRSKPLSKMEDQVFVF

SEQ ID NO: 5086 - DNA, 2754 bp, Arabidopsis thaliana
  CDS (1)..(2754)
atggcgacctccgtcgataaccgccattatcccaccatgaacggcgtcgctcacgccttcaaacctcctctcgttccttctcctcgctcattcgaccgccaccgtcaccaaaaccaaactctcgacgtcatcctcaccgaaactaaaatcgtcaaagaaaccgaagtcatcaccaccgtcgtagacagttacgacgactcctcaagcgacgacgaagacgagagccataaccgtaacgtcccttactacaaagagctggttaaaaaatcaaacagcgatttagaaccgtcgattttagatccgagagatgaatcaacggctgatagttggattcaacgtaactcatccatgctccgtctcaccggaaaacatccattcaacgccgaagcacctcttcctcgtcttatgcaccatggattcatcactccagttccactccattacgtccgcaaccacggtgcagttcccaaagcgaattggtcagactggtcaatcgaaattaccggactcgttaaacgtccggctaaattcaccatggaagagctaatctccgagttccccagccgcgaattcccggtgacactcgtctgcgccggtaatcgccgcaaggaacagaacatggtgaaacaaacgatcggattcaattggggatccgccggagtatctacttctctatggaaaggtattccgttaagcgaaatcctccgtcgatgcgggatctatagccggagaggaggcgcgttaaacgtttgcttcgaaggagcggaggatcttcccggcggcggcggatctaaatacggaacaagtattaagaaggagatggcgatggatccggctagagatattatcttagcttatatgcaaaacggcgagcttttaacgccggatcatgggtttccggttcgggtcattgtaccgggtttcatcggtggtcggatggttaaatggttaaagagaatcatcgtcacgcctcaagaatctgacagttactatcactataaagacaatcgagtccttccttctctcgttgatgctgagctggcaaattccgaagcttggtggtataagcctgaatacataatcaacgagcttaatataaactcggtgattacaacacctggtcacgcagagattttaccgattaatgcattcactactcagaagccgtacacattaaaaggctacgcttattctggaggaggtaagaaggtaacgagggttgaggtgactctagacggaggagacacgtggagtgtttgtgagcttgaccaccaggagaaaccgaacaagtacggtaaattctggtgctggtgtttctggtcacttgacgttgaggttcttgatctgctcagtgctaaagacgtcgcggttcgagcctgggacgagtctttcaatactcagcctgataaactcatctggaacctcatggggatgatgaacaattgctggttcaggattaggaccaacgtgtgcaagcctcatagaggagagatagggatagttttcgaacacccgaccagacccggaaaccagtcgggtgggtggatggcaaaggagcgtcagcttgagatttcctcagaatccaacaataccttgaagaaatctgtctcatctcctttcatgaacactgcctcgaagatgtattcaatctctgaagttagaaaacacaacactgctgactctgcatggatcatcgtccacggtcacatctatgactgtacacgtttcttgaaagatcatccaggaggcacagattctatcctgataaacgcaggtacagattgcaccgaagagtttgaagccattcactctgacaaagccaagaagcttttggaagattaccgtatcggtgaactcatcaccactggctacgactcttcccctaacgtctcagttcatggtgcctcaaactttggtcctttgttagctccaatcaaagagctaactcctcaaaagaacattgctttggtcaacccacgtgagaaaatcccggttaggctcattgagaagacttcgatctcgcacgacgttcgtaagttccgattcgcattaccatcagaagatcaacagcttggtttacccgtggggaagcacgttttcgtttgcgccaacataaacgacaaactctgtctcagagcttatactcccaccagcgccatcgacgcggttggtcatatcgacctcgtcgtcaaagtttacttcaaagacgttcatccaaggtttcccaatggtggactcatgtctcaacacttagactcgttaccaatcgggtcaatgatagatatcaaaggtccactagggcacatcgagtacaaaggcaaaggcaacttcctggtcagcggcaaacctaagtttgccaagaaactagcaatgctcgccggaggaacaggcatcactcctatctaccagatcattcaatctatattgagtgatccagaggacgaaaccgagatgtatgtggtttacgcaaacagaaccgaggatgacattcttgtgagggaagagctagaaggatgggctagtaagcataaggagaggctaaagatttggtacgtcgttgaaatcgcaaaggaaggttggagttacagtaccgggtttataactgaagctgtgcttagggaacatatccctgaaggtttggaaggcgaatcgctagcactcgcatgcggaccaccgcctatgattcagtttgcgttgcagccaaatctagagaagatgggttacaacgtgaaggaggatctcttaatcttctag

SEQ ID NO: 5087 - protein, 917 aa, Arabidopsis thaliana
MATSVDNRHYPTMNGVAHAFKPPLVPSPRSFDRHRHQNQTLDVILTETKIVKETEVITTVVDSYDDSSSDDEDESHNRNVPYYKELVKKSNSDLEPSILDPRDESTADSWIQRNSSMLRLTGKHPFNAEAPLPRLMHHGFITPVPLHYVRNHGAVPKANWSDWSIEITGLVKRPAKFTMEELISEFPSREFPVTLVCAGNRRKEQNMVKQTIGFNWGSAGVSTSLWKGIPLSEILRRCGIYSRRGGALNVCFEGAEDLPGGGGSKYGTSIKKEMAMDPARDIILAYMQNGELLTPDHGFPVRVIVPGFIGGRMVKWLKRIIVTPQESDSYYHYKDNRVLPSLVDAELANSEAWWYKPEYIINELNINSVITTPGHAEILPINAFTTQKPYTLKGYAYSGGGKKVTRVEVTLDGGDTWSVCELDHQEKPNKYGKFWCWCFWSLDVEVLDLLSAKDVAVRAWDESFNTQPDKLIWNLMGMMNNCWFRIRTNVCKPHRGEIGIVFEHPTRPGNQSGGWMAKERQLEISSESNNTLKKSVSSPFMNTASKMYSISEVRKHNTADSAWIIVHGHIYDCTRFLKDHPGGTDSILINAGTDCTEEFEAIHSDKAKKLLEDYRIGELITTGYDSSPNVSVHGASNFGPLLAPIKELTPQKNIALVNPREKIPVRLIEKTSISHDVRKFRFALPSEDQQLGLPVGKHVFVCANINDKLCLRAYTPTSAIDAVGHIDLVVKVYFKDVHPRFPNGGLMSQHLDSLPIGSMIDIKGPLGHIEYKGKGNFLVSGKPKFAKKLAMLAGGTGITPIYQIIQSILSDPEDETEMYVVYANRTEDDILVREELEGWASKHKERLKIWYVVEIAKEGWSYSTGFITEAVLREHIPEGLEGESLALACGPPPMIQFALQPNLEKMGYNVKEDLLIF

SEQ ID NO: 5088 - DNA, 2736 bp, Brassica napus
  CDS (1)..(2736)
atggcaacctccgtcgataaccgccactatccccgcctcagctccgccctaaacggcggggttgtccactccttcaaacctcctctcgtcccttccccttccctcgaccgtgaccaagaccagagcgtcaacgtcccaaccgaaaaatccgtcgacaaaaccaccaaagaagaccgtttcgactccagtgacgacgaggacgagagccacaaccgttacgtctcctactacaaggagatggttctcaaatccaactccgatctagaaccgacggctctagactcgcgagacgaatccacgggtgacaaatggatccaccgtaactcctctatggtgcgtctcactggaaaacaccccttcaacgccgaggctcccctcccccgcctcatgcaccacggcttcatcacccccgtccctctccactacgtccgcaaccacgggggcgtccccaaagccgagtggtcggactggtccgtcgaggtcaccgggctcgtcaagcgcccggcggggctcaccatggagcagctcatctccgagttccccagccgcgagtttcccgtgacgctcgtctgcgccggaaaccgccgcaaggagcagaacatggtgaagcagaccatcgggttcaactggggctccgccggcgtgtccacctccctgtggagaggcgttgctctgagcgacgtcctccgccggtgcggcgtctacagcaagagaggcggcgctctcaacgtgtgcttcgaaggcgcggaggatcttcccggaggcggggggtctaagtacgggacgagcatcaagaaggagatggccatggaccccgcgagagacattatattggcgtacatgcagaacggggagcttctcacgccggatcacgggttcccggttcgggtcattatacccggtttcatcggcgggcggatggttaagtggttgaagcgcatcatcgtcacgcctcaagagtcagacaattactaccactacaaagacaacagagtcctcccttcttacgtggatgctgagctgccaaatgaagaatcttggtggtacaggccggagtatataatcaacgagcttaatataaactcggtgataacgacacctggtcacgaggagattttgccgatcaatgcattcacgactcagaagccttacactttgaaaggctatgcttactctggaggagggaagaaggtaacgagagtggaggtgactctagacggaggagagacgtggagcgtgtgtgagcttgaccaccaagagaagccaaacaagtatggcaagttctggtgctggtgcttctggtcgcttgacgttgaggttcttgatctgcttagtgctaaagaggtagctgttcgagcctgggacgagtctttgaacacccaacctgaaaaactcatctggaacctcatggggatgatgaacaactgctggttcaggatcaaaaccaacgtgtgcaagcctcacagaggagagataggtatcgttttcgaacacccgacccgacccggaaaccaatcgggcgggtggatggcaaaggaacgtcagatcgagaaatcctccgagtcacaccctactttgaaaaaatcagtttcaacacctttcatgaacactgcctcaaagatgtactcaatgtccgaagttaggaaacacaactcagctgaatctgcatggatcatcgtccacggtcacatctacgactgcacacgtttcttgaaagaccaccctggtggttcggactctatcctcatcaacgctggcactgattgcaccgaggagttcgaagccattcattcggacaaagcaaagaagcttctagaagattaccgtatcggtgagcttattacaacggggtacgactcttcacctaacgtctcggtccacggtggctcgagtgtgatgtctttgctagctcctatcagacagctagctcctactaagaacatagctttggtcaacccacgtgagaaagtcccggttaaactcatcgagaagacttcgatctcccacgacgtgcgtagattccgtttcgcgttaccgtctgaagatcagcagcttggtctacctgtcgggaaacacatcttcctctgcgccactattaacgacaagctttgtcttagagcctatactccgaccagcacggtcgacgcggttggatacatcgacttggtcatcaaggtttacttcaagaacgtccatccaagattccccaacggagggctcatgtcgcagcacccagactcgttaccgatcggtgcggttttagacatcaaaggtccgttaggacatattgagtaccaaggcagaggtaaattcatggtcagcggtaaaccaaagtttgctaataaactagccatgcttgctggaggaaccggtataactccaatctaccaagtcattcaatcgatactaagtgacccggaggacgaaaccgagatgtttgtggtttacgcgaaccgaaccgaggatgatattcttgtgagagaagagctagaaggatgggctagtaagtttccggacaggctaaagatttggtacgttgttgagattgctaaagaaggttgggagtacagcacagggtttatcaccgaagctgtgcttagagaacatgtccctgaaggattagaaggcgagtctctggccttggcatgtggaccaccgcctatgattcagtttgcgttgcagcctaatcttgagaagatgggttatgatattaaggaagatctcttgatcttctaa

SEQ ID NO: 5089 - protein, 911 aa, Brassica napus
MATSVDNRHYPRLSSALNGGVVHSFKPPLVPSPSLDRDQDQSVNVPTEKSVDKTTKEDRFDSSDDEDESHNRYVSYYKEMVLKSNSDLEPTALDSRDESTGDKWIHRNSSMVRLTGKHPFNAEAPLPRLMHHGFITPVPLHYVRNHGGVPKAEWSDWSVEVTGLVKRPAGLTMEQLISEFPSREFPVTLVCAGNRRKEQNMVKQTIGFNWGSAGVSTSLWRGVALSDVLRRCGVYSKRGGALNVCFEGAEDLPGGGGSKYGTSIKKEMAMDPARDIILAYMQNGELLTPDHGFPVRVIIPGFIGGRMVKWLKRIIVTPQESDNYYHYKDNRVLPSYVDAELPNEESWWYRPEYIINELNINSVITTPGHEEILPINAFTTQKPYTLKGYAYSGGGKKVTRVEVTLDGGETWSVCELDHQEKPNKYGKFWCWCFWSLDVEVLDLLSAKEVAVRAWDESLNTQPEKLIWNLMGMMNNCWFRIKTNVCKPHRGEIGIVFEHPTRPGNQSGGWMAKERQIEKSSESHPTLKKSVSTPFMNTASKMYSMSEVRKHNSAESAWIIVHGHIYDCTRFLKDHPGGSDSILINAGTDCTEEFEAIHSDKAKKLLEDYRIGELITTGYDSSPNVSVHGGSSVMSLLAPIRQLAPTKNIALVNPREKVPVKLIEKTSISHDVRRFRFALPSEDQQLGLPVGKHIFLCATINDKLCLRAYTPTSTVDAVGYIDLVIKVYFKNVHPRFPNGGLMSQHPDSLPIGAVLDIKGPLGHIEYQGRGKFMVSGKPKFANKLAMLAGGTGITPIYQVIQSILSDPEDETEMFVVYANRTEDDILVREELEGWASKFPDRLKIWYVVEIAKEGWEYSTGFITEAVLREHVPEGLEGESLALACGPPPMIQFALQPNLEKMGYDIKEDLLIF

SEQ ID NO: 5090 - DNA, 2748 bp, Hordeum vulgare
  CDS (1)..(2748)
atggccgcttcggtcgagccacggcagccgttcggccgcctcgacgcgccggccaccgctccaactgctcgtgcccccggctcgaacggcatccgtcgccgcgccgactccccggtgcgcggctgcgggttcccctcgctcatttcgccgccacggaaggggcccgtggcggaggaggaggaggacgacgacgatgaggatgacgaggggcatgaggactggagggaggcgtacgggtcgcacctgcagctggaggtggagccgtcgacgcgcgacccgcgcgacgagggcacggccgacgcctggatcgagcgcaacccgtctctgatccggctcaccggcaagcacccgctcaactgcgagcctccgctggcccggctgatgcaccacggcttcatcaccccggcgccgctccactacgtccgcaaccacggcgccgtgccccgcggcgactgggccacctggacggtggaggtgactggcctcgtccgccgccccgcgcgtctcaccatggacgagcttgccaacggtttccccgcggccgaggtgccggccacgctcgtctgcgccggcaaccggcgcaaggagcagaacatggtgcagcagacggtgggtttcaactggggcgcggcgggggtgtccacctccgtgtggcgcggcgcgcggctccgcgacgtgctgctccggtgcggcgtcatgtcgaaaaaggggcaggccctgaacgtgtgcttcgagggcgccgaggacctccccggcggcggcggctccaagtacggcacgagcgtgagccgggagtgggcgatggacccgtcacgcgacatcatcctgccctacgcgcagaacggggagccgctgctgccggaccacggctacccggtgcgcgtcctcatcccgggatgcatcggcggccggatggtcaagtgggtgcggcggatcgtggtcaccaccgccgagtccgacaactactaccacttcaaggacaaccgggtgctgccgtcccacgtcgacgccgagctcgccaacgccgaggcatggtggtaccgcccagagtacatcatcaacgagctcaacaccaactgcgtcatcaccaccccggggcacgacgagatactacccatcaacgccttcaccacacagcgcgcatacaccatcaagggatacgcatactcaggcggtggcaagaagatcacacgagtggaggtgacgctggacggcggcgagagctggatgctgtgcacgctcgacatcccggagaagcccaacaagtacggccggtactggtgctggtgcttctggtcggtggagatcgaggtgctggacctgctgggcgccaaggaggtggcggtgcgcacgtgggatcagacccacaacacccagccggagaagctcatctggaacctcatgggcatgatgaacaactgctggttcaagatcaaggtcaacgtgtgccgcccccacaagggcgagatcgggctggtgttcgagcaccccacgcagcccgggaaccagaccggcggatggatggcgcgccagaagcacctcgagacggcggaggcggcggcgccgggcctcaagcggagcacgtccacgccgttcatgaacaccgccggggacaagcagttcaccatgtccgaggtgcgcaagcacgggtccaaggagtcggcgtggatcgtggtgcacggccacgtctacgactgcaccgccttcctcaaggaccaccccggcggcgccgacagcatccttattaacgcaggatccgactgcaccgaggagttcgacgccatccactccgacaaggccaaggcgctgctcgacacctaccgcatcggcgagctgatcaccacggggacggggtacaactccgacaactcggtgcatggagggtccagcctatcccacctcgcaccgatccgcgaggccaccaaggtcgccggcgcgcccatcgcgctctccagcccacgcgagaaggtcccgtgccgcctcgtcgacaagaaggagctctcccacgacgtccgcctcttccgcttcgcgctgccgtcctccgaccaggtgctcggcctccccgtcggcaagcacatcttcgtttgcgccaccatcgacggcaagctctgcatgcgcgcctacacgccgacgagcatggtggacgagatcgggcagttcgagctgctcgtcaaggtctacttcagggacgagcacccgaagttccccaacggcgggctcatgacgcagtacctggagtcgctccaggttggctcttcctacattgacgtcaagggcccgcttgggcatgtggagtacaccggccgtggcaacttcgtcatcaacggcaagcagcgccgggcgcggcggctggccatgatctgcggcggcagcgggatcacgcccatgtaccaggtgatccaggccgtgctgcgggaccagccggaggacgagacggagatgcacctggtctatgccaaccggagcgaggacgacatcctgctgcgcgacgagctggaccggtgggcggcggagtaccccgacaggctcaaggtgtggtacgtgatcgaccaggtgaagcggccggaggacgggtggaagttcagcgtcgggtttgtgacggaggacatcctccgggcgcacgtccccgagggcggcgacgacacgctcgcactcgcctgcgggccgccgcccatgatcaagttcgccatctcccccaacctggagaagatgaagtacgacatggccaattccttcatctccttctga

SEQ ID NO: 5091 - protein, 915 aa, Hordeum vulgare
MAASVEPRQPFGRLDAPATAPTARAPGSNGIRRRADSPVRGCGFPSLISPPRKGPVAEEEEDDDDEDDEGHEDWREAYGSHLQLEVEPSTRDPRDEGTADAWIERNPSLIRLTGKHPLNCEPPLARLMHHGFITPAPLHYVRNHGAVPRGDWATWTVEVTGLVRRPARLTMDELANGFPAAEVPATLVCAGNRRKEQNMVQQTVGFNWGAAGVSTSVWRGARLRDVLLRCGVMSKKGQALNVCFEGAEDLPGGGGSKYGTSVSREWAMDPSRDIILPYAQNGEPLLPDHGYPVRVLIPGCIGGRMVKWVRRIVVTTAESDNYYHFKDNRVLPSHVDAELANAEAWWYRPEYIINELNTNCVITTPGHDEILPINAFTTQRAYTIKGYAYSGGGKKITRVEVTLDGGESWMLCTLDIPEKPNKYGRYWCWCFWSVEIEVLDLLGAKEVAVRTWDQTHNTQPEKLIWNLMGMMNNCWFKIKVNVCRPHKGEIGLVFEHPTQPGNQTGGWMARQKHLETAEAAAPGLKRSTSTPFMNTAGDKQFTMSEVRKHGSKESAWIVVHGHVYDCTAFLKDHPGGADSILINAGSDCTEEFDAIHSDKAKALLDTYRIGELITTGTGYNSDNSVHGGSSLSHLAPIREATKVAGAPIALSSPREKVPCRLVDKKELSHDVRLFRFALPSSDQVLGLPVGKHIFVCATIDGKLCMRAYTPTSMVDEIGQFELLVKVYFRDEHPKFPNGGLMTQYLESLQVGSSYIDVKGPLGHVEYTGRGNFVINGKQRRARRLAMICGGSGITPMYQVIQAVLRDQPEDETEMHLVYANRSEDDILLRDELDRWAAEYPDRLKVWYVIDQVKRPEDGWKFSVGFVTEDILRAHVPEGGDDTLALACGPPPMIKFAISPNLEKMKYDMANSFISF

SEQ ID NO: 5092 - DNA, 2751 bp, Oryza sativa
  CDS (1)..(2751)
atggctgcttccgtgcagccgcggcagttcggccacctcgagccgggctccgcgccggtgcgcggcgccgcctcctcgaacggcgccaaggcgtaccctcccgcgaacggcatcccacgccgcgccgactcgccggtgcgcgggtgcggcttccctccgctcgtctcgccaccgccgcggaagccgcccagcgacgggtcggacgacgaggaggaggagcaggaggactggcgggagctgtacggctcgcacctgcagctggaggtggagccgccggtgcgcgacgcgcgcaacgagggcaccgccgacgcgtggaccgagcgcaacccgtcgctgatccggctcaccgggaagcacccgctgaactgcgagccgccgctggcagagctcatgcaccacggcttcatcaccccggcggcgctgcactacgtggccaaccacggcgccgtgccgcggggtgactggtcgacgtggaccgtcgatgtgacggggctcgtcaagcggcccatgcggctcaccatggacgagctggtcaacggcttccccgccgtcgagatccccgtcacgctggtctgcgcgggcaaccgccgcaaggagcagaacatggtgcagcagacggtggggttcaactggggcgccgctggcgtgtctacgtcggtgtggcgcggcgcccgcctccgcgacgtgctccggcggtgcggcatcatgcccagcaagggcggcgcgctcaacgtgtgcttcgagggcgccgaggacctccccggcggcggcggctccaagtacggcaccagcatcacacgccagtgggcgctggacccgtcgcgggacatcatgctcgcctacatgcagaatggcgagccgctgctccccgaccacggcttccccgtccgcgccatcatccccggctgcatcggcggccgcatggtcaagtgggtcaagcgcatcatcgtcaccaccgccgagtccgacaactactaccattacaaggacaaccgcgtcctcccgtcccatgtcgacgccgagctcgccaacgccgatgcgtggtggtacaagccagagtacatcatcaacgagctgaacgtgaactcggtgatcacgacgcccgggtacgacgagatcctgcccatcaacggcatcaccacgcagcgcggctacaccatgaagggatacgcctactccggcggcggcaagaggatcacgcgggtggaggtgacgctggacggcggcgagacatggctggtgtgcgtgctggacctcccggagaagcccaccaagtacggcaagcactggtgctggcgcttctggcccgtcgaggtcgaggtgttcgacctcctcggcgccaaggagatcgccgcgcgcgcttgggaccagtcgcacaacacccagcccgagaagctcatctggaatctcatggggatgatgaacaactgctggttcaaggtgaaggtcaacgtgtgccggccgcacaagggtgagatcgggctggtgttcgagcacccgacgcagcccgggaaccagaccggcgggtggatggcgaggcagaagcacctggagacggcggaggcggccgcaccggggctgaagcggagcacgtcgacgccgttcatgaacaccaccgacggcaagcagtttaccatgtccgaggtgcgcaagcactcgtcgcaggactcggcgtggatcgtcgtccacggtcacgtctacgactgcacggccttcctcaaggaccaccccggcggcgccgacagcatcctcatcaacgccggcaccgactgcaccgaggagttcgacgccatccactccgacaaggccaaggcgctcctcgacacctaccgcatcggcgagctcatcaccaccggcgccgggtacagctccgacaactccgtccacggcgcgtccaacctctcccagctcgcccccatccgcgaggccatcaaggcgccggcgcccgtcgcgctctccagcccgcgcgacaaggtcccctgccaactcgtcgacaagaaggagctctcccgcgacgtccgcctcttccgcttcgcgctgccgtcctccgaccaggtgctcggcctccccgtcggcaagcacatcttcgtgtgcgccagcatcgaagggaagctgtgcatgcgggcgtacacgccgacgagcatggtcgacgaggtcggccacttcgacctcctcatcaaggtgtacttcaagaacgagcaccccaagttccccgatggcgggctcatgacgcagtacctggactcgctccccgtgggcgcctacatcgacgtcaaggggccactcggccacgtcgagtacaccggccgcggcgagttcgtcatcaacggcaagccgcggaacgcgcggcggctggcgatgatcgccggcgggagcgggatcacgcccatgtaccaggtcatccagtcggtgctgcgcgaccagccggaggacacgacggagatgcacctggtgtacgcgaaccggacggaggacgacatcctcctccgcgacgagctcgaccggtgggcggcggagtacccggacaggctcaaggtgtggtacgtcatcgaccaggtgaagcggccggaggaagggtggaagtacggcgtcgggttcgtcacggaggaggtgctgcgggagcacgtgccggagggcggcgacgacacgctcgcgctcgcctgcgggccgccgccgatgatcaagttcgccgtctcgccgaacctggagaagatgaagtacgacatggccaattctttcatcgtgttctaa

SEQ ID NO: 5093 - protein, 916 aa, Oryza sativa
MAASVQPRQFGHLEPGSAPVRGAASSNGAKAYPPANGIPRRADSPVRGCGFPPLVSPPPRKPPSDGSDDEEEEQEDWRELYGSHLQLEVEPPVRDARNEGTADAWTERNPSLIRLTGKHPLNCEPPLAELMHHGFITPAALHYVANHGAVPRGDWSTWTVDVTGLVKRPMRLTMDELVNGFPAVEIPVTLVCAGNRRKEQNMVQQTVGFNWGAAGVSTSVWRGARLRDVLRRCGIMPSKGGALNVCFEGAEDLPGGGGSKYGTSITRQWALDPSRDIMLAYMQNGEPLLPDHGFPVRAIIPGCIGGRMVKWVKRIIVTTAESDNYYHYKDNRVLPSHVDAELANADAWWYKPEYIINELNVNSVITTPGYDEILPINGITTQRGYTMKGYAYSGGGKRITRVEVTLDGGETWLVCVLDLPEKPTKYGKHWCWRFWPVEVEVFDLLGAKEIAARAWDQSHNTQPEKLIWNLMGMMNNCWFKVKVNVCRPHKGEIGLVFEHPTQPGNQTGGWMARQKHLETAEAAAPGLKRSTSTPFMNTTDGKQFTMSEVRKHSSQDSAWIVVHGHVYDCTAFLKDHPGGADSILINAGTDCTEEFDAIHSDKAKALLDTYRIGELITTGAGYSSDNSVHGASNLSQLAPIREAIKAPAPVALSSPRDKVPCQLVDKKELSRDVRLFRFALPSSDQVLGLPVGKHIFVCASIEGKLCMRAYTPTSMVDEVGHFDLLIKVYFKNEHPKFPDGGLMTQYLDSLPVGAYIDVKGPLGHVEYTGRGEFVINGKPRNARRLAMIAGGSGITPMYQVIQSVLRDQPEDTTEMHLVYANRTEDDILLRDELDRWAAEYPDRLKVWYVIDQVKRPEEGWKYGVGFVTEEVLREHVPEGGDDTLALACGPPPMIKFAVSPNLEKMKYDMANSFIVF

SEQ ID NO: 5094 - DNA, 2646 bp, Phaseolus vulgaris
  CDS (1)..(2646)
atggcggcttcagtcgaacaccgtcctttcacctcccaccaacacggcgtcgttcgctccttcaagtcctatccggacgtcccgcgtcctaagaagttacccctgccacaaccactttccgattccacaaacgacaacgacgaggaagccgctgtgtggaaggaactggttcttaagtcgagcgcgggagttgaaccctctattttcgacccgcgcgacgacggaacctccgaccaatggatcaaacggaatgcttccatgatccgtttgacggggaaacaccccttcaacgcggagccgcccctccctcgcctcatgcagcacggcttcatcacccccagtcccatccactacgtccgtagccacggacccgtgccccatgctcgctgggaggactggaccgtcgaggttacgggtctcgttacccggcccacgtgcttcaccatggagcagctggtcaatgacttccccagccacgagttccccgccacgcttgtctgcgctgggaaccggcgcaaggaacagaacatggtgaaacagagcatcggcttcaactggggcgccggcggtgtctctacttcggtgtggcgcggtgtatcgttgcggagcctgctaaagcggtgcgggatctacagccgcgcgaagggggcgcttcacgtgtgcttcgaaggcgccgaggatctgccaggtggcggtgggtccaattacgggaccagtctcatgagggaggttgcactggatccctcccgcgacatcatactggcttacatgcaaaacggggagcttctgtccccggatcacggcttccccgttaggatgataatacccggtttcattggcggccgcatggtgaaatggttgaagcgcatcgttgtcagtaaccagcaatctcaaagtcattaccattacaaggataacaagctatttccatctcacgttgacgccgaacttgccaatgaagaagattggtggtacaagccagagtatattatcaacgaggtcaacataaactccgtcataacaactccctcccaccaagagatcttgcccatcaactcatggacaactcagatgccatattccatgagaggctacgcctattccgggggtgggagaaaggtgacacgtgtggaggtaaccctggacggtggtgaaacgtggcaagtgtgcagtgtggagcgtctggagaaaccgaacaaatatggcaagtactggtgttggtgtttctggtccttggaggtggaggtgttggatatcctcggagccaaagagattgcggtgagagcttgggacgaggcccagaacacccagcccgagaaactcatctggaatactatgggaatgattaacaactgctggttcagagtgaagacgaacgtgtgcaagccgaagaagggtgagattggtatagtgttcgagcaccccacccaaccaggcaatcaatctggcggatggatggccagagagaaacagctggagaaatcatcagaatccaacccaatcctcaagaagagtgtctcctccccattcatgaacaccgccaccaaatcctattccctttccgaagtcagaagacacaacaaccgcgattcagcttggatcattgtcaacggccatgtctacgactgcactcgcttcctcaaagaccatccgggcggcgaagatagcatcctcttaaacgctggcaccgactgcactgaggagttcgaagccatccactccgacaaagccaagaaaatgcttgaagactaccgaatcggggagctcatgaccaccgactacacctctgattcctcatcctccaacaacagcgtgcacggcaattctgaaaccacccacttggccccaatcagggaggtggctctcaacccacgcgagaaaatcccatgcaagctcctctccaaaacctccatctctcacgacgttaggctccttcgctttgcgttgcccgccgaggaccaggttatgggtttgccggtcgggaatcacgtattcttatgtgctaccgtcgacgagaagctatgcatgcgagcctacactcccacaagcagcgtagatgaagtgggcttctttgacctcgtcgtcaaggtttacttcaaaggggttcatcctaacttccccaacggtgggatcatgtctcaacacttggactcgctccccattggctctgtcgtggacgtgaaaggcccactaggccacatagaatacaccggcagaggaaacttcctcgttcatggaaaacctaggtttgccaagaggctaaccatgctggctggtggcaccgggatcacaccaatctaccaagtggttcaagccattctaaaggacccagaggaccgcaccgaaatgtatgtggtatacgccaaccgaaccgaggatgatatattgctgaaggaggagcttgatgaatgggctaagaaacatgacaggctcaaggtgtggtacgtcctgcaagcaaacataagagaaggatgggaatacagcgtgggattcatcaccgagagtatcctgagggaacatgttccacttgcatctcctgataccttggcgttgacttgtggtccaccacccatgattcagttcgcggttcaaccgaatttggagaagttgggctacgacatccagaacgacttgctcgtgttttag

SEQ ID NO: 5095 - protein, 881 aa, Phaseolus vulgaris
MAASVEHRPFTSHQHGVVRSFKSYPDVPRPKKLPLPQPLSDSTNDNDEEAAVWKELVLKSSAGVEPSIFDPRDDGTSDQWIKRNASMIRLTGKHPFNAEPPLPRLMQHGFITPSPIHYVRSHGPVPHARWEDWTVEVTGLVTRPTCFTMEQLVNDFPSHEFPATLVCAGNRRKEQNMVKQSIGFNWGAGGVSTSVWRGVSLRSLLKRCGIYSRAKGALHVCFEGAEDLPGGGGSNYGTSLMREVALDPSRDIILAYMQNGELLSPDHGFPVRMIIPGFIGGRMVKWLKRIVVSNQQSQSHYHYKDNKLFPSHVDAELANEEDWWYKPEYIINEVNINSVITTPSHQEILPINSWTTQMPYSMRGYAYSGGGRKVTRVEVTLDGGETWQVCSVERLEKPNKYGKYWCWCFWSLEVEVLDILGAKEIAVRAWDEAQNTQPEKLIWNTMGMINNCWFRVKTNVCKPKKGEIGIVFEHPTQPGNQSGGWMAREKQLEKSSESNPILKKSVSSPFMNTATKSYSLSEVRRHNNRDSAWIIVNGHVYDCTRFLKDHPGGEDSILLNAGTDCTEEFEAIHSDKAKKMLEDYRIGELMTTDYTSDSSSSNNSVHGNSETTHLAPIREVALNPREKIPCKLLSKTSISHDVRLLRFALPAEDQVMGLPVGNHVFLCATVDEKLCMRAYTPTSSVDEVGFFDLVVKVYFKGVHPNFPNGGIMSQHLDSLPIGSVVDVKGPLGHIEYTGRGNFLVHGKPRFAKRLTMLAGGTGITPIYQVVQAILKDPEDRTEMYVVYANRTEDDILLKEELDEWAKKHDRLKVWYVLQANIREGWEYSVGFITESILREHVPLASPDTLALTCGPPPMIQFAVQPNLEKLGYDIQNDLLVF

SEQ ID NO: 5096 - DNA, 2661 bp, Glycine max
  CDS (1)..(2661)
atggcggcttccgtcgacaaccgtcaatacggcacccacataaacgccgtcgttcgcgcttgcggcccagacttcaatacccctctcccgtcggatttcgatctggactcatccagcgacgacgaagaccaaaacgacgacgcttcgtttctcaaggagttgatacaaaaagcgaacgcggaaaccgaggcgtcgctgttggacccgcgagacgagggaaccgcggaccagtggatcccgcggaacgcctccatggtgcggttcacagggaagcaccccttcaacggggagggcccactcccccgccttatgcaccacggtttcatcaccccatcgccactccgctacgtccgcaaccacggtccagttcccaagatcaaatgggatgaatggaccgtggaagtgactgggttggtcaaacgatcaacccacttcaccatggagaaacttatgagggaattccctcaccgcgagtttcccgccacactagtgtgtgcgggaaatcggcgcaaagagcataacatggtgaagcagagcatcggcttcaactggggtgccgccgggggctccacctccgtgtggcggggggtcccgctgcgtcatgtgctcaaacgctgtgggatcctcgcccgtatgaagggcgccatgtacgtgtccttcgagggcgccgaggatctccccgggggtggtgggtccaagtatggaaccagcgtcaagagggagatggccatggatccgtcgcgtgacatcattctcgcgttcatgcaaaacggcgagccgttggcgccggatcatggatttcccgtgcgcatgattattccggggttcatcggtggaagaatggtgaaatggctcaaacgcattgtcgttactgagcatgagtgcgatagtcattatcattataaggataatagagtactcccttcccatgttgatgcagaacttgctaatgacgaaggttggtggtacaagccagaatacatcatcaacgagttgaatataaactcagtgataactacgccttgtcacgaggagatcttgcccatcaactcatggactactcagatgccttatttcatcagaggctatgcgtattccggtggtgggagaaaggtgacacgtgttgaggtaaccctggacggaggtggaacgtggcaagtgtgcacactggactgtccggagaaacccaacaaatatggaaagtactggtgttggtgtttttggtctgtggaggttgaggttttggacctgctcggagccagggagattgcggtgcgtgcttgggacgaggccctcaacacccaacctgaaaagctcatttggaatgttatgggcatgatgaacaactgctggttcagagtgaaaaccaatgtgtgcaggccccacaagggtgagataggtatagtgtttgaacaccccacccaaccaggcaaccaatccggcggatggatggcaaaagaaaaacacctagagaaatcatctgagtccaacccaaccctcaagaagagtgtctcctccccattcatgaacaccacctcaaaaacctataccatgtctgaagtcagaaggcacaacaacgccgattcggcttggatcatagtccacggtcatgtctatgattggacccgcttcctcaaagaccatcccggtggcacagacaggatcctcatcaacgccggcaccgactgcaccgaggagttcgaagccatccactccgacaaagccaagcaaatgcttgaagactaccgaatcggcgagctcaccaccacctgctacaactctgattcttcatcgtcaaacccctccgtgcatgggaggtccgacaccatccctttgacccccatcaaggaagtgattacaccaatgcgaagcgtggctcttatcccacgcgagaaaatcccatgcaagctcatctcgaaaacctccatctctcacgacgttaggcttttccgctttggcctcccctccgacggactactcatgggtttggcagttgggaagcacatattcctatgtgtcaccgttgacgagaaactatgcatgcgagcctacactccaacaagcagcgttcacgaagtgggatacttcgacctcgtcgttaaggtttacttcaaaggggtgcaccctaagttccccaacggtgggatcatgtctcaacacttggactctctccccattggttctgtcttggacgtgaaaggaccacttggacacattgaatacactggcagaggaaacttcctcgttcatgggaaaccaaggtttgccacgaggctagccatgttggctggtggcacaggaatcacacccatttaccaagtggttcaagccattctaaaggatccagaggactgcaccgagatgcatgtggtttacgcgaaccgaaccgaggatgatatattgctgaaggaagagcttgatgagtgggctaagaagtatgataggttgaaggtgtggtacgtgatacaagaaagcataagagaggggtgggaatacagtgtgggattcatcactgaaagtatcctgacggagcatattccaaatgcatctcctgataccttggcattgacttgtggaccaccacctatgattcaatttgcagtccagccgaatttggagaagttgggctacgacacccagaataacttgctcgtgttttag

SEQ ID NO: 5097 - protein, 886 aa, Glycine max
MAASVDNRQYGTHINAVVRACGPDFNTPLPSDFDLDSSSDDEDQNDDASFLKELIQKANAETEASLLDPRDEGTADQWIPRNASMVRFTGKHPFNGEGPLPRLMHHGFITPSPLRYVRNHGPVPKIKWDEWTVEVTGLVKRSTHFTMEKLMREFPHREFPATLVCAGNRRKEHNMVKQSIGFNWGAAGGSTSVWRGVPLRHVLKRCGILARMKGAMYVSFEGAEDLPGGGGSKYGTSVKREMAMDPSRDIILAFMQNGEPLAPDHGFPVRMIIPGFIGGRMVKWLKRIVVTEHECDSHYHYKDNRVLPSHVDAELANDEGWWYKPEYIINELNINSVITTPCHEEILPINSWTTQMPYFIRGYAYSGGGRKVTRVEVTLDGGGTWQVCTLDCPEKPNKYGKYWCWCFWSVEVEVLDLLGAREIAVRAWDEALNTQPEKLIWNVMGMMNNCWFRVKTNVCRPHKGEIGIVFEHPTQPGNQSGGWMAKEKHLEKSSESNPTLKKSVSSPFMNTTSKTYTMSEVRRHNNADSAWIIVHGHVYDWTRFLKDHPGGTDRILINAGTDCTEEFEAIHSDKAKQMLEDYRIGELTTTCYNSDSSSSNPSVHGRSDTIPLTPIKEVITPMRSVALIPREKIPCKLISKTSISHDVRLFRFGLPSDGLLMGLAVGKHIFLCVTVDEKLCMRAYTPTSSVHEVGYFDLVVKVYFKGVHPKFPNGGIMSQHLDSLPIGSVLDVKGPLGHIEYTGRGNFLVHGKPRFATRLAMLAGGTGITPIYQVVQAILKDPEDCTEMHVVYANRTEDDILLKEELDEWAKKYDRLKVWYVIQESIREGWEYSVGFITESILTEHIPNASPDTLALTCGPPPMIQFAVQPNLEKLGYDTQNNLLVF

SEQ ID NO: 5098 - DNA, 2715 bp, Nicotiana tabacum
  CDS (1)..(2715)
atggcggcatctgtcgaaaacaggcagttcagtcacatagaagccggtttatcccggtctttcaagcctcggtctgattccccggttcgtggctgcaacttccctccgcccaacagtactaatttccaaaagaaaccaaattccaccattttccttgattactcgtcgagtgaagacgacgatgatgatgacgaaaaaaatgagtaccttcaaatgatcaaaaaagggaattcagaattagagccatctgttcatgacagcagggacgaaggtaccgctgataactggattgaacgcaacttttccttgattcgtctcaccggaaagcatccatttaactccgaaccgccgttgaaccgtctcatgcaccacggttttatcacaccggtcccacttcattacgttcgtaaccatggaccggttcccaagggcacatgggatgactggaccgtggaagtcacgggactagtgaaacgtcctatgaaattcacaatggaccagttggttaacgaattcccttccagagaattgcccgttacgcttgtgtgtgctggcaaccgaaggaaagaacagaacatggttaaacaaaccattggtttcaactggggtgccgctgccgtttcaacaactgtatggcgcggggtacccctacgcgctttgttaaaacggtacggtgtttttagcaagaataaaggggcgcttaatgtttgcttcgaaggagctgatgtcttgcccggaggcggtggttcaaagtatggaaccagcattaagaaggaatttgcaatggatccagcacgagatatcataatagcttacatgcagaacggagaaaaattggcacccgaccacgggtttccagtacgaatgataattccaggattcattggaggaagaatggtgaaatggataaagaggattatagtcaccacccaagaatcagacagctattatcatttcaaggacaatagagttcttcctccccatgttgatgctgaacttgcaaatactgaagcatggtggtacaagccagagtacatcatcaatgagctcaatattaactctgtcattacgacgccgtgtcatgaagaaattttgcctattaacgcctggacgactcagcgaccttacacgttgaggggctattcttattctggcggagggaaaaaagtaacgcgagtagaagtgaccttggatggaggagaaacatggcaagtttgcacactagatcacccagagaagcccaccaaatatggcaagtactggtgttggtgcttttggtcactcgaggttgaggtgttagacttgctcagtgccaaagaaattgctgttcgagcttgggatgagaccctcaatactcaacctgagaagcttatttggaatgtcatgggaatgatgaacaattgctggttccgagtaaagatgaatgtgtgcaagcctcacaagggagagattggaatagtgtttgaacacccgactcaacctggaaaccaatcaggtggatggatggcaaaggagaggcatttggagatatcagcagaggcacctccaacactaaagaagagtatctcaactccattcatgaacacagcttccaagatgtactccatgtcggaggtgaggaaacacagctctgctgactctgcttggatcatagtccatggtcatatctatgacgccacgcgtttcttgaaagatcaccccggtggttctgacagcattctcatcaatgctggcactgattgcactgaggaatttgatgcaattcattctgataaggctaagaagctattggaggaattcaggattggtgaactcctaactactggttacacctctgactctcctggcaactccgtccatggatcttcttccttcagcagctttctagcacctattaaggaacttgttccagcgcagaggagtgtggccctcattccaagagagaaaatcccatgcaaactcatcgacaaacaatccatctcccctgatgttaggaaatttcgatttgcattgccctctgaggatcaagtcttgggcttgcctgttggtaaacacatcttcctctgtgccgttattgacgataagctctgcatgcgcgcctacacgcctactagcacgatcgatgaggtggggtacttcgagttggttgtcaagatatacttcaaaggaattcaccctaaattccccaatggggggcaaatgtcacaataccttgattctctccaattagggtcatttctcgacgtgaaaggtccattaggtcacattgaataccaaggaaagggcaatttcttagttcatggcaaacaaaagtttgccaagaagttggccatgatagcaggtggaacagggataactccagtttatcaagtcatgcaggcaattctgaaagatccagaagatgacacagaaatgtatgtggtctatgctaatagaacagaggatgatattttacttaaggaagagcttgattcatgggctgagaaaattccagaaagggttaaagtttggtatgtggttcaagattctattaaagaaggatggaagtacagccttggttttatttcagaagccattttgagagaacatatccctgagccatctcacacaacactggctttggcttgtggaccacctcctatgattcaatttgctgttaatccaaacttggagaagatgggctatgacattaaggattccttattggtgttctaa

SEQ ID NO: 5099 - protein, 904 aa, Nicotiana tabacum
MAASVENRQFSHIEAGLSRSFKPRSDSPVRGCNFPPPNSTNFQKKPNSTIFLDYSSSEDDDDDDEKNEYLQMIKKGNSELEPSVHDSRDEGTADNWIERNFSLIRLTGKHPFNSEPPLNRLMHHGFITPVPLHYVRNHGPVPKGTWDDWTVEVTGLVKRPMKFTMDQLVNEFPSRELPVTLVCAGNRRKEQNMVKQTIGFNWGAAAVSTTVWRGVPLRALLKRYGVFSKNKGALNVCFEGADVLPGGGGSKYGTSIKKEFAMDPARDIIIAYMQNGEKLAPDHGFPVRMIIPGFIGGRMVKWIKRIIVTTQESDSYYHFKDNRVLPPHVDAELANTEAWWYKPEYIINELNINSVITTPCHEEILPINAWTTQRPYTLRGYSYSGGGKKVTRVEVTLDGGETWQVCTLDHPEKPTKYGKYWCWCFWSLEVEVLDLLSAKEIAVRAWDETLNTQPEKLIWNVMGMMNNCWFRVKMNVCKPHKGEIGIVFEHPTQPGNQSGGWMAKERHLEISAEAPPTLKKSISTPFMNTASKMYSMSEVRKHSSADSAWIIVHGHIYDATRFLKDHPGGSDSILINAGTDCTEEFDAIHSDKAKKLLEEFRIGELLTTGYTSDSPGNSVHGSSSFSSFLAPIKELVPAQRSVALIPREKIPCKLIDKQSISPDVRKFRFALPSEDQVLGLPVGKHIFLCAVIDDKLCMRAYTPTSTIDEVGYFELVVKIYFKGIHPKFPNGGQMSQYLDSLQLGSFLDVKGPLGHIEYQGKGNFLVHGKQKFAKKLAMIAGGTGITPVYQVMQAILKDPEDDTEMYVVYANRTEDDILLKEELDSWAEKIPERVKVWYVVQDSIKEGWKYSLGFISEAILREHIPEPSHTTLALACGPPPMIQFAVNPNLEKMGYDIKDSLLVF

SEQ ID NO: 5100 - DNA, 2754 bp, Arabidopsis thaliana
  CDS (1)..(2754)
atggcggcctctgtagataatcgccaatacgctcgtctcgagccaggtttgaacggcgtggttcgttcttacaaacctcccgttccaggccggtccgattcccctaaggcgcaccagaaccaaaccaccaaccaaaccgtgttcttgaaaccagccaaggttcatgacgatgacgaagacgtgtcgagcgaagacgagaacgagacacacaacagcaacgccgtgtactacaaggagatgataagaaaatccaacgccgagcttgaaccgtccgttttggacccgagggacgaatacacggctgatagctggatcgagcgtaacccttccatggtacgtctcacagggaaacatcccttcaactccgaggcgcctcttaaccgtttaatgcaccacgggtttatcacccctgtcccgttgcactacgttcgtaaccacggccacgtccctaaagcccaatgggccgaatggacggtcgaggtgaccggattcgtcaaacggcccatgaaattcaccatggaccagctcgtctccgagtttgcttaccgcgagttcgccgcgacgctagtctgcgcggggaaccgccgtaaggaacagaacatggtgaagaagtcaaagggattcaactggggatccgccggagtttccacctccgtgtggcgtggtgtccctctctgcgacgtactgcgtcgctgcgggatctttagccgaaaaggcggcgctctcaacgtctgcttcgaagggtcggaggatcttccgggcggtgccggaactgctggttccaaatacggaacgagcatcaagaaggaatatgccatggatccatcaagagacatcattttggcttatatgcaaaacggagagtatctaacaccagaccacggttttccggttcggatcatcatccccggtttcattggtggccggatggttaaatggttgaaacgaatcattgtcacaactaaagaatccgacaatttctaccatttcaaggacaacagagttttaccttctttggtagacgccgaactcgccgacgaagaaggttggtggtataagccagagtacataatcaacgagctaaacataaactccgtgattacgacgccatgtcacgaggagattcttcccatcaacgctttcacaacccaaagaccttatactttaaagggttacgcatattccggaggtggaaaaaaagtgacccgtgtggaggtcacggtagatggtggagagacatggaacgtatgtgcacttgaccatcaagagaagccaaacaagtatgggaagttctggtgttggtgtttttggtcacttgaggttgaggttttggacttgcttagtgccaaagagattgctgttcgtgcatgggacgagactctcaacacgcagcccgagaaaatgatatggaatctcatggggatgatgaataactgctggtttagagtgaagactaacgtgtgcaagccacacaagggagagattgggattgtgttcgagcatccaacgcttcctggtaatgaatctggtggatggatggcgaaggaacgtcacctcgaaaaatcggctgacgcgcctcctagtctaaagaagtctgtctcgacgccgtttatgaacacaactgcgaagatgtactcgatgtccgaggtcaagaagcataattcggctgactcttgctggatcattgtccatggacatatctatgattgtacacgattccttatggatcacccgggtggttcggattcaatcttgatcaatgctggtacggattgtacggaggagtttgaagccattcactcggataaagccaagaagatgcttgaggattaccgtatcggtgagctcatcaccactggttattcctctgactcttcctcgcctaacaactcggttcacggttcatccgccgtgttctcgctgttggctcccattggagaggcgactccggttaggaacctcgctttggttaatccccgggctaaagtcccggttcaactcgtcgaaaagacttccatttctcatgatgttcgtaaattccggtttgctttaccggttgaggatatggttctaggcttaccggttggtaagcacattttcctttgcgccaccatcaatgacaagctctgcctcagagcttacacaccaagcagcaccgttgatgtggttggctacttcgagctcgtggtcaagatttactttggcggtgtccacccaagattccctaacggcgggctcatgtctcagtacctagactctttgcctatagggtcaactttggagattaaaggaccattgggtcacgttgagtatctcggcaagggtagtttcacggttcacggtaaaccaaagtttgctgataaattggcaatgttggcaggtggaaccggaataactccggtttaccaaattatccaagccattctcaaggatccagaggatgagactgaaatgtacgtcatttatgctaaccggaccgaggaagatattctcctaagggaggaactggatggttgggcagagcaatacccggaccggttaaaggtttggtacgtagtggaatcagctaaggaaggttgggcatacagtaccgggtttatttccgaggcgattatgcgagaacatatccctgatggattagatggctcagcccttgccatggcttgcggaccaccaccgatgattcagtttgcggttcagccgaatttggagaagatgcaatataacatcaaggaggatttcttgatattctag

SEQ ID NO: 5101 - protein, 917 aa, Arabidopsis thaliana
MAASVDNRQYARLEPGLNGVVRSYKPPVPGRSDSPKAHQNQTTNQTVFLKPAKVHDDDEDVSSEDENETHNSNAVYYKEMIRKSNAELEPSVLDPRDEYTADSWIERNPSMVRLTGKHPFNSEAPLNRLMHHGFITPVPLHYVRNHGHVPKAQWAEWTVEVTGFVKRPMKFTMDQLVSEFAYREFAATLVCAGNRRKEQNMVKKSKGFNWGSAGVSTSVWRGVPLCDVLRRCGIFSRKGGALNVCFEGSEDLPGGAGTAGSKYGTSIKKEYAMDPSRDIILAYMQNGEYLTPDHGFPVRIIIPGFIGGRMVKWLKRIIVTTKESDNFYHFKDNRVLPSLVDAELADEEGWWYKPEYIINELNINSVITTPCHEEILPINAFTTQRPYTLKGYAYSGGGKKVTRVEVTVDGGETWNVCALDHQEKPNKYGKFWCWCFWSLEVEVLDLLSAKEIAVRAWDETLNTQPEKMIWNLMGMMNNCWFRVKTNVCKPHKGEIGIVFEHPTLPGNESGGWMAKERHLEKSADAPPSLKKSVSTPFMNTTAKMYSMSEVKKHNSADSCWIIVHGHIYDCTRFLMDHPGGSDSILINAGTDCTEEFEAIHSDKAKKMLEDYRIGELITTGYSSDSSSPNNSVHGSSAVFSLLAPIGEATPVRNLALVNPRAKVPVQLVEKTSISHDVRKFRFALPVEDMVLGLPVGKHIFLCATINDKLCLRAYTPSSTVDVVGYFELVVKIYFGGVHPRFPNGGLMSQYLDSLPIGSTLEIKGPLGHVEYLGKGSFTVHGKPKFADKLAMLAGGTGITPVYQIIQAILKDPEDETEMYVIYANRTEEDILLREELDGWAEQYPDRLKVWYVVESAKEGWAYSTGFISEAIMREHIPDGLDGSALAMACGPPPMIQFAVQPNLEKMQYNIKEDFLIF

SEQ ID NO: 5102 - DNA, 2736 bp, Brassica napus
  CDS (1)..(2736)
atggccacctccgtcgataaccgccattacccccgcctcaaccccgccataaacggcgtcgttcgctccttcaaacctcctcccattccttctccccgtcaccaaaacaagaccgtatcctttctaaccgaaaaggtcatcgtcaaagaaaccaaaaacgacgccgtggatgacagttacgactccagcgacgacgaggacgagagccacaaccgtaacgtctcgtactacaaggagatgatacgcaaatcccacagcgacgtagaaccgtcgatcctggactcgcgagacgaatccacggctgacaactggatccaccgtaactcctctatggtgcgtctcacgggaaaacaccccttcaacgccgagcctcctctccctcgcctcatgcaccacggcttcatcactcccgtccctctccactacgtccgcaaccacggcaccgtcccaaaagccgactggtcggaatggaccgtcgagatcaccggactcgtcaagcgtccggcgaagttcaccatggaggaacttatctccgagttcccaagccgcgagtttccggtgactctcgtatgcgccggtaaccgccggaaagagcagaacatggtgaagcagacgataggattcaactggggctccgccggagtgtccacctctctctggaaaggtgttcctctcagtgagatcctcggtcgatgcgggatatacagtaggagaggcggcgggctcaacgtctgctttgaaggagcggaggatcttcccggaggaggcgggtctaagtacggaacgagtatcaagaaagagatggcgatggatcctgcgagagatatcatattagcgtacatgcagaacggcgagcttctgacgccggatcacgggtttccggttcggatcatcgtacccggtttcatcggcggtcggatggttaaatggttgaaaagaattatcgtcacgcctcaagaatccgacagttactatcattacaaggacaatagagttctgccttctcttgtcgatgctgaactggcaaatgcagaagcatggtggtacaagccggaatacataatcaacgagcttaatataaactcggtaataacaacacctggtcaccaagagattttgcctattaatgcgtttaccactcagaagccgtacacgttaaaaggctatgcttactctggaggagggaagaaggtaacgagggtggaggtgactctagatggaggagacacatggagtgtgtgtgaccttgaccaccaagagaaaccaaacaagtatggcaagttctggtgctggtgtttctggtcacttgacgtggaggttcttgatctccttagtgctaaagacgttgcggttcgagcctgggacgagtctttcaacacccagcctgataaactcatctggaacctcatgggcatgatgaataattgctggttcaggatcaaaaccaatgtgtgcaagcctcacaaaggagagatagggattgttttcgaacacccgacccgacccggaaaccagtcgggtgggtggatggcaaaggaacgtcagcttgagatatcctcagagtcaaaccctattttgaagaagtctgtttcatcacctttcatgaacacatccgcaaagatgtactcaatgtccgaagttagaaaacacaactcagttgaatctgcatggatcattgtccacggtcacatttatgactgtacacgtttcttgaaagaccaccctggaggctcagactcgatcctcatcaacgcgggaactgattgcacagaagagtttgaagctattcattcagacaaagccaagaagcttcttgaagattaccgtatcggtgaactcatcacgaccggctacgactcttctcctaatgtttcagtccacggtggctcgaccgcagtttctttgttagcacctatcaaagagttagctccttcaaagaacatagctttagtcaacccacgtgagaaagtcccggtcacactcatagagaagacttctatctctcatgacgtacgtaggttccggttcgcattaccatcagaagatcagcagcttggtctaccggtagggaagcacatctttctctgcgccaacatcaacgacaaactttgtcttagagcctatactccgaccagcacggtcgacgccgttgggcatatcgacttggtcgtcaaagtttacttcaaagacgttcatccaagattccctaacggaggactcatgtcacagcacttagactcgttgcccatcgggtcggttttgaacatcaaaggtccattaggacacatcgagtacctaggcaaaggcaatttcatggtcaccggtaaacctaagtttgccaagaaactagccatgcttgccggaggaccaggcattactcctatctaccaggtcattcaatcaatattgagtgatccagaggatgaaaccgagatgtttgtggtttacgcaaatcgaaccgaggatgatattcttgtgagagaagagctagaaggatgggctaataagcataaggacaggcttaaggtttggtacgttgttgaaatagcaaaagaaggttggaactatagcaccgggtttatcactgagcctgtacttagagaacatgtccctgaaggtttagaaggcgaatcactagccctagcgtgtggaccaccgcctatgattcagtttgcattgcagcctaatcttgagaagatgggttacaacgtgaaggaagatctcctgatcttctaa

SEQ ID NO: 5103 - protein, 911 aa, Brassica napus
MATSVDNRHYPRLNPAINGVVRSFKPPPIPSPRHQNKTVSFLTEKVIVKETKNDAVDDSYDSSDDEDESHNRNVSYYKEMIRKSHSDVEPSILDSRDESTADNWIHRNSSMVRLTGKHPFNAEPPLPRLMHHGFITPVPLHYVRNHGTVPKADWSEWTVEITGLVKRPAKFTMEELISEFPSREFPVTLVCAGNRRKEQNMVKQTIGFNWGSAGVSTSLWKGVPLSEILGRCGIYSRRGGGLNVCFEGAEDLPGGGGSKYGTSIKKEMAMDPARDIILAYMQNGELLTPDHGFPVRIIVPGFIGGRMVKWLKRIIVTPQESDSYYHYKDNRVLPSLVDAELANAEAWWYKPEYIINELNINSVITTPGHQEILPINAFTTQKPYTLKGYAYSGGGKKVTRVEVTLDGGDTWSVCDLDHQEKPNKYGKFWCWCFWSLDVEVLDLLSAKDVAVRAWDESFNTQPDKLIWNLMGMMNNCWFRIKTNVCKPHKGEIGIVFEHPTRPGNQSGGWMAKERQLEISSESNPILKKSVSSPFMNTSAKMYSMSEVRKHNSVESAWIIVHGHIYDCTRFLKDHPGGSDSILINAGTDCTEEFEAIHSDKAKKLLEDYRIGELITTGYDSSPNVSVHGGSTAVSLLAPIKELAPSKNIALVNPREKVPVTLIEKTSISHDVRRFRFALPSEDQQLGLPVGKHIFLCANINDKLCLRAYTPTSTVDAVGHIDLVVKVYFKDVHPRFPNGGLMSQHLDSLPIGSVLNIKGPLGHIEYLGKGNFMVTGKPKFAKKLAMLAGGPGITPIYQVIQSILSDPEDETEMFVVYANRTEDDILVREELEGWANKHKDRLKVWYVVEIAKEGWNYSTGFITEPVLREHVPEGLEGESLALACGPPPMIQFALQPNLEKMGYNVKEDLLIF

SEQ ID NO: 5104 - DNA, 2742 bp, Hordeum vulgare
  CDS (1)..(2742)
atgtcggtcgagccacggcagccgttcggccgcctcgacgcgccggccaccgctccaactgctcgtgcccccggctcgaacggcatccgtcgccgcgccgactccccggtgcgcggctgcgggttcccctcgctcatttcgccgccacggaaggggcccgtggcggaggaggacgaggaagacgacgatgaggatgacgaggggcatgaggactggcgggaggcgtacgggtcgcacctgcagctggaggtggagccgtcgacgcgcgacccgcgcgacgagggcacggccgacgcctggatcgagcgcaacccgtctctgatccggctcaccggcaagcacccgctcaactgcgagcctccgctggcccggctgatgcaccacggcttcatcaccccggcgccgctccactacgtccgcaaccacggcgccgtgccccgcggcgactgggccacctggacggtggaggtgactggcctcgtccgccgccccgcgcgtctcaccatggacgagcttgccaacggtttccccgcggccgaggtgccggccacgctcgtctgcgccggcaaccggcgcaaggagcagaacatggtgcagcagacggtgggtttcaactggggcgcggcgggggtttccacgtccgtgtggcgcggcgcgcggctccgcgacgtgctgctccggtgcggcgtcatgtcgaaaaaggggcaggccctgaacgtgtgcttcgagggcgccgaggacctccccggcggcggcggctccaagtacggcacgagcatgagccgggagtgggcgatggacccgtcacgcgacatcatcctgccctacgcgcagaacggggagccgctgctgccggaccacggctacccggtgcgcgtcctcatcccgggatgcatcggcggccgcatggtcaagtgggtgcggcggatcgtggtcaccaccgccgagtccgacaactactaccacttcaaggacaaccgggtgctgccgtcccacgtcgacgccgagctcgccaacgccgaggcatggtggtaccgcccagagtacatcatcaacgagctcaacaccaactccgtcatcaccaccccggggcacgacgagatactacccatcaacgccttcaccacacagcgcgcatacaccatcaagggatacgcatactcaggcggtggcaagaagatcacacgagtggaggtgacgctggacggcggcgagagctggatgctgtgcacgctcgacatcccggagaagcccaacaagtacggccggtactggtgctggtgcttctggtcggtagagatcgaggtgctggacctgctgggcgccaaggaggtggcggtgcgcgcgtgggatcagacccacaacacccagccggagaagctcatctggaacctcatgggcatgatgaacaactgctggttcaagatcaaggtcaacgtgtgccgcccccacaagggcgagatcgggctggtgttcgagcaccccacgcagcccgggaaccagaccggcggatggatggcgcgccagaagcacctcgagacggccgaggcggcggcgccggggctcaagcggagcacgtccacgccgttcatgaacaccgccggggacaagcagttcaccatgtccgaggtgcgcaagcacgggtccaaggagtcggcgtggatcgtggtgcacggccacgtctacgactgcaccgccttcctcaaggaccaccccggcggcgccgacagcatccttattaacgcaggatccgactgcaccgaggagttcgacgccatccactccgacaaggccaaggcgctgctcgacacctaccgcatcggcgagctgatcaccacggggacggggtacaactccgacaactcggtgcatggagggtccagcctatcccacctcgcaccgatccgcgaggccaccaaggtcgccggcgcgcccatcgcgctctccagcccgcgcgagaaggtcccatgtcgcctcgtcgacaagaaggagctctcccacgacgtccgcctcttccgcttcgcgctgccgtcctccgaccaggtgctcggcctccccgtcggcaagcacatcttcgtttgcgccaccatcgacggcaagctctgcatgcgcgcctacacgccgacgagcatggtggacgagatcgggcagttcgagctgctcgtcaaggtctacttcagggacgagcacccaaagttccccaacggcgggctcatgacgcagtacctggagtcgctccaggtcggctcctcctccatcgacgtcaagggcccgcttggccacgtggagtacaccggccgcggcaacttcgtcatcaacggcaagcagcgccgggcgcggcggctggccatgatctgcggcagcagtgggatcacgcccatgtaccaggtgatccaggccgtgctgcgggaccagccggaggacgagacggagatgcacctggtgtacgccaaccggagcgaggacgacatcctgctgcgcgacgagctggaccggtgggcgacggagtaccccgacaggctcaaggtgtggtacgtgatcgaccaggtgaagcggccggaggacgggtggaagttcagcgtcgggtttgtgacggaggacatcctccgggcgcacgtccccgagggcggcgacgacacgctcgcactcgcctgcgggccgccgcccatgatcaagttcgccatctcccccaacctggagaagatgaagtacgacatggccaattccttcatctccttctga

SEQ ID NO: 5105 - protein, 913 aa, Hordeum vulgare
MSVEPRQPFGRLDAPATAPTARAPGSNGIRRRADSPVRGCGFPSLISPPRKGPVAEEDEEDDDEDDEGHEDWREAYGSHLQLEVEPSTRDPRDEGTADAWIERNPSLIRLTGKHPLNCEPPLARLMHHGFITPAPLHYVRNHGAVPRGDWATWTVEVTGLVRRPARLTMDELANGFPAAEVPATLVCAGNRRKEQNMVQQTVGFNWGAAGVSTSVWRGARLRDVLLRCGVMSKKGQALNVCFEGAEDLPGGGGSKYGTSMSREWAMDPSRDIILPYAQNGEPLLPDHGYPVRVLIPGCIGGRMVKWVRRIVVTTAESDNYYHFKDNRVLPSHVDAELANAEAWWYRPEYIINELNTNSVITTPGHDEILPINAFTTQRAYTIKGYAYSGGGKKITRVEVTLDGGESWMLCTLDIPEKPNKYGRYWCWCFWSVEIEVLDLLGAKEVAVRAWDQTHNTQPEKLIWNLMGMMNNCWFKIKVNVCRPHKGEIGLVFEHPTQPGNQTGGWMARQKHLETAEAAAPGLKRSTSTPFMNTAGDKQFTMSEVRKHGSKESAWIVVHGHVYDCTAFLKDHPGGADSILINAGSDCTEEFDAIHSDKAKALLDTYRIGELITTGTGYNSDNSVHGGSSLSHLAPIREATKVAGAPIALSSPREKVPCRLVDKKELSHDVRLFRFALPSSDQVLGLPVGKHIFVCATIDGKLCMRAYTPTSMVDEIGQFELLVKVYFRDEHPKFPNGGLMTQYLESLQVGSSSIDVKGPLGHVEYTGRGNFVINGKQRRARRLAMICGSSGITPMYQVIQAVLRDQPEDETEMHLVYANRSEDDILLRDELDRWATEYPDRLKVWYVIDQVKRPEDGWKFSVGFVTEDILRAHVPEGGDDTLALACGPPPMIKFAISPNLEKMKYDMANSFISF

SEQ ID NO: 5106 - DNA, 2673 bp, Phaseolus vulgaris
  CDS (1)..(2673)
atggcggcttccgttggcaaccgtcaattcgccactcatatgaacggcgtcgttcgcagttgcggccaggatctaaagccctctctgccgttggattttgacctggactcctccagcagcgacgacgatgaaaatgacgacgcttcgtatctgaaagagctcgtacgaaaagccaacgcggaaacggaagcgtcagttatggacccgcgcgacgagggaacggcggatcagtgggtcgcacggaacgcctccatggtccgcctcacagggaagcaccccttcaacgcggagtcccccttgcagcgcctcatgcaccacggcttcatcaccccagtcccactccactacgtccgcaaccacggtccagttcccaaggccaactgggaagactggaccgtcgaaataaccggtcttgtcaagcgcccaacccggttcaccatggaccgcctcgtgcgcgagtttccccaccgcgagtttcccgccacgctcgtctgcgccggtaaccgccgcaaggagcagaacatggtcaagaagaccatcggcttcaactggggctccgccggcacctccacctccgtgtggcgcggcgtgcccgtgcgccacgtgctgcgccgttgcgggatcctgacacgtgggaagggagcgctgcacgtgtccttcgagggcgccgagaatctccccggcggcggcgggtccaagtacggaacgagcatctcgagggagatggccatggacccttcgcgcgacatcatcctggcgtacatgcaaaacggcgagcctctggcaccggatcacggcttccccattcgaatgattattccggggtttatcggtggcagaatggtgaagtggctaaaacgcattgtggttactgaacaagagtgcgaaagccattatcattacaaggataacagagttcttccttctcatgttgatccagaacttgccaatgaagaaggatggtggttcaaaccagagtacataatcaacgagttgaatataaactcagtgataacgactccttgtcacgatgagatattgcccatcaactcatggacaacgcagaggccttacgtagtcagaggctacgcatattctggtggtgggaggaaagtgacacgtgtggaggtaactctggacggtggagaaacatggcacgtgtgcacactggatcatcctgagaaacctaacaaatatggaaagtattggtgctggtgcttctggtctttggaggtggaggtgctggacctgctggggaccaaagagattgcagttcgagcttgggatgaaggcctcaacacgcagccagaaaacctaatttggaatcttatgggcatgatgaacaactgttggtttagagtgaagacaaatgtgtgcaagccccacaagggagagattggcatagtgtttgaacacccaacccaaccagggaaccaacctggtgggtggatggcaaaggaaaaacatttggagcaatcacaagaggcgaaaccaagccttaaaaagagtgtgtctacgccattcatgaacactgcctctaaaatgttctccgtctccgaagtaaaaaaacatagcagccctgactcagcttggatcattgtccatggtcacgtctacgactgcacccgcttcctcaaagatcaccctggtggcaccgacagcatcctcatcaatgccggcactgactgcaccgaagagtttgacgccatccactctgacaaagcaaagaagatgctggaagactatcgtattggcgagctcatcactacaggttacacctcagctgactcatcgccgaacaactccgtgcatggcaattccgaattcatccatttggctcctatcaatgaaatcactacaataccaccactaccaccacgtagtgtggctctcaacccacggcagaaaatcccatgcaaactcgtgtcaaagacctccatttcccatgatgtgaggcttttccgtttcgaaatgccgtcaaagaatcaactcttaggtttaccagtgggtaagcacattttcttgtgcgccaccatagatggcaagctatgcatgcgagcctacactccaacaagtagcgtggaggaagtggggttcttcgatttgctcatcaaggtttacttcaaagacgtgcaccctaagttcccgaacgggggacttatgtcacagtatttagaatctctctccataggatccatgttagacgtgaagggtccattgggtcacatagagtacactggaagaggcaatttcactgttaatgggaaatccagattcgcaaagagattagccatgctggccggtggaactggcatcacaccaatttaccaagtggcgcaagcgattctgaaggacccagaggacctgaccgaaatgcatgtcgtgtatgcaaaccgcacagaggatgatattctgctgagagaggagttggatacatgggcgaaagaacattgtgagaggttcaaggtgtggtacgttgtggaaacggcgaaggaagggtggggatacggtgtggggttcatcacagaagccataatgagggagcaccttccagaagcttcaagcgattctttggctatgacgtgtggaccaccacccatgattcagttcgcggtgcagcctaatttggagaagatgggttacgatatcaagaatgatttgctcgtgttttag

SEQ ID NO: 5107 - protein, 890 aa, Phaseolus vulgaris
MAASVGNRQFATHMNGVVRSCGQDLKPSLPLDFDLDSSSSDDDENDDASYLKELVRKANAETEASVMDPRDEGTADQWVARNASMVRLTGKHPFNAESPLQRLMHHGFITPVPLHYVRNHGPVPKANWEDWTVEITGLVKRPTRFTMDRLVREFPHREFPATLVCAGNRRKEQNMVKKTIGFNWGSAGTSTSVWRGVPVRHVLRRCGILTRGKGALHVSFEGAENLPGGGGSKYGTSISREMAMDPSRDIILAYMQNGEPLAPDHGFPIRMIIPGFIGGRMVKWLKRIVVTEQECESHYHYKDNRVLPSHVDPELANEEGWWFKPEYIINELNINSVITTPCHDEILPINSWTTQRPYVVRGYAYSGGGRKVTRVEVTLDGGETWHVCTLDHPEKPNKYGKYWCWCFWSLEVEVLDLLGTKEIAVRAWDEGLNTQPENLIWNLMGMMNNCWFRVKTNVCKPHKGEIGIVFEHPTQPGNQPGGWMAKEKHLEQSQEAKPSLKKSVSTPFMNTASKMFSVSEVKKHSSPDSAWIIVHGHVYDCTRFLKDHPGGTDSILINAGTDCTEEFDAIHSDKAKKMLEDYRIGELITTGYTSADSSPNNSVHGNSEFIHLAPINEITTIPPLPPRSVALNPRQKIPCKLVSKTSISHDVRLFRFEMPSKNQLLGLPVGKHIFLCATIDGKLCMRAYTPTSSVEEVGFFDLLIKVYFKDVHPKFPNGGLMSQYLESLSIGSMLDVKGPLGHIEYTGRGNFTVNGKSRFAKRLAMLAGGTGITPIYQVAQAILKDPEDLTEMHVVYANRTEDDILLREELDTWAKEHCERFKVWYVVETAKEGWGYGVGFITEAIMREHLPEASSDSLAMTCGPPPMIQFAVQPNLEKMGYDIKNDLLVF

SEQ ID NO: 5108 - DNA, 2673 bp, Glycine max
  CDS (1)..(2673)
atggcggcttccgtcgaccagcgtccgtaccccggcctccacaatggcgtcgttcggcccctcaaaccaggcccggatatcccgcgtcccaagaagctaccccaggcgccgccgccactctcggattcctcaagcgacgaagaagaagacaccaccttgaacttgaaggacctgattcgcaagggaacaacggaagttgaatcctccattttcgacccgcgcgacgatggaacctctgaccactggatccaacggaactcttctcttgtccgtttaacgggaaagcacccgtttaactcggagccacccctccctcgcctcatgcaccacggcttcatcaccccggtccccctccactacgtccgtaaccacgggccagtcccccgggcccgctgggaggactggaccgtggaagtcacgggcctggtcaccaggcccacatgcttcaccatggagcaactcctccacgatttccccagtcgcgagttcccagccacactcgtctgcgctgggaaccggcggaaggaacagaacatggtgaaacagagcatcggcttcaactggggggcagccgccatctccacttcggtgtggcgcggcgtgcccttgcgcaccctgctcaagagctgcgggatctacacccgcaccaagggcgcgctccacgtgtgcttcgaaggggccgaggatctgccaggtggaggtgggtccaagtacggaaccagtatcctgagggaggttgcactggatccctcccgcgacatcattctcgcctacatgcaaaacggtgagcctttgtccccggatcacggcttccccgttagaatgataatacccggtttcattggtggccgcatggtcaaatggttgaagcgcatcattgttactaccgaccaatctcaaaactattaccattataaggataacagggtactcccttctcacgttgatgccgaactcgccaatgctcaagcttggtggtacaagccggactatattatcaacgagcttaacataaactccgtgataaccacgccttgccacgaggagatcttgcccatcaactcatggactactcagatgccttacttcatcagaggctatgcgtattccggtggtgggagaaaggtgacacgtgttgaggtaaccctggacggaggtgaaacgtggcaagtgtgcacactggactgtccggagaaacccaacaaatatggaaagtactggtgttggtgtttgtggtctgtggaggttgaggttttggacctgctcggagccagggagattgcggtgcgtgcttgggacgaggccctcaacacccaacctgaaaagctcatttggaatgttatgggcatgatgaacaactgctggttcagagtgaaaaccaatgtgtgcaggccccacaagggtgagataggtatagtgtttgaacaccccacccaaccaggcaaccaatccggcggatggatggcaaaagaaaaacacctagagaaatcatctgagtccaacccaaccctcaagaagagtgtctcctccccattcatgaacaccacctcaaaaacctataccatgtctgaagtcagaaggcacaacaacgccgattcggcttggatcatagtccacggtcatgtctatgattgcacccgcttcctcaaagaccatcccggtggcacagacagcatcctcatcaacgccggcaccgactgcaccgaggagttcgaagccatccactccgacaaagccaagcaaatgcttgaagactaccgaatcggcgagctcaccaccacctgctacaactctgattcttcatcgtcaaacccctccgtgcatggcagctccgacaccatccctttgacccccatcaaggaagtgattacaccaatgcgaagcgtggctcttaacccacgcgagaaaatcccatgcaagctcatctccaaaacctccatctctcacgacgttaggcttttccgctttgccctcccctccgacgacctactcatgggtttgccagttgggaagcacatattcctatgtgccaccgttgacgagaaactatgcatgcgagcctacactccaacaagcagcgttcacgaagtgggatacttcgacctcgtcgttaaggtttacttcaaaggggtgcaccctaagttccccaccggtgggatcatgtctcaacacttggactctctccccattggttctgtcttggacgtgaaaggcccacttggccacattgtatacactggcagaggaaacttcctcgttcatgggaaaccaaggtttgccacgaggctagccatgttggctggtggcacaggaatcacacccatttaccaagtggttcgagccattctaaaggatccagaggactgcaccgagatgcatgtggtttacgcgaaccgaaccgaggatgatatattgctgaaggaagagcttgatgagtgggctaagaagtatgataggttgaaggtgtggtacgtgatacaagcaagcataagagaagggtgggaatacagtgtgggattcatcactgaaagtatcctgacggagcatattccaaatgcatctcctgataccttggcattgacttgtggaccaccacctatgattcaatttgcagtccagccgaatttggagaagttgggctacgacacccagaataacttgctcgtgttttag

SEQ ID NO: 5109 - protein, 890 aa, Glycine max
MAASVDQRPYPGLHNGVVRPLKPGPDIPRPKKLPQAPPPLSDSSSDEEEDTTLNLKDLIRKGTTEVESSIFDPRDDGTSDHWIQRNSSLVRLTGKHPFNSEPPLPRLMHHGFITPVPLHYVRNHGPVPRARWEDWTVEVTGLVTRPTCFTMEQLLHDFPSREFPATLVCAGNRRKEQNMVKQSIGFNWGAAAISTSVWRGVPLRTLLKSCGIYTRTKGALHVCFEGAEDLPGGGGSKYGTSILREVALDPSRDIILAYMQNGEPLSPDHGFPVRMIIPGFIGGRMVKWLKRIIVTTDQSQNYYHYKDNRVLPSHVDAELANAQAWWYKPDYIINELNINSVITTPCHEEILPINSWTTQMPYFIRGYAYSGGGRKVTRVEVTLDGGETWQVCTLDCPEKPNKYGKYWCWCLWSVEVEVLDLLGAREIAVRAWDEALNTQPEKLIWNVMGMMNNCWFRVKTNVCRPHKGEIGIVFEHPTQPGNQSGGWMAKEKHLEKSSESNPTLKKSVSSPFMNTTSKTYTMSEVRRHNNADSAWIIVHGHVYDCTRFLKDHPGGTDSILINAGTDCTEEFEAIHSDKAKQMLEDYRIGELTTTCYNSDSSSSNPSVHGSSDTIPLTPIKEVITPMRSVALNPREKIPCKLISKTSISHDVRLFRFALPSDDLLMGLPVGKHIFLCATVDEKLCMRAYTPTSSVHEVGYFDLVVKVYFKGVHPKFPTGGIMSQHLDSLPIGSVLDVKGPLGHIVYTGRGNFLVHGKPRFATRLAMLAGGTGITPIYQVVRAILKDPEDCTEMHVVYANRTEDDILLKEELDEWAKKYDRLKVWYVIQASIREGWEYSVGFITESILTEHIPNASPDTLALTCGPPPMIQFAVQPNLEKLGYDTQNNLLVF

SEQ ID NO: 5110 - DNA, 2670 bp, Zea mays
  CDS (1)..(2670)
atgagcacttgtgttgagcagccaacgcactcggccagcctcgatccgaccgctgcccagcgtttgccgtacccagatctgccggtcgacatcctgcgccgctcatccgtgcgcggcagtggcttcgtcgcggcggcccttgtctcgtcggcccggaaggctgacgacgacgctcgacacgacgacgacgacccatcaggtgatcgacacgagacgtatgggtcgcactaccttgccaatctcggcgtggagcagtcggtgagagacgagggcaccgtggacgcgtgggtcgagagcagccagtcgctcatccgtctgacgggaaagcacagcttgaacggcgagctgccgcggctcatgcggcacggcttcatcacgccggtcccccgccactacgtgcgcaaccacgggcccgtcccgcgcggcgactgggcgacgtggaccgtcgaggtgactggcctggtccggcgaccgcgcgccctcaccatggacgagctcgcccgcgacttcccggccctggagctccccgtgacgctggtctgcgccggcaaccggcgcaaggagcagaacatggtgcgccagacgctgggcttcaactggggccccggcgctgtgtccacgtccgtgtggcgcggcgcccgcctcagcgacgtgctgcgtcggtgcggcagcatgtcgcgcaagggcggcgcgctcttcgtgtgcttcgagggcgccgaggacctccccggcggcggcggcaccaagtacggcaccagcatcacgcgcgaggtggccttggaccccaccatggacgtcatgctcgcgtaccagcagaacggcgggccgctgctgcccgaccatggcttccccgtgcgcctcatcgtccccggatgcacggccggccgcatggtcaaatggctcaagcgcatcgtcgtcgccccggctgagtccgacaactactaccattaccgggacaaccgcttcctgccgtcccacgtcgacgccaagctcgccgacgccgaaggctggtggtacaagccggagtatgtcatcaacgagatgaacacgaactcggtgatcacaacgccggcgcacaatgagttcctgcccatcaacgccatcacgacacagcgcatctacaccatgaagggattcgcatactcgggtggtggcaagaaagtgacgcgagttgaggtgactctggacggcggcgagaactggctcctctgcgagcttgaccacccggagaagcccaccaagtacggcaggtactggtgctggtgcttctggtccatcgacgtcgagctcatcgacctcctcgcctgcaaggagatcgccgtccgcgcatgggaccaatcgctcaacacgcagccggagttcctcacctggaacctcatgggaatgatgaccaactgctggttcagggtgaaggtcaacgtgtgccggccgcggcatggggagaaagcagggcttgcgttcgagcacccggtgcggacgaaccagccgggcggatggatggcgcagcagaagcacctcgagaccgcagagcgcacgtccgcggcgacctccaccaccaatcagcagttcaccatgtccgaggtgcgcaagcacgcgtcccaggactcggcgtggatcgtcgtccacggccacgtctacgactgcacggcgtttctcaaggaccacccgggcggcgccgacagcatcctcatcaacgccggcaccgactgcaccgaggagttcgacgccatccactccgacaaggccaaggagctcctcgacacctaccgcatcggcgatctcgtcaccaccggtggcgccgagcagcgctcccccctcgagctcgctcccagtcctcccatccgccacgaggggccagcggcgcccgtcatcgcgctctccaacccgcgcgagaaggtcccgtgccagctcgtcgccaggacggtgctgtctcgcgacgtccgcctgttccgcttcgcgctgccgtcgtccggccaggtgctcggcctccccgtcggcaagcacatcttcgtgtgcgccagcatcgacggcaagctgtgcatgcgcgcgtacacgccgacgagctcggtggacgaggtcggccacttcgacctcctggtgaaggtgtacttcaggaacgagaacaccaagttccccgacggcgggcggatgacccagtacctcgactcgctcccggtcggcgcccacgtcgacgtgaaggggccgctcggccacgtcgagtacgtcggccgcggaggcttcgtgatcgacggcaagccgcgcaaggcgggccgcctcgccatggtcgccggcgggagcgggatcacgccgatataccaggtgatccaggcggtgctgcgcgaccagccggaggacaagacggagatgcacctcgtgtacgccaaccggacggaggacgacatcctcctccgcgccgagctggaccgctgggcagccgagtatcctgagaggctcaaggtttggtacgtcgtgagccaggtgaaacgccttgacgagtggaagtacagcgtcgggatcgtaacggaggccgttctgcgggacgacgtgccggaggcgcgcgacggcacgctggctctgctctgcgggccaccgtcaatgatccagtcgcccatcttgccgaacctagagaagatgaaacaccagctcgacgattctgtcgtctccttctaa

SEQ ID NO: 5111 - protein, 889 aa, Zea mays
MSTCVEQPTHSASLDPTAAQRLPYPDLPVDILRRSSVRGSGFVAAALVSSARKADDDARHDDDDPSGDRHETYGSHYLANLGVEQSVRDEGTVDAWVESSQSLIRLTGKHSLNGELPRLMRHGFITPVPRHYVRNHGPVPRGDWATWTVEVTGLVRRPRALTMDELARDFPALELPVTLVCAGNRRKEQNMVRQTLGFNWGPGAVSTSVWRGARLSDVLRRCGSMSRKGGALFVCFEGAEDLPGGGGTKYGTSITREVALDPTMDVMLAYQQNGGPLLPDHGFPVRLIVPGCTAGRMVKWLKRIVVAPAESDNYYHYRDNRFLPSHVDAKLADAEGWWYKPEYVINEMNTNSVITTPAHNEFLPINAITTQRIYTMKGFAYSGGGKKVTRVEVTLDGGENWLLCELDHPEKPTKYGRYWCWCFWSIDVELIDLLACKEIAVRAWDQSLNTQPEFLTWNLMGMMTNCWFRVKVNVCRPRHGEKAGLAFEHPVRTNQPGGWMAQQKHLETAERTSAATSTTNQQFTMSEVRKHASQDSAWIVVHGHVYDCTAFLKDHPGGADSILINAGTDCTEEFDAIHSDKAKELLDTYRIGDLVTTGGAEQRSPLELAPSPPIRHEGPAAPVIALSNPREKVPCQLVARTVLSRDVRLFRFALPSSGQVLGLPVGKHIFVCASIDGKLCMRAYTPTSSVDEVGHFDLLVKVYFRNENTKFPDGGRMTQYLDSLPVGAHVDVKGPLGHVEYVGRGGFVIDGKPRKAGRLAMVAGGSGITPIYQVIQAVLRDQPEDKTEMHLVYANRTEDDILLRAELDRWAAEYPERLKVWYVVSQVKRLDEWKYSVGIVTEAVLRDDVPEARDGTLALLCGPPSMIQSPILPNLEKMKHQLDDSVVSF

SEQ ID NO: 5112 - DNA, 2676 bp, Hordeum vulgare
  CDS (1)..(2676)
atggcggcctccgtcgagtacaaccgtcaggtgtccgcccacccgtggccgaccaatgcgcagcccaaggccgccttcgacctcttctcctcctccggcggcggcaggcgccgttcgggcgcggactccgactcggacgacgaggacagcgttccgccggactggcggtcgctctacagcccgcggctcgacgtggagccatcggtcaaggacccccgcgacgaggccacctccgacgcctgggtcaagcgccacccggcgctcgtccgcctcaccggcaagcacccgttcaactccgagcccccgctgccgcggctcatgtcccacggcttcatcaccccggtcccgctccactacgtgcgcaaccacggcgccgtgcccaaggccgactggtccacctggaccgtcgaggtcaccggcctcgtcaagcgcccggtcaagttcaccatggaggagctcgtcacggggttccaggccgtggagttcccggtcacgctggtgtgcgccggcaaccggcgcaaggagcagaacatggtgcgccagtcctcgggcttcaactggggtcccggggccatctccaccaccgtgtggcgcggggtgcgcctccgcgacgtgctgcgccggtgcggcgtcatgggggccggcgccgcctccaacgtgtgcttcgagggcgccgaggaccttcccggcggcggcgggtgcaagtacggcaccagcctccggcggtccgtggccatggacccggcccgcgacgtcatcctcgcctacatgcagaacggcgagccgctggcgcccgaccacggattccccgtgcgcgtcatcgtgccgggcttcatcggcggccgcatggtcaagtggctcaagcgcatcgtcgtggcctgcaacgagtcggagagctactaccactaccgcgacaaccgcgtgctgccgtcacacgtcgacgccgagctcgccaatgccgaagcttggtggtacaagccggagtgcatgatcaacgagctcaacatcaactcggtgatcaccacgcccggacacgacgaggtgctgcccatcaacgcgctgacgacgcagaagccgtatacgatgaagggatatgcctactccggcggtggccggaaagttacgcgggtggaggtgaccctcgacggcggcgagacgtggcaggtgtgcgatctggagcacccggagcgtcctaccaagtacggcaagtactggtgctggtgcttctggtcggtggaagtggaggtgctggagctcctgggcgccaaggagatggccgtccgcgcgtgggacgaggccctcaacacccagccggagcgcctcatctggaacctcatgggcatgatgaacaactgctggttccgggtcaagatcaacgtctgccgcccccacaagggcgagatcggcctcgtcttcgaccacccaacgcagccgggcaaccagtccggcggctggatggcgcgccagaagcacatcgagacgtccgagaccacgcagggcacgctcaagcggagcacctccacgcccttcatgtccaccgcctcagcccagttcaccatgtccgaggtgcgccgccacgcctccaaggactccgcctggatcgtcgtgcacggccacgtctacgactgcaccgccttcctcaaggaccaccccggcggcgccgacagcatcctcatcaacgccggctccgactgcaccgaggagttcgacgccatccactccgccaaggcccgcggactcctcgagatgtaccgcgtcggcgagctcatcgtcaccggcaacgactactcgccgcagagcagcaacgccgacctcgcggccatcgtcgaggcccccgctgtcgtcgtgcctcggctgccggcctccgccgtcgcgctcgccaacccgcgggagaaggtgcggtgccggctcgtcgacaagaagagcatgtcccacaacgtgcgcctgttcaggttcgcgctgccgtcgcctgaccagaagctcgggctgcccgtcggcaagcacgtgtacgtttgcgcgtccaccggcggcaagctctgcatgcgcgcgtacacgccgaccagctccgtcgaggaggttggccacgtggagctgctcatcaagatatacttcaaggacgaggatcccaagttccccgccggcgggctcatgtcgcagtacctcgacgcgctgccgctcggtgcccccgtcgacatcaagggccccgtgggccacatcgagtacgccggccgcggcgccttcacggtgggcggcgagcgccggttcgcgcgccggctcgccatggttgccggcgggacggggatcacgccggtgtaccaggtgatccaggccgtgctgagggaccagcccgatgacaccacggagatgcacctggtgtacgcgaaccgcacggaggacgacatgctgctgcgggaggagatcgaccggtgggcggccgcgaacccggcgcggctcaaggtgtggtacgtggtgagcaaggtgggtcggccggaggacgcgtgggaatacggcgtggggagagtggacgagcaggtgctcagggagcacctgcctctgggcggcgacggcgagacgctcgcgctcgtctgtgggcctccggcgatgctcgagtgcacggtgcgcccgggactggagaagatggggtacgacctcgacaaggattgcctcgtcttctaa

SEQ ID NO: 5113 - protein, 891 aa, Hordeum vulgare
MAASVEYNRQVSAHPWPTNAQPKAAFDLFSSSGGGRRRSGADSDSDDEDSVPPDWRSLYSPRLDVEPSVKDPRDEATSDAWVKRHPALVRLTGKHPFNSEPPLPRLMSHGFITPVPLHYVRNHGAVPKADWSTWTVEVTGLVKRPVKFTMEELVTGFQAVEFPVTLVCAGNRRKEQNMVRQSSGFNWGPGAISTTVWRGVRLRDVLRRCGVMGAGAASNVCFEGAEDLPGGGGCKYGTSLRRSVAMDPARDVILAYMQNGEPLAPDHGFPVRVIVPGFIGGRMVKWLKRIVVACNESESYYHYRDNRVLPSHVDAELANAEAWWYKPECMINELNINSVITTPGHDEVLPINALTTQKPYTMKGYAYSGGGRKVTRVEVTLDGGETWQVCDLEHPERPTKYGKYWCWCFWSVEVEVLELLGAKEMAVRAWDEALNTQPERLIWNLMGMMNNCWFRVKINVCRPHKGEIGLVFDHPTQPGNQSGGWMARQKHIETSETTQGTLKRSTSTPFMSTASAQFTMSEVRRHASKDSAWIVVHGHVYDCTAFLKDHPGGADSILINAGSDCTEEFDAIHSAKARGLLEMYRVGELIVTGNDYSPQSSNADLAAIVEAPAVVVPRLPASAVALANPREKVRCRLVDKKSMSHNVRLFRFALPSPDQKLGLPVGKHVYVCASTGGKLCMRAYTPTSSVEEVGHVELLIKIYFKDEDPKFPAGGLMSQYLDALPLGAPVDIKGPVGHIEYAGRGAFTVGGERRFARRLAMVAGGTGITPVYQVIQAVLRDQPDDTTEMHLVYANRTEDDMLLREEIDRWAAANPARLKVWYVVSKVGRPEDAWEYGVGRVDEQVLREHLPLGGDGETLALVCGPPAMLECTVRPGLEKMGYDLDKDCLVF

SEQ ID NO: 5114 - DNA, 2685 bp, Beauveria bassiana
  CDS (1)..(2685)
atggcagtcaaaagccaactcggtgtaacttacaccacaaagacctttcctcctagcccacctcggactgtcggcaattctcatgctggtagcgacgacgaacgagacgaagtcgatgctacaccgacgactcctccagtagagaagcttggccagcttctgaaaccctactctcttccacccacaaacactcctacccatgttctcccagaagacctgaaaacaccagaccaccgcgtcaaccgggatcccaggctaatacggctcacgggtgttcatcccttcaatgtcgagccgcccctgaccgacttatacgatgagggctttctgaacagcgagaacctgcattacgttcgcaaccatggcccagtacctcactgccccgacgatgaatccctgaattggacatttactgttgatggactagtggaaaagcctttcacaattgctgtccgcgacttgatccagaagtatgaccagttcacataccctgttacgctggtgtgtgctggtaatcgtcgaaaggaacaaaatgtggttcgcaagtccaagggcttctcttggggagccgctgggctctcgactgctctgtggactggtgtgccgattggtgctcttctgagaatggccaagcccaaacgagctgcgaaatatgtatgctttgagggagcagacaagctgcctaacgggtactatggcacatctgtcaagctcaactggtgcatggatgagaaccgaggcatcatggtcgcccacaagatgaacggccagtcgttgcatccagaccatggtaaacctgtacgtattatcatccctgggcagattggagggcgcagtgtcaaatggctcaagaaaatcacaatcacatccgagcccagtgataactggtaccacatctacgacaaccgtgtccttcccaccacaatatcgcccgacgctagtgcaaacttgccagacgtctggaaagatgagaaatacgccatctacgatctgaatgccaacagtgccatctgttacccccgacacgacgagcggctcgttttggcaactgctccagatacgtacaaggttcggggttacgcttatggcggcggcgggaaacgaatcactcggctcgaagttaccttgaataaaggtaaatcatggctgttagcaggcatccactatcccgaggatgactaccgtcgcgcccccgacggcgacttgctgtacggcggcagcaccgacatgtggtggcgcgagacgtgcttttgctggtgcttttgggaaattgacattcccgtcgccgacctcagtgccgccgacgacatcatgatccgcgccatggacgagggtatgatggtgcagccgcgcgacatgtactggagcgtgctcggcatgatgaacaatccatggttccgcgtcgtgatccacaaggaagacggcgcgctccgattcgagcatcctacccagccggcgctgatgcccggtgggtggatggagcgcgtcaaacgccgcggcggcaacctcaccaacggcttttggggcgagaagacggcagcggaggaggagcaggtgctagcagagccggaaaaggagatttgcatgacgaatccaaaagtggtccgcatcatctctctggaggagctcaaggcgcacgagggagagatggagccttggttcgtggtcaatgggcatgtgtataatggcacgccgtacctggacaatcacccaggtggcgcgacatccatcatcaacgccgcagcccaagatgcaactgaagaatttatgacaatccatagcgaaaatgccaaggccatgatgccgcagtatcacattggcactctcaatgatgcagcccgcaaagctctcgaaggcagtgccgaggagagcccagcaagcgacccaacacgcgctgtatttcttcaaccaaaatactggagcaaggctatcctcgagaccaagacggatgtttcctctgacagcaaaatattctccttccgtctcgaccacgcggcccagtccatcggtctcccgacaggccagcaccttctcgtgcgcctccgagatccggccacgcgcgaagctgtcatccgtgcgtacacgcccttatcagagacacatgccaagggccagctcgacatcctcatcaaaatttaccgagatgtccccggccagcccggcggcaagatgacgcaggcgctcgactcgatccccctcggccactttgtggatatcaaaggcccggttggcaagtttgagtacctcggcaagggacactgcaccgtgtccgggacgtcgaggcacgtgcgccgcttcgtcatgatttgcgcagggtccggcgtcacgcccatctttcaggtgctgcgggccgtgacgtcggacgcgcaagacgggacggaatgtctggtactggacgggaaccgctgcgagaaggacattctctgcagggaggagctggacgccatggtggccagggcgccggcgaggacgacgctgctgcacaagctctcccggccagacgcgtcgtggtgcggcctgcgagggcgcatggataaagagtatctggaggagcacattggaggctttaggaagtcggatggtcgtgaaatggtgctggtgtgtggtccagcagcgctcgaggagactgtaaggagtgttctcgtggaaatggcatggaagcctgaagacatgctcttcttttag

SEQ ID NO: 5115 - protein, 894 aa, Beauveria bassiana
MAVKSQLGVTYTTKTFPPSPPRTVGNSHAGSDDERDEVDATPTTPPVEKLGQLLKPYSLPPTNTPTHVLPEDLKTPDHRVNRDPRLIRLTGVHPFNVEPPLTDLYDEGFLNSENLHYVRNHGPVPHCPDDESLNWTFTVDGLVEKPFTIAVRDLIQKYDQFTYPVTLVCAGNRRKEQNVVRKSKGFSWGAAGLSTALWTGVPIGALLRMAKPKRAAKYVCFEGADKLPNGYYGTSVKLNWCMDENRGIMVAHKMNGQSLHPDHGKPVRIIIPGQIGGRSVKWLKKITITSEPSDNWYHIYDNRVLPTTISPDASANLPDVWKDEKYAIYDLNANSAICYPRHDERLVLATAPDTYKVRGYAYGGGGKRITRLEVTLNKGKSWLLAGIHYPEDDYRRAPDGDLLYGGSTDMWWRETCFCWCFWEIDIPVADLSAADDIMIRAMDEGMMVQPRDMYWSVLGMMNNPWFRVVIHKEDGALRFEHPTQPALMPGGWMERVKRRGGNLTNGFWGEKTAAEEEQVLAEPEKEICMTNPKVVRIISLEELKAHEGEMEPWFVVNGHVYNGTPYLDNHPGGATSIINAAAQDATEEFMTIHSENAKAMMPQYHIGTLNDAARKALEGSAEESPASDPTRAVFLQPKYWSKAILETKTDVSSDSKIFSFRLDHAAQSIGLPTGQHLLVRLRDPATREAVIRAYTPLSETHAKGQLDILIKIYRDVPGQPGGKMTQALDSIPLGHFVDIKGPVGKFEYLGKGHCTVSGTSRHVRRFVMICAGSGVTPIFQVLRAVTSDAQDGTECLVLDGNRCEKDILCREELDAMVARAPARTTLLHKLSRPDASWCGLRGRMDKEYLEEHIGGFRKSDGREMVLVCGPAALEETVRSVLVEMAWKPEDMLFF

SEQ ID NO: 5116 - DNA, 2697 bp, Betula verrucosa
  CDS (1)..(2697)
atggcggcctcagtggagaaccgtcggttcactcatcacgaacccgccgtgaacggcctcgttcgcacctttaaacccgttccaaacagccaccggtccgactcgccggatcttggccgtcaaatcccgtcgagtcccaagaaacaggtcgcgacaggggaagattcgtcgagcgaggacgaaaatgagaacgattataaagagttaatacagaaagggaacggcgaattggagccgtcaatcctggacccgcgagatgaggccacagccgataattgggtcgagcgcaacgctaccatggtccgccttacagggaagcaccccttcaactcggaggcgcccctgacccggctcatgcatcacgggttcatcaccccggccccgctccactacgtacgaaaccacggtccggttcccaaggcaaggtgggaggactggagcgtcgaagtctgcgggctcgtcaagcgacccgcccggttcaccatggaccgcctggtgaccgagttccggagtcgcgagtttccggtcacgctggtctgcgccggtaacagacgcaaagagcagaacatggtgaagaaaaccatcgggttcaactggggggcggcaggggtctccacttcggtgtggcgtggcgtaccgttgcgcgatgtgctcaagcggtgcgggatcttcagccgtggtcgtggggccttcaacgtgtgctttgagggcgctgaagacttgcccggtggcggtgggtccaagtacgggaccagtgtcaagtacgagatggctatggacccggcgcgtgacatcatcttggggtacatgcaaaacggcgagcgtctgtcgccggaccatgggttcccggtgcggatgatcatacccgggttcatcggtgggcgaatggtcaaatggctgaagcggatcatagtgacaaccaaggaatccgataattactaccactataacgacaatagagtacttccctctcacgtcgacgcggacgtagccaaggccgaagcttggtggtacaagcctgagcatatcatcaatgagctgaacataaattctgtgataacgacgccgtgccacgaggagatcttgccgataaactcttggacaacgcagagaccatacactttgaggggctatgcatattccggaggtgggaggaaagtgacacgtgttgaaataactatgaacggtggagagaagtggcgcgtgtgtgcattggaccatccagagaaaccgaacaaatacggtaaatattggtgctggtgcttctggtcactggaggtagaggtgctagacctccttggcgccaaggagattgctgtccgagcctgggatgaagctcacaacacccaacccgaaaagctcatttggaatgtcatgggaatgatgaacaactgctggttccgggtgaaaacaaatgtgtgcaaggcgcacatgggggagattggaatcgcgtttgagcacccaacggtacccggaaacgagtctggcggatggatggccagggaaaagaacctcgagacatcatcggacgcaaaccaatccctgaagaagagcgtctcatcccctttcatgaacacgtcatcaaagatgttttcaatgtcggaggtgaaaaagcacaactcggccgaatcagcttggataattgtccacggccacatctacgattgcacccacttcctcaaagatcaccctggcggcgccgacagcattctcattaacgccggtactgactgcaccgaagagtttgacgccatacactccgacaaggccaagaaaatgctcgaggactatcgaatcggcgagttgatcaccacgggttatgtttccgactcacccaatagcacagtgcatggcgcgtccaacacatcccacctcgctccgatcaaagaaatcgcgccactgagaaacgtcgctctcatcccaggcgccaaaatcccgaccaagctcgtgtacaaaaaatcactatcccatgacgtgcggctattccgactcgcgttgccgtccgatgatcaagtcttgggtttgccagtagggaagcacgtatttttgtgcgctaccatagacgacaagttgtgcatgcgggcttacactccaacgagcaccattgatgaagttgggtacttagatctagtggttaagatttactttaaaaattcgaatccgagattccctaatggagggcttatgtcacagcacctagactcacttccaataggttcggttctacacgtgaagggtccattaggtcacgtagaatatactgggcgcggcaactttttagtccatggcgaacccaagtttgccaagaggctagccatggtggcaggtgggaccgggatcacgcccatatatcaagtgattcaagccattttgaaggacccggaggatgagacagagatgtttgtggtctacgcgaatcgtaccgaagacgatattttgctgagagaagagcttgatgattgggctaagaagcatgagaagttgaaggtttggtatgtggtgaaagaatctaaaagggaagggtgggaatacagtgtgggatacatcagagagagtattctacgggagcacatcccagaaggatcggacgatgttttggcgttggcatgtggagccccgtcaatgatagaggaagcagtgcggctaaatttggagaagatgaattatgataccaagaattcattgataatattttag

SEQ ID NO: 5117 - protein, 898 aa, Betula verrucosa
MAASVENRRFTHHEPAVNGLVRTFKPVPNSHRSDSPDLGRQIPSSPKKQVATGEDSSSEDENENDYKELIQKGNGELEPSILDPRDEATADNWVERNATMVRLTGKHPFNSEAPLTRLMHHGFITPAPLHYVRNHGPVPKARWEDWSVEVCGLVKRPARFTMDRLVTEFRSREFPVTLVCAGNRRKEQNMVKKTIGFNWGAAGVSTSVWRGVPLRDVLKRCGIFSRGRGAFNVCFEGAEDLPGGGGSKYGTSVKYEMAMDPARDIILGYMQNGERLSPDHGFPVRMIIPGFIGGRMVKWLKRIIVTTKESDNYYHYNDNRVLPSHVDADVAKAEAWWYKPEHIINELNINSVITTPCHEEILPINSWTTQRPYTLRGYAYSGGGRKVTRVEITMNGGEKWRVCALDHPEKPNKYGKYWCWCFWSLEVEVLDLLGAKEIAVRAWDEAHNTQPEKLIWNVMGMMNNCWFRVKTNVCKAHMGEIGIAFEHPTVPGNESGGWMAREKNLETSSDANQSLKKSVSSPFMNTSSKMFSMSEVKKHNSAESAWIIVHGHIYDCTHFLKDHPGGADSILINAGTDCTEEFDAIHSDKAKKMLEDYRIGELITTGYVSDSPNSTVHGASNTSHLAPIKEIAPLRNVALIPGAKIPTKLVYKKSLSHDVRLFRLALPSDDQVLGLPVGKHVFLCATIDDKLCMRAYTPTSTIDEVGYLDLVVKIYFKNSNPRFPNGGLMSQHLDSLPIGSVLHVKGPLGHVEYTGRGNFLVHGEPKFAKRLAMVAGGTGITPIYQVIQAILKDPEDETEMFVVYANRTEDDILLREELDDWAKKHEKLKVWYVVKESKREGWEYSVGYIRESILREHIPEGSDDVLALACGAPSMIEEAVRLNLEKMNYDTKNSLIIF

SEQ ID NO: 5118 - DNA, 2763 bp, Cichorium intybus
  CDS (1)..(2763)
atggcggcctctgtggaaaaccgccagttccgccacgaacctggtctatccgccgccggtgttgttcgttcattcagccctaaccaccgccgttctgattcacccatccggaactgtaactaccccgcggctgctagagagtttatgacgcctaagaaacttcctcctgagacgtacgatactagtgacgatgaagaagacgaagccgattatcgtgacgccattaaaaagtcgaactccgagttggaaagctccgtttttgacccaagagatcagggcactgcagatcaatggatcgagcgcaacccatcaatggttcgtctcactggaaaacacccattcaactccgagccacctttgaataagctcatgcaacatgggttcatcacccctgaccctcttcattacgtccgtaaccatggtccggtgcctaacgccacctgggaggattggacggtggagatatgcggcttggtgaaaagacctgcgcgtttcagtatgacccagcttgtcaacgagtttccaagcagggagtttccggtgacgttagtctgcgccgggaaccgccggaaggagcagaatctgacaaaacagacgatagggttcaactggggcgccgccgggatatctacttcggtttggaaaggggtgccattggttcatatcctgaaaagatgcgggatttacagccggaagaaaggcgcactcaatgtgtgcttcgagggggcggaggatcttcccggcggcggaggttccaaatacgggaccagcataaagatcgagatggcaatggatccggcgagggatatcatattggcgtacatgcaaaacggggaaaagttgtcacctgatcacggattcccggtgaggatgatcattccaggattcatcggcggtaggatggtgaaatggttgaagcgtatcatagtaacgacgccggagtcggaaagttattaccacttcaaagacaaccgcgtgttgccgtcgcacgtggacgccgagctagctaactcggaaggttggtggtataagccagagtacatcatcaacgaactcaacataaactcggtgattacaacaccttgtcatgaagagattttgcctattaattcttggacaactcaaaggccttacaccttgagaggctatgcatattccggaggtgggaagaaagtgacacgggtggaagtaacaatggacggaggagagacgtggaacgtttgtacactggatcataaagagaagccaacaagatacgccaaatattggtgttggtgtttttggtcgcttgaagttgaagttcttgaccttcttagtgccaaagagatcgcggttcgagcctgggatgagacactaaacacccaacctgacaaactcatttggaatctcatgggtatgatgaacaattgttggttccgagtgaagacaaacatgtgcaaaccacacaaaggcgagatcggcatcgtcttcgagcacccaacgcaacctggaaaccagtccggtggatggatggctcgtgagaaacacctcgagatttcatcggaactagcacacccaactctcaagaagagtgtatcctcccctttcatgaacaccacttctttaaccttcaccatgtcggaagtcaagaaacacaattccgctgactcagcctggatcgtcgtccatggccatatctacgactgcacctccttcctcaaagaccatcccggtggcagtgacagtatcctcctcaatgctggaaccgactgcacagaagagttcgatgccatccattccgacaaggccaagaaactcttggaagagtatcgagttggtgagctcataaccatgggatacagttccgattctgctgcgtcatcaccaaataactccgtccatggtgccaccaattacctgacattacacttaagcttagccaccatcaaagaaattgctccgaccagaagcgtagccctaatccctaaagaaattgctccgacaagacgtgaaaagatcccatgtaaacttatctccaaaacatcggtttctcatgacgtgaggctattcaggttcgctctcccatcaccggatcaagttcttgggttaccagtagggaaacacgtctttgtatgtgccaccattgacgataagctatgcatgagggcatacacaccaacgagcaccattgatgaagtcgggtactttgagttgcttgtcaaaatctacttcaaaggcgtggaacccaagtttccgaatggagggctcatgtcgcaacatctggagtcaatggaacttggctcttcaattgaaatcaaaggtcctttgggccacatcgagtacatgggcagggggacgttttcggtgcatggtaaacaaaagtttgccaggaagttagccatgtttgcaggtgggacgggtatcactccggatctatcaagtgatgcaagctatttaaaggatccggaagatgatacagagatgtatgtggtgtatgcaaatcgtaccgaagatgatatattgttgagggaagaacttgatgcatgggcagacaagtattcggacagggtgaaggtatggtatgttgttgccaagtccataagagaagggtggaaatacagtgaaggtttcatcacggaggatattatgagggaacatgtaccggaggtctctgaagatacattggctttggcttgtggaccaccacccatgattcagttcgcaatcaaccctaatttagaaaagatggggtatgatatcaagaattctttgctggtgttttag

SEQ ID NO: 5119 - protein, 920 aa, Cichorium intybus
MAASVENRQFRHEPGLSAAGVVRSFSPNHRRSDSPIRNCNYPAAAREFMTPKKLPPETYDTSDDEEDEADYRDAIKKSNSELESSVFDPRDQGTADQWIERNPSMVRLTGKHPFNSEPPLNKLMQHGFITPDPLHYVRNHGPVPNATWEDWTVEICGLVKRPARFSMTQLVNEFPSREFPVTLVCAGNRRKEQNLTKQTIGFNWGAAGISTSVWKGVPLVHILKRCGIYSRKKGALNVCFEGAEDLPGGGGSKYGTSIKIEMAMDPARDIILAYMQNGEKLSPDHGFPVRMIIPGFIGGRMVKWLKRIIVTTPESESYYHFKDNRVLPSHVDAELANSEGWWYKPEYIINELNINSVITTPCHEEILPINSWTTQRPYTLRGYAYSGGGKKVTRVEVTMDGGETWNVCTLDHKEKPTRYAKYWCWCFWSLEVEVLDLLSAKEIAVRAWDETLNTQPDKLIWNLMGMMNNCWFRVKTNMCKPHKGEIGIVFEHPTQPGNQSGGWMAREKHLEISSELAHPTLKKSVSSPFMNTTSLTFTMSEVKKHNSADSAWIVVHGHIYDCTSFLKDHPGGSDSILLNAGTDCTEEFDAIHSDKAKKLLEEYRVGELITMGYSSDSAASSPNNSVHGATNYLTLHLSLATIKEIAPTRSVALIPKEIAPTRREKIPCKLISKTSVSHDVRLFRFALPSPDQVLGLPVGKHVFVCATIDDKLCMRAYTPTSTIDEVGYFELLVKIYFKGVEPKFPNGGLMSQHLESMELGSSIEIKGPLGHIEYMGRGTFSVHGKQKFARKLAMFAGGTGITPDLSSDASYLKDPEDDTEMYVVYANRTEDDILLREELDAWADKYSDRVKVWYVVAKSIREGWKYSEGFITEDIMREHVPEVSEDTLALACGPPPMIQFAINPNLEKMGYDIKNSLLVF

SEQ ID NO: 5120 - DNA, 2757 bp, Cucurbita maxima
  CDS (1)..(2757)
atggcggcttccgtcgacaaccgtcaatatggacctctccagccaccgcttagtggcgtcgttaggtcattcaagaatggtcctaaccaccgagccgactctcccgttcgtggctgtaacttccctaattccaacgtcgattataataacaaccgacctttgaaaagctctgtcaagatacaagaggcggcggcggaggagatggaggattcgtgtagcgaagatgaaaatgagaacgagtttcgtgatttgatcgtgaagggaaaccgtgaactcgagccgtcgattttggaccacagagatgaaggcacggctgataattggatcgagcggaatgcttccatggtccgtctcacggggaagcatcccttcaattctgaaccacctcttaaccgtctgatgcatcacggattcatcacccctgttcctctccactacgtccgtaaccacggtgtggtccccaaggcgaagtgggccgactggaccgttgaggtttgcgggcttgtcaaacgtcccgccaagttcaccatggaccaactcctcaacgaattccgcttccgtgaattcccagccacactagtctgcgctggaaaccgacggaaggaacagaacatggtgaaacagagcatcggattcaactggggagcggcgggtgtgtctacgtcggtatggcgtcgtgtcccactttgtgacctgttgaaacgatgcgggatattgagccgtaagaaaggggcgctgaatgtatgctttgaaggagctgaggatctgcctggtggcggtgggtcaaaatacgggaccagtatcaagaaggagctagccatggatcctgctagagacatcattctcgcctatatgcaaaacggcgagcaattagcgccggaccatggctttccggtgaggatgatcattccgggattcatcggtggtagaatggtgaagtggttgaaacgaatcattgtaacaacgaaagaatccgaaaactattaccattttaaggataacagagtcttgccttcccatgtcgacgcggacgtcgccaacgctgaagcttggtggtacaagccggagcatataatcaacgagttgaacataaactcagtgataaccacgccctgtcatgaggagattctgcccatcaacgcgtggaccactcagaggccctacaccttgagaggctactcttattccggcggtgggaagaaggtgacgcgtgtggaggtgacgatggacagtggagagacatggcaggtgtgcacgttggaccatccggagaaggcgaacaagtacggaaaatactggtgctggtgcttctggtcgttggaggtggaggtgctggacttgctcagcgctaaggaaattgctgtccgggcttgggatgaaacccataacacccagccggagaaacttatctggaacctcatgggaatgatgaacaattgttggttcagagtgaaaaccaatatgtgcaagcctcacaagggagaaatcggtatcgtcttcgaacacccaacgcagcccggcaaccaatccggcggatggatggacagagagagacatctggagatttcgactgaatcaaaccagacattgaagaagagtgtctccactccattcatgaacaccgcctccaacacctacaccttatccgaagtcaaaaagcacaactccccccaatccgcctggatcatcgtccacggccatgtctacgactgcacccgcttcctcaaagaccaccccggcggttccgacagtatcctcattaacgccggcaccgactgcaccgaagagttcgacgcaatccactctgacaaagccaagaaaatgctcgaggactatcgaatcggggagttaatcaccaccggctacgcctccgactcctcctccaactcccctaacaactccactcatggcgcgtccaacttctcccacttggcccccattcgagaggctccagtatcacgacgcgtggcgctcgcccctaacgagaaaatcccctgcaaattgatttccaagacctcgatctcacacgacgtgcgtgtgttcagattcgccctacccggtggtcaggaccaggctctcgggttgcccgtggggaagcacattttcatatgcgccacagtggacggcaagctctgcatgagagcctacacgcccactagctcaatagacgagatggggttcttcgaattggtggtgaaagtgtacttcaaaggtgtgcacccaaagttccccaacggcgggatcatgtcgcagtatttggattccatggaagtgggatccacgctggatgtgaagggtccactgggccatatcgagtacacggggcgcggcaactttatggttcatgggaagccccggttcgcgagacggcttgccatgctggcaggtgggaccggaataaccccaatataccaagtggtgcaggcgatattaaaggatccggaggacgagacggagatgtatgtggtgtatgcgaatcggacggaggatgatattttgctaagggatgaattggacacgtgggcgaagaagaaccagaggttgaaagtgtggtacgtggtgcaggagagtattagagaagggtgggaatatagcgttgggttcattacagagaatattctgagagagcatattccggcggcggcggaggacacattggcattggcttgtgggccgccggcgatgattcagttcgcagtgcagcccaatttggagaagatgaattacgataccaagaattcgttattagtgttttaa

SEQ ID NO: 5121 - protein, 918 aa, Cucurbita maxima
MAASVDNRQYGPLQPPLSGVVRSFKNGPNHRADSPVRGCNFPNSNVDYNNNRPLKSSVKIQEAAAEEMEDSCSEDENENEFRDLIVKGNRELEPSILDHRDEGTADNWIERNASMVRLTGKHPFNSEPPLNRLMHHGFITPVPLHYVRNHGVVPKAKWADWTVEVCGLVKRPAKFTMDQLLNEFRFREFPATLVCAGNRRKEQNMVKQSIGFNWGAAGVSTSVWRRVPLCDLLKRCGILSRKKGALNVCFEGAEDLPGGGGSKYGTSIKKELAMDPARDIILAYMQNGEQLAPDHGFPVRMIIPGFIGGRMVKWLKRIIVTTKESENYYHFKDNRVLPSHVDADVANAEAWWYKPEHIINELNINSVITTPCHEEILPINAWTTQRPYTLRGYSYSGGGKKVTRVEVTMDSGETWQVCTLDHPEKANKYGKYWCWCFWSLEVEVLDLLSAKEIAVRAWDETHNTQPEKLIWNLMGMMNNCWFRVKTNMCKPHKGEIGIVFEHPTQPGNQSGGWMDRERHLEISTESNQTLKKSVSTPFMNTASNTYTLSEVKKHNSPQSAWIIVHGHVYDCTRFLKDHPGGSDSILINAGTDCTEEFDAIHSDKAKKMLEDYRIGELITTGYASDSSSNSPNNSTHGASNFSHLAPIREAPVSRRVALAPNEKIPCKLISKTSISHDVRVFRFALPGGQDQALGLPVGKHIFICATVDGKLCMRAYTPTSSIDEMGFFELVVKVYFKGVHPKFPNGGIMSQYLDSMEVGSTLDVKGPLGHIEYTGRGNFMVHGKPRFARRLAMLAGGTGITPIYQVVQAILKDPEDETEMYVVYANRTEDDILLRDELDTWAKKNQRLKVWYVVQESIREGWEYSVGFITENILREHIPAAAEDTLALACGPPAMIQFAVQPNLEKMNYDTKNSLLVF

SEQ ID NO: 5122 - DNA, 2622 bp, Emericella nidulans
  CDS (1)..(2622)
atgtctacaaccgtcacacaagtgcggacgggctccatacccaagactctcaagacttcccagatcagggtcgaagagcaagagatcacagagctcgatactgcagatattcctttacctcctccttcgaaagaaccaaccgaggttctaagtctagataaaactacaccagatagccatgtcccccgagatccccggctgatccggctcactggcgttcacccgttcaatgtcgagcctccattgacagcactctttcagcaaggcttcttgacgcctcctgagctattctacgtccggaatcatggcccagtgccccatgttcgcgacgaggacattcccaactgggaactccgcattgaaggactcgttgaaaagccaatcaccctcagcttcaagcagatcctgcagaactatgatcagatcacagctcctattacactagtatgtgcaggcaacagacggaaagagcaaaacacagtacggaaatcgaaaggcttctcatggggctcggccgctctgtctactgcgctcttcaccgggcccatgatggccgatatcataaagagcgccaagcccctgcgaagagcaaagtatgtctgcatggagggtgccgataacttgccgaacggaaattacgggacatccatcaaactcaactgggccatggacccgaatagaggcattatgctcgcgcacaagatgaacggcgaagacctcagaccagaccacggtcgtccgctgagggccgtcgtaccgggccagattggagggcgcagtgtcaagtggctgaagaagcttatcatcaccgacgcgcccagcgataactggtaccatatttatgacaacagggtgctacctacaatggtcacgccagatatgtcgtcccaaaacccgtcatggtggcgcgatgaacgctacgccatctacgatctgaacgtcaattccgccgccgtctacccccagcacaaggaaaccctggatctggccgccgcgaggccgttctacacagcaaaagggtatgcctatgcaggaggcggacgaagaataacccgtgtcgagatctcgctggataagggcaaatcatggcgccttgcgcggatcgaatacgccgaagacaaataccgcgacttcgaaggtacgctctatggcggccgcgtcgacatggcctggcgagaagcctgcttctgctggtccttctggtccctcgacattcccgtctcggaactcgcaagcagtgatgccctactcgtccgcgcaatggacgaagcacttagtctccaaccaaaggatatgtactggtctgtccttggtatgatgaacaacccttggttccgggtcaagatcaccaacgagaatgggcggttgctcttcgagcatccgactgatatcactggctcgagcgggtggatggaacaaatcaagaaagcaggaggcgacttgacgaatgggaactggggcgagaggcaggagggtgaggagcctgttgaagcggagcccgtggtggaggtcaatatgaagaaagagggcgtgacgaggatcattgatctagaggagttcaaaaagaactcgtcggacgagaggccctggttcgtcgttaacggggaggtatatgatggcacagcattcctagagggacaccccggcggagctcagagtatcatctcggctgctggaacggatgcttctgaggagttcctcgaaatccacagcgaaaccgccaaaaagatgatgccagactaccatatcggcaccctcgacaaagcctcgctcgaagcccttagaaagggcaacgcagacacaacagactcatccagcgatccccgccctactttccttacccccaaagcctggacaaaagctactctgacgaagaaaacatctgtctcctccgacacgcacattttcactctctcccttgagcacccatcccaagccctcggccttccaacgggccagcacctgatgctcaaaacccccgacccaaagtcctcgagctcaggcagcattatccgctcgtacaccccgatatcaccatccgatcagctgggaatggtcgacattctcatcaaaatctacgccgagacacccagcatccccggcggcaagatgaccacagccctagataccctgccgctcggttccgtcatcgaatgcaagggtcctactgggcgtttcgagtatctagaccgcggaagggtcctcattagcggaaaggaaagatttgtcaagtctttcgtcatgatctgtggcgggacgggcatcacgcctgtcttccaagtccttagggctgttatgcaagatgaacaagatgaaacgaaatgtgtcatgcttgatggaaaccggctagaggaagacattttgctgaagaacgagctagacgaattcgaggctttggccgggaagaaagagaagtgcaaaattgtgcatacactgacgaaggggagtgaaagttggactgggcggaggggacgtattgatgaagaattgattaggcagcatgccgggacaccggatagagagaccatggttttggtttgcgggcctgaggcgatggagaaggcttcaaagaagatcctactgtcgttgggatggaaagaggagaaccttcattacttctag

SEQ ID NO: 5123 - protein, 873 aa, Emericella nidulans
MSTTVTQVRTGSIPKTLKTSQIRVEEQEITELDTADIPLPPPSKEPTEVLSLDKTTPDSHVPRDPRLIRLTGVHPFNVEPPLTALFQQGFLTPPELFYVRNHGPVPHVRDEDIPNWELRIEGLVEKPITLSFKQILQNYDQITAPITLVCAGNRRKEQNTVRKSKGFSWGSAALSTALFTGPMMADIIKSAKPLRRAKYVCMEGADNLPNGNYGTSIKLNWAMDPNRGIMLAHKMNGEDLRPDHGRPLRAVVPGQIGGRSVKWLKKLIITDAPSDNWYHIYDNRVLPTMVTPDMSSQNPSWWRDERYAIYDLNVNSAAVYPQHKETLDLAAARPFYTAKGYAYAGGGRRITRVEISLDKGKSWRLARIEYAEDKYRDFEGTLYGGRVDMAWREACFCWSFWSLDIPVSELASSDALLVRAMDEALSLQPKDMYWSVLGMMNNPWFRVKITNENGRLLFEHPTDITGSSGWMEQIKKAGGDLTNGNWGERQEGEEPVEAEPVVEVNMKKEGVTRIIDLEEFKKNSSDERPWFVVNGEVYDGTAFLEGHPGGAQSIISAAGTDASEEFLEIHSETAKKMMPDYHIGTLDKASLEALRKGNADTTDSSSDPRPTFLTPKAWTKATLTKKTSVSSDTHIFTLSLEHPSQALGLPTGQHLMLKTPDPKSSSSGSIIRSYTPISPSDQLGMVDILIKIYAETPSIPGGKMTTALDTLPLGSVIECKGPTGRFEYLDRGRVLISGKERFVKSFVMICGGTGITPVFQVLRAVMQDEQDETKCVMLDGNRLEEDILLKNELDEFEALAGKKEKCKIVHTLTKGSESWTGRRGRIDEELIRQHAGTPDRETMVLVCGPEAMEKASKKILLSLGWKEENLHYF

SEQ ID NO: 5124 - DNA, 2718 bp, Fusarium oxysporum
  CDS (1)..(2718)
atggagacttcaacaacaacaaccctcctacaacaggaaaggattcctgaaaactctgaaccaatctcaacccatatacatacccacagccttcctcctactcctccaggaacagcaaagccatctcggataggtagcttccacgatctacaagaactctcatcagttgaatctcctcgtctcgaccatatcaagccttatcctctacctccaaaattctcgccaaagtctgtcctcaaggaagatctcaagactcctgataattttgttgagagagatccacgtcttattcgtctaactggagtccaccctttcaacgtcgaggcacccctgagcgacttatacgatgaaggtttccttaccagcgagaaccttcactatgtccgtaaccacggacacgtacctagatgtgaagacgatgacattctcgactgggagttcgaaataagtggccttgtcgaaaaccccatcaagatgaacgtgcgggatctcatcaacgactaccagcaattgacttatccagtgacgttcgtgtgtgctggaaaccgtcgcaaagagcagaacattgtacggaaaaccaagggtttctcttggggaccggccggcctgtcaacagctctctggaccggtgttgctataggagatctcctttctgcggcgaaacctaagcgcggagcccggtatgtttgcttcgagggagcagacaagttacccaatggctattatggtacatccatcaagctcaactggtgcatggatcctaacagaggtgtcatggtggctcacaagatgaatggcaaccccctgcctccagaccatggcaagcctgttcgtatcgtcattcctggacagatcggcggtcgaagcattaagtggcttaagaagattactatcactcaagagcctagcgataactggtatcacatatatgataaccgtgtcctacccaccatgatctcacctgaagagagcgcaaacttgcctgaggtctggaaggatgagaaatacgccatttacgacctcagcacgaatagtgccatttgttaccctgcccatgaagagaaggtgccattcacggatgctccggcaagctataaggtgcgaggttatgcctacagtggtggcggaagacgtattacaagagtcgaggttacccttgataagggtaaatcttggagactcgccaacatcagataccctgaggatgactaccgcaacgcccctgaaggtgatactctgtatggggggcgtgtcgacatgtggtggcgcgagacatcgttctgttggtgcttctgggaccttgacattcctctggatgagttgaagagtgcagacgacatcatgatgcgtgctatggacgagtccatgaacgtgcagcctcgagatatgtactggagcgtactgggcatgatgaacaacccgtggttccgcatcgtgatccacaaggaggatcatgcacttcgcttcgagcatcccactcacgctaccctgaagatcaagggttggatggagcgagtcaaggaggccggtggtgatctcactaacggctactggggtgagaaggcccctggtgaagttcaagaggtcgtggtaaaggagcccgagaagcagatctgcatgaccaaccctcagatcaatcgaaagatcaccatagaagagctcaaggctcatagtggtgaagaagagccttggttcgttgtcaagggcgaagtgtacgatggcactccttacctctctggtcaccctggtggtgcagcatcaatctttggtgccgctggtcaagatgctactgaagaatttatggccattcacagcgaaaatgcaaaagccatgctgcccacataccacattggcaccctcgatgaagaatcccgtgcgattctcagtggcgatgctaccaagacgaacgacgacgcagaccgagaagtgttcctccaagccaagacatggagcaaggctattctcgacaagaagacatccatctcaccagataccaagatcttctccttcaagctcaaccacgaagcccagaagattggcctccccactggccagcatcttatgatgcgtctccgcgaccctgccacccgcgaggctatcatccgctcatacacaccatactccgacggctcagattgtggccgtctggatattcttatcaagatctactacgatactccccagcgcaagggtggtgttatgacacaagcactcgatgcccttcccattggccactgggttgactttaagggacctacgggcaaattcgtctatcatggcaatggcctctgcacgattaatgagaaagaacgccgtgttcgccgtttcatcatggtgtgtggtggttctggcattactcctatccgccaagtactccgcgctgttatcgataatcccaaagacacgacgccatgtctggtcttcaacggcaaccggagtgtcaacgatattctctgcatggaggagctcgaagaactggaggctgccaatccttcaagatgccgagtcgttaatgccctctctaatccaccacccgaatggaatggcctcaagggcttcgtgaaccaagccctggttcccgaatacatggatctgcccaaggcaagtggtgaaggcgacgagttgttgcttgtttgtggacctccaccgatggttaaggctgttgaggcctcatttctgggcatgggtttcaaatcagatgattttgtattcttctga

SEQ ID NO: 5125 - protein, 905 aa, Fusarium oxysporum
METSTTTTLLQQERIPENSEPISTHIHTHSLPPTPPGTAKPSRIGSFHDLQELSSVESPRLDHIKPYPLPPKFSPKSVLKEDLKTPDNFVERDPRLIRLTGVHPFNVEAPLSDLYDEGFLTSENLHYVRNHGHVPRCEDDDILDWEFEISGLVENPIKMNVRDLINDYQQLTYPVTFVCAGNRRKEQNIVRKTKGFSWGPAGLSTALWTGVAIGDLLSAAKPKRGARYVCFEGADKLPNGYYGTSIKLNWCMDPNRGVMVAHKMNGNPLPPDHGKPVRIVIPGQIGGRSIKWLKKITITQEPSDNWYHIYDNRVLPTMISPEESANLPEVWKDEKYAIYDLSTNSAICYPAHEEKVPFTDAPASYKVRGYAYSGGGRRITRVEVTLDKGKSWRLANIRYPEDDYRNAPEGDTLYGGRVDMWWRETSFCWCFWDLDIPLDELKSADDIMMRAMDESMNVQPRDMYWSVLGMMNNPWFRIVIHKEDHALRFEHPTHATLKIKGWMERVKEAGGDLTNGYWGEKAPGEVQEVVVKEPEKQICMTNPQINRKITIEELKAHSGEEEPWFVVKGEVYDGTPYLSGHPGGAASIFGAAGQDATEEFMAIHSENAKAMLPTYHIGTLDEESRAILSGDATKTNDDADREVFLQAKTWSKAILDKKTSISPDTKIFSFKLNHEAQKIGLPTGQHLMMRLRDPATREAIIRSYTPYSDGSDCGRLDILIKIYYDTPQRKGGVMTQALDALPIGHWVDFKGPTGKFVYHGNGLCTINEKERRVRRFIMVCGGSGITPIRQVLRAVIDNPKDTTPCLVFNGNRSVNDILCMEELEELEAANPSRCRVVNALSNPPPEWNGLKGFVNQALVPEYMDLPKASGEGDELLLVCGPPPMVKAVEASFLGMGFKSDDFVFF

SEQ ID NO: 5126 - DNA, 2682 bp, Leptosphaeria maculans
  CDS (1)..(2682)
atgagtgtcaccacacaacagccagcggtggtgcctctcccatcatccccaagactaccaatagaatcacatgctggtccccgaagcacacagttaccaccatctccgccagagaccgtcaacggcgatgaccctaagtctattacctctacgccagccgagcctgacttccctttgcctccaccagcaaatcccaagccgcaggtcctagacatcgataaaccaacaccagatgcacatgtcccaagagatccacgactcatccgcctgaccggggtccatccatttaacacagaaccaccgctcaccgacctgtacaacgagggctttctcaccagcccggaactattctacgttcgaaaccatggggctgtccctgaggtccaagatgaggaatgcttggactgggaattttcgatcgaagggatggttgcaaacccgctcaaaatcaccttgcgacaattactagaggagtatgagaatgtgacatatcccgtcacccttgtctgtgcaggtaacaggcgaaaggaacaaaatgtagtacgaaagagcaagggtttcgcgtggggtgcggctggtgtatcaacagcactctttactggcgtcgttatgaaggatgttatagaacgagcgaagccgctaaggaaagcaaagtatgtgtgtatggaaggcgctgacaagctgcccaatggatactatggcacatctgtgaagttgaactgggtcatggatccaaatcgtggcatcatgctcgcacacaagatgaatggtgaaaatttgagtttagatcacggaaagccattgagagccgtggtccccggacagattgggggtcgaagcgtcaagtggctgaaaaagctgatcgtcacggctgaaccgagtgacaattggtatcatatttacgataaccgggtcttgcctacaatggtcgaccctgatgaagctgcaaagaacccaaagtggtggatggacgaaagatatgcaatctacgacctcagtcccaactcagcaattgcgttcccagcacatgaagagaaggtcgtgcttgcatcagcagaaaattcatataacgtccgaggatacgcctacagtggtggtggtcgccgcatcacgagatgcgaagtatcattgaacaaaggcaaaaactggcgattagccaacatcgattacgcagaagataaatatcgagacttcgaaggccgcgaattgttcggtgcgcgtttggatatggactggcgtgagactagcttctgctggtgtttctggaacctcgatatagcaacggcagagctgagggatgcaaatgacattcttgtcagagcaatggatgaggccatgtgtatacagccgcgtgatatgtactggagtgtactcggcatgatgaacaacccatggtaccggataacgatacaccacgagggcgatgtcctgcgtttcgagcatccaacacaaccagcgttgatacctggtggctggatggaacgcgttaagaaggctggcggcaatctgaccaatgggcaatggggtgagcagattgagggtcaagagcttgaaaatactgccgttgaagaagtcaaagagatcaagatgacgaaagacggtgtaaacaggattgttgagctcgatgaattaaaatggcatgaaagtgcggaatatccttggtttgtggtcaacgacgaagtgtacgatggcacttccttcctcgagggacacccaggcggtgcacaaagcatcatcagcgcagccggtctcgatgcttcagatgaattcatggccatccatagcgaaaccgcaaaagcaatgatgccagcttaccacatcggcaccctctcccctactgcctccaaacaactttccttggaggaaccaacctcgaagcaagcatcctcatccagtcttcgcccgacctttctagattcacgcacctggtccaaagcgctactttcttccaagacaaaagtctcatgggatactagaatcttccgcttcaagctggatcacgcttcgcagacgctcggtctgccaacaggccagcatttaatgattcggttgcgcgacccggtaacacgcgaggctattattcgctcttataccccgatttctcagataagcgagcaggggttctgcgatgtgttgatcaagatttatgcggacgcgcctgggcgggagggcggaaagatgaccaaggcactggacagcattccctgtgggcattgggtggacatgaagggcccgattggcaaatttgaatacctaggcaagggcgtgtgctctatcaatgggaacgagagaagggtgaggagtatgaagatgatttgcggtggcagtggcataacgcccatttaccaggtcttgcgcgccattctgcaggattcggccgatagcacgcactgcactgttctgaatggaaacaggctggaggaggatattctgtgtagagaggatctcgatcggttcgcagaggagaatggagagaggtgtacgctggttcatacacttacgcaagcggcagaaggatggacggggcgaagggggagaattggagaggaattgttgaaggagttttgtgggacagaggaggacggcttggtgttggtttgtgggccggagggtttggagagaagtgtcaagggattactttcggggatggcgtggagggatgacgatgtgattttcttctga

SEQ ID NO: 5127 - protein, 893 aa, Leptosphaeria maculans
MSVTTQQPAVVPLPSSPRLPIESHAGPRSTQLPPSPPETVNGDDPKSITSTPAEPDFPLPPPANPKPQVLDIDKPTPDAHVPRDPRLIRLTGVHPFNTEPPLTDLYNEGFLTSPELFYVRNHGAVPEVQDEECLDWEFSIEGMVANPLKITLRQLLEEYENVTYPVTLVCAGNRRKEQNVVRKSKGFAWGAAGVSTALFTGVVMKDVIERAKPLRKAKYVCMEGADKLPNGYYGTSVKLNWVMDPNRGIMLAHKMNGENLSLDHGKPLRAVVPGQIGGRSVKWLKKLIVTAEPSDNWYHIYDNRVLPTMVDPDEAAKNPKWWMDERYAIYDLSPNSAIAFPAHEEKVVLASAENSYNVRGYAYSGGGRRITRCEVSLNKGKNWRLANIDYAEDKYRDFEGRELFGARLDMDWRETSFCWCFWNLDIATAELRDANDILVRAMDEAMCIQPRDMYWSVLGMMNNPWYRITIHHEGDVLRFEHPTQPALIPGGWMERVKKAGGNLTNGQWGEQIEGQELENTAVEEVKEIKMTKDGVNRIVELDELKWHESAEYPWFVVNDEVYDGTSFLEGHPGGAQSIISAAGLDASDEFMAIHSETAKAMMPAYHIGTLSPTASKQLSLEEPTSKQASSSSLRPTFLDSRTWSKALLSSKTKVSWDTRIFRFKLDHASQTLGLPTGQHLMIRLRDPVTREAIIRSYTPISQISEQGFCDVLIKIYADAPGREGGKMTKALDSIPCGHWVDMKGPIGKFEYLGKGVCSINGNERRVRSMKMICGGSGITPIYQVLRAILQDSADSTHCTVLNGNRLEEDILCREDLDRFAEENGERCTLVHTLTQAAEGWTGRRGRIGEELLKEFCGTEEDGLVLVCGPEGLERSVKGLLSGMAWRDDDVIFF

SEQ ID NO: 5128 - DNA, 2703 bp, Lotus japonicus
  CDS (1)..(2703)
atggcagcatcagtggacaaccgtcaatacagcacccttaacggcgtcgtccgctccttcaccccgaacaacacctacctccacgacccaaaacccagcttccccgccgtgaacctcgacctcgacgcttcctccagtgacgacgacgacgaaaaggacgacgcgtcgatcctcaaagacctcattagaaagggcaacgcagaaatcgaatcgtccgttctcgacccacgtgaccagggaacggctgataactggatctcacgaaactcctccatggtccgcctcacagggaagcaccctttcaactcggagccaccactcccacgcctcatgcaccacgggttcataaccccggtcccgcttcactatgttcgcaaccacggtccggttcccaaagcacgttgggatgactggaccgtggaggtgaccgggttggtgaaaacaccgacccggtttagtatggataggctcgtccgtgatttcccgagccgcgagcttcctgtgacgctcgtgtgcgcgggaaatcgcaggaaggagcagaacatggtccgccaaagcatcgggttcaactggggatccgccggggtctccacgtccgtgtggcgcggcgtgtcattgcgccacatcctgcggaggtgcaggatccagacgcggtcaagaggtgcgctacacgtgtgcttcgagggggacgaggatcttcccggtggtggcggttccaagtactcgacgagcatcaggagggaggttgcgatggatccgtcgcgtgatgttatacttgcttacatgcagaacggggaggttctggctccagatcatggatttccggttcgggttatcatacccgggtttattggtggccgcatggtgaagtggcttaaacgtattgtggtgacggaagaagagtgtgatggacattaccattacaaggataatagagtgcttccttcccatgttgatgcagaacttgccaatgaagaaggatggtggtacaagccggagtatattatcaacgagttgaacataaattccgtgattacgacgccgtgtcatgatgagatcttgcccattaacgcatggactacgcagaggccttacacgctgagagggtactcatattctgggggtggaagaaaagtgacacgtgtggaagtgacactggacggtggagaaacatggttcgtgtgtgcgttggaccagcaagagaaaccaaacaaatacggcaagtattggtgctggtgcttctggtctttggaggtagaagtgctggaccttcttgggaccaaggagattgctgtccgcgcatgggatgaggccctcaacacccaacctgaaaacctcatttggaatgttatgggcatgatgaacaactgctggttcagggtgaaaaccaatgtgtgcaagccccacaagggtgagattggaatagtgttcgaacatccaacccaaccaggaaaccaaccaggcgggtggatggcgaaggagaaacacctagagatctcacaacaagactctcgcccaattctcaaaaagagtgtctcctcaccattcatgaacaccttcacaaaaatgtactccctctcggaagtaaagaaacacaacagccccgactctgcatggatcattgtccacggccatgtttacgactgcacccgcttcctcaaggaccaccctggcggtgctgacagcatcctcatcaacgccggcactgactgcaccgaggagtttgaggccatccactctgacaaggccaagaaaatgctcgaagactaccgcgtcggcgagctcatcaccaccggctacacctcagactcttcttcccccaataactccctccatggaaactctgaattcaaacacttagcccctatcaaagaaatcacaacaatgtcactaccaccactaccacgccgcaaggtggctctaataccacgtgagaaaattccatgcaaactcatctccagaacctcaatctcacacgatgttagagtgttccgtttcgctctaccctcagaagatcaacagttagggctacccgtagggaagcacattttcttatgtgccaccgttgacgggaagctatgcatgcgagcctatacgccaactagcggagttgatgaagttggttattttgaactcgtggttaaagtttacttcaaaggagtccacccaaagtttccaaatggcggtgccatgtctcaacatttggattctcttccaattgggtctgatttggacgtgaagggtccacttggtcacatagagtacactggaagaggaaactttttggttcacgggaagcatagatttgccaagaagctagccatgttagctggtgggactggaatcacaccgatttaccaagttgcacaagcgattctgaaggacccagaggatcacactaagatgtatgtggtctatgcaaacaggaccgaggatgatattcttttaagggaggagctcgacacatgggcgaagaagtacgaagaccggttcaaggtgtggtatgtggtggaaaccgccaaggaagggtgggggtacagtgtgggattcgtcacggagggtgttatgagggagcatcttccggaggctggggatgatgcattggcattggcttgtgggccaccaccgatgattcagtttgccgtaaatccgaatttggagaagatgggatatgatgtcaagaatgatttgctagtgttttga

SEQ ID NO: 5129 - protein, 900 aa, Lotus japonicus
MAASVDNRQYSTLNGVVRSFTPNNTYLHDPKPSFPAVNLDLDASSSDDDDEKDDASILKDLIRKGNAEIESSVLDPRDQGTADNWISRNSSMVRLTGKHPFNSEPPLPRLMHHGFITPVPLHYVRNHGPVPKARWDDWTVEVTGLVKTPTRFSMDRLVRDFPSRELPVTLVCAGNRRKEQNMVRQSIGFNWGSAGVSTSVWRGVSLRHILRRCRIQTRSRGALHVCFEGDEDLPGGGGSKYSTSIRREVAMDPSRDVILAYMQNGEVLAPDHGFPVRVIIPGFIGGRMVKWLKRIVVTEEECDGHYHYKDNRVLPSHVDAELANEEGWWYKPEYIINELNINSVITTPCHDEILPINAWTTQRPYTLRGYSYSGGGRKVTRVEVTLDGGETWFVCALDQQEKPNKYGKYWCWCFWSLEVEVLDLLGTKEIAVRAWDEALNTQPENLIWNVMGMMNNCWFRVKTNVCKPHKGEIGIVFEHPTQPGNQPGGWMAKEKHLEISQQDSRPILKKSVSSPFMNTFTKMYSLSEVKKHNSPDSAWIIVHGHVYDCTRFLKDHPGGADSILINAGTDCTEEFEAIHSDKAKKMLEDYRVGELITTGYTSDSSSPNNSLHGNSEFKHLAPIKEITTMSLPPLPRRKVALIPREKIPCKLISRTSISHDVRVFRFALPSEDQQLGLPVGKHIFLCATVDGKLCMRAYTPTSGVDEVGYFELVVKVYFKGVHPKFPNGGAMSQHLDSLPIGSDLDVKGPLGHIEYTGRGNFLVHGKHRFAKKLAMLAGGTGITPIYQVAQAILKDPEDHTKMYVVYANRTEDDILLREELDTWAKKYEDRFKVWYVVETAKEGWGYSVGFVTEGVMREHLPEAGDDALALACGPPPMIQFAVNPNLEKMGYDVKNDLLVF

SEQ ID NO: 5130 - DNA, 486 bp, Lotus tetragonolobus
  CDS (1)..(486)
atgaagggtccattgggccacatcgagtacactggaaaaggcaacttcatagcccacggagagcccaaattcgcgagacggcttgccatgctggctggtgggaccgggatcacgccgatttaccaagtgatacaagcggttctgaaggacccggatgaccgaaccgaaatgttttttgcagtctattcaaacaaaacagagagtgatatattgctgagggaagagttggacgcgtgggcgaagaaacacagtgaccggttcaaggtgtggtacgttgtggacaaagccgggaatgactgggcattcagtacgggccgcgttaatgagagtatcatgagggtgcaccttcctggaccgtctgatgccttggccttggcgtgtgggccaccccccattaattcagcttacggttggcagcctagtttggagaacattgggtacaaaaaggatgatgtgcctgtgttcatggccactacgcagagttag

SEQ ID NO: 5131 - protein, 161 aa, Lotus tetragonolobus
MKGPLGHIEYTGKGNFIAHGEPKFARRLAMLAGGTGITPIYQVIQAVLKDPDDRTEMFFAVYSNKTESDILLREELDAWAKKHSDRFKVWYVVDKAGNDWAFSTGRVNESIMRVHLPGPSDALALACGPPPINSAYGWQPSLENIGYKKDDVPVFMATTQS

SEQ ID NO: 5132 - DNA, 2736 bp, Lycopersicon esculentum
  CDS (1)..(2736)
atggcggcatctgtggaaaacagacagtatactcaccttgaaccgggtttatcaggcgtaggccgtactttcaagcctaggcctgattccccggttcgtggttgcaacttccctccttcatccaaccatgaactccctttccaaaaaaaacaaaatcccccaatttaccttgattattcgtctagtgaagacgaggatgacgatgacgaaaaaaatgaatacgttcaaatgatcaaaaaaggtaaaactgaattagaaccatcaattcatgatactagagatgaaggtaccgctgataattggatcgaacgaaacttttccttaatacgtctcaccggtaaacacccattcaactccgaaccacctttatctcgccttatgcatcacgggttcatcactcccgtaccacttcattacgtccgtaaccacggcccagtccccaaagcatcctggtctgactggactgtggaagttacagggctggtaaaacgaccaatgaaattcacaatggatcaattagttaacgaattcccttcacgtgaattccctgtcacacttgtgtgcgcaggcaatcgtcgtaaagagcagaatatggtgaagcagacaattggtttcaattggggtgctgctgccgtttcaaccaccgtatggcgcggagtacctctccgcgccctgttgaaacggtgcggtgttcagagtaagaaaaaaggcgcgcttaatgtctgtttcgaaggttccgatgttttgcctggaggtggtggttcaaagtacggaacgagtataaagaaggaattcgccatggatccatctcgtgatattattgtagcttacatgcaaaacggagaaatgttgtcaccggatcatggttttccggtaaggatgattatccccggattcatcggtggaagaatggtgaaatggttaaagaggattgtggtcactacacaagaatcggaaagctattatcattacaaggacaatagagtcctccctccacacgttgacgcggaacttgccaacgcggaagcttggtggtacaaaccagagtacatcatcaatgagctcaacataaactctgtcattacaactccgtgccatgaagaaattttgcccatcaatgcgtggactactcagagaccttacacgttgagaggctatgcttattctggtggaggtaaaaaggtaactcgagtggaagtgactttggatggaggagagacatggagtgtgtgtacacttgatcacccagagaagccaacaaagtatggcaagtactggtgttggtgcttttggtcactcgaggttgaggtgcttgacttgcttagtgctaaagaaattgctgtacgagctaccgatgagaccctcaacactcaacccgagaagcttatttggaacgtcatgggaatgatgaacaattgttggtttcgagtgaagatgaatgtgtgcaaacctcacaagggagagattggtatagtgtttgagcatccgactcaacctggaaatcaatcgggtggatggatggcaaaggagagacacttggagatatcagcagtggctcctccaacactaaagaagagtatatcaactcctttcatgaacacagcttcgaagatgtattccatgtccgaggtgaggaaacacaactcttcagactctgcttggatcatagtccatggacatatctacgatgcctcacgtttcttgaaagaccatcccggtggtgttgacagcattctgatcaatgctggaactgattgtactgaggaatttgatgcaattcattctgataaggctaagaagctattggaggactttaggattggtgaactcataactactggttacacgtctgattcgtctccaaacagttctgtccatggatcctcttcgatcagtagcttcttagcacctattaaggagcttgttcaaacaccaacaaggagtgtagctctcatcccaagggaaaaaatcccttgcaaactcgtcgacaagcaatccatctcccatgatgttaggaaattcaaatttgcattaccctctgaggatcaagtcttagggttacctgttggcaaacacatattcctctgtgccacagttgatgacaaactctgtatgcgtgcctacacgcctactagcacagtcgatgaagtagggttcttcgagttggttgtcaagatctacttcaaaggtgttcaccctaaattccctaatggaggtcaaatgtcacaacatcttgattctctcccaataggtgcattccttgacgttaaaggtccattaggtcacattgaataccaaggtaagggtaatttcttagtccatggtaaacaaaagtttgccaagaagttagctatgatagcgggtggaacaggtataactccagtatatcaagtaatgcaatcaatattgaaagatcctgaagacgatacagagatgtatgtggtgtatgcaaacagaacggaggatgatattttgctcaaagacgaacttgatgcatgggcagagcaagttccaaatagggttaaagtatggtatgtcgttcaagaatccattacacaaggatggaagtatagtacaggattcgttacagaatcgattcttagagaacatatacctgaaccatctcatacaacattggcattagcatgtggaccacctccaatgatacaatttgctattaatccaaacttggagaaaatgggatatgacattaaggaggaactattggtgttctaa

SEQ ID NO: 5133 - protein, 911 aa, Lycopersicon esculentum
MAASVENRQYTHLEPGLSGVGRTFKPRPDSPVRGCNFPPSSNHELPFQKKQNPPIYLDYSSSEDEDDDDEKNEYVQMIKKGKTELEPSIHDTRDEGTADNWIERNFSLIRLTGKHPFNSEPPLSRLMHHGFITPVPLHYVRNHGPVPKASWSDWTVEVTGLVKRPMKFTMDQLVNEFPSREFPVTLVCAGNRRKEQNMVKQTIGFNWGAAAVSTTVWRGVPLRALLKRCGVQSKKKGALNVCFEGSDVLPGGGGSKYGTSIKKEFAMDPSRDIIVAYMQNGEMLSPDHGFPVRMIIPGFIGGRMVKWLKRIVVTTQESESYYHYKDNRVLPPHVDAELANAEAWWYKPEYIINELNINSVITTPCHEEILPINAWTTQRPYTLRGYAYSGGGKKVTRVEVTLDGGETWSVCTLDHPEKPTKYGKYWCWCFWSLEVEVLDLLSAKEIAVRATDETLNTQPEKLIWNVMGMMNNCWFRVKMNVCKPHKGEIGIVFEHPTQPGNQSGGWMAKERHLEISAVAPPTLKKSISTPFMNTASKMYSMSEVRKHNSSDSAWIIVHGHIYDASRFLKDHPGGVDSILINAGTDCTEEFDAIHSDKAKKLLEDFRIGELITTGYTSDSSPNSSVHGSSSISSFLAPIKELVQTPTRSVALIPREKIPCKLVDKQSISHDVRKFKFALPSEDQVLGLPVGKHIFLCATVDDKLCMRAYTPTSTVDEVGFFELVVKIYFKGVHPKFPNGGQMSQHLDSLPIGAFLDVKGPLGHIEYQGKGNFLVHGKQKFAKKLAMIAGGTGITPVYQVMQSILKDPEDDTEMYVVYANRTEDDILLKDELDAWAEQVPNRVKVWYVVQESITQGWKYSTGFVTESILREHIPEPSHTTLALACGPPPMIQFAINPNLEKMGYDIKEELLVF

SEQ ID NO: 5134 - DNA, 2730 bp, Petunia hybrida
  CDS (1)..(2730)
atggcggcatcagtcgaaaaccgtcagtttagtcacctagaaccgggtttgtcaggtgtggtccggtctttcaagccccgatctgattccccggttcgtggctgcaattttcctctcaacaatgaactcactaatttccaaaagaaaccaaatactaccatttaccttgattgctcgtcaagcgaagacgacgatgatgatgacgacaaaaatgaataccttcaaatgataagaaaagggaagttagaggtagaaccatctgttcatgacattagggacgaaggaactgctgataattggattgaaaggaataattccatgattcgtcttactgggaaacatccatttaactccgagccacccttggctagactcatgcaccatggttttatcactccggtcccacttcattacgttcgtaatcatggaccggttcccaagggcatgtgggacgactggaccgtcgaagtcacgggtctagtgaagcgcccaatgaaattcacaatggaacagttggttaacgagttcccatctagagaattgcccgtgactcttgtatgtgccggtaatcggaggaaagagcagaacatggtgaaacaaaccattggtttcaactggggtgctgccgctgtttcaactactgtatggcgcggggttcccctccgtgccatcttgaaacgctgcggtatctatagccggacaaaaggggcactcaacatttgttttgaaggtgccgatgtcttgccgggaggtggtggctcaaaatatggtaccagcattaagaaggaattcgccatggatccgtcacgagatatcatcatagcttacatgcagaatggagaaaagttgacaccggaccatggatttccgttacggatgattattccgggattcattggtggcaggatggtgaaatggcttaagaggattatagtcactactcaagaatcagaaagctattatcattacaaggacaatagggttcttcccccccatgttgatgctgaacttgctaacgctgaagcatggtggtacaagccagagtacatcatcaatgagctgaacatcaactctgtgattacgacgccgtgtcatgaagaaattttgccaatcaactcgtggacgactcagcgaccctacacgttgagaggatattcttattctggtggagggaaaaaagtaacgcgagtagaagttaccatggatggaggagagacatggaatgtttgcaccgtagatcacccagaaaagcctaacaagtatggaaagtactggtgctggtgcttttggtcactggaggttgaagtgctagacttgcttagtgccaaggaaattgctgttcgagcttgggatgaaaccctcaatactcaaccggagaagcttatctggaatgtcatgggaatgatgaacaactgctggttccgagtcaaaaccaatgtatgcaagcctcacaaaggagagattggtatagtctttgagcacccaacccaacctggaaacctatctggtgggtggatggcaaaggaaaggcatttggagatatcggcagaagccccaccaactctaaagaagagtatctcaactccattcatgaacacagcttcaaagatgtactccatgtctgaggtcaagaagcataactctgctgattctgcttggataattgtccatggccatgtctacgacgcgacacgtttcttgaaagaccaccctggtgggattgatagcatcctcattaatgcaggcactgattgcactgaggaatttgacgcaattcactctgataaggctaagaaactcttggaggactttaggattggtgaactcataactactggttacacctctgattcctctcctaacaactctgtccatggatcttcttccttcagtggatttttagcacccattaaggaacttgctccagctgtgaggagtgtggccctcattccaagggagaaaatcccatgcaaactcgtcgacaagaaatccatctcccatgatgttaggaaatttcgatttgcattaccatctgaggatcaagtattgggattgcccgttggtaagcacatcttcctctgtgcaattattgatgataagctttgcatgcgtgcctacacgcctactagcaccgttgatgaggtgggatactttgagttggttgtcaaaatatactttaaaggaattgtccctaaattccctaacggagggcaaatgtcacagtatctggattctctcccattgggagcttttgtcgacgtgaaaggtccattaggtcacattgaataccaaggaaggggcaacttcttagtacatggcaaacgcaagtttgccaagaagttggccatgctagctggtggaacagggataacccccgtttatcaagtaatgcaggcaattctgaaagatccagaagatgagacagaaatgcatgtagtgtatgcaaatagaacagaagatgatattctacttaaggatgagcttgattcatgggctgtcaaacttccggaaagggttaaggtttggtatgtagttcaagattctataaaagaaggatggaagtacagcaccggtttcattacagaagccgttctgagagaacatatccctttaccatctcagacaacactagctttagcatgtggaccacctcccatgattcaatttgctgttaatccaaacttggagaagatgggttacgacattaaggattccttattggtgttctaa

SEQ ID NO: 5135 - protein, 909 aa, Petunia hybrida
MAASVENRQFSHLEPGLSGVVRSFKPRSDSPVRGCNFPLNNELTNFQKKPNTTIYLDCSSSEDDDDDDDKNEYLQMIRKGKLEVEPSVHDIRDEGTADNWIERNNSMIRLTGKHPFNSEPPLARLMHHGFITPVPLHYVRNHGPVPKGMWDDWTVEVTGLVKRPMKFTMEQLVNEFPSRELPVTLVCAGNRRKEQNMVKQTIGFNWGAAAVSTTVWRGVPLRAILKRCGIYSRTKGALNICFEGADVLPGGGGSKYGTSIKKEFAMDPSRDIIIAYMQNGEKLTPDHGFPLRMIIPGFIGGRMVKWLKRIIVTTQESESYYHYKDNRVLPPHVDAELANAEAWWYKPEYIINELNINSVITTPCHEEILPINSWTTQRPYTLRGYSYSGGGKKVTRVEVTMDGGETWNVCTVDHPEKPNKYGKYWCWCFWSLEVEVLDLLSAKEIAVRAWDETLNTQPEKLIWNVMGMMNNCWFRVKTNVCKPHKGEIGIVFEHPTQPGNLSGGWMAKERHLEISAEAPPTLKKSISTPFMNTASKMYSMSEVKKHNSADSAWIIVHGHVYDATRFLKDHPGGIDSILINAGTDCTEEFDAIHSDKAKKLLEDFRIGELITTGYTSDSSPNNSVHGSSSFSGFLAPIKELAPAVRSVALIPREKIPCKLVDKKSISHDVRKFRFALPSEDQVLGLPVGKHIFLCAIIDDKLCMRAYTPTSTVDEVGYFELVVKIYFKGIVPKFPNGGQMSQYLDSLPLGAFVDVKGPLGHIEYQGRGNFLVHGKRKFAKKLAMLAGGTGITPVYQVMQAILKDPEDETEMHVVYANRTEDDILLKDELDSWAVKLPERVKVWYVVQDSIKEGWKYSTGFITEAVLREHIPLPSQTTLALACGPPPMIQFAVNPNLEKMGYDIKDSLLVF

SEQ ID NO: 5136 - DNA, 2709 bp, Phytophthora infestans
  CDS (1)..(2709)
atgacgcgtttgagatctgccgccagcacaatcaccaaccggtcgacgccggcgttggcgctaacggcatcccacgcgggctcgcatcccgccgtcatcgtgccgatccaaccgctcttgctcacgctcgagcgccgcccatcatgcccgcaccgtgtgagttatcccgaaatcgaggcataccgcggcatcagtagctcactgcgttctcacaatgcgattgtccgtgcaagtgacatcatggcgcaaattgaccccagagacgttggtacgcccgatgagtgggtaccccggcaccctgagctgatccggctcacgggacgacacccgttcaatagtgagcccccgctgaagtacgcgagcacctttatcacacccatggcattgcactacgttcgcaaccacggccccgtgccgagactcgagtgggatacacatacgttctcgatcgacggactggtgaagaagccgcgtacgttcggcatgaacgagctggtcaccacttttgaacaggagaccgtgacgttcccggtgttgctggtatgtgccggtaatcgccgtaaagaacagaatatgatcaagaagactatcggctttagttggggcgcggccggatgctccaccgctgagtggacaggagtcccgcttcacgtactgctgacggcttgcggtgttgatcgagagaaggcacagtgggtgtggtttgagggcatcgaggacttgccacacgacaagtacggcacgtgcattcgtgccagtacggagttggacccggagtgcgatgttctggtggcgtggaaagccaacggtgagctactcggtcctgatcatgggttccctgtgcgccttattgtcccaggtcacatcggtggacgcatggtcaagtggctcgaacggatccacgtgagcgatcacgagtcctccaatcaccatcacattatggacaatcgcgtactaccgtcgcacgtcactgccgagacggcaacggcggaaggttggtggtccaagtcgccgtacgcgatcatggagcttaacgtcaatgccgtggtcattttaccgaaccatgacgacctgttggctctcggtgaagacaccacgtttaacgacatcgagacgtacacgatcaaggggtacgcgtattcaggcggtggtcggcgagttattcgcgtagaggtgacgctagacgatggcgcatcgtggcagctagctcgcatcatttaccatgagaggccaagcaagtacggcaaaatgtggtgctgggtgcactacgagttggccgctccgatgagcagtctgctttgtgctcgagaagtgtgcgttcgagcttgggacagctcgatgaacctcatgccagcgttccctacatggaatgttatgggcatgatgaacaacccttggtaccgcgtcaagatccaccacgaacaagacacgaactcgctacggttcgagcatccgactcaagcaggaaaccagaaaggtggctggatgaccaaggaacggatcatgactaacgacgtcgactcgattaagatgctgcaagtggagccacttgacacgagcagtgctgcaacaccgaagcctggtctgactgcagacgaattgagtgagctgcctctgatttttgcagacgaagttgcaaaacacaactcgaagaaaagctgctggtttatttgtcgcgacctggtgtacgacgcaacaccgttcctggacgaacaccctggtggagccacaagtatcttgctgtgtggtggcacagactgtacggacgaattcgagagcatccactctaccaaagcctggcaaatgctgaagaaatactgtatcggacgttgttcaagcacagaggacgacactggaaccagcgatacctcgtcggaccatgaagagacggacgtggcgctcaaaggccgtaccaaggtgcctatcgtactgatctcaagagaggtggtcagccacgatgcacgcatctttaaatttgctctgcctgccaaggatctgagactcggactacctattggcaaccacgttttcttgtacgcgaagatcaacggcaagaccgccgtgcgtgcgtacacaccgatatcgtccgagaacgacgaagaccgaggattcgtgtccttcctcatcaaagtctactttgcaggcgacaaccctgtgcatccagaaggaggactcttttcacagtatctcgatggcttgcatcttggtcaacagattcagatcaagggaccgctgggccacttcacgtactacggagacggcaatttctccctcgagacgaccaattttcacgcctacaagttcgggttcgtcgccggagggacaggtatcacgcccgtctaccaggtcatgcgcgccattcttgaagacgcaaaggaccagaccaaagttgcgctcatctattgcgtgcgctcgcagcgtgacctgctgctccgaaaggaacttgaaaccctacaaaagctgcgaccgggtcagtgccggatcttctacactttgtcagacatggagctgcttgataggaacgaccctattgttcgagggtgggcgtacggtaagagtcgacttaactttgccatggtgaagaacatcatcggctcggacgccgaggacgtttgcatgtgcggccccgagggtatgattgagtacgcctgcaagccagcgctacttaagctgaactacgacctcaaaacccagaccaccgtgttttaa

SEQ ID NO: 5137 - protein, 902 aa, Phytophthora infestans [sequence omitted]

SEQ ID NO: 5138 - DNA, 2580 bp, Pichia angusta
  CDS (1)..(2580)
atggattctattgtcactgaggtaacctatggtctggagatcaagaaaatcaaagatatcacggagctaccttttccagtcaggcaagactctcctcttaccgaggtgcttccaacagatctgaagaccaaagataattttgtcgctagagatcctgaccttcttagactcactggttcacacccattcaattctgagccgccactgacaaagctttatgactcggggtttctcactccagtgagtcttcactttgtgagaaaccacggccccgttccttacgttcctgatgaaaatattttagactgggaagtttcaattgaagggatggttgaaacgccttataaaatcaaattgtcagacataatggagcagtttgatatctattcaacccccgttactatggtctgcgctggaaacagaagaaaggagcagaatatggtaaagaagggagccggtttcaattggggagcagctggaacatctacttctctttggacaggatgcatgcttggagatgtaataggcaaggctagaccatcaaagagagcaagattcgtatggatggagggtgcagataatccggcaaacggcgcataccgcacctgtatccgcttaagctggtgtatggaccctgaacggtgcatcatgatcgcataccagcagaacggcgagtggttgcatcctgaccatggaaagccccttcgagtagtaatccccggtgttattggtggacgatcagtcaaatggctaaagaaactagtagtgagcgatcggccgtctgaaaattggtatcattattttgataatcgggttcttccaaccatggtgacgccagagatggctaaaagtgacgacaggtggtggaaagacgagcgatatgccatatatgatctgaacttgcaaacgatcatttgcaagcccgaaaatcagcaggttatcaagatttcagaggacgagtacgaaattgcaggttttggctacaacggaggtggagtcagaataggccggattgaggtcagtcttgacaaagggaagagttggaaactggcagatatagactatccggaagacagatatagggaagcaggttacttcagattgtttggcggacttgtgaatgtttgcgacagaatgagctgcctgtgctggtgtttctggaagctcaaggttcctctttctgaattagcaaggtcaaaagatattctcattcgtggcatggatgagcgtatgatggttcagccgcgcacgatgtactggaacgtaacgtccatgctgaacaactggtggtatcgagtcgccattatccgcgagggtgagagtcttcgatttgagcatcccgtggtggccaacaagcctggcggttggatggatagggtcaaggcagagggtggagatattctagataacaattggggagaggtggacgacacggtcaagcaggctgaaaggaggccgcatattgatgaggatctcgagatgatgtgcaaccgggagaaaatggacgtcgttatcaaatattcagagtttgaagcacacaaggacagcgagacagagccatggtttgctgtcaaaggccaagtgttcgatggtagctcgtatctggaagaccatccaggaggggcccagtcgatcttgatggtgagcggcgaagacgcaaccgacgacttcattgcaattcactcatcttttgctaaaaagctgctcccttccatgcacctgggaagactcgaagaggtcagttcagttacaaaagtgaagtctgtagagcaaaatgtgaagcgagaagttttgctcgatccgcgaaaatggcacaagataacgcttgcagaaaaagaggttatctcttccgactctagaatattcaagttcgacctggagcattcagaacagctttctggtctgccaacgggtaaacacctgtttctgaggctaaaagattcatctggcaagtatgtgatgagggcatacacccctaaatcgagcaattctttgcggggtcgtctagagatattgataaaggtttatttcccaaatagggaataccccaacggcggaattatgacaaatcttatcgaaaacctccaagtgggaaaccagatcgaggtcaaaggacctgtcggcgagtttgagtatgtcaagtgcgggcactgcagtttcaataacaagccttatcaaatgaagcattttgttatgatctcgggaggatcgggcatcaccccaacttaccaggttctgcaagctattttcagcgatcccgaagatagaacaagcgttcagttattttttggaaataaaaaagttgacgatatcctgcttcgagaagagcttgaccacatacaggaaaaatatccagaacaattcaaagttgattactcgctgtcggatctggatcatctaccggagaattggagcggagtgagaggcaggttaacattcgatattctagacacctatgttcgggggaaaaaaatgggagagtatatgctactggtatgtggaccgccaggaatgaacggtgtggtcgaaaactggtgcaatgcgcgcaagttggataaacagtatgtagtgtacttctga

SEQ ID NO: 5139 - protein, 859 aa, Pichia angusta
MDSIVTEVTYGLEIKKIKDITELPFPVRQDSPLTEVLPTDLKTKDNFVARDPDLLRLTGSHPFNSEPPLTKLYDSGFLTPVSLHFVRNHGPVPYVPDENILDWEVSIEGMVETPYKIKLSDIMEQFDIYSTPVTMVCAGNRRKEQNMVKKGAGFNWGAAGTSTSLWTGCMLGDVIGKARPSKRARFVWMEGADNPANGAYRTCIRLSWCMDPERCIMIAYQQNGEWLHPDHGKPLRVVIPGVIGGRSVKWLKKLVVSDRPSENWYHYFDNRVLPTMVTPEMAKSDDRWWKDERYAIYDLNLQTIICKPENQQVIKISEDEYEIAGFGYNGGGVRIGRIEVSLDKGKSWKLADIDYPEDRYREAGYFRLFGGLVNVCDRMSCLCWCFWKLKVPLSELARSKDILIRGMDERMMVQPRTMYWNVTSMLNNWWYRVAIIREGESLRFEHPVVANKPGGWMDRVKAEGGDILDNNWGEVDDTVKQAERRPHIDEDLEMMCNREKMDVVIKYSEFEAHKDSETEPWFAVKGQVFDGSSYLEDHPGGAQSILMVSGEDATDDFIAIHSSFAKKLLPSMHLGRLEEVSSVTKVKSVEQNVKREVLLDPRKWHKITLAEKEVISSDSRIFKFDLEHSEQLSGLPTGKHLFLRLKDSSGKYVMRAYTPKSSNSLRGRLEILIKVYFPNREYPNGGIMTNLIENLQVGNQIEVKGPVGEFEYVKCGHCSFNNKPYQMKHFVMISGGSGITPTYQVLQAIFSDPEDRTSVQLFFGNKKVDDILLREELDHIQEKYPEQFKVDYSLSDLDHLPENWSGVRGRLTFDILDTYVRGKKMGEYMLLVCGPPGMNGVVENWCNARKLDKQYVVYF

SEQ ID NO: 5140 - DNA, 2595 bp, Volvox carteri
  CDS (1)..(2595)
atgactatcccagagctacctctcggcggcatcgtttcccaggctgtggaacttggcgctccctacgagccgcctctaacgcccgaccacccggaatggaaagtgcacgttcccgcggccgcggtggacaagaaggatcaagatacgcctgataactgggttcgacgtgacccgcgaattctgcgcctcaccggtcggcacccgcttaactgcgagccaccgatggacgtgctcatggagtacggattcataactccgcctgccgtgcatttcgttcgcaaccatggtgcggccccacgcattccctgggccgagcatcgtatcgaaatcaacggcctcgtggacaaaccgctgtttttgacgatggacgagctagtggcgttgccatccatcacttttccctgcactctcgtatgcgccgggaaccgtcgcaaggaggagaatatgttaaaaaagtctattggctttaactggggcccttgcgccacgagcactacctactggactggagtgaggctccgagacctgctgctgctggcgggaattaagtctccagagcagggagccaacttcgtgtgcttccggggccctaagggcgaactgcctcgtggttcggacgggtcgtacggcacgtccctgacgtacgccaaagccatggatccatcctctgacgtcattattgcgtacaagcagaaccacaggtggctgactcctgaccatggcttcccggtgcgtatgattattccgggcttcattggcgggcgcatggtgaagtggctgtccgagattacggtcaccgaggttgagtcccagaacttttaccacttcatggacaaccgcgtgctgccctcgcacgtcgatgaagcgctcgccaaggaggaaggttggtggtacaagccggagttcattatcaacgacttgaacataaactcggcagtggcgcggccgtggcatgacgaagttgtccgactggacgcgaacaagccgtacaccatgcgcggatacgcgtacgctggcggcggccggaaaatcattcggtgcgaggtgtcgctagacgatggcaagacgtggcggctgggcgacatccagcgcttcgagaaaccgaatgaatacggcaagtactggtgctgggtgcattggagcctggacgttatgacatttgactttttgaatgccaaggaggtcctgctccgcgcctgggatgagaccatgaacacgcagcccgcgatcatcacgtggaacgtcatgggcatgatgaacaactgctactacaggattaagatccatcctcaggtggattctgatggtgtcatggggctccgtttccagcaccccgcgccagtggagctaggagagcgcggtaacatgggttggcgtgaggaggacaacctcgtggcgcaggcgctggcggcggtgaaggagggggccaccgctgctgctgcgccagcggcgccgccgccggtggtggcagctgctgcgaacggcggtccccgtcaatacacgatggaagaggtggcggcgcataacacagaggagagctgctggttcgtgcacggaggaaaggtgtacgacgccacgccgtacttggacgagcaccccggcggcgccgagtccatcctgattgtcgccggcgccgacgccaccgacgagttcaactctattcactcttccaaggccaaggccatgttggcacagtactacattggcgacttggtggcgtcgaaaccagccgctgcaggcgccacagtcccggagccccagcccgttgcaagcacctcgagccccgcagtcgacccgctggtggtcctcaaccctcgccagaaggtcaagctgccgctgattgagcgcatcgagttgaaccgcaatacccgcatcttccgcttcggactgccgagtccgcagcacaggatagggctgcccgtgggcaagcacgtcttcacgtacgccaccatcaatggggagaacgtaatgcgcgcctacacgcccatcagcggcgatgaggagctgggtcggttggacatgctcatcaaggtctactttgccaacgagcatccagccttccctgacggcggcaagatgtcgcaacacttcgagtccttgcgcatcggcgacacggtggagttcaagggtcctctgggccattttgtgtacgatggtcgcgggtcgtacacgctgaacggcaagctgcacaagcacgcgacccacatgtcatttgtcgctggcggtacgggcatcacgccctgctacgcggttatcaaggctgcgctccgagacccggaggataagacgcagattagcctggtgtttgcaaacaacacagaagaagatattttgctgcgagaggagcttgatgagctcgcaaacaaccacccggaccggttccacctatggcacacggtgtctcagaccaacagctcggactggaagttctcgacagggcgcgtgacgttggagatgtttaagcagcacctctttgcgtgttccggaccggaatgcctggcgctcatgtgcggaccgcccgccatgttggagcactgctgcgtgcccttcctggagtcaatgggatacagcaaggagcagatgatccatttttag

SEQ ID NO: 5141 - protein, 864 aa, Volvox carteri
MTIPELPLGGIVSQAVELGAPYEPPLTPDHPEWKVHVPAAAVDKKDQDTPDNWVRRDPRILRLTGRHPLNCEPPMDVLMEYGFITPPAVHFVRNHGAAPRIPWAEHRIEINGLVDKPLFLTMDELVALPSITFPCTLVCAGNRRKEENMLKKSIGFNWGPCATSTTYWTGVRLRDLLLLAGIKSPEQGANFVCFRGPKGELPRGSDGSYGTSLTYAKAMDPSSDVIIAYKQNHRWLTPDHGFPVRMIIPGFIGGRMVKWLSEITVTEVESQNFYHFMDNRVLPSHVDEALAKEEGWWYKPEFIINDLNINSAVARPWHDEVVRLDANKPYTMRGYAYAGGGRKIIRCEVSLDDGKTWRLGDIQRFEKPNEYGKYWCWVHWSLDVMTFDFLNAKEVLLRAWDETMNTQPAIITWNVMGMMNNCYYRIKIHPQVDSDGVMGLRFQHPAPVELGERGNMGWREEDNLVAQALAAVKEGATAAAAPAAPPPVVAAAANGGPRQYTMEEVAAHNTEESCWFVHGGKVYDATPYLDEHPGGAESILIVAGADATDEFNSIHSSKAKAMLAQYYIGDLVASKPAAAGATVPEPQPVASTSSPAVDPLVVLNPRQKVKLPLIERIELNRNTRIFRFGLPSPQHRIGLPVGKHVFTYATINGENVMRAYTPISGDEELGRLDMLIKVYFANEHPAFPDGGKMSQHFESLRIGDTVEFKGPLGHFVYDGRGSYTLNGKLHKHATHMSFVAGGTGITPCYAVIKAALRDPEDKTQISLVFANNTEEDILLREELDELANNHPDRFHLWHTVSQTNSSDWKFSTGRVTLEMFKQHLFACSGPECLALMCGPPAMLEHCCVPFLESMGYSKEQMIHF

SEQ ID NO: 5142 - DNA, 939 bp, Saccharomyces cerevisiae
  CDS (1)..(939)
atgtcgatagtagagacatgcatatcttttgtttcgacaaatccgttttatccattttgtactggattgcttctgaattgtgtggttacacctctttacttttggaaaacgcaaaatggtagaatcgtggtcgtttcattgctgcaattcgtagtactttatgccacagcgtttatttcgattggaactgataaatctctttacagaaataaatgggtcgcgctaccgctatccaagaagacccgcatttctcgtaatactagtctgtactgcttcaagttaaagtacccatttgaaagattgcatattcccatgggataccacctggcagtaagggttacaataaatggtgagcgattagtgaggtactatacgccagtaaatgttcctaatacggagggtcacttggaattagtagtcaagacgtataaacatggtgtcgtttctaagtattttgataaattaaaaattcgccagtatgttgaatttaaagggccgttaggtgagctggaatatgatcaggacaccgcaacagagttgggtataatcgcaggggggtctggtataacccctgtattgcaagtgctgcaagaaatcataccctctccagaagacctaacacacatttctttgatatacgcaaacgaaacagaggatgacattctcatgaaatcgcaactagaccacatggctaaggagtacccgcattttaaagttcattatgtaattcataagccaaacggtaaatggaacggtgatgttgggtacgtaactctagaggaaatgaaaagatacctacctaaacaagcggaggaccatcgtttattgatttgcggaccacctaaaatgaatgaaatggttttgaattatgcaaaggagttggggtggagtaatgggtttcacaaaggtaatggaaccgataaagtttttgttttttaa

SEQ ID NO: 5143 - protein, 312 aa, Saccharomyces cerevisiae
MSIVETCISFVSTNPFYPFCTGLLLNCVVTPLYFWKTQNGRIVVVSLLQFVVLYATAFISIGTDKSLYRNKWVALPLSKKTRISRNTSLYCFKLKYPFERLHIPMGYHLAVRVTINGERLVRYYTPVNVPNTEGHLELVVKTYKHGVVSKYFDKLKIRQYVEFKGPLGELEYDQDTATELGIIAGGSGITPVLQVLQEIIPSPEDLTHISLIYANETEDDILMKSQLDHMAKEYPHFKVHYVIHKPNGKWNGDVGYVTLEEMKRYLPKQAEDHRLLICGPPKMNEMVLNYAKELGWSNGFHKGNGTDKVFVF

SEQ ID NO: 5144 - DNA, 939 bp, Saccharomyces cerevisiae
  CDS (1)..(939)
atgtcaaaagaagacatagaaggaactaacattctagacgaacctgtccacgggatctatattcctgccgcgctattcgttgttggtgttgcaatcaccacgtatatgtctggtgaattgaaaatcctgtggagtttacccattctcttcatgatcatcttcgtcagagcatactctgcctacaaaagaagaagatcactgtatccagataggtggacttcgttagaattggaagatcaaaccataatttccaagaataccgccctgtatcgttttaagttgaagacaagactggaaagcttggacattcccgctggtcatcatgttgctgtacgcgttccaattgacggcaaacaagaggtcagatactataatccgatcagttctaaactagaaagtggatacttggatttggtggtgaaagcatacgttgatggtaaagtctccaaatatttcgctggcttaaattctggtgacaccgtggatttcaaggggccaataggtactttgaactacgaaccaaattcctccaagcatttaggtatcgtagccggtggttctggtatcacgccagtcctacagatcttgaatgaaatcatcaccgttcctgaagatttgacgaaagtctccctgctatatgccaatgagactgaaaatgacattctattgaaggacgaactggatgagatggccgaaaaatacccacatttccaggtccattacgtggtacactatccatccgacagatggaccggagatgtcggctacatcaccaaggaccagatgaacaggtatctgccggaatattcggaggataacagactcttgatctgtggacctgatggaatgaacaacttggcccttcaatacgctaaagaactgggctggaaggtcaattcaacgagaagttctggcgacgatcaagtcttcgtcttttaa

SEQ ID NO: 5145 - protein, 312 aa, Saccharomyces cerevisiae
MSKEDIEGTNILDEPVHGIYIPAALFVVGVAITTYMSGELKILWSLPILFMIIFVRAYSAYKRRRSLYPDRWTSLELEDQTIISKNTALYRFKLKTRLESLDIPAGHHVAVRVPIDGKQEVRYYNPISSKLESGYLDLVVKAYVDGKVSKYFAGLNSGDTVDFKGPIGTLNYEPNSSKHLGIVAGGSGITPVLQILNEIITVPEDLTKVSLLYANETENDILLKDELDEMAEKYPHFQVHYVVHYPSDRWTGDVGYITKDQMNRYLPEYSEDNRLLICGPDGMNNLALQYAKELGWKVNSTRSSGDDQVFVF

SEQ ID NO: 5146 - DNA, 1311 bp, Brassica napus; identical to SEQ ID NO: 2340
  CDS (30)..(1019)

SEQ ID NO: 5147 - protein, 329 aa, Brassica napus; identical to SEQ ID NO: 2341

SEQ ID NO: 5148 - DNA, 1280 bp, Brassica napus; identical to SEQ ID NO: 2344
  CDS (3)..(1262)

SEQ ID NO: 5149 - protein, 419 aa, Brassica napus; identical to SEQ ID NO: 2345

SEQ ID NO: 5150 - DNA, 894 bp, Glycine max; identical to SEQ ID NO: 2422
  CDS (1)..(894)

SEQ ID NO: 5151 - protein, 297 aa, Glycine max; identical to SEQ ID NO: 2423

SEQ ID NO: 5152 - DNA, 972 bp, Glycine max; identical to SEQ ID NO: 2426
  CDS (1)..(972)

SEQ ID NO: 5153 - protein, 323 aa, Glycine max; identical to SEQ ID NO: 2427

SEQ ID NO: 5154 - DNA, 837 bp, Glycine max; identical to SEQ ID NO: 2434
  CDS (1)..(837)

SEQ ID NO: 5155 - protein, 278 aa, Glycine max; identical to SEQ ID NO: 2435

SEQ ID NO: 5156 - DNA, 960 bp, Glycine max; identical to SEQ ID NO: 2446
  CDS (1)..(960)

SEQ ID NO: 5157 - protein, 319 aa, Glycine max; identical to SEQ ID NO: 2447

SEQ ID NO: 5158 - DNA, 1029 bp, Glycine max; identical to SEQ ID NO: 2456
  CDS (13)..(885)

SEQ ID NO: 5159 - protein, 290 aa, Glycine max; identical to SEQ ID NO: 2457

SEQ ID NO: 5160 - DNA, 1349 bp, Linum usitatissimum; identical to SEQ ID NO: 2507
  CDS (71)..(916)

SEQ ID NO: 5161 - protein, 281 aa, Linum usitatissimum; identical to SEQ ID NO: 2508

SEQ ID NO: 5162 - DNA, 1155 bp, Triticum aestivum; identical to SEQ ID NO: 2535
  CDS (102)..(941)

SEQ ID NO: 5163 - protein, 279 aa, Triticum aestivum; identical to SEQ ID NO: 2536

SEQ ID NO: 5164 - DNA, 25 bp, Artificial sequence
  primer
atgttttccagattatccagatctc

SEQ ID NO: 5165 - DNA, 26 bp, Artificial sequence
  primer
ttaaaatttgaaaacttggtccttgg

SEQ ID NO: 5166 - protein, 337 aa, Artificial sequence
  consensus sequence
  Variant (2)..(7): Xaa in position 2 to 7 is any amino acid
  Variant (9)..(13): Xaa in position 9 to 13 is any amino acid
  Variant (15)..(15): Xaa in position 15 is any amino acid
  Variant (17)..(17): Xaa in position 17 is any amino acid
  Variant (19)..(22): Xaa in position 19 to 22 is any amino acid
  Variant (23)..(26): Xaa in position 23 to 26 is any or no amino acid
  Variant (30)..(30): Xaa in position 30 is any amino acid
  Variant (32)..(35): Xaa in position 32 to 35 is any amino acid
  Variant (36)..(57): Xaa in position 36 to 57 is any or no amino acid
  Variant (59)..(59): Xaa in position 59 is any amino acid
  Variant (63)..(63): Xaa in position 63 is any amino acid
  Variant (65)..(69): Xaa in position 65 to 69 is any amino acid
  Variant (70)..(71): Xaa in position 70 to 71 is any or no amino acid
  Variant (73)..(75): Xaa in position 73 to 75 is any amino acid
  Variant (77)..(78): Xaa in position 77 to 78 is any amino acid
  Variant (80)..(81): Xaa in position 80 to 81 is any amino acid
  Variant (82)..(107): Xaa in position 82 to 107 is any or no amino acid
  Variant (109)..(109): Xaa in position 109 is any amino acid
  Variant (111)..(121): Xaa in position 111 to 121 is any amino acid
  Variant (122)..(122): Xaa in position 122 is any or no amino acid
  Variant (124)..(125): Xaa in position 124 to 125 is any amino acid
  Variant (126)..(130): Xaa in position 126 to 130 is any or no amino acid
  Variant (133)..(133): Xaa in position 133 is any amino acid
  Variant (135)..(137): Xaa in position 135 to 137 is any amino acid
  Variant (139)..(147): Xaa in position 139 to 147 is any amino acid
  Variant (148)..(179): Xaa in position 148 to 179 is any or no amino acid
  Variant (181)..(181): Xaa in position 181 is any amino acid
  Variant (185)..(185): Xaa in position 185 is any amino acid
  Variant (190)..(191): Xaa in position 190 to 191 is any amino acid
  Variant (193)..(201): Xaa in position 193 to 201 is any amino acid
  Variant (202)..(203): Xaa in position 202 to 203 is any or no amino acid
  Variant (205)..(205): Xaa in position 205 is any amino acid
  Variant (207)..(213): Xaa in position 207 to 213 is any amino acid
  Variant (214)..(214): Xaa in position 214 is any or no amino acid
  Variant (216)..(219): Xaa in position 216 to 219 is any amino acid
  Variant (223)..(225): Xaa in position 223 to 225 is any amino acid
  Variant (228)..(249): Xaa in position 228 to 249 is any amino acid
  Variant (250)..(281): Xaa in position 250 to 281 is any or no amino acid
  Variant (283)..(284): Xaa in position 283 to 284 is any amino acid
  Variant (285)..(286): Xaa in position 285 to 286 is any or no amino acid
  Variant (288)..(293): Xaa in position 288 to 293 is any amino acid
  Variant (294)..(320): Xaa in position 294 to 320 is any or no amino acid
  Variant (322)..(322): Xaa in position 322 is any amino acid
  Variant (326)..(336): Xaa in position 326 to 336 is any amino acid
LXXXXXXSXXXXXFXFXLXXXXXXXXGLPXGXXXXXXXXXXXXXXXXXXXXXXXXXXRXYTPXSXXXXXXXGXXXLXXKXXXXXXXXXXXXXXXXXXXXXXXXXXXXPXGXXXXXXXXXXXXGXXXXXXXGPXGXXXYXXXXXXXXXXXXXXXXXXXXXXXXXXXXXXXXXXXXXXXXXMXAGGXGITPXXQXXXXXXXXXXXDXTXXXXXXXXNXXXXDILXXXELXXXXXXXXXXXXXXXXXXXXXXXXXXXXXXXXXXXXXXXXXXXXXXXXXXXXXXWXXXXGXXXXXXXXXXXXXXXXXXXXXXXXXXXXXXXXXLXCGPXXXXXXXXXXXP

SEQ ID NO: 5167 - DNA, 264 bp, Saccharomyces cerevisiae
  CDS (1)..(264)
atggaaaacgataagggccaattagtcgaactttacgttccaagaaaatgttctgctaccaacagaatcatcaaggctgatgaccacgcatctgttcaaatcaacgtcgctaaggttgatgaagaaggacgtgctatcccaggtgagtacgttacctacgctttgtccggttacgttagatccagaggtgaatctgatgattctttgaaccgtttggctcaaaacgatggtttgttaaagaacgtctggtcttactcacgttaa

SEQ ID NO: 5168 - protein, 87 aa, Saccharomyces cerevisiae
MENDKGQLVELYVPRKCSATNRIIKADDHASVQINVAKVDEEGRAIPGEYVTYALSGYVRSRGESDDSLNRLAQNDGLLKNVWSYSR

SEQ ID NO: 5169 - DNA, 264 bp, Unknown
  Unidentified
  CDS (1)..(264)
atggaaaacgaggctggacaattggttgacctttacgtccctcgcaagtgctctgccactaaccgcatcatccaagccaaagatcacgcttctgtgcaaatcaacgtttgcgctgttgacgctgaaggtcgccaaattcctggcgagaagaccacctatgctattagtggctttgttcgctccaagggcgagtccgatgactgcattaaccgccttaccacccaagacggattgttggagggtgtctggtcttatcaacgttaa

SEQ ID NO: 5170 - protein, 87 aa, Unknown
  Unidentified
MENEAGQLVDLYVPRKCSATNRIIQAKDHASVQINVCAVDAEGRQIPGEKTTYAISGFVRSKGESDDCINRLTTQDGLLEGVWSYQR

SEQ ID NO: 5171 - DNA, 273 bp, Unknown
  Unidentified
  CDS (1)..(273)
atgcagaacgacgccggcgagttcgtggacctgtacgtgccgcggaaatgctccgctagcaatcgcatcatcggtgccaaggaccacgcatccatccagatgaacgtggccgaggttgacaaggtcacaggcaggtttaatggccagtttaaaacttatgctatctgcggggccattcgtaggatggtgagtgtttccctgggctttgctcatcacttcgggacatcgtggactttaccgtgcgcattggagtgtgtgatggtgcctgagtag

SEQ ID NO: 5172 - protein, 90 aa, Unknown
  Unidentified
MQNDAGEFVDLYVPRKCSASNRIIGAKDHASIQMNVAEVDKVTGRFNGQFKTYAICGAIRRMVSVSLGFAHHFGTSWTLPCALECVMVPE

SEQ ID NO: 5173 - DNA, 252 bp, Unknown
  Unidentified
  CDS (1)..(252)
atgcagaacgacgccggcgagtttgtggacctgtacgtgccgcggaaatgctccgcaagcaaccgcatcattgctgccaaggaccacgcgtccatccagatgaacgtggccgaggttgataggaccacaggccggtttaatggccagtttaaaacctatggcatctgcggggccattcgcaggatgggcgagtcagatgattctattctccgattggctaaggctgatggaattgtctcaaagaacttttga

SEQ ID NO: 5174 - protein, 83 aa, Unknown
  Unidentified
MQNDAGEFVDLYVPRKCSASNRIIAAKDHASIQMNVAEVDRTTGRFNGQFKTYGICGAIRRMGESDDSILRLAKADGIVSKNF

SEQ ID NO: 5175 - DNA, 249 bp, Unknown
  Unidentified
  CDS (1)..(249)
atgtttaacgatcaaaaagttttagtcgatatttatatacccaggaagtgctcagctacatcacgacttattccggccaaggaacatggagctgtacaaataaatgttggaatggttgatgctaatggagtttacaacggtaaaaccgaaaccttcgctatctctggtcatgtcagacaaaatggagaatcagatgcttgcttaaatagacttatgtatgaaaagaaattattatcctttcaaaactaa

SEQ ID NO: 5176 - protein, 82 aa, Unknown
  Unidentified
MFNDQKVLVDIYIPRKCSATSRLIPAKEHGAVQINVGMVDANGVYNGKTETFAISGHVRQNGESDACLNRLMYEKKLLSFQN

SEQ ID NO: 5177 - DNA, 252 bp, Unknown
  Unidentified
  CDS (1)..(252)
atgcagaacgacgccggagaattcgttgacttgtactgcccgaggaagtgctcggccagcaaccgtctgatccacgccaaggaccacgcgtccgtgcagctggtgatcgcggacgtggaccccgccacgggccgcgccgccgacacctccaagatgtacgtggtgtgcggagccatccgccgcatgggggagtccgacgactgcatcgtcaggctcaccaagaaggacggcatattggctaagaactactga

SEQ ID NO: 5178 - protein, 83 aa, Unknown
  Unidentified
MQNDAGEFVDLYCPRKCSASNRLIHAKDHASVQLVIADVDPATGRAADTSKMYVVCGAIRRMGESDDCIVRLTKKDGILAKNY

SEQ ID NO: 5179 - DNA, 252 bp, Unknown
  Unidentified
  CDS (1)..(252)
atggagaacgacgccggtgaatctgttgatttgtactgcccacgtaaatgttctgcatccaacagaattatccacgctaaggatcatgcttcagtgcaattaaacattgttgatgttgaccctgaaaccggccgtatgactgttggttcaaagacctacgctatctgcggtgagatccgtcgtatgggcgaatccgatgattgtattgtgcgtttggccaagaaagatggtttgatcaccaaggctttctaa

SEQ ID NO: 5180 - protein, 83 aa, Unknown
  Unidentified
MENDAGESVDLYCPRKCSASNRIIHAKDHASVQLNIVDVDPETGRMTVGSKTYAICGEIRRMGESDDCIVRLAKKDGLITKAF

SEQ ID NO: 5181 - DNA, 258 bp, Unknown
  Unidentified
  CDS (1)..(258)
atgcagaacgacgcaggtgaagttgtggatctgtacatccctcgcaagtgctcatcaaccaaccgcatcattggtgccaaggatcatgcctcaatccagatcaactttgctgaggttgacccgaccactggccgcatgacaggacagtacaagacttacgccatctgtggctacatcaggcaaatgggagagtccgatgactgtctgaagcgcctggcaataaaggataaaatcattgacgcaaaaatggatgcctag

SEQ ID NO: 5182 - protein, 85 aa, Unknown
  Unidentified
MQNDAGEVVDLYIPRKCSSTNRIIGAKDHASIQINFAEVDPTTGRMTGQYKTYAICGYIRQMGESDDCLKRLAIKDKIIDAKMDA

SEQ ID NO: 5183 - DNA, 258 bp, Unknown
  Unidentified
  CDS (1)..(258)
atgcagaacgaccagggagaaatcgtggatgtatacatccccaggaagtgctctgccacgaacaacattctggctgcaaaggaccatgcatcagtgcagatcaacatggctgagattgacccccaaactggcaggatgactggcaaacagatcacatatgctctgtgtggagagctcaggaggatgggtgaggctgatgacagtgtaaacagattggcaatgaaagacaaaatgctgtcagaggtcttcggtcattga

SEQ ID NO: 5184 - protein, 85 aa, Unknown
  Unidentified
MQNDQGEIVDVYIPRKCSATNNILAAKDHASVQINMAEIDPQTGRMTGKQITYALCGELRRMGEADDSVNRLAMKDKMLSEVFGH

SEQ ID NO: 5185 - DNA, 252 bp, Unknown
  Unidentified
  CDS (1)..(252)
atgcaaaacgacgctggagaattcgtggacctgtacgtgcctcgtaaatgctctgctagcaacagaattattggtgcaaaggaccatgcctccatccagatcaacattgctgaggttgacaaggtaacaggcaggttcaatggccagttcaagacctatgccatctgtggtgctattcgcagaatgggggaggctgatgactctctcctgagactggcaaagaacgactccattgtgtcaaagaacatataa

SEQ ID NO: 5186 - protein, 83 aa, Unknown
  Unidentified
MQNDAGEFVDLYVPRKCSASNRIIGAKDHASIQINIAEVDKVTGRFNGQFKTYAICGAIRRMGEADDSLLRLAKNDSIVSKNI

SEQ ID NO: 5187 - DNA, 246 bp, Unknown
  Unidentified
  CDS (1)..(246)
atgcagaacgacgctggtgaattcgtggacctgtacgtccctcgtaaatgctctgctagcaacagaatcattggtgccaaggaccatgcctccatccagatcaacattgctgaggtggacagggttacaggcaggttcaatggacagttcaagacctatgccatctgtggcgccatccgtagaatgggtgaagctgatgactccctcctgaggctcgcaaagaccgacagcattgtggccaagtaa

SEQ ID NO: 5188 - protein, 81 aa, Unknown
  Unidentified
MQNDAGEFVDLYVPRKCSASNRIIGAKDHASIQINIAEVDRVTGRFNGQFKTYAICGAIRRMGEADDSLLRLAKTDSIVAK

SEQ ID NO: 5189 - DNA, 270 bp, Unknown
  Unidentified
  CDS (1)..(270)
atgcaatcggatgacatcgggatgaagaacagcagcggagtggtcgtagacgcatacataccgcgcaagtgttcagcaacaaataggctcattggcccgaaggaccacgccgcagtccagctgagcgtcgccagggttaatgataagggcaagatgatcgagaacaactatgttacattcgccttctgcggggccatccgcagccgaggcggagtggactcggccttcatgctcctcgcccaggagcacggtctcatggaacgcctttag

SEQ ID NO: 5190 - protein, 89 aa, Unknown
  Unidentified
MQSDDIGMKNSSGVVVDAYIPRKCSATNRLIGPKDHAAVQLSVARVNDKGKMIENNYVTFAFCGAIRSRGGVDSAFMLLAQEHGLMERL

SEQ ID NO: 5191 - DNA, 252 bp, Unknown
  Unidentified
  CDS (1)..(252)
atgcagaacgacgccggcgagttcgtggacctgtacgtgccgcggaaatgctccgctagcaatcgcatcatcggtgccaaggaccacgcatccatccagatgaacgtggccgaggttgacaaggtcacaggcaggtttaatggccagtttaaaacttatgctatctgcggggccattcgtaggatgggtgagtcagatgattccattctccgattggccaaggccgatggcatcgtctcaaagaacttttga

SEQ ID NO: 5192 - protein, 83 aa, Unknown
  Unidentified
MQNDAGEFVDLYVPRKCSASNRIIGAKDHASIQMNVAEVDKVTGRFNGQFKTYAICGAIRRMGESDDSILRLAKADGIVSKNF

SEQ ID NO: 5193 - DNA, 249 bp, Unknown
  Unidentified
  CDS (1)..(249)
atgaattctaccaacaaaaaaattgtaggggaatatatcccgagaaaatgctctttaagtaataaactaatcaataataaagatcatgcttcaattcaaatttcaattggggtcttagataaaaacgatttatttaaaggtgaatatgatatatttgcattttcaggtcttatgagaaaaaaaggtaaatctgattatgcaatagtaaatttaattgaaaaattggataattgtaatttaaaaatttga

SEQ ID NO: 5194 - protein, 82 aa, Unknown
  Unidentified
MNSTNKKIVGEYIPRKCSLSNKLINNKDHASIQISIGVLDKNDLFKGEYDIFAFSGLMRKKGKSDYAIVNLIEKLDNCNLKI

SEQ ID NO: 5195 - DNA, 332 bp, Unknown
  Unidentified
  CDS (1)..(249)
atgcagaacgacgagggcaagattgtggacctgtacatcccgcggaagtgctccgcgaccaaccggctgatctcggccacggaccacgccgccgtccagatcaacgtcggccacgttgacccgaactctggcctgtacactggtgactacaccacgttcgccctgtgcggcttcgttcgcagcatgggcgagtcggacgccgcgctcaaccgcctgtgcgtgaagcacgggctggcgaaggccatttaagcagccttcaacattgtgtcccgtttcttggaggatgtaacaatgacacgaatgccccccctttcaaaaaaaaaaaaaaaaaa

SEQ ID NO: 5196 - protein, 82 aa, Unknown
  Unidentified
MQNDEGKIVDLYIPRKCSATNRLISATDHAAVQINVGHVDPNSGLYTGDYTTFALCGFVRSMGESDAALNRLCVKHGLAKAI

SEQ ID NO: 5197 - DNA, 264 bp, Unknown
  Unidentified
  CDS (1)..(264)
atggaaaacgataaaggtcaattagttgaattatacgtcccaagaaaatgttctgctaccaacagaatcattaaagccaaagatcacgcttctgttcaaatctcaattgctaaagttgatgaagacggtagagctattgctggtgaaaacatcacttacgctttaagtggttacgttagaggtagaggtgaagctgatgactcattaaacagattggctcaacaagacggtttattgaagaacgtctggtcttactctcgttaa

SEQ ID NO: 5198 - protein, 87 aa, Unknown
  Unidentified
MENDKGQLVELYVPRKCSATNRIIKAKDHASVQISIAKVDEDGRAIAGENITYALSGYVRGRGEADDSLNRLAQQDGLLKNVWSYSR

SEQ ID NO: 5199 - DNA, 264 bp, Unknown; identical to SEQ ID NO: 5169
  Unidentified
  CDS (1)..(264)

SEQ ID NO: 5200 - protein, 87 aa, Unknown; identical to SEQ ID NO: 5170
  Unidentified

SEQ ID NO: 5201 - DNA, 249 bp, Unknown
  Unidentified
  CDS (1)..(249)
atggagaacgacgcaggtcaggtcacagagctctacattccaagtaaatgctcggcaacaaacagaatgatcacatcaaaggatcatgcttcagttcagcttaacattggtcatcttgatgctaatggtctctacactggccaattcaccacttttgctctctgcggatttgtccgtgctcagggagacgcagacagtggcgtggacaggctctggcagaagaagaaggtcgaagctaaacaacagtga

SEQ ID NO: 5202 - protein, 82 aa, Unknown
  Unidentified
MENDAGQVTELYIPSKCSATNRMITSKDHASVQLNIGHLDANGLYTGQFTTFALCGFVRAQGDADSGVDRLWQKKKVEAKQQ

SEQ ID NO: 5203 - DNA, 249 bp, Unknown
  Unidentified
  CDS (1)..(249)
atgcagaacgaggagggtcagatggtggacctctacgtccccaggaagtgctcggccacgaacaggatcatcaccgccaaggaccacgcctcggtccagatcaacattgggcatgtggatgagaatgggctgtacgatggccgcttcaccacctttgctctctctgggttcatccgtgctcagggagatgctgacagtgctctggataggctgtggcagaagaggaaggctgaggtcaagcagcagtag

SEQ ID NO: 5204 - protein, 82 aa, Unknown
  Unidentified
MQNEEGQMVDLYVPRKCSATNRIITAKDHASVQINIGHVDENGLYDGRFTTFALSGFIRAQGDADSALDRLWQKRKAEVKQQ

SEQ ID NO: 5205 - DNA, 246 bp, Unknown
  Unidentified
  CDS (1)..(246)
atgcagaacgaggagggtaagacggtggacctctacgtccccaggaagtgctcggccacgaataggatcatcactgccaaggatcatgcctctgtccagatcaacattggccacttggatgcgaatggcctgtacgatggtcacttcaccacgtttgctctctctgggtttgtccgtgctcagggtgatgctgacagttcgttggacaggctgtggcagaagaagaaggctgagatcaagcagtag

SEQ ID NO: 5206 - protein, 81 aa, Unknown
  Unidentified
MQNEEGKTVDLYVPRKCSATNRIITAKDHASVQINIGHLDANGLYDGHFTTFALSGFVRAQGDADSSLDRLWQKKKAEIKQ

SEQ ID NO: 5207 - DNA, 201 bp, Unknown
  Unidentified
  CDS (1)..(201)
atgcagaacgacgccggcgagttcgtggacctgtacgtgccgcggaaatgctccgctagcaatcgcatcatcggtgccaaggaccacgcatccatccagatgaacgtggccgaggtgagctgggagcccgggaggcgggaaggttgtgatatatgtgcgggaaaggcaggctgtcccattgtggaggagcccctggggtga

SEQ ID NO: 5208 - protein, 66 aa, Unknown
  Unidentified
MQNDAGEFVDLYVPRKCSASNRIIGAKDHASIQMNVAEVSWEPGRREGCDICAGKAGCPIVEEPLG

SEQ ID NO: 5209 - DNA, 294 bp, Unknown
  Unidentified
  CDS (1)..(294)
atgcagaacgacgccggcgagttcgtggacctgtacgtgccgcggaaatgctccgctagcaatcgcatcatcggtgccaaggaccacgcatccatccagatgaacgtggccaggttgacaaggtcacaggcaggtttaatggccagtttaaaacttatgctatctgcggggccattcgtaggatgggtgagtcagatgattccattctccgattggccaaggcgatggcatcgtctcaaagaacttttgactggagagaatcacagatgtggaatatttgtcataaataaataa

SEQ ID NO: 5210 - protein, 97 aa, Unknown
  Unidentified
MQNDAGEFVDLYVPRKCSASNRIIGAKDHASIQMNVARLTRSQAGLMASLKLMLSAGPFVGWVSQMIPFSDWPRRWHRLKELLTGENHRCGIFVINK

SEQ ID NO: 5211 - DNA, 252 bp, Unknown
  Unidentified
  CDS (1)..(252)
atgcagaacgacgccggcgagtttgtggacctgtacgtgccgcggaaatgctccgcgagcaaccgcatcattgctgccaaggaccacgcgtccatccagatgaatgtggccgaggttgacaggagtacaggccgatttaatggtcagtttaaaacctacggcatctgcggggccattcgcaggatgggcgagtcagatgattctattctccgattggctaaggctgatggaattgtctcaaagaacttttga

SEQ ID NO: 5212 - protein, 83 aa, Unknown
  Unidentified
MQNDAGEFVDLYVPRKCSASNRIIAAKDHASIQMNVAEVDRSTGRFNGQFKTYGICGAIRRMGESDDSILRLAKADGIVSKNF

SEQ ID NO: 5213 - DNA, 267 bp, Unknown
  Unidentified
  CDS (1)..(267)
atgcaaaacgacgccggacaaaccgtcgagctttacgttccacgcaagtgctcttcgtccaaccgcatcatcggaccaaaggaccacgcttccgtccaaatcgatttcgtcgatgtcgacccagagactggccgcatgatcccaggaaagtctacccgctacgccatctgtggagctatccgccgcatgggagaatccgacgacgctatcttgagacttgcccagaaggacggactcgtgccaagagatgatgttaagtccaactga

SEQ ID NO: 5214 - protein, 88 aa, Unknown
  Unidentified
MQNDAGQTVELYVPRKCSSSNRIIGPKDHASVQIDFVDVDPETGRMIPGKSTRYAICGAIRRMGESDDAILRLAQKDGLVPRDDVKSN

SEQ ID NO: 5215 - DNA, 252 bp, Unknown
  Unidentified
  CDS (1)..(252)
atggagaacgacgccggtgagaatgttgatctgtacgtgccccgcaaatgctcggcgtccaacaggatcatccacgccaaggatcacgcctccgtgcagctgagcatcgtggatgtggaccccgagaccggtcgccagaccgacggttccaagacctacgccatctgcggcgagatccgtcgcatgggcgagtccgacgactgcatcgtgcgtctggccaagaaggacggcatcattaccaagaacttctaa

SEQ ID NO: 5216 - protein, 83 aa, Unknown [sequence omitted]

SEQ ID NO: 5217 - DNA, 264 bp, Unknown
  Unidentified
  CDS (1)..(264)
atggagaacgatcgcggcgaaattgtcgacctttacgtcccccgcaagtgctctgcgacgggccgcatcatcaagtccaaggaccacggttcttgccagatcaccatcgccaaggtcgacgagaacggccgtgccatccagggcgagaacatcatctacgctctctccggcttcgttcgcgccatgggcgagtctgacgactccctcaaccgccttgcccagcgcgatggtctcctcaaggccgtctggaacccccagcgctaa

SEQ ID NO: 5218 - protein, 87 aa, Unknown
  Unidentified
MENDRGEIVDLYVPRKCSATGRIIKSKDHGSCQITIAKVDENGRAIQGENIIYALSGFVRAMGESDDSLNRLAQRDGLLKAVWNPQR

SEQ ID NO: 5219 - DNA, 243 bp, Unknown
  Unidentified
  CDS (1)..(243)
atggagaacgatgctggagagtttgttgatctgtactgcccccgcaagtgctcttcgagcaaccgcatcatccacgctaaggatcatgcctccatccagatcaacatcgtcgacgtagacccggagactggccgcatgctggacacctccaaggtgtacgccatctgcggtgagatccgccgtatgggcgaatcggacgattgcatcgttcgtctggccaagaaggacggtatcctgtcctga

SEQ ID NO: 5220 - protein, 80 aa, Unknown
  Unidentified
MENDAGEFVDLYCPRKCSSSNRIIHAKDHASIQINIVDVDPETGRMLDTSKVYAICGEIRRMGESDDCIVRLAKKDGILS

SEQ ID NO: 5221 - DNA, 252 bp, Unknown; identical to SEQ ID NO: 2298
  Unidentified
  CDS (1)..(249)

SEQ ID NO: 5222 - protein, 82 aa, Unknown; identical to SEQ ID NO: 2299
  Unidentified

SEQ ID NO: 5223 - DNA, 252 bp, Unknown; identical to SEQ ID NO: 2312
  Unidentified
  CDS (1)..(249)

SEQ ID NO: 5224 - protein, 82 aa, Unknown; identical to SEQ ID NO: 2313
  Unidentified

SEQ ID NO: 5225 - DNA, 249 bp, Unknown; identical to SEQ ID NO: 2515
  Unidentified
  CDS (1)..(246)

SEQ ID NO: 5226 - protein, 81 aa, Unknown; identical to SEQ ID NO: 2516
  Unidentified

SEQ ID NO: 5227 - DNA, 473 bp, Linum usitatissimum; identical to SEQ ID NO: 2517
  CDS (76)..(321)

SEQ ID NO: 5228 - protein, 81 aa, Linum usitatissimum; identical to SEQ ID NO: 2518

SEQ ID NO: 5229 - DNA, 249 bp, Unknown; identical to SEQ ID NO: 2304
  Unidentified
  CDS (1)..(246)

SEQ ID NO: 5230 - protein, 81 aa, Unknown; identical to SEQ ID NO: 2305
  Unidentified

SEQ ID NO: 5231 - DNA, 246 bp, Zea mays; identical to SEQ ID NO: 2575
  CDS (1)..(246)

SEQ ID NO: 5232 - protein, 81 aa, Zea mays; identical to SEQ ID NO: 2576

SEQ ID NO: 5233 - DNA, 246 bp, Zea mays; identical to SEQ ID NO: 2589
  CDS (1)..(246)

SEQ ID NO: 5234 - protein, 81 aa, Zea mays; identical to SEQ ID NO: 2590

SEQ ID NO: 5235 - DNA, 25 bp, Artificial sequence
  primer
atggaaaacgataagggccaattag

SEQ ID NO: 5236 - DNA, 24 bp, Artificial sequence
  primer
ttaacgtgagtaagaccagacgtt

SEQ ID NO: 5237 - protein, 80 aa, Artificial sequence
  consensus sequence
  Variant (2)..(2): Xaa in position 2 is any amino acid
  Variant (4)..(5): Xaa in position 4 to 5 is any amino acid
  Variant (7)..(8): Xaa in position 7 to 8 is any amino acid
  Variant (10)..(10): Xaa in position 10 is any amino acid
  Variant (13)..(13): Xaa in position 13 is any amino acid
  Variant (20)..(20): Xaa in position 20 is any amino acid
  Variant (23)..(23): Xaa in position 23 is any amino acid
  Variant (25)..(26): Xaa in position 25 to 26 is any amino acid
  Variant (32)..(32): Xaa in position 32 is any amino acid
  Variant (34)..(38): Xaa in position 34 to 38 is any amino acid
  Variant (39)..(39): Xaa in position 39 is any or no amino acid
  Variant (41)..(52): Xaa in position 41 to 52 is any amino acid
  Variant (53)..(54): Xaa in position 53 to 54 is any or no amino acid
  Variant (56)..(57): Xaa in position 56 to 57 is any amino acid
  Variant (59)..(60): Xaa in position 59 to 60 is any amino acid
  Variant (61)..(67): Xaa in position 61 to 67 is any or no amino acid
  Variant (69)..(70): Xaa in position 69 to 70 is any amino acid
  Variant (72)..(73): Xaa in position 72 to 73 is any amino acid
  Variant (75)..(76): Xaa in position 75 to 76 is any amino acid
  Variant (77)..(78): Xaa in position 77 to 78 is any or no amino acid
MXNXXGXXVXLYXPRKCSAXNRXIXXKDHASXQXXXXXXDXXXXXXXXXXXXXXAXXGXXXXXXXXXRXXGXXDXXXXRL

SEQ ID NO: 5238 - protein, 76 aa, Artificial sequence
  consensus sequence
  Variant (2)..(2): Xaa in position 2 is any amino acid
  Variant (4)..(5): Xaa in position 4 to 5 is any amino acid
  Variant (7)..(8): Xaa in position 7 to 8 is any amino acid
  Variant (13)..(13): Xaa in position 13 is any amino acid
  Variant (20)..(20): Xaa in position 20 is any amino acid
  Variant (23)..(23): Xaa in position 23 is any amino acid
  Variant (25)..(25): Xaa in position 25 is any amino acid
  Variant (32)..(32): Xaa in position 32 is any amino acid
  Variant (34)..(38): Xaa in position 34 to 38 is any amino acid
  Variant (41)..(49): Xaa in position 41 to 49 is any amino acid
  Variant (50)..(57): Xaa in position 50 to 57 is any or no amino acid
  Variant (59)..(60): Xaa in position 59 to 60 is any amino acid
  Variant (62)..(63): Xaa in position 62 to 63 is any amino acid
  Variant (65)..(66): Xaa in position 65 to 66 is any amino acid
  Variant (68)..(69): Xaa in position 68 to 69 is any amino acid
  Variant (71)..(74): Xaa in position 71 to 74 is any amino acid
MXNXXGXXVDLYXPRKCSAXNRXIXAKDHASXQXXXXXVDXXXXXXXXXXXXXXXXXAXXGXXRXXGXXDXXXXRL

SEQ ID NO: 5239 - protein, 33 aa, Artificial sequence
  Consensus sequence
  Variant (2)..(11): Xaa in position 2 to 11 is any amino acid
  Variant (13)..(13): Xaa in position 13 is any amino acid
  Variant (15)..(15): Xaa in position 15 is any amino acid
  Variant (19)..(28): Xaa in position 19 to 28 is any amino acid
  Variant (30)..(32): Xaa in position 30 to 32 is any amino acid
MXXXXXXXXXXYXPXKCSXXXXXXXXXXHXXXQ

SEQ ID NO: 5240 - DNA, 378 bp, Saccharomyces cerevisiae
  CDS (1)..(378)
atgaatttattcttcgtcttcttcttcgtcttcttctggagtgacttggtagaaggccaatctgtattcgttggtcttggtagagacaaatctgatccagtctctcaattggttcttcttcaagtacttctttgtcaagtacttcaagtacttaccagagaacttggcagtggaaacaacagtaacaacggtaccatcttcagtgacagtgacagcgttacccaagttaccgacagcaccttcgaccttgatgtggtcgatcaagtacttagcgtaggaagctgggtcgaagacaccgttttcagttggagaagagacatcgacggtaaaggtcttggcaatcttttgctttctggaagtctatatcaaaaaaattaa

SEQ ID NO: 5241 - protein, 125 aa, Saccharomyces cerevisiae
MNLFFVFFFVFFWSDLVEGQSVFVGLGRDKSDPVSQLVLLQVLLCQVLQVLTRELGSGNNSNNGTIFSDSDSVTQVTDSTFDLDVVDQVLSVGSWVEDTVFSWRRDIDGKGLGNLLLSGSLYQKN

SEQ ID NO: 5242 - DNA, 375 bp, Candida glabrata CBS138
  CDS (1)..(375)
atgattctattaattaatttattcctcatcttcttcttcctcctctggagtgacttggtagaaggccaatctgtaagagttagtcttggtggagacgaatctgatccagtctctcaattggttcttcttcaagtacttcttggtcaagtacttcaagtacttaccagagaacttggtggtggaaacaatggtaacaacggaaccatcttcttcgacagtgatggcgttacccaagttaccgacaacgttttcaaccttgatgtggtcgatcaagtacttggcgtaagaagctgggtcgaagacaccgttttcagttggagcggagacgtcaacagtgaaggtcttaacaaccttttgctttctagcggtctgtaa

SEQ ID NO: 5243 - protein, 124 aa, Candida glabrata CBS138
MILLINLFLIFFFLLWSDLVEGQSVRVSLGGDESDPVSQLVLLQVLLGQVLQVLTRELGGGNNGNNGTIFFDSDGVTQVTDNVFNLDVVDQVLGVRSWVEDTVFSWSGDVNSEGLNNLLLSSGL

SEQ ID NO: 5244 - DNA, 27 bp, Artificial sequence
  primer
atgaatttattcttcgtcttcttcttc

SEQ ID NO: 5245 - DNA, 28 bp, Artificial sequence
  primer
ttaatttttttgatatagacttccagaa

SEQ ID NO: 5246 - protein, 120 aa, Artificial sequence
  consensus sequence
  Variant (4)..(5): Xaa in position 4 to 5 is any amino acid
  Variant (9)..(10): Xaa in position 9 to 10 is any amino acid
  Variant (11)..(11): Xaa in position 11 is any or no amino acid
  Variant (22)..(22): Xaa in position 22 is any amino acid
  Variant (24)..(24): Xaa in position 24 is any amino acid
  Variant (27)..(27): Xaa in position 27 is any amino acid
  Variant (29)..(29): Xaa in position 29 is any amino acid
  Variant (44)..(44): Xaa in position 44 is any amino acid
  Variant (56)..(56): Xaa in position 56 is any amino acid
  Variant (60)..(60): Xaa in position 60 is any amino acid
  Variant (67)..(67): Xaa in position 67 is any amino acid
  Variant (71)..(71): Xaa in position 71 is any amino acid
  Variant (78)..(79): Xaa in position 78 to 79 is any amino acid
  Variant (81)..(81): Xaa in position 81 is any amino acid
  Variant (90)..(90): Xaa in position 90 is any amino acid
  Variant (92)..(92): Xaa in position 92 is any amino acid
  Variant (103)..(104): Xaa in position 103 to 104 is any amino acid
  Variant (106)..(109): Xaa in position 106 to 109 is any amino acid
  Variant (112)..(112): Xaa in position 112 is any amino acid
  Variant (118)..(119): Xaa in position 118 to 119 is any amino acid
NLFXXFFFXXXWSDLVEGQSVXVXLGXDXSDPVSQLVLLQVLLXQVLQVLTRELGXGNNXNNGTIFXDSDXVTQVTDXXFXLDVVDQVLXVXSWVEDTVFSWXXDXXXXGLXNLLLSXXL

SEQ ID NO: 5247 - DNA, 1431 bp, Saccharomyces cerevisiae
  CDS (1)..(1431)
atgatagcttccaaaagctccttattagttactaaatcgcgcataccctctctatgctttcctttgataaagaggtcctatgtgtcaaagactccgacacactctaacacggctgctaatctgatggttgaaactccggccgccaatgccaacggcaatagtgtgatggcacctcctaactcaatcaattttctacagacacttcccaagaaggaactattccaactgggattcatcggtattgcgaccttgaacagcttcttcctgaacacgatcattaagttgttcccttacatccccatcccagtaataaaattcttcgtctcttctttatactgtggcggtgagaactttaaagaggtcatcgaatgcggcaaacgtctgcagaagagaggtatatcgaacatgatgctttcattaactattgaaaattccgaaggtacaaagagtttgtccagtactccagtagaccaaattgtcaaggaaacaatcagctctgtccacaacatcctactgcccaatattattggccagctggaatctaagccaatcaatgacattgctccaggttatatcgctctaaaaccctctgctttggtcgataaccctcacgaggttctgtacaatttcagtaatcccgcctacaaggctcaaagggatcagctgatcgagaactgctctaagattacaaaagagatttttgaactaaatcaatctttgttaaagaagtaccctgaaagaaaggccccatttatggtttccactattgacgctgagaagtatgatttgcaggagaatggtgtttacgaattacagagaatcttatttcaaaaattcaatcccacttcatctaaactgatatcatgtgtcggtacttggcagttgtacctaagggactctggtgaccatattttgcacgaattgaagctggcccaagaaaacggctataagcttgggctgaaactggttcgtggtgcttatattcattctgaaaaaaaccgtaaccaaattatctttggcgataaaacgggcactgacgaaaattacgatcgtatcatcactcaagttgtcaatgatttaatcatcaatggcgaggattcttattttggtcacttggttgtcgcctctcataattaccaatcccaaatgctcgttactaatttgctaaaatctacccaagacaactcttatgccaaatcgaacattgtgttggggcaattactaggtatggcagataatgttacctatgacctaattaccaaccatggcgctaaaaacataatcaagtatgtcccatggggcccaccattggaaactaaagattatcttttgagaagattgcaagaaaacggggatgctgtgagatctgataatggctggccattaatcaaggccatagcaaagtcgattccaaaaagagtaggcctatga

SEQ ID NO: 5248 - protein, 476 aa, Saccharomyces cerevisiae
MIASKSSLLVTKSRIPSLCFPLIKRSYVSKTPTHSNTAANLMVETPAANANGNSVMAPPNSINFLQTLPKKELFQLGFIGIATLNSFFLNTIIKLFPYIPIPVIKFFVSSLYCGGENFKEVIECGKRLQKRGISNMMLSLTIENSEGTKSLSSTPVDQIVKETISSVHNILLPNIIGQLESKPINDIAPGYIALKPSALVDNPHEVLYNFSNPAYKAQRDQLIENCSKITKEIFELNQSLLKKYPERKAPFMVSTIDAEKYDLQENGVYELQRILFQKFNPTSSKLISCVGTWQLYLRDSGDHILHELKLAQENGYKLGLKLVRGAYIHSEKNRNQIIFGDKTGTDENYDRIITQVVNDLIINGEDSYFGHLVVASHNYQSQMLVTNLLKSTQDNSYAKSNIVLGQLLGMADNVTYDLITNHGAKNIIKYVPWGPPLETKDYLLRRLQENGDAVRSDNGWPLIKAIAKSIPKRVGL

SEQ ID NO: 5249 - DNA, 1398 bp, Danio rerio
  CDS (1)..(1398)
atggctgcctcgcagttcccagcagcaaagcgtagtggagagctgaataacccatcaccggctgcgtatctgcgattcgaggaccctcaggcgttcagagtgaagagtctgtgggagctgatccgggccctcggtgtcttcaggctctgctcgttccctgtgctggtcaacaactgcggaaagctgatgtctttctcgaggagggttttgggaaagcgttgtttctgcatggtcctccgtccgtctgtttacgctcagtttgtggctggagaaacagaaggagagatcgcagactccatgcagaagatgagctctctaggcctccatccaatgctggcagttcctatcgaagaggacctgggggagagcaccggggaaaagcgatatgacgataacctgtcggccatgctggagtgtgtcttcatgtctcacagtaatggatggagtaacaatcccatgatgcagctgaagatcacagctttagtcagccctgaactgtgtgttaagctgacctctctgctgaaaacagaactgtatgatctgaacttgcttgtcaaagccatggatggagaggaagtcttgtttcccggtctaactgagagtgaaaacacacacctgctatttggccttcggaggctcaacaaaatcggagaggcgagtgttaataaagtgcgtgttctggtggatgcagagtacacatacatgaatcccgcgctgtcactcatcacgatggccatgatgaagaaatttaatcaacaaagtgcctggatctggaacacctaccagtgctacctgaaggaatcgagaaatctattacttgatgccgttcagacatccatcaatcagagtttttgtttcggcgttaaactcgtcagaggagcttacatggacaaagaaagaaaactagctgaaaaagaaggacggacagatccaatccacgaatcatgggagcatactaatgacagctataacggatgtctagagctcatgttgaagctgattgcagagaaaccagagcgatacatgatgattgttgccactcacaatgaagaatcagtcagacgggctgtgacgcatatggcagagcttggacttcacagagatggaaactcagtgtgttttggtcagctgttgggcatgtgtgaccatgtctctctaactctagctcagcatggtttctcagtgtataagtcagtgccgtacggatcggtggacgacacgctgccgtatctggtgcgacgagctcaggagaaccgcaccgtcctccaggggatccggaaggagagagatctgctcagacaggagctccaccgcagactcaaagaaaagatcagcagatccacaaagagaaactgcgctggaaatcaaactaaggggcaagtgggaaaagacttttaa

SEQ ID NO: 5250 - protein, 465 aa, Danio rerio
MAASQFPAAKRSGELNNPSPAAYLRFEDPQAFRVKSLWELIRALGVFRLCSFPVLVNNCGKLMSFSRRVLGKRCFCMVLRPSVYAQFVAGETEGEIADSMQKMSSLGLHPMLAVPIEEDLGESTGEKRYDDNLSAMLECVFMSHSNGWSNNPMMQLKITALVSPELCVKLTSLLKTELYDLNLLVKAMDGEEVLFPGLTESENTHLLFGLRRLNKIGEASVNKVRVLVDAEYTYMNPALSLITMAMMKKFNQQSAWIWNTYQCYLKESRNLLLDAVQTSINQSFCFGVKLVRGAYMDKERKLAEKEGRTDPIHESWEHTNDSYNGCLELMLKLIAEKPERYMMIVATHNEESVRRAVTHMAELGLHRDGNSVCFGQLLGMCDHVSLTLAQHGFSVYKSVPYGSVDDTLPYLVRRAQENRTVLQGIRKERDLLRQELHRRLKEKISRSTKRNCAGNQTKGQVGKDF

SEQ ID NO: 5251 - DNA, 1371 bp, Mus musculus
  CDS (1)..(1371)
atgatctggacgcgtctgccgctgtatggcccctccaagccctctacaggtggctggcagcccctgcgctttgatggtggggccttccatgtcaagggaaccgcagaactggcacgggctttgctagtgcttcgcctatgcgcctggccccctttggtcactcatggactagcgtttcaggcctggtctcagcgactcctgggatcccggctctcaggcgcacttcttcgagcatccatctacgggcagtttgtggccggggagacagcagaggaagtgaggaactgtgtcgggcagctgcaggccctgggactccagcccctgttggcagtacccaccgaggaggaaccagactccactgccaagaccagtgaggtctggtatgaggagaaccttagcgccatgctgcgctgtgtggacttatcccgagccctcgtggacgcccacggcccagccaggaacagcctcatgcagctgaaggtgaccgcgctagccagcactcggctttgtaaagagctgtcggcttggatccaaagacccagaggctcctcggagctgagccctgagaggctggcagaagccatggactcgggtcggaacctccagctctcctgcctcagcacagaacagaatcagcacctgcaggcctccctcagccgcttgcaccgagtggcacagcacgcccgggcgaagtgtgtgcggctgctggtagatgctgaatatactttcattaaccctgcactgtccctgctggtggctgccctggctgtgcgctggaacagccctgaggaaggtggtccgtgggtgtggaacacttaccaggcctatctaaaggacactcaccaacggctggagcaggacgccgaggcagcacacaaggctggcctggcatttggggtgaagttggtgcgaggtgcctatctggacaaggagagatccatgacacagctccaagggaaggaagactgtacccagcctgactatgaggccactagtcggagttacagccgctgtctagagctgatgctgcgctgcgtgtcgaaccacggtcccccgtgtcacctcatggtggcttcccacaatgaagaatccgttcgccaggcaactaagcgcatgtgggagctgggcattcctctggatgggcctgtctgttttggacaacttctgggcatgtgtgaccatgtctccctggcattagggcaggctggatatatggtgtacaagtctattccctatggctgcctggaggaggtgattccctacctgatccgaagagcccaggagaacaggagtgtgctgcagggtgcccgcagggagcaggcactactcagccaggaactgtggcggagactgctgggaaggacggcctaa

SEQ ID NO: 5252 - protein, 456 aa, Mus musculus
MIWTRLPLYGPSKPSTGGWQPLRFDGGAFHVKGTAELARALLVLRLCAWPPLVTHGLAFQAWSQRLLGSRLSGALLRASIYGQFVAGETAEEVRNCVGQLQALGLQPLLAVPTEEEPDSTAKTSEVWYEENLSAMLRCVDLSRALVDAHGPARNSLMQLKVTALASTRLCKELSAWIQRPRGSSELSPERLAEAMDSGRNLQLSCLSTEQNQHLQASLSRLHRVAQHARAKCVRLLVDAEYTFINPALSLLVAALAVRWNSPEEGGPWVWNTYQAYLKDTHQRLEQDAEAAHKAGLAFGVKLVRGAYLDKERSMTQLQGKEDCTQPDYEATSRSYSRCLELMLRCVSNHGPPCHLMVASHNEESVRQATKRMWELGIPLDGPVCFGQLLGMCDHVSLALGQAGYMVYKSIPYGCLEEVIPYLIRRAQENRSVLQGARREQALLSQELWRRLLGRTA

SEQ ID NO: 5253 - DNA, 1611 bp, Homo sapiens
  CDS (1)..(1611)
atgtcgcccagggtagtctcaaactcctcggtcttggcctcccaaagtgttgggattacaaacgtgagaaccgtattttcaaatgtattcaataacactacagcgtttccaattttaagaggaagcaattgccacaaaatcactgcccctggtctgggcaaggggcagttggtgaacttgctgcctccagagaaccttccctggtgtggaggcagccagggacccaggatgctccggacctgttacgtgctctgttcccaagctggtcccccctccaggggctggcagtccctgagctttgatggcggggccttccaccttaagggcacaggagagctgacacgggccttgctggttctccggctgtgtgcctggcccccactcgtcactcacgggctgttgctccaggcctggtctcggcgactcctgggctcccggctctcaggcgcatttctccgagcatccgtctatgggcagtttgtggctggtgagacagcagaggaggtgaagggctgcgtgcagcagctgcggaccctcagcctccgaccactgctggcagtgcccactgaggaggagccggactctgctgccaagagtggtgaggcgtggtatgaggggaacctcggtgctatgctgcggtgtgtggacctgtcacggggcctcctggagccccccagcctggctgaggccagcctcatgcagctgaaggtgacggcgctgaccagtactcggctctgtaaggagctagcctcgtgggtcagaaggccaggagcctccttggagctgagccccgagaggctggctgaagctatggactctgggcagaacctccaggtctcctgcctcaatgctgagcagaaccagcacctccgggcctccctcagccgcctgcatcgggtggcacagtatgcccgggcccagcacgtgcggctcctggtggatgcggagtacacctcactgaaccctgcgctctcgctgctggtggctgccctggctgtgcgctggaacagcccgggtgaaggcgggccctgggtgtggaacacctaccaggcctgtctaaaggacacattcgagcggctggggagggatgcagaggctgcgcacagggccggcctggccttcggagtgaagctggtacgaggtgcatatctggacaaggagagagcggtggcccagctccatgggatggaagaccccactcagcctgactatgaggccaccagtcagagttacagccgctgcctggaactgatgctgacgcacgtggcccgccatggccccatgtgccacctcatggtggcttcccacaatgaggaatctgttcgccaggcaaccaagcgcatgtgggagctgggcattcctctggatgggactgtctgtttcggacaacttctgggcatgtgtgaccacgtctctctagcactggggcaggccggctatgtagtgtataagtccattccctatggctccttggaggaggtaatcccctacctgatccggagggcccaggagaaccggagcgtgcttcagggtgcccgcagggaacaggagctgctcagccaagaactgtggcggcggctgctgccaggatgccgaaggataccccactag

SEQ ID NO: 5254 - protein, 536 aa, Homo sapiens
MSPRVVSNSSVLASQSVGITNVRTVFSNVFNNTTAFPILRGSNCHKITAPGLGKGQLVNLLPPENLPWCGGSQGPRMLRTCYVLCSQAGPPSRGWQSLSFDGGAFHLKGTGELTRALLVLRLCAWPPLVTHGLLLQAWSRRLLGSRLSGAFLRASVYGQFVAGETAEEVKGCVQQLRTLSLRPLLAVPTEEEPDSAAKSGEAWYEGNLGAMLRCVDLSRGLLEPPSLAEASLMQLKVTALTSTRLCKELASWVRRPGASLELSPERLAEAMDSGQNLQVSCLNAEQNQHLRASLSRLHRVAQYARAQHVRLLVDAEYTSLNPALSLLVAALAVRWNSPGEGGPWVWNTYQACLKDTFERLGRDAEAAHRAGLAFGVKLVRGAYLDKERAVAQLHGMEDPTQPDYEATSQSYSRCLELMLTHVARHGPMCHLMVASHNEESVRQATKRMWELGIPLDGTVCFGQLLGMCDHVSLALGQAGYVVYKSIPYGSLEEVIPYLIRRAQENRSVLQGARREQELLSQELWRRLLPGCRRIPH

SEQ ID NO: 5255 - DNA, 1431 bp, Arabidopsis thaliana
  CDS (1)..(1431)
atggcaaaccgtttcctccgaccaaacctcatccaccgtttctccaccgtgagtcccgtcggtcctccgaccaccatcatcccagaaatcctttcctttgaccaaccaaaaccagaagttgatctagatctctccgaccaagctcgactctttgcttctgtcccaatctccaccctcctccgctcaaccgcaattctccatgccacgtccataggccctatggtcgatcttggctcgtggctcatgagttccaagctcatggacacgaccgttacacgcgatctagtactccgtatcgtgaaaggaacgttttacgaccatttctgcgccggtgaagacgcggctgccgcagcaaggcgcgtgagtagcgtgtatgagtcgacgggacttaaaggtatgttagtgtacggcgtagaacacgctgaagacggtggcgcatgtgatgaaaacattcaaaaattcattgaaaccgtcgaagctgctaaaaccctaccttcgtctcacttaagctcagtggtggtcaagatcacagcgatttgtccaatgaatgtcctaaaacgggttagtgatttgcttcggtggcaatacaagaaccctaatttcaaacttccatggaaactcaattcatttccggttttctccggcttaagtcctctgtaccacacaacgtctgaaccggaaccattaaccgtagaggaagaacgagagcttgaaaaagctcatgaacgcctcaaatccgtgtgtcttagatgtcaagaatcgaacgtaccgttactaattgatgccgaagacaccattctccaaccagcaatcgattacatggcgtattggtcggcgattatgttcaattcggataaagatcgacctatagtttacaacacgattcaagcctacttgaaagatgctggagagagattacacttggctttacgagagtcagagaaaatgaatgttcctattgggtttaaattggtgagaggtgcttatatgtctagtgaagctaagttagcagattccttgggttacaagtcaccggttcacgacacaattcaaaatacacatgattgctacaatgactgtatgagtttccttatggagaaagcctcaaatggatcaggcattgcggtcattctagctacgcataacacagactcgggtaaactaggggcaagaaaagcaagtgagctagggatcaataaagaaaacgggaagatcgagtttgcgcagctttacgggatgtcggatgcgttatcttttggattgaaaagggccggtttcaatgtgagtaagtacatgccatacgggccggttgatactgcaattccataccttatccggcgggcatatgagaatcggggtatgatgtccacaggtgctttagaccgccaacttatgaggaaggagcttaagagaagagttatggcttggtga

SEQ ID NO: 5256 - protein, 476 aa, Arabidopsis thaliana
MANRFLRPNLIHRFSTVSPVGPPTTIIPEILSFDQPKPEVDLDLSDQARLFASVPISTLLRSTAILHATSIGPMVDLGSWLMSSKLMDTTVTRDLVLRIVKGTFYDHFCAGEDAAAAARRVSSVYESTGLKGMLVYGVEHAEDGGACDENIQKFIETVEAAKTLPSSHLSSVVVKITAICPMNVLKRVSDLLRWQYKNPNFKLPWKLNSFPVFSGLSPLYHTTSEPEPLTVEEERELEKAHERLKSVCLRCQESNVPLLIDAEDTILQPAIDYMAYWSAIMFNSDKDRPIVYNTIQAYLKDAGERLHLALRESEKMNVPIGFKLVRGAYMSSEAKLADSLGYKSPVHDTIQNTHDCYNDCMSFLMEKASNGSGIAVILATHNTDSGKLGARKASELGINKENGKIEFAQLYGMSDALSFGLKRAGFNVSKYMPYGPVDTAIPYLIRRAYENRGMMSTGALDRQLMRKELKRRVMAW

SEQ ID NO: 5257 - DNA, 3183 bp, Pseudomonas aeruginosa PAO1
  CDS (1)..(3183): transl_table=11
atgttcaaagccagtcacgtcttgcagggcgaggaccagacccggtccgcagccgaattcttccctgtcatcagcgccaactacgcggtcgacgaggaagcctacctgggcgaactgctgcagctcgccgaccccggtcccgacggcatcgaggctatccgccgcaacgcccgcgcactgatcgaaaccgtgcgcagccgggacaacgccgtcgataccctcgacgcactcctgcgccaatacagcctggacacccaggaaggcctgatgctgatgtgtctggccgaggcgctgttgcgtgtgcctgacgcggcgaccgccgacgcgctgatccgcgacaagctgtccgccgccgactggcagcgccatctcggccagagcgacaacgttctggtcaatttcgccgcctggggcctggtgatgaccggcaaggtggtgaacatcgacgaacgcaccgacggccgcgccccgagcgtcatcagccggctggtgcagcgctctggcgaaccggtgatccgcgccgcgatgaaccaggcgatgaagctgatgggcaagcagttcgtgcttggccggaccatctccgaagcgctgaagaacggtcgtccatgccgcgagcagggctacacctattccttcgacatgctcggcgaggccgcgctgaccgccgccgacgccgagaaatacatggccgactaccgccaggccatcgacaccgtcggcgccgagccgcaggtcggtccggggccgcggccgtcgatctcgatcaagctctcggcgctgcatccgcgctacgaagtggcgcaacgcgagcgggtgctcagcgagctgttcgccaatgtcctggaactggcggtgcgcgcgcgcaagctgaacgtcggcatcaccatcgacgccgaggaagccgatcgcctggagctgtccctcgaactctacgagaagctgatgcgcgacccggccatcgccggctggggcgagttcggcctggtcatccaggcctactccaagcgctgcctgccggtgctggtatggctgaccctgctcggccgcgagcttggcgcacgcatcccgctgcgcctggtgaagggtgcctactgggacagcgagatcaagcagtgccaggtgcagggcgccgatggctaccccgtctacacccgcaaggaaggcaccgacacttcctacctggcctgcgcccgctacctgctcagcgagcacacccgcggggtgatctacccgcagttcgccagccacaacgcccacaccgtgaccgccatcctcgccctggccgacgaagccagggccgccggcggcgaggagcgcgacttcgagttccagcgcctgcacggcatgggcgacgcgctgtacgacacggtgatcgaaaagtaccgccgcaacgtgcgcatctacgccccggtcggcgcgcacaaggacctgctgccgtacctggtccgccgcctgctggagaacggcgccaactcttccttcgtgcacaagctggtggacccgcgcgtgccggtggagacgctgatccagcacccggttacccaactgcgccagttcaagacgctggccaacgaccgtatccctctgccccaggcgatcttcggcgccgggcggaaaaactcccagggcatcaacatgaacatccagaaccagtggaacgagctggagctcgcctacaagccgcacctgacccgccagtggcaagccgcgccgatcgtcaacggcgagaagctctccggcccggcccacgaagtgcgttgcccgtacgacctggagaggctggtcggcagcgtccagtacgcgtccgccgagcaggccggcaaggccctcgacgtgttgcaggcggcctggccgcgctggagcgccaccccggtggacgagcgtgccggcatcctcgagcgtctcgccgacctgctggaagcccagcgcggcgagctgatggcgctgtgcaccctggaagccggcaagtcgttgcaggatggtatcgacgagatccgcgaggcggtcgacttctgccgctactacgcccagcaggcccgccagcgcctggtccgcgaggaactgcgcggcccgaccggcgagcgcaacgagctgttctacgaaggccgcggcatcttcgcctgcgtcagcccgtggaacttcccgctggcgatcttcctcggccagatcagcgccgcgctggtggccggcaacaccgtgctggccaagccggccgagcagaccagcctgatcgccgcgcgcaccgtcgaactgatgttcgaagccggcctgccgaaggacgttatcgccctgctgccgggcgacggcgccaccctcggcggcgtgttctgccgtgacgcgcgggtcgccggggtggccttcaccggctccaccgacaccgcccgcatcatcaaccgccaactggccgagaagcccggcgccatcgccaccctgatcgccgagaccggcgggcagaacgcgatgatcgtcgattccaccgctttgccggaacaggtgatcaaggatgcggtacaatccgcgttcaccagcgccggccagcgctgctccgcgctgcgcgtgatgtacgtgcagcaggacatcgccgagcgggtgatcgagttgctgaagggcgccatggccgagctgaaggtcggcccgaccgaggtgcgcgtcagcgacgtcggcccggtgatcgacgccgaggccaaggccggcctggagcagcacatcgccgcgctgaaggccgccggcaagctgatcgccgagaccaaggtgccgggcaacctgaacggtcacttcgtcgctcccgtcgcgttcgagatcagcggcatcgacgagctgaagaaagagaacttcggcccggtgctgcacgtggtgcgttatgccgcgcaggacctggaaaaggtcgtgcaggcgatcaacgccaccggtttcggcctgaccatgggggtccatagccgcaacgaggaaaccgcccgtcgcatcgaagagctggcgcgggtcggcaacctctacatcaaccgcaaccagatcggcgcggtggtgggcgtgcaaccgttcggcggccacggcctgtccggcaccggtcccaaggccggcgggccgaactacctgctgcgtttcgtcagcgagcgcaccacgtcggtgaacaccaccgcggtgggcggcaacgcgtcgctgctgtcgctggccgacgccgagtga

SEQ ID NO: 5258 - protein, 1060 aa, Pseudomonas aeruginosa PAO1
MFKASHVLQGEDQTRSAAEFFPVISANYAVDEEAYLGELLQLADPGPDGIEAIRRNARALIETVRSRDNAVDTLDALLRQYSLDTQEGLMLMCLAEALLRVPDAATADALIRDKLSAADWQRHLGQSDNVLVNFAAWGLVMTGKVVNIDERTDGRAPSVISRLVQRSGEPVIRAAMNQAMKLMGKQFVLGRTISEALKNGRPCREQGYTYSFDMLGEAALTAADAEKYMADYRQAIDTVGAEPQVGPGPRPSISIKLSALHPRYEVAQRERVLSELFANVLELAVRARKLNVGITIDAEEADRLELSLELYEKLMRDPAIAGWGEFGLVIQAYSKRCLPVLVWLTLLGRELGARIPLRLVKGAYWDSEIKQCQVQGADGYPVYTRKEGTDTSYLACARYLLSEHTRGVIYPQFASHNAHTVTAILALADEARAAGGEERDFEFQRLHGMGDALYDTVIEKYRRNVRIYAPVGAHKDLLPYLVRRLLENGANSSFVHKLVDPRVPVETLIQHPVTQLRQFKTLANDRIPLPQAIFGAGRKNSQGINMNIQNQWNELELAYKPHLTRQWQAAPIVNGEKLSGPAHEVRCPYDLERLVGSVQYASAEQAGKALDVLQAAWPRWSATPVDERAGILERLADLLEAQRGELMALCTLEAGKSLQDGIDEIREAVDFCRYYAQQARQRLVREELRGPTGERNELFYEGRGIFACVSPWNFPLAIFLGQISAALVAGNTVLAKPAEQTSLIAARTVELMFEAGLPKDVIALLPGDGATLGGVFCRDARVAGVAFTGSTDTARIINRQLAEKPGAIATLIAETGGQNAMIVDSTALPEQVIKDAVQSAFTSAGQRCSALRVMYVQQDIAERVIELLKGAMAELKVGPTEVRVSDVGPVIDAEAKAGLEQHIAALKAAGKLIAETKVPGNLNGHFVAPVAFEISGIDELKKENFGPVLHVVRYAAQDLEKVVQAINATGFGLTMGVHSRNEETARRIEELARVGNLYINRNQIGAVVGVQPFGGHGLSGTGPKAGGPNYLLRFVSERTTSVNTTAVGGNASLLSLADAE

SEQ ID NO: 5259 - DNA, 3090 bp, Caulobacter crescentus CB15
  CDS (1)..(3090): transl_table=11
atgaccgattgggacagcctcgacgccggcaagtatcgcgacgaagccgcggtgatcgccgacctgctcgccgccaagccgctctccagcgaagaccgcgcggccgtccgcgccgaggccgaggcgctggtgcgcggggcccgccgcagcgtccgcaagcagggcgtggtcgaaagcttcctgcaggaattcagcctgggcacccgcgagggtctcgctttgatgtgcctggccgaggcgcttctccgcacccccgacgacgacacgcgcgacaagctgatcgctgagaagatcggctcggccgactgggccagccacctgggcggcagcgacagcctgttcgtcaacgcctcgacctggggcctgatgctgaccggcaagatcgtcgagcccgacgagacggcccgcaacgacatgcccggcttcatcaagaagctggccgggcggctgggcgagccggtgatccgcgccgccgtcggccaggcgatccgcatcatgggcgagcagttcgtcctgggccgcacgatcgaggccgccatcaagcgcgccgccgccgaaggcgacatgtgcagcttcgacatgctgggcgaaggcgcccgcaccgccgctgacgccgcgcgctatgaaaaggcctatgccgacgcgatcgagacggtcggcaagctgtcgaacggcgcgggtccggaagccggccacggcgtgtcggtcaagctctcggccctgtgcccgcgctatgaggccacccacgaagaccgcgtctgggaagagctctatccgcgcaccctacgtctggccaagatcgccgcccgccacaacctcaacttcaccatcgacgccgaagaggccgaccgcctggccctgtcgctgaagctcctggacaagctgtgccgcgagccggagctgggcgactggacgggcctgggcctggccgtccaggcctatcagaagcgctgcggcgaggtgatcgctcgcctgaaggccctctccgaagagaccggtcgccgcctgatggtgcgcctggtcaagggcgcctactgggacagcgagatcaagcgcgcccaggtcgccggtcgcccggactatccggtgttcaccaccaagccggccacggatctgtcgtacctcgtcaacgccaaggcgctgatcgaggccgccccgcacctctacgcccagttcgccacccacaacgcccacaccctggcggccgtggtgcgcatggccaagaacaccggcgtcaagatcgaacaccagcgcctgcacggcatgggcgaggctctctataaggccgccgacgatctctatgacgggatcaccctgcgggcctacgcgccggtgggcggtcacgaggacctcttgccctacctggtgcgtcgcctgctggagaacggcgccaacacctcgttcgtccacgccctgctggacgagcgcgtgccggtcgagaaggtcgtcaccgacccgatcgacacggtcgaggcccatcccgaccgccacgccaagatcccgacgccgatcaacgtctatggcgagcgccgcgtgaacagcgcgggcctggatctgtcggtaaaggccgaccgtgagcgcctctccgccgccgtcgcggcccaggacggcgtgaccctgtcagccggtccgctggtcggcggcaaggtcgtcgccggcggcgcgccgctgccgctcatcgccccggccaacgaccagaagacggtcggcgtggtctcggaagcgcaaagcgcgcagatcgacgaggccttcaagctggcccgcgccgcgcaaccggcctgggatcgcgccggcggcgtcgcccgcgcccaggtgctgcgcgccatgggcgatgcgctggaagccaatatcgagcgcctgatcgccctcctgtcgcgcgaagccggcaagaccctgtcggacggcatcgccgaggtccgcgaggccgtcgacttctgccgctactacgcgatgctggccgaagaccagttcggcgaggccgagatcctcaaaggtccggtcggcgagaccaacagcctgcgcctggccgggcgcggcgtctttgtctgcatcagcccgtggaacttcccgctggccatcttcaccggccagatcgccgcggccctggcggccggcaacgccgtgctggccaagcccgccgagcagaccccgctgatcgccttcgaggccgtgaagctctatcacgccgccggcctggacccgcgcctgctggccctgctgcccgggcgcggtgagaccgtcggcgcggccctgaccagccacgaggacctggacggcgtggccttcaccggcggcaccgacaccgcctggcgcatcaaccagaccctggccgcgcgccagggcccgatcgtgccgttcatcgccgagaccggcggcctcaacggcatgttcgtcgacacgacggcgcagcgcgagcaggtgatcgacgacgtgatcgtctcggccttcggttcggccggccagcgctgctcggccctgcgcctgctgttcctgccgcacgacaccgccgaccacatcatcgagggcctgaagggcgcgatggacgccctggtgctgggcgacccggccctggccgtcaccgacgtcggcccggtgatcgacgccgaggccaaggacgcgctggacaagcatctggttcgcctgaagtcggacgccaaggtgctgcacgccctggccgcccccgccggcgggaccttcttcgccccggtcctggccgagatcccgaccgccgacttcctggagcgcgaggtgttcggcccggtcctgcacgtcgtgcgctacaagccggagaaccttgaaaaggtcgccggcgccctggcggcccgccgctatggcctgacgctgggcatccactcgcggatcgagagcttcgcggccgacgtccagcgcctggtcccggccggcaacgcctatgtcaaccgctcgatgaccggcgccgtggtcggcgtccagccgttcggcggcgagggcctgtcgggcaccggccccaaggccggcggcccccacgccctgctccgcttcgcggtcgagcgcgcgctcagcgtcaacatcaccgcccagggcggcgacccggcgctgctgaacctgtag

SEQ ID NO: 5260 - protein, 1029 aa, Caulobacter crescentus CB15
MTDWDSLDAGKYRDEAAVIADLLAAKPLSSEDRAAVRAEAEALVRGARRSVRKQGVVESFLQEFSLGTREGLALMCLAEALLRTPDDDTRDKLIAEKIGSADWASHLGGSDSLFVNASTWGLMLTGKIVEPDETARNDMPGFIKKLAGRLGEPVIRAAVGQAIRIMGEQFVLGRTIEAAIKRAAAEGDMCSFDMLGEGARTAADAARYEKAYADAIETVGKLSNGAGPEAGHGVSVKLSALCPRYEATHEDRVWEELYPRTLRLAKIAARHNLNFTIDAEEADRLALSLKLLDKLCREPELGDWTGLGLAVQAYQKRCGEVIARLKALSEETGRRLMVRLVKGAYWDSEIKRAQVAGRPDYPVFTTKPATDLSYLVNAKALIEAAPHLYAQFATHNAHTLAAVVRMAKNTGVKIEHQRLHGMGEALYKAADDLYDGITLRAYAPVGGHEDLLPYLVRRLLENGANTSFVHALLDERVPVEKVVTDPIDTVEAHPDRHAKIPTPINVYGERRVNSAGLDLSVKADRERLSAAVAAQDGVTLSAGPLVGGKVVAGGAPLPLIAPANDQKTVGVVSEAQSAQIDEAFKLARAAQPAWDRAGGVARAQVLRAMGDALEANIERLIALLSREAGKTLSDGIAEVREAVDFCRYYAMLAEDQFGEAEILKGPVGETNSLRLAGRGVFVCISPWNFPLAIFTGQIAAALAAGNAVLAKPAEQTPLIAFEAVKLYHAAGLDPRLLALLPGRGETVGAALTSHEDLDGVAFTGGTDTAWRINQTLAARQGPIVPFIAETGGLNGMFVDTTAQREQVIDDVIVSAFGSAGQRCSALRLLFLPHDTADHIIEGLKGAMDALVLGDPALAVTDVGPVIDAEAKDALDKHLVRLKSDAKVLHALAAPAGGTFFAPVLAEIPTADFLEREVFGPVLHVVRYKPENLEKVAGALAARRYGLTLGIHSRIESFAADVQRLVPAGNAYVNRSMTGAVVGVQPFGGEGLSGTGPKAGGPHALLRFAVERALSVNITAQGGDPALLNL

SEQ ID NO: 5261 - DNA, 2973 bp, Synechocystis sp. PCC 6803
  CDS (1)..(2973): transl_table=11
atggttgcacaaatcgattcacaacaacagtatgaacaggccacccaggcgatcgccaaggaactattagcccagaccagggagaaaagatcgctgtgggacaaaattggcgataatctgcggctcgatgacaagttgctggattggaccatgggtcatcctggattgcgggtgcaattgttcaaatttatcgactgtctgccagcgttgcagagtaacagtgagattgccaaccatctccagcagtatatgagcgaagaggaggtggaattaccagaagcactgaaaaaattgttgaattttgccgatgcccactcgacgccggcccagattgcagcgggaacggtgagtaaagcgacggaacagttggcttttaaatacattgctggggaaacgatcgcccaggtgatcaaaacagtggaacggctccgcaaggaaaaaatgggctttaccattgatttactgggggaagcggtaattacggaatcggaggcggcggaatattggcaaaattatttggacctgatggcccagttatcccagcaagccaaatcctggtcgaaggtgccccaaattgatcaggcagacggggaaatattgccccaggtgcaggtatcggtaaagttaacggctttttattcccagtttgatcccctggaccccgcaggtagtaaagccaaggtttgtgagcggattcgggaattgttgcggcgagcccaagaattaggtgtcgctgttcactttgacatggagcagtaccactacaaagacctgattttaaatattctcaaggaattgttagtggaagaagagttccgctcccgcaccgatgtgggcattaccatgcaggcctatctgcgggattcgaccgaagatttggaagcattaattccctgggctaaacatcggggttatcccgtgactgtgcgcttggtgaaaggagcctattgggatcaagaaaccatcaaagcccaacagaatcattggcaaattccggtttatgtggaaaaagcccaaaccgatgccaactacgagcgcatgactcggctattactggaaaaccacgaatatttgtacgccgccattggtagtcataatgtccgttcccaagccctggcctgtgcgatcgccgaagagttgaatattcccaaacgtcgttatgaaatgcagattctttacggcatgggagaacccctggcccgggccattgttaaacggggtcatcgggtgcgggtctatgcaccctacggtcggctgttaccggggatggcttatttaatccgacgcttattggaaaatactgctaacagttcttttctacgccaaaacctagaagagcggcccattgaagaattaattgctccgccccaagttaaaggcattaatgacctacccaccaagggttatggcaacgctcccgacaccgattacgccgatgctgatttacgccagcaagcatttcaagccctaaccagggttaaacaacaattgggcaaaacctatctgccctacattaacggcgagtacgtggaaacggctaactacattgattccgttaatccctgtcgtccatcccaggcgatcgggaaagtggggttaatcagtgttgaacaggcagaccatgccctggaaatagccaaggctgcgtttcctgcttggaaaaaaactccagtacgggaacggtgtggcattctccgcaaagcggcagacattatggaagagcgtcgccatgagttaaacgcctggatttgtttggaagtgggcaaaattattccccaagctgatgcggaggtgtccgaggcgatcgatttttgtcgctactatgccgatgaaatggaacggctagaccaaggcgttaacctcgatattcccggtgaaaccaaccgttatttctatcaaccccggggcattgccctagtgatttccccctggaatttccccatggcgatcgccgttggtatgacggtggcggcgttggtgacgggcaattgtacgttactaaaaccagcggaaacttccacggtaattgcggctaaaattgcggaaattcttattgcagcgggggttccccctggggtcttccaatatgtacctggtaaggggtcggtggtgggttcccacatggtcaatcatcccgacgtacatttgattgctttcactggctccagggaagtgggctgtcgcatttacgccgatgccgctttggtacaaccaggacaaaaacacctcaaacgggtaattgcagaaatgggcggcaaaaacgccatcatcgttgatgaaagtgcggatctcgatcaagcggtggccggggcagtgtattccgcctttggttacacgggccaaaaatgttctgcctgttcccgggtggtggtgctttcccccgtacacgatgcctttgtggagcggtttgtagaggcaacccgttccctcaatgtgggccccaccgatgaccccagcacccaggttggtccggtaattgatgccaaggcccaagcccgcattcaggaatacatcgaacagggtaaggcggaatgtgaattggcgatcgcctgtgatgctcctagtgaaggctatttcgtcggtcccacggtgttcaaaaatgttgaccgccatgccaccattgcccaggaggaaatttttggtccagtggtaaccattattcgggcggccaattttgacgaagcgttggaaattgccaatggtaccgactacgctttaacggggggtctctattcccgtaccccagatcacattaatcgtgccgcggcggagtttgaagtaggcaatctttacatcaaccgcaccatcaccggggcgatcgtttcccgccaaccttttggggggttcaaaatgtctggggttggttccaaagcgggtggaccagattatttgttacagttcttagaaccacgccatgtaacggagaatattcaacggcaaggatttgcaccaattgagggggcagatcagtaa

SEQ ID NO: 5262 - protein, 990 aa, Synechocystis sp. PCC 6803
MVAQIDSQQQYEQATQAIAKELLAQTREKRSLWDKIGDNLRLDDKLLDWTMGHPGLRVQLFKFIDCLPALQSNSEIANHLQQYMSEEEVELPEALKKLLNFADAHSTPAQIAAGTVSKATEQLAFKYIAGETIAQVIKTVERLRKEKMGFTIDLLGEAVITESEAAEYWQNYLDLMAQLSQQAKSWSKVPQIDQADGEILPQVQVSVKLTAFYSQFDPLDPAGSKAKVCERIRELLRRAQELGVAVHFDMEQYHYKDLILNILKELLVEEEFRSRTDVGITMQAYLRDSTEDLEALIPWAKHRGYPVTVRLVKGAYWDQETIKAQQNHWQIPVYVEKAQTDANYERMTRLLLENHEYLYAAIGSHNVRSQALACAIAEELNIPKRRYEMQILYGMGEPLARAIVKRGHRVRVYAPYGRLLPGMAYLIRRLLENTANSSFLRQNLEERPIEELIAPPQVKGINDLPTKGYGNAPDTDYADADLRQQAFQALTRVKQQLGKTYLPYINGEYVETANYIDSVNPCRPSQAIGKVGLISVEQADHALEIAKAAFPAWKKTPVRERCGILRKAADIMEERRHELNAWICLEVGKIIPQADAEVSEAIDFCRYYADEMERLDQGVNLDIPGETNRYFYQPRGIALVISPWNFPMAIAVGMTVAALVTGNCTLLKPAETSTVIAAKIAEILIAAGVPPGVFQYVPGKGSVVGSHMVNHPDVHLIAFTGSREVGCRIYADAALVQPGQKHLKRVIAEMGGKNAIIVDESADLDQAVAGAVYSAFGYTGQKCSACSRVVVLSPVHDAFVERFVEATRSLNVGPTDDPSTQVGPVIDAKAQARIQEYIEQGKAECELAIACDAPSEGYFVGPTVFKNVDRHATIAQEEIFGPVVTIIRAANFDEALEIANGTDYALTGGLYSRTPDHINRAAAEFEVGNLYINRTITGAIVSRQPFGGFKMSGVGSKAGGPDYLLQFLEPRHVTENIQRQGFAPIEGADQ

SEQ ID NO: 5263 - DNA, 1851 bp, Caenorhabditis elegans
  CDS (1)..(1851)
atgcaagcagctttgataggactcaactttccattgcaaagacgctttttgtcaggtgtcctaaccacaacaagttccgccaaaagatgttattccggtgatacggggaaaccatacgattgtacatctgctgaacacaagaaagaactggaagaatgttataatcgattggatttatcttttgaaaatacaaaagaggcatttaagagcaaatcaaacaccgagctcgtgcgtgctcttgtcgttcttcgattatgcggaattcaaactcttgtcaatcaaaatcaaataattcttaatacaatgcgtcgtgttttgggaaagaatctgttcaagaaaacactgaaaaatacatttttcggacattttgtggctggtgaaactgaagaagaagtacgtcatgttgtggagaaacttcgaaattatggagtcaaatcgattttggattattcagttgaagcagatattacgagtcaagaagcaactgataagacggtcaaaggaacgtctgtagcgacggttaagccagcggcgatgacaccagttgtggatgcaaaaacgctcgaaacgacaagggaacggtacactgtacatgaagagtttggagatcggcggcagggtgtttctagtgcaagaacatatttctacgaaggagaagagcaatgtgacaagaatcgtgatattttcaaggattccataaacgctgttgcatcggctactaaaaacgaaggatttgttgctgtaaagattacagctctcggtagacctcaactacttttgaaactttctgaagctattgtacagactcagaactttttcaaagcgttgaccggtggaatgagtcttcaggagggaagattgacgtcacaggagttttataaaagacttggagaacttggcgtcaaaaccgacacagaatccgtcaagaaattcttcgacgaagtcgattttgattcggatggaattgttgatttacacggatggaatcacattttggatgatcacgtgaaactgggacaattgtttcaagtactgaacatcaagaccggatcacttgagccattgattcagaatttgtcaaacgaagaagaacaagaattcaggaatatggtacgaagaactcttgacgtggcagaatacgctattgagaagggagtcagaattatggtggacgccgagcagacttacttacagccagcgatctcaaagattacaattgaaatgatgaaaaaatacaataagggacgtggaaacatcttcaacacctaccaagcatacttgaagggaacccttcaaaatatggaggctgatatgcaagttgccagacgtgaaggatggcatttcggtgcaaaacttgttcgtggagcatacatggagcaggagagagcacgagcaaaagcaattggttatgaggatccgattaatgataattttgaggccacctcaaaaatgtacgagtcatgtctgacacgtatcgccgatgaagtacatcgtcgtggtaagaccaatgtgtccgtaatggtggcaagtcacaatgaggatacagtaagattcgcattgaatttgatgaaggaaaagtgtatttcaccatcggaacgtgttatgtgcatggcacagttgtacggaatgtgtgatcaggtatcattctccctgggtcaagccggtttctcagtctacaaatatcttccatatggaccagttgaagaagttctaccatatctaagtcgacgtgcacttgaaaatggaagtgtattgaaaaaagcgaataaggaacgtgatctcttgtggaaagagcttaaacgacgaatctcaagtggtgaatttaaagccagaagtagcagttcttcttaa

SEQ ID NO: 5264 - protein, 616 aa, Caenorhabditis elegans
MQAALIGLNFPLQRRFLSGVLTTTSSAKRCYSGDTGKPYDCTSAEHKKELEECYNRLDLSFENTKEAFKSKSNTELVRALVVLRLCGIQTLVNQNQIILNTMRRVLGKNLFKKTLKNTFFGHFVAGETEEEVRHVVEKLRNYGVKSILDYSVEADITSQEATDKTVKGTSVATVKPAAMTPVVDAKTLETTRERYTVHEEFGDRRQGVSSARTYFYEGEEQCDKNRDIFKDSINAVASATKNEGFVAVKITALGRPQLLLKLSEAIVQTQNFFKALTGGMSLQEGRLTSQEFYKRLGELGVKTDTESVKKFFDEVDFDSDGIVDLHGWNHILDDHVKLGQLFQVLNIKTGSLEPLIQNLSNEEEQEFRNMVRRTLDVAEYAIEKGVRIMVDAEQTYLQPAISKITIEMMKKYNKGRGNIFNTYQAYLKGTLQNMEADMQVARREGWHFGAKLVRGAYMEQERARAKAIGYEDPINDNFEATSKMYESCLTRIADEVHRRGKTNVSVMVASHNEDTVRFALNLMKEKCISPSERVMCMAQLYGMCDQVSFSLGQAGFSVYKYLPYGPVEEVLPYLSRRALENGSVLKKANKERDLLWKELKRRISSGEFKARSSSSS

SEQ ID NO: 5265 - DNA, 2046 bp, Drosophila melanogaster
  CDS (1)..(2046)
atggctctactccgttcgctgagcgcccaacgaacagccatcagtttggtctacggccgtaatagcagcaagtcgagcaattccgtggccgtcgccgcctgccggagtttccatcagcgcggcagcgggagcaccagcatcgccggagaaggagcagcatcggagtccacgagaggagtcaatggagcgcgcttcctgcacagcggcgaccggccgctgcaggcctccactctggtccaaccggaggtggtctccagcgagacggtgaagcgatcgatgaagcaggagtcgtcccaggaaaagaacccctcgcccgctggctcgccgcagagggatcccctggacgtgagctttaatgatccgattgctgctttcaagagcaagaccactggagagctaatacgcgcctatctcgtctacatgatatgttccagcgagaagctggtcgagcacaacatgacgcttatgaaatggtcaaagaacgtattgggtcaacggttatttacattattgatgaaggcgaccttctatggccactttgtcgccggcgaggatcagatcaagatcatacccacactggaaaggctaagatcctttggcgttaagccgattctcgattattccgttgaggaggatatcacccaggaggaggccgagaaacgtgaagttgaatcttccgtctccagtgcaggcgacaaaaaggaggagggcagcatgccgcagtaccatgtggacaagtcctttgcggatcggcgctacaaggtcagcagtgctcgcacctacttctacttgaacgaggccacctgcgagcggaacatggagatcttcatcaagtgtctggaggctgtttcggatgatgatcgcaaggcgccccgggcagtggccacgggcgccacctttggaactggcatcaccgccattaaactcaccgccctgggccgtccacaattgctgctgcaactgtccgaggtaatcatgcgcacacgcaagtacatggaggatatggtgggcggtcagggcaatgtgctgactcaccacaagaccatcaaggatctcgaaaagtattacgccacgctgggcgacaataaggacgtcaaggagttcctgaacaatgtaacgtccgataaggagggaattttgcatttgttcccctggtcgggcattgttgacgaggactcgcagctgagcgacacgttccgcgttcccgatccccaaaccggacagatgcgtcgactgatctcacaaataccgcccaaggaggaggagatgttcaggaacatgatccgtcgtctcaacacgattgtaaaggctgctgcggacttggatgtgcgtatcatggtggatgcggagcagacttacttccagccggccatctcccgtatcaccctggaaatgatgcgcaagtacaacaaggacaaggccattgtctttaatacgtaccagtgctatctgcgcgagacgttccgcgaggtgaacaccgatctggagcaggccaagcgccagaacttctacttcggcgccaagctggtgcgcggtgcctatatggaccaggagcgggaccgtgccaagtcgctgggctacccggatccggtaaatcccacgttcgaggccaccacggacatgtatcacaggacgttgtcggagtgcttgcgacgcattaagctgatgaaggactgtgatgacgatgccaggaagattggtattatggtggcctcgcacaacgaagacaccgtacgatttgccatccagcagatgaaggagatcggcatctcaccggaggacaaggtgatctgcttcggccaactgctgggcatgtgcgactacattacctttccactgggtcaagcgggatactcggcgtacaagtacataccatatggcccagtcgaagaggtgctgccctacttgtctcgtcgtgcccaggagaacaagggtgtgctcaagaagatcaagaaggaaaaacgcctgctgctctccgagattcggcgccgtctgatgcgtggccagttgttctacaagcccaagggcaattacgtgcccatctaa

SEQ ID NO: 5266 - protein, 681 aa, Drosophila melanogaster
MALLRSLSAQRTAISLVYGRNSSKSSNSVAVAACRSFHQRGSGSTSIAGEGAASESTRGVNGARFLHSGDRPLQASTLVQPEVVSSETVKRSMKQESSQEKNPSPAGSPQRDPLDVSFNDPIAAFKSKTTGELIRAYLVYMICSSEKLVEHNMTLMKWSKNVLGQRLFTLLMKATFYGHFVAGEDQIKIIPTLERLRSFGVKPILDYSVEEDITQEEAEKREVESSVSSAGDKKEEGSMPQYHVDKSFADRRYKVSSARTYFYLNEATCERNMEIFIKCLEAVSDDDRKAPRAVATGATFGTGITAIKLTALGRPQLLLQLSEVIMRTRKYMEDMVGGQGNVLTHHKTIKDLEKYYATLGDNKDVKEFLNNVTSDKEGILHLFPWSGIVDEDSQLSDTFRVPDPQTGQMRRLISQIPPKEEEMFRNMIRRLNTIVKAAADLDVRIMVDAEQTYFQPAISRITLEMMRKYNKDKAIVFNTYQCYLRETFREVNTDLEQAKRQNFYFGAKLVRGAYMDQERDRAKSLGYPDPVNPTFEATTDMYHRTLSECLRRIKLMKDCDDDARKIGIMVASHNEDTVRFAIQQMKEIGISPEDKVICFGQLLGMCDYITFPLGQAGYSAYKYIPYGPVEEVLPYLSRRAQENKGVLKKIKKEKRLLLSEIRRRLMRGQLFYKPKGNYVPI

SEQ ID NO: 5267 - DNA, 2943 bp, Thermosynechococcus elongatus BP-1
  CDS (1)..(2943): transl_table=11
atgaccggtctttacgaagcagaaacgatcgcgatcgcccggcaactgtgggcggccagccaagagtcccgcaacttttttagccaactgcgggagcaaatgcgcattgaagataagctcctcggctgggccatggaacatccgggtctacgggtacaactctttcgcctcattgactgtctgcccagtctgcgcagtcaaaccgaggtggcacgccacctgcaggagtacctcagtgatcccagtgtggagttgccgcccgggctgaaaaaactcttgaactttgcccagccggattccctgccggcccaagcagcggcaaccaccttcacaacagcagtgcaagccctggcccacaagtacattgccggtgaaaccaccgagcaggtgctaaaaaccattggccgtctgcgcaagcagggcatgctggtgacgatggatattcttggggaagcggtgattacggaggcagaggcacagcagtattgcgatcgctaccttgacttgatggagcacctcagtcccttgggccaacgggagggcgtgaatccagtccaggtctccgtaaagctgacggccttttactcccagtttgatcctttggatgtttctggctgccgtgccaaggtgggagagccgattcgccggctgttgcatcgtgcccaagaattgggggtggcagtgcactttgatatggagcagtatgcctacaaagacattaccttggcgatcctcaaggatattttgctagagccagagtttcgcgatcgcgccgatattgggctaacactgcaggcctatttgcgggatagctaccaagatgcccaagacctcattacttgggtacaacagcggggcacccccatcactgtgcgggtggtcaagggcgcctactgggatcaggaactcattaaggcagtgcaacatcattggccgttgcccgtctatcaacacaaacagaacacggatgccaactttgagcgcatcattgaactgctcctgagtcaccatacggtgttgcgcacagcgatcgcgagccataatgtgcgttcccaagcgcgggcgatcgcaattgctcaacggcagcacattccgcccacggccatggaatgccaagttctctacggcatggccgataaactggccaaggcattggtggaggcagggcaaacggtgcgggtctattgtccctatggcgatctcattccggggatggcctacctgattcggcgactcctggaaaataccgccaatagttcctttttacgccaacagttgggggctgtggccatcgaggaattactggccccaccggaaccaacggcggactttgaagccgtgaacgttcatctgaccacgggcaagacttcaacctttgtcaatgctgccaatagtgactatgcccgagccagccagcgggaagccattcaagcggccttaatccatgtccatcgccaactggggcaaacctatactcccatcatcaatggcgatcgcgtcaatccccgcgaatacagtgagtccctgaacccttcgcagccggaggaaatcgtcggtcgggttggcttggccaccattgaggatgccgagcatgcgatccgggctgccaaagccgctcaagcccaatggcaacagacctccgtggctgaacgggcaaccctgctccggcgggcagcagacctcctagaggcacagcgccatgaactggtggcttggatgtgctacgaagtgggcaaggtggtggcagaaggggatgccgaagtctccgaagccgttgatttttgccgctactacgccgatgaaatggagcgcctcagcagcggctatgaccgcaactttcccggtgaaaccaaccattaccactaccaagggcggggccttgcggttgtgatttctccttggaactttcccttggcgattcccaccggtatgaccgcggccgccctagtgacaggtaactgcacgattctcaaacctgcggatcccgccgccgtcgttgctgccaaactagcggagatcctgatggccgccggttttccgccgggggtgtttcagtttctccccggacgtggctccgtgattggcccctatttaacccaacatcccgatgtacatctcatcgcctttactggctcccaagaggtgggttgccgcattattgctgaggcagcagtgttacagcggggacaaagccacatcaagcgggtgattgccgagatggggggcaaaaacgccatcatcattgacgaaagtgccgacttagatcaggcagtggcgggggttgtgcagtccgcctttggctacagcggccaaaaatgctccgcctgttcgcgggtgattgtccttgagtccatctacaaaccctttgtggagcgcttagtggcggccacccagtccctgaatattgggccagcccacttgcccagtacccgtgtcggaccggtggtgacagccgctgcccgcgatcgcattcaggaatacattgccaaaggacagcaagaggcggaactcctcttgagcgtaccggtaccggagatgggctattttgtctcgcccacgatctttaccaacgtgccccccacggccacgatcgcccaagaggaaatttttggcccggtgctggccgtcctacgggcagaaaccttcacccaagcccttgcaattgccaatgccaccgcctatgccctgacaggggggctgtattcgcggacgccctcccatattcagcaggccaaagcccaatttgctgtagggaacctgtacatcaatcgggggattacaggggcgatcgtggatcggcagccctttggcggctttaagctgtcggggattggctccaaagccggtggacgcgattacctgctgcaattccttgaaccgcgggtcattaccgagaatgtccaacgtcaagggtttgcccccattgccggagtcgatgattga

SEQ ID NO: 5268 - protein, 980 aa, Thermosynechococcus elongatus BP-1
MTGLYEAETIAIARQLWAASQESRNFFSQLREQMRIEDKLLGWAMEHPGLRVQLFRLIDCLPSLRSQTEVARHLQEYLSDPSVELPPGLKKLLNFAQPDSLPAQAAATTFTTAVQALAHKYIAGETTEQVLKTIGRLRKQGMLVTMDILGEAVITEAEAQQYCDRYLDLMEHLSPLGQREGVNPVQVSVKLTAFYSQFDPLDVSGCRAKVGEPIRRLLHRAQELGVAVHFDMEQYAYKDITLAILKDILLEPEFRDRADIGLTLQAYLRDSYQDAQDLITWVQQRGTPITVRVVKGAYWDQELIKAVQHHWPLPVYQHKQNTDANFERIIELLLSHHTVLRTAIASHNVRSQARAIAIAQRQHIPPTAMECQVLYGMADKLAKALVEAGQTVRVYCPYGDLIPGMAYLIRRLLENTANSSFLRQQLGAVAIEELLAPPEPTADFEAVNVHLTTGKTSTFVNAANSDYARASQREAIQAALIHVHRQLGQTYTPIINGDRVNPREYSESLNPSQPEEIVGRVGLATIEDAEHAIRAAKAAQAQWQQTSVAERATLLRRAADLLEAQRHELVAWMCYEVGKVVAEGDAEVSEAVDFCRYYADEMERLSSGYDRNFPGETNHYHYQGRGLAVVISPWNFPLAIPTGMTAAALVTGNCTILKPADPAAVVAAKLAEILMAAGFPPGVFQFLPGRGSVIGPYLTQHPDVHLIAFTGSQEVGCRIIAEAAVLQRGQSHIKRVIAEMGGKNAIIIDESADLDQAVAGVVQSAFGYSGQKCSACSRVIVLESIYKPFVERLVAATQSLNIGPAHLPSTRVGPVVTAAARDRIQEYIAKGQQEAELLLSVPVPEMGYFVSPTIFTNVPPTATIAQEEIFGPVLAVLRAETFTQALAIANATAYALTGGLYSRTPSHIQQAKAQFAVGNLYINRGITGAIVDRQPFGGFKLSGIGSKAGGRDYLLQFLEPRVITENVQRQGFAPIAGVDD

SEQ ID NO: 5269 - DNA, 3180 bp, Shewanella oneidensis MR-1
  CDS (1)..(3180): transl_table=11
atgttcaaagcgagtgaagtgctggcaggccgctacgattctgccaatctcgacgaactgttcaaagctgtcaccgacaactacattgtcgatgaagaacaatacttgtcagagctaatcaaactagtcccctccagtgatgaagcgattgagcgcgtcactcgtcgtgcccacgaactggtgaacaaagttcgtcaatttgagaaaaaaggcttaatggttggcatcgatgccttcctacagcaatacagcttagagactcaggaaggtatcatcctgatgtgtttagccgaagccctactgcgtattcccgatgcggccaccgctgacgccttgattgaagataaactttcaggtgcaaaatgggatgaacacttaagcaagagcgattcggtactggttaacgcctccacttggggcctgatgctcaccggtaaaattgtcagcttagataaaaaaatcgacggcagctcaagtaacctattaggccgtttagtcaatcgtttaggtgaacccgtgatccgccaagccatgatggccgcgatgaaaatcatgggtaaacagttcgttcttggccgcaccatgaaagaagcgcttaagaacagcgaagacaagcgtaaattaggttacacccactcctacgatatgctgggcgaagccgcgctgacgcgtaaagatgccgaaaaatactttaccgattatgccaatgcgattaccgagttaggcgcgcaaagctataacgaaagtgaatctccacgcccaacgatttcaattaagttgtcggcattgcacccacgttacgaagtcgctaacgaagaccgtgtactaaccgagctgtatgacaccgtcattcgcctaattaaactcgcgcgcgggttaaatatcggtatttctatcgacgccgaagaagttgaccgtctcgaactgtcattaaagctgttccaaaaactgtttaattctgaagccactaaaggctggggattactgggtatcgttgttcaagcttactctaagcgcgcgctacctgtactggtatggttaacccgcctagcgaaagagcaaggcgatgaaatcccggttcgcttagtcaaaggcgcttactgggatagcgagcttaaatgggcgcagcaggcaggcgaagccgcttacccactttacacccgcaaagcagggacagacgtatcttacttagcctgtgcgcgttacctgttatccgacgccacccgcggcgcgatttaccctcaatttgccagccacaacgcgcaaaccgttgcggcaatttccgatatggcgggcgatcgtaaccacgaattccaacgtctacacggtatgggacaagagctgtacgacaccattctgtcggaagcgggcgcgaaagcagtacgtatctacgcccccatcggtgcccataaggatctgctgccctacttagtacgtcgcctactggaaaacggtgcgaacacctcgttcgtgcacaaactggtcgatccgaaaacgcctattgagtctttagtggttcatccgttaaagacattgaccagctacaaaaccctggctaacaacaaaatcgttttacctatcgatattttcggtagcgatcgcaaaaattccaagggactcaatatgaacattatttcagaagcagagccattcttcgcggccttagacaaattcaaatcaacacagtggcaagcgggtcctctggttaatggtcaacccttaactggcgagcacaaaaccattgttagcccattcgataccactcaaactgtgggtcaagtggcctttgccgacaaagcagctatcgaacaagccgtgtcttctgctcatgcggctttcggctcttggacccgtacacctgttgaagtgcgcgcctcggcactgcaaaagctagcggatctgttagaagaaaaccgcgaagaactgattgccctctgtacccgtgaagcaggtaagagcattcaagacggtatcgacgaagtgcgtgaagccgtcgacttctgccgttactacgcagtacaagccaagaagctgatgtcaaaacctgaactgctcccaggcccaacaggcgagttaaacgaactcttcctccaaggtcgcggtgtatttgtgtgtatcagcccatggaacttcccattagcgatcttcttaggccaagtctcagcggccctagcagcgggtaacactgtggtcgcaaaacctgcggaacagacgtcaatcattggttaccgcgcagtgcagttagcacaccaagcgggtattccaacggacgtgctgcaatatctgccaggtacaggcgccaccgttggtaacgcactgacggctgatgagcgcattggcggcgtatgctttaccggttcaacgggcacagccaaactgattaaccgcacgctggcaaaccgtgaaggcgcgatcattccgttaatcgccgaaaccggtggccaaaacgccatggtggttgattctacttctcaaccagaacaagtggttaacgatgtagtgtcttcatccttcaccagcgcgggtcaacgctgctcggcgctgcgcgtactcttcctgcaggaagatattgctgaccgcgttattgatgttctgcaaggtgcgatggatgagctagtgattggcaatccaagttcaatcaaaactgacgtaggtccagtgattgatgcaacagccaaagccaaccttgatgcccatatcgaccacattaagcaagttggcaagctgatcaagcaaatgtctctgccagcgggcactgagaatggtcactttgtagcgccaacagccgttgaaattgattcaatcaaagtgcttgaaaaagaacactttggcccaatcctgcacgtgatccgttacaaagcatcagaacttgcccatgtgatcgatgaaatcaacagcacaggctttggtttaaccttaggtatccacagccgtaacgaaggccatgccctcgaagtggcggataaagtgaatgtcggcaacgtgtacattaaccgtaaccaaatcggcgcggtggttggagtacagcctttcggcggtcaaggtctatctggcacaggtccaaaagccggtggtccacactacttaacccgtttcgtgactgaaaaaacccgcactaacaacatcaccgctatcggtggtaatgcgaccctgctgtcactcggtgatagcgacgcctaa

SEQ ID NO: 5270 - protein, 1059 aa, Shewanella oneidensis MR-1
MFKASEVLAGRYDSANLDELFKAVTDNYIVDEEQYLSELIKLVPSSDEAIERVTRRAHELVNKVRQFEKKGLMVGIDAFLQQYSLETQEGIILMCLAEALLRIPDAATADALIEDKLSGAKWDEHLSKSDSVLVNASTWGLMLTGKIVSLDKKIDGSSSNLLGRLVNRLGEPVIRQAMMAAMKIMGKQFVLGRTMKEALKNSEDKRKLGYTHSYDMLGEAALTRKDAEKYFTDYANAITELGAQSYNESESPRPTISIKLSALHPRYEVANEDRVLTELYDTVIRLIKLARGLNIGISIDAEEVDRLELSLKLFQKLFNSEATKGWGLLGIVVQAYSKRALPVLVWLTRLAKEQGDEIPVRLVKGAYWDSELKWAQQAGEAAYPLYTRKAGTDVSYLACARYLLSDATRGAIYPQFASHNAQTVAAISDMAGDRNHEFQRLHGMGQELYDTILSEAGAKAVRIYAPIGAHKDLLPYLVRRLLENGANTSFVHKLVDPKTPIESLVVHPLKTLTSYKTLANNKIVLPIDIFGSDRKNSKGLNMNIISEAEPFFAALDKFKSTQWQAGPLVNGQPLTGEHKTIVSPFDTTQTVGQVAFADKAAIEQAVSSAHAAFGSWTRTPVEVRASALQKLADLLEENREELIALCTREAGKSIQDGIDEVREAVDFCRYYAVQAKKLMSKPELLPGPTGELNELFLQGRGVFVCISPWNFPLAIFLGQVSAALAAGNTVVAKPAEQTSIIGYRAVQLAHQAGIPTDVLQYLPGTGATVGNALTADERIGGVCFTGSTGTAKLINRTLANREGAIIPLIAETGGQNAMVVDSTSQPEQVVNDVVSSSFTSAGQRCSALRVLFLQEDIADRVIDVLQGAMDELVIGNPSSIKTDVGPVIDATAKANLDAHIDHIKQVGKLIKQMSLPAGTENGHFVAPTAVEIDSIKVLEKEHFGPILHVIRYKASELAHVIDEINSTGFGLTLGIHSRNEGHALEVADKVNVGNVYINRNQIGAVVGVQPFGGQGLSGTGPKAGGPHYLTRFVTEKTRTNNITAIGGNATLLSLGDSDA

SEQ ID NO: 5271 - DNA, 2010 bp, Drosophila melanogaster
  CDS (1)..(2010)
atggctctactccgttcgctgagcgcccaacgaacagccatcagtttggtctacggccgtaatagcagcaagtcgagcaattccgtggccgtcgccgcctgccggagtttccatcagcgcggcagcgggagcaccagcatcgccggagaaggagcagcatcggagtccacgagaggagtcaatggagcgcgcttcctgcacagcggcgaccggccgctgcaggcctccactctggtccaaccggaggtggtctccagcgagacggtgaagcgatcgatgaagcaggagtcgtcccaggaaaagaacccctcgcccgctggctcgccgcagagggatcccctggacgtgagctttaatgatccgattgctgctttcaagagcaagaccactggagagctaatacgcgcctatctcgtctacatgatatgttccagcgagaagctggtcgagcacaacatgacgctgatgaaactggcgcgcaacctgctcggccagaagctcttcgtcctgctgatgaagtccagcttctacggacactttgtggccggcgagaatcgtcacacgatcgtgcccgccctagagaggctaagatcctttggcgttaagccgattctcgattattccgttgaggaggatatcacccaggaggaggccgagaaacgtgaagttgaatcttccgtctccagtgcaggcgacaaaaaggaggagggcagcatgccgcagtaccatgtggacaagtcctttgcggatcggcgctacaaggtcagcagtgctcgcacctacttctacttgaacgaggccacctgcgagcggaacatggagatcttcatcaagtgtctggaggctgtttcgggcgccacctttggaactggcatcaccgccattaaactcaccgccctgggccgtccacaattgctgctgcaactgtccgaggtaatcatgcgcacacgcaagtacatggaggatatggtgggcggtcagggcaatgtgctgactcaccacaagaccatcaaggatctcgaaaagtattacgccacgctgggcgacaataaggacgtcaaggagttcctgaacaatgtaacgtccgataaggagggaattttgcatttgttcccctggtcgggcattgttgacgaggactcgcagctgagcgacacgttccgcgttcccgatccccaaaccggacagatgcgtcgactgatctcacaaataccgcccaaggaggaggagatgttcaggaacatgatccgtcgtctcaacacgattgtaaaggctgctgcggacttggatgtgcgtatcatggtggatgcggagcagacttacttccagccggccatctcccgtatcaccctggaaatgatgcgcaagtacaacaaggacaaggccattgtctttaatacgtaccagtgctatctgcgcgagacgttccgcgaggtgaacaccgatctggagcaggccaagcgccagaacttctacttcggcgccaagctggtgcgcggtgcctatatggaccaggagcgggaccgtgccaagtcgctgggctacccggatccggtaaatcccacgttcgaggccaccacggacatgtatcacaggacgttgtcggagtgcttgcgacgcattaagctgatgaaggactgtgatgacgatgccaggaagattggtattatggtggcctcgcacaacgaagacaccgtacgatttgccatccagcagatgaaggagatcggcatctcaccggaggacaaggtgatctgcttcggccaactgctgggcatgtgcgactacattacctttccactgggtcaagcgggatactcggcgtacaagtacataccatatggcccagtcgaagaggtgctgccctacttgtctcgtcgtgcccaggagaacaagggtgtgctcaagaagatcaagaaggaaaaacgcctgctgctctccgagattcggcgccgtctgatgcgtggccagttgttctacaagcccaagggcaattacgtgcccatctaa

SEQ ID NO: 5272 - protein, 669 aa, Drosophila melanogaster
MALLRSLSAQRTAISLVYGRNSSKSSNSVAVAACRSFHQRGSGSTSIAGEGAASESTRGVNGARFLHSGDRPLQASTLVQPEVVSSETVKRSMKQESSQEKNPSPAGSPQRDPLDVSFNDPIAAFKSKTTGELIRAYLVYMICSSEKLVEHNMTLMKLARNLLGQKLFVLLMKSSFYGHFVAGENRHTIVPALERLRSFGVKPILDYSVEEDITQEEAEKREVESSVSSAGDKKEEGSMPQYHVDKSFADRRYKVSSARTYFYLNEATCERNMEIFIKCLEAVSGATFGTGITAIKLTALGRPQLLLQLSEVIMRTRKYMEDMVGGQGNVLTHHKTIKDLEKYYATLGDNKDVKEFLNNVTSDKEGILHLFPWSGIVDEDSQLSDTFRVPDPQTGQMRRLISQIPPKEEEMFRNMIRRLNTIVKAAADLDVRIMVDAEQTYFQPAISRITLEMMRKYNKDKAIVFNTYQCYLRETFREVNTDLEQAKRQNFYFGAKLVRGAYMDQERDRAKSLGYPDPVNPTFEATTDMYHRTLSECLRRIKLMKDCDDDARKIGIMVASHNEDTVRFAIQQMKEIGISPEDKVICFGQLLGMCDYITFPLGQAGYSAYKYIPYGPVEEVLPYLSRRAQENKGVLKKIKKEKRLLLSEIRRRLMRGQLFYKPKGNYVPI

SEQ ID NO: 5273 - DNA, 1071 bp, Drosophila melanogaster
  CDS (1)..(1071)
atgcgcacacgcaagtacatggaggatatggtgggcggtcagggcaatgtgctgactcaccacaagaccatcaaggatctcgaaaagtattacgccacgctgggcgacaataaggacgtcaaggagttcctgaacaatgtaacgtccgataaggagggaattttgcatttgttcccctggtcgggcattgttgacgaggactcgcagctgagcgacacgttccgcgttcccgatccccaaaccggacagatgcgtcgactgatctcacaaataccgcccaaggaggaggagatgttcaggaacatgatccgtcgtctcaacacgattgtaaaggctgctgcggacttggatgtgcgtatcatggtggatgcggagcagacttacttccagccggccatctcccgtatcaccctggaaatgatgcgcaagtacaacaaggacaaggccattgtctttaatacgtaccagtgctatctgcgcgagacgttccgcgaggtgaacaccgatctggagcaggccaagcgccagaacttctacttcggcgccaagctggtgcgcggtgcctatatggaccaggagcgggaccgtgccaagtcgctgggctacccggatccggtaaatcccacgttcgaggccaccacggacatgtatcacaggacgttgtcggagtgcttgcgacgcattaagctgatgaaggactgtgatgacgatgccaggaagattggtattatggtggcctcgcacaacgaagacaccgtacgatttgccatccagcagatgaaggagatcggcatctcaccggaggacaaggtgatctgcttcggccaactgctgggcatgtgcgactacattacctttccactgggtcaagcgggatactcggcgtacaagtacataccatatggcccagtcgaagaggtgctgccctacttgtctcgtcgtgcccaggagaacaagggtgtgctcaagaagatcaagaaggaaaaacgcctgctgctctccgagattcggcgccgtctgatgcgtggccagttgttctacaagcccaagggcaattacgtgcccatctaa

SEQ ID NO: 5274 - protein, 356 aa, Drosophila melanogaster
MRTRKYMEDMVGGQGNVLTHHKTIKDLEKYYATLGDNKDVKEFLNNVTSDKEGILHLFPWSGIVDEDSQLSDTFRVPDPQTGQMRRLISQIPPKEEEMFRNMIRRLNTIVKAAADLDVRIMVDAEQTYFQPAISRITLEMMRKYNKDKAIVFNTYQCYLRETFREVNTDLEQAKRQNFYFGAKLVRGAYMDQERDRAKSLGYPDPVNPTFEATTDMYHRTLSECLRRIKLMKDCDDDARKIGIMVASHNEDTVRFAIQQMKEIGISPEDKVICFGQLLGMCDYITFPLGQAGYSAYKYIPYGPVEEVLPYLSRRAQENKGVLKKIKKEKRLLLSEIRRRLMRGQLFYKPKGNYVPI

SEQ ID NO: 5275 - DNA, 3132 bp, Vibrio vulnificus CMCP6
  CDS (1)..(3132): transl_table=11
atgtttacagcaacagatgtgttaaagccggagtttgtcgcgcagccgctcgataagctatgggcattgatctccccattgtatatggtggacgaatctcaatggctggagcagctcctgccactggcaaccccttcagcggaagaaaagcaagcgatcgccagccgaacgactcagttaattgaagcgattcgcgccgacaagaagtcgattcaattgatcgatgcactgttgttggaatacagcctagacacgcacgaaggcattttgctgatgtgtttggcagaagcgctgatgcgtattccggatgcggccacggctgacgctctgatcaaagataaaatgagcgtggcagattggaaatcgcatcttaaaaattctgaatctgtgtttgtcaacgcctcgacatggggcctcatgctgacaggtaaagtggtgggcttgggtgatgatgaaacgcaaagtgctagccaagcgctcaatcgcttagtgaacaagctttctgagccagtgatccgcaaagccatgtatcaggcaatgaagatcatgggtcatcagttcgttcgtggtcgcaccatcgaagaggcgcagaaaaatggccgcccgatgcgcgataaaggcttcacttactcttttgacatgctgggtgaagcggcgctgaccactgcggatgccaataaatacttcaaagattatttgatggcgattgaagcggtgggtcgtgaaacgtatggtaacgacaccagccccgcgccgtcggtatcgatcaagctctctgccttgcatcctcgctatgaagtggccaatgaacaccgcgtgatgagcgagctgtttgatacgttagcacaactgcttaaacgtgctgtcgagctagacgttgcgattaccattgatgcggaagaagccgaccgcctagagctctctctcaaactgtttgaaaaactctaccgcagtgaaacggtcaaaggctggggtaagtttggcctggtggtgcaagcgtattccaaacgcgctctgccggtgttggtgtggctcaatgcgctggctaaagagcaaggcgatttgatcccgctgcgtttggtgaaaggcgcgtattgggacagcgaagtgaagtggtctcagcagcgcggttacgataactacccggtttacactcgcaaagaagctaccgatgtggcgtacttagcgtgtgctcgcttcctgttaagcgatgacgtgcgcggcaacatcttcccgcaatttgctagccataacgcgcaaaccgtttcctcgatcgccaccatggcgactcacagtgactacgagttccaacgtctgcatggcatgggcgattcactttataaccatgtgatggaacagtatcgtcagccagtacgaatttacgcgccagtgggcagccacaaagatttgctgccatacctagtgcgtcgtctgctggaaaacggtgccaacagttcgtttgtacaccgtttggttgatgcgcgctgcccagtggcagagctcaccaaacatccagtagaagcactgacctcatttgaaacactgaacaataccaagatcccattgccagcggcgattttccctgagcgtaaaaactcctatggcgttaatgtggatatcgaaagcgaagccaagccgtttgaagcacaggtcgagtccttcttgagcaagcagtggttagcgggcccaatcatcaatggcgcttcgctggccgaaagcatgatcaaggacggtcaagcggaaagtgtcacagcgccgtatgatcgtcgtatccaagtggggcaaattgcgtttgctaaccttgatcatgtttcccaagcgatcgacatcgcacaagcggcttttgcggattggaatcgcacaccgttggtggagaaagcgcgttgcctagacaacctcgctgatttgatggaagccaacttggctgagctggtggcgctttgtcaccaagaagcgggcaagacactgcatgacagtattgatgaagtgcgtgaagcggtcgatttctgtcgttactacgccaaacaagcgcaaaatctgcaaccttttgagttagaaggctttgatggcgtgaaacgcgttgccagccgtgaaggtttgggggtattcgtctgcattagcccgtggaacttcccactggcgattttccttggtcaagtgaccgcggcgctcgtggcgggcaacacggtcgtagcgaaaccggcggaacaaaccagtttgatcgcggtgcgtgcggtagagctcatgctacaagcaggtttcccagcaggcgttgttcaactgatccctggtcgtggtgcggatattggctcggcgctcacctctcacccagccattgcaggggtggcgtttacgggctccaccgccacggcgcaacgcatcaacgtaactttggcacaacgtgaagccaaaccggtgccgtttatcgccgaaaccggtggtcaaaacgcgatgatcgttgatagtactgcgctgccagagcaggtggtgcgtgatgtgattcgttctgcctttgcttctgcaggtcaacgctgttcagcactgcgtgtgctgtttgttcagcaagacattgccgatcgagtgattggcctgatccaaggggcaatgaatgaactgagtgttggtgtgccgcatcgacacaaaaccgatgtggggccagtgattgacgcgcgcgcgaaagaaaagctgctgctgcatatcgagcagatgaaccaaactcagaggccgattgcgcaactgacactggcggacgattgtcagcatggtgattttgtcgcaccaacggcatttgaaatctcaggtatcgacgtgcttaaagaagagcagtttggcccgatcctgcacattgtgcgtttcaaagcgtctgaactgactcgcgtggtggaacaaatcaaccaaacgggctttggtttgaccatgggtattcacagtcgtaacgaaaccacctaccgctggatcgaaaaacacgctcgagtagggaactgctacattaaccgtgaccaagtgggtgcggtggttggcgtgcagccattcggtggtcagggcttatcggggactgggccaaaagcaggtggtccacactacttgtatcgctttacccaagtgcaatttaaccagactgagaacgcataa

SEQ ID NO: 5276 - protein, 1043 aa, Vibrio vulnificus CMCP6
MFTATDVLKPEFVAQPLDKLWALISPLYMVDESQWLEQLLPLATPSAEEKQAIASRTTQLIEAIRADKKSIQLIDALLLEYSLDTHEGILLMCLAEALMRIPDAATADALIKDKMSVADWKSHLKNSESVFVNASTWGLMLTGKVVGLGDDETQSASQALNRLVNKLSEPVIRKAMYQAMKIMGHQFVRGRTIEEAQKNGRPMRDKGFTYSFDMLGEAALTTADANKYFKDYLMAIEAVGRETYGNDTSPAPSVSIKLSALHPRYEVANEHRVMSELFDTLAQLLKRAVELDVAITIDAEEADRLELSLKLFEKLYRSETVKGWGKFGLVVQAYSKRALPVLVWLNALAKEQGDLIPLRLVKGAYWDSEVKWSQQRGYDNYPVYTRKEATDVAYLACARFLLSDDVRGNIFPQFASHNAQTVSSIATMATHSDYEFQRLHGMGDSLYNHVMEQYRQPVRIYAPVGSHKDLLPYLVRRLLENGANSSFVHRLVDARCPVAELTKHPVEALTSFETLNNTKIPLPAAIFPERKNSYGVNVDIESEAKPFEAQVESFLSKQWLAGPIINGASLAESMIKDGQAESVTAPYDRRIQVGQIAFANLDHVSQAIDIAQAAFADWNRTPLVEKARCLDNLADLMEANLAELVALCHQEAGKTLHDSIDEVREAVDFCRYYAKQAQNLQPFELEGFDGVKRVASREGLGVFVCISPWNFPLAIFLGQVTAALVAGNTVVAKPAEQTSLIAVRAVELMLQAGFPAGVVQLIPGRGADIGSALTSHPAIAGVAFTGSTATAQRINVTLAQREAKPVPFIAETGGQNAMIVDSTALPEQVVRDVIRSAFASAGQRCSALRVLFVQQDIADRVIGLIQGAMNELSVGVPHRHKTDVGPVIDARAKEKLLLHIEQMNQTQRPIAQLTLADDCQHGDFVAPTAFEISGIDVLKEEQFGPILHIVRFKASELTRVVEQINQTGFGLTMGIHSRNETTYRWIEKHARVGNCYINRDQVGAVVGVQPFGGQGLSGTGPKAGGPHYLYRFTQVQFNQTENA

SEQ ID NO: 5277 - DNA, 2991 bp, Gloeobacter violaceus PCC 7421
  CDS (1)..(2991): transl_table=11
atggaattgccgccattccaggaaactcgcgtgctcaccgtcgatccgatcgaatccgaaacccagcgcatcggccaatcgctgctcgctgccccccagcagagtcgtttttcattttttgagcgttctttttgggacgagaagctgctggagtgggcgatggcggacgacgagctgcgcgtgcagctgtttcgctttatcgactgcctgcctgccctcaagaccaatcgcgaggtggcttcccacctgcaggagtacctggggtcggtgaagctgcccgggccgctggccaaggcgctcgattttgccgacccgggttctccggcggcggcggtggcgacgttgggcttgcgccagggcatcagccagatggcccgccgctttatctgcggcgagaatctcaaaaccgccgtcaagacgatcgagaagttgcgttctcagaacatggccgtctcgctggacttgctcggtgaggcggtggtctcggaggcggaagccgaggtgtatcagcggcgctacttggagttgctgagcgatctgcacgccgcccaatcgcgctggccggtgatcgaccaaatcgaccgggcggacggacaattgctgccccgggtgcatttcgccctcaaactcacctcgctctacagccagttcgacgctatcgaccccgccactacaggccgcaacgtcaaggcgcgcctgcggccgattttgcggaaggcgcgggagttgggcgccttcgtgcacatcgacatggagcaatcccaacacaaagacctgatcttgcagatttttaaagaggtcatggtcgaagcggattttcgcgattggatcgacaccggtatctgtctgcaggcgtacctgcgctccgccgaactcgatgcggccaatgtcatcgcctggtcaaaagaacgcggctatccggtcactgtgcgcctggtcaaaggtgcctactgggacggcgaagtcatccgcgcagcccagcagcgctggcctgtgccggtctttacccgcaaggccgataccgacgcgcagtacgaaaaagtcctgcacctgctgatggagaatcatcggagtgtgcacatcgcggtgggcagccacaacgcccgcacggtggctttggcgattgccctggctcgccggaaccgggtaccgcgccgggcctttgaagtgcagatgctctacgggatggcggaccacctcaaggcgggagtggcgcagcagggagagcgattgcgggtgtacgcgccctacggagagctgttgcccgggatggcgtatctgattcgccggttgttggagaacacggcgaacacgtcgtttttgcgccagagtgtgcgtccgggcagcgatgtggtgcggttactggccccccccgctgcgagcggcgaggcggcgccgagcctgatgggcagcgaatttgtcaatgcaccggatcgagattttgcggtggcggcggagcgcgagaagctggcggctgggctggccgaggtgcgcacctgttttggacagacgtactggccggtggtgggaggtaaagcgcgcagaggtttgcccacgctctcggtccccaacccggctgaacctgggaccgtcctgggagcgctcggtcttgccgacgctgaattggccgacgaagcggtcaaagttgcccacaccgcctggcttagttggagcaaaaccacccccgaagcgcgcgcccgactgcttgggcgcctcgccgaactgatggaacaacagcgttccgccctcaccgcctggatcgtctacgagaccggcaaaccctggcgcgaatccgacgccgacgtctcagaagcgatcgacttctgccgctactacggccggcaaatcctcaagctcaccgcccaggcccagcaccgcgacgtgccgggcgaaaccaacggctaccactaccgctcgcggggggtggcggcggtgatcgctccgtggaattttccgctcgccatcctcaccggcatgaccaccgcggcgcttgccacaggcaataccgtgatcatgaaaccggccgagcagtcatcgattgtggccgctcaactgatgcggctgtgcgagcaagccggttttgcggccggggtggtcaactacctgccgggcaggggcgaggtggtcggagcgaagctggtggcgcacccgcaggtgcatttgattgctttcaccggttcgcttgcggtcggtcagcggattttggccgaggcgagcatggtgcgtccgggtcagcgccacctcaagcgggtgattgcggagttgggaggtaagaacgcgatcatcgtcgacagcgacgcggatctcgaccaggcggtcgtgggggtggtgcaatcggcgttcggctacagcggccagaagtgctcggcctgttcgcggctgattgtgctcgaagggatttacgacgtctttatcgaacggctcgtccaggccacccgctcgctcatcgtgggcaatcccgcacagcccgccacctacaccggcccggtgattgcccgcgacgcctgcgagcgcatccgtggcgtcatcgaagatgccaagggtcgccatcgcctggtgttggaggtagatgtctctcacctgggcgaggggtactttatcgggccgaccatcttcgcggacgtcgatccgcaatcgtcactggcccaggaagaaatcttcggcccggtgctcgccgtcatcaaagcccgcgacttcgagcacgccatcgagattgccaacggcaccagctttgctttgaccggcggcctcttctcgcgcagcccgaggcacattgccgaagcgcgcgagcgctttgaagtgggcaatctgtacatcaaccgcaagatcaccgcagctttggtggaccggcagcccttcgggggcttccgcctttcgggcgtcggctcgaaggcggggggaccggactacctgctgcaatttgtcgagccggtgacggtgacggaaaacatccagcgccagggcttcgcacctctgccgggcgagctgtag

SEQ ID NO: 5278 - protein, 996 aa, Gloeobacter violaceus PCC 7421
MELPPFQETRVLTVDPIESETQRIGQSLLAAPQQSRFSFFERSFWDEKLLEWAMADDELRVQLFRFIDCLPALKTNREVASHLQEYLGSVKLPGPLAKALDFADPGSPAAAVATLGLRQGISQMARRFICGENLKTAVKTIEKLRSQNMAVSLDLLGEAVVSEAEAEVYQRRYLELLSDLHAAQSRWPVIDQIDRADGQLLPRVHFALKLTSLYSQFDAIDPATTGRNVKARLRPILRKARELGAFVHIDMEQSQHKDLILQIFKEVMVEADFRDWIDTGICLQAYLRSAELDAANVIAWSKERGYPVTVRLVKGAYWDGEVIRAAQQRWPVPVFTRKADTDAQYEKVLHLLMENHRSVHIAVGSHNARTVALAIALARRNRVPRRAFEVQMLYGMADHLKAGVAQQGERLRVYAPYGELLPGMAYLIRRLLENTANTSFLRQSVRPGSDVVRLLAPPAASGEAAPSLMGSEFVNAPDRDFAVAAEREKLAAGLAEVRTCFGQTYWPVVGGKARRGLPTLSVPNPAEPGTVLGALGLADAELADEAVKVAHTAWLSWSKTTPEARARLLGRLAELMEQQRSALTAWIVYETGKPWRESDADVSEAIDFCRYYGRQILKLTAQAQHRDVPGETNGYHYRSRGVAAVIAPWNFPLAILTGMTTAALATGNTVIMKPAEQSSIVAAQLMRLCEQAGFAAGVVNYLPGRGEVVGAKLVAHPQVHLIAFTGSLAVGQRILAEASMVRPGQRHLKRVIAELGGKNAIIVDSDADLDQAVVGVVQSAFGYSGQKCSACSRLIVLEGIYDVFIERLVQATRSLIVGNPAQPATYTGPVIARDACERIRGVIEDAKGRHRLVLEVDVSHLGEGYFIGPTIFADVDPQSSLAQEEIFGPVLAVIKARDFEHAIEIANGTSFALTGGLFSRSPRHIAEARERFEVGNLYINRKITAALVDRQPFGGFRLSGVGSKAGGPDYLLQFVEPVTVTENIQRQGFAPLPGEL

SEQ ID NO: 5279 - DNA, 1185 bp, Photorhabdus luminescens subsp. laumondii TTO1
  CDS (1)..(1185): transl_table=11
atggctaataaaaaatcaaacaataataaggtttttaaagacgaaacatcactgtattctagatatagtatatcaaccctttttcttaagttttttgtaactttattgttaacaaataaaatcacaaaaaaaatttccttatggatgatgagatttattttaaataaaaaaaataagttttttattaggtttttaaatggggtttattttggtggtgaaagtatagatgaagcaaaggctaatgtgatttttctatcaaaaaataatattcatagcatattagattatgcaattgaagggaaaaacgacgaaattttctttgataatgcgctagagtcaacattaaaattaattgatctcgctagcaaagagtccaatataccatatgttgccattaagccttcatcactaggagatattcatctttatgaagaaaaaatgagaggttggaatttttttggagaaaaaattaattcttggagtaggatattagaacgttatgaaaaaatatttcattatgcagaaattaaatcagttaaagttatgattgatgcagagcaatcttggattcaggcagcagtagacaagattgtcatagatagcattattaaacacaataaaatattacctattataacattaacaatacaatcctacaaaaaagaatccattgatcttctgatgttactacataaaattgctattgataataacattaaagttggtattaagattgttagaggagcttatttagaagaagagattaaaaataaagaaaaatcaattggaacattttttttaaataaagaagagactgatttaaattataattatttagttgaatacatatcaaaaagaattgagtatttttatcctttttttgcaactcataatgaaaatagtatatcaatcatattaaataagaatgaattaaaaaataaatcattttggattggacaattgtacgggattggagatcatatttcatcaaaattagcttacaatggtattaggacgtgtaaatatttgccatatgggccaattgataaatcattgccatatttattaagaaggataaatgaaaatgcagtggcttcagatacctttgttacagaaaacagaaagataatgaaagagattattttaagattaaaaaatacgggagataaaaatggatgtctttaa

SEQ ID NO: 5280 - protein, 394 aa, Photorhabdus luminescens subsp. laumondii TTO1
MANKKSNNNKVFKDETSLYSRYSISTLFLKFFVTLLLTNKITKKISLWMMRFILNKKNKFFIRFLNGVYFGGESIDEAKANVIFLSKNNIHSILDYAIEGKNDEIFFDNALESTLKLIDLASKESNIPYVAIKPSSLGDIHLYEEKMRGWNFFGEKINSWSRILERYEKIFHYAEIKSVKVMIDAEQSWIQAAVDKIVIDSIIKHNKILPIITLTIQSYKKESIDLLMLLHKIAIDNNIKVGIKIVRGAYLEEEIKNKEKSIGTFFLNKEETDLNYNYLVEYISKRIEYFYPFFATHNENSISIILNKNELKNKSFWIGQLYGIGDHISSKLAYNGIRTCKYLPYGPIDKSLPYLLRRINENAVASDTFVTENRKIMKEIILRLKNTGDKNGCL

SEQ ID NO: 5281 - DNA, 3132 bp, Vibrio vulnificus YJ016
  CDS (1)..(3132): transl_table=11
atgtttacagcaacagatgtgttaaagccggagtttgtcgcgcagccgctcgataagctatgggcattgatctccccattgtatatggtggacgaatctcaatggctggagcagctcctgccactggcaaccccttcagcggaagaaaagcaagcgatcgccaaccgaacgactcagttaattgaagcgattcgcgccgacaagaagtcgattcaattgatcgatgcactgttgttggaatacagcctagacacgcacgaaggcattttgctgatgtgtttggcagaagcgctgatgcgtattccggatgcggccacggctgacgctctgatcaaagataagatgagcgtggcagattggaaatcgcatcttaaaaattctgaatctgtgtttgttaacgcctcgacatggggcctcatgctgacaggtaaagtggtgggcttgggtgatgatgaaacgcaaagtgctagccaagcgctcaatcgcttagtgaacaagctttctgagccggtgatccgcaaagccatgtatcaggcgatgaagatcatgggtcatcagttcgttcgtggccgcaccatcgaagaggcgcagaaaaatggccgcccaatgcgcgataaaggcttcacttactcttttgatatgctgggtgaagcggcgctgaccaccgcggatgccaataaatacttcaaagattatttaatggcgatcgaggcggtgggccgtgaaacgtatggtaatgacaccagccctgcgccatcggtatcgatcaaactctctgccttgcatcctcgctatgaagtggccaatgaacaccgcgtgatgagcgagctgtttgatacgttagcacaactgctgaaacgcgctgtcgagctagacgttgcgattaccattgatgcggaagaagccgatcgtctagagctctctctcaaactgtttgaaaaactttaccgcagtgaaacggtaaaaggttggggcaagtttggcctggtggtgcaagcgtattccaaacgcgctctgccggtgttggtgtggctcaatgctcttgctaaagagcaaggggatttgatcccactgcgtttggtgaaaggcgcgtattgggacagcgaagtgaagtggtctcagcagcgcggttacgataactacccggtttacactcgcaaagaagccaccgatgtggcgtacttagcgtgtgctcgcttcctgttgagcgatgacgtgcgcggcaacattttcccgcaatttgctagccataacgcgcaaaccgtttcctcgatcgccaccatggcgactcacagcgactacgagttccaacgtctgcatggcatgggcgattcactctataaccatgtgatggagcagtatcgtcagccagtacgaatttacgcgcctgtgggcagccacaaagatttgctgccatacctagtgcgtcgtctactggaaaacggtgccaacagctcgtttgtacaccgtttggttgatgcgcgctgcccagtggcagagctcaccaaacatccagtagaagcactgacctcatttgaaaccctgaacaataccaagatcccattgccagcggcgattttccctgagcgtaaaaactcctatggcgttaacgtggatatcgaaagtgaagctaagccgtttgaagcacaggtcgagtccttcttgagcaagcagtggttagcgggcccgatcatcaacggagcatcgctggccgaaagcatgatcaaggacggtcaagcggaaagtgtcacagcgccgtatgatcgtcgtatccaagtggggcaaattgcgtttgctaaccttgatcatgtttcccaagcgatcgacatcgcacaagcggcttttgcggattggaatcgcacaccgttggtggagaaagcgcgttgcctagacaacctcgctgatttgatggaagccaacttggctgagctggtggcgctttgtcaccaagaagcgggcaagacactgcatgacagtattgatgaagtgcgtgaagcggtcgatttctgtcgttactacgccaaacaagcgcaaaatctgcaaccttttgaactagaaggttttgatggcgtgaaacgcattgccagccgtgaaggtttgggggtattcgtctgcattagcccgtggaacttcccactagcgattttccttggtcaagtgaccgcagcgctcgtggcgggcaacacggtcgtagcgaaaccggcggaacaaaccagtttgatcgcggtgcgtgcggtagagctcatgctacaagcaggtttcccagcaggcgttgttcaactgattcctggtcgtggtgcggatattggctcggcgctcacctctcacccagccattgcgggtgtggcgtttacgggctccaccgccacggcgcaacgcatcaacgtaactttggcacaacgtgaagctaaaccggtgccgtttatcgccgaaaccggtggtcaaaacgcgatgatcgtggacagtactgcgttgccagagcaggtggtgcgtgatgtgattcgttctgccttcgcttctgcaggtcaacgctgttcagcactgcgtgtgctgtttgttcagcaagacattgccgaccgagtgattggcttgatccaaggggcaatgaatgaactgagtgttggcgtgccgcatctacacaaaaccgatgtggggccagtgattgacgctcgcgcgaaagaaaagctgctgcagcatatcgagcagatgaaccaaactcagaagccgattgcgcaactgacactggcggacgattgtcagcatggtgattttgtcgcaccaacggcatttgaaatctcaggcatcgacgtgcttaaagaagaacagtttggcccgatcctgcacattgtgcgtttcaaagcgtctgaactgactcgcgtggtggaacaaatcaaccgcacaggctttggtttgaccatgggtattcacagtcgtaacgaaaccacctaccgctggatcgaaaaacacgctcgagtggggaactgctacatcaaccgcgaccaagtgggggcagtggttggcgtgcagccattcggtggtcagggcttatcggggactgggccaaaagcaggtggtccacactacttgtatcgctttacccaagtgcaatttaaccagactgagaacgcataa

SEQ ID NO: 5282 - protein, 1043 aa, Vibrio vulnificus YJ016
MFTATDVLKPEFVAQPLDKLWALISPLYMVDESQWLEQLLPLATPSAEEKQAIANRTTQLIEAIRADKKSIQLIDALLLEYSLDTHEGILLMCLAEALMRIPDAATADALIKDKMSVADWKSHLKNSESVFVNASTWGLMLTGKVVGLGDDETQSASQALNRLVNKLSEPVIRKAMYQAMKIMGHQFVRGRTIEEAQKNGRPMRDKGFTYSFDMLGEAALTTADANKYFKDYLMAIEAVGRETYGNDTSPAPSVSIKLSALHPRYEVANEHRVMSELFDTLAQLLKRAVELDVAITIDAEEADRLELSLKLFEKLYRSETVKGWGKFGLVVQAYSKRALPVLVWLNALAKEQGDLIPLRLVKGAYWDSEVKWSQQRGYDNYPVYTRKEATDVAYLACARFLLSDDVRGNIFPQFASHNAQTVSSIATMATHSDYEFQRLHGMGDSLYNHVMEQYRQPVRIYAPVGSHKDLLPYLVRRLLENGANSSFVHRLVDARCPVAELTKHPVEALTSFETLNNTKIPLPAAIFPERKNSYGVNVDIESEAKPFEAQVESFLSKQWLAGPIINGASLAESMIKDGQAESVTAPYDRRIQVGQIAFANLDHVSQAIDIAQAAFADWNRTPLVEKARCLDNLADLMEANLAELVALCHQEAGKTLHDSIDEVREAVDFCRYYAKQAQNLQPFELEGFDGVKRIASREGLGVFVCISPWNFPLAIFLGQVTAALVAGNTVVAKPAEQTSLIAVRAVELMLQAGFPAGVVQLIPGRGADIGSALTSHPAIAGVAFTGSTATAQRINVTLAQREAKPVPFIAETGGQNAMIVDSTALPEQVVRDVIRSAFASAGQRCSALRVLFVQQDIADRVIGLIQGAMNELSVGVPHLHKTDVGPVIDARAKEKLLQHIEQMNQTQKPIAQLTLADDCQHGDFVAPTAFEISGIDVLKEEQFGPILHIVRFKASELTRVVEQINRTGFGLTMGIHSRNETTYRWIEKHARVGNCYINRDQVGAVVGVQPFGGQGLSGTGPKAGGPHYLYRFTQVQFNQTENA

SEQ ID NO: 5283 - DNA, 3015 bp, Geobacter sulfurreducens PCA
  CDS (1)..(3015): transl_table=11
atgctaaacagtgagctgaacacgaagatcgttaaccgcggcaaggagtttttcggcagcatttccggcgagaagccctccctcttcaacaagggggcctggatgggcaaggccatggactggagcatgcagaacgagcagttcaagatccagatgttccggtttgtggacgtgttcccctcgctgaccaccagtaagctcctgacggagcatattcgcgaatatttcggcaacgagcaggatatgcccgcgttcatgtccacgggggccaaggtggcggggatgctcggttccttcggcggggccgtgctgaacaaggtgctcacctccaatatcgaggagatggcccgccagttcatcgtgggcgagaccaccaaggaggcggtgaaaaacctggagaagctccgcaaggacggcttcgccgcggtggttgacgtgctcggcgaggcgaccctttccgaagaggaagcagaagtctacacgaacacctacctggagctgctggaggccctgaagaaagagcaggggagctggaaaggcctgcccggcaagggaggcgaccctggcttggactgggggcatgcccccaaggtgaacattgcggtgaagcccacggccctcttctgcctggccaatccccaggacttcgaggggtcggtggtggccatccttgaccggatgcgccgcatcttcaagaaggtaatggagctgaatggcttcctctgcatcgatatggaatcgtaccgccacaaggagatcatcctggaggtcttccggcgcctgaaactggagtaccgcgactatccccacctgggaatcgtgctccaggcttacctgaaggataacgacaaggacctggatgaccttctggcctgggcgaaggagcacaaggttcagatatccgtccgtctcgtgaagggtgcctactgggactacgaaacggtcaaggcgaagcagaacgattgggaagtcccggtctggaccatcaaggcggagagcgacgcggcctacgagcgccaggcgcggaagatcctggaaaaccaccagatctgccactttgcctgcgcctcccacaatatccggaccatatcggcggtcatggagatggcgcgggaactgaatgtgccggaggatcgttatgaattccaggttctctacggcatggccgaaccggtgcgcaaggggattctgaaggtggcgggacgcatccgcctctatgcaccctacggcaacatggttccggggatggggtacctggtgcgtcggctcctggagaacaccgccaatgaatcgttcctgcgccagagctttgccgaggacgcccagatcgagcgcctgctggaagacccggctgtcacggtcgagcgggaacgggccgcccgcgccgcaaagccgaagaaggagcggaaaggcctcggcgggcttcccccgttcaacaacgaggccatggtggacttcacccgggctgatcaccgggctgccttcccgaagcacatcgcccaggtgcggacccagttgggcaagacctatcccctgttcataaacgggaaagaggtccggaccaacgacctcatccccaccgtgaaccccaacaagccctctgaggtcctgggccagatctgccaggcaggcaccacggaggtgggcgacgccatcgctgccgccaaggcagccttcccggcatggcgcgacaccgatccccggaccagggccgaatatctcctgaaggcggcccaggccgcccgcaagcgactcttcgaactctcggcctggcaggtcctggagatcggcaagcagtgggatcaggcctatgccgacgtgaccgaggccatcgacttcctggaatactatgcccgtgagatgatccggctgggccagccccagcgggtgggccacgccccgggcgaactgaaccattacttctacgagcccaaaggggtggccgcggtcatcgcaccctggaacttccccctggccatcagcatgggcatggcgtcggcagccatcgtcaccggcaactgcgtggtcttcaagccgtcggggatcacctcgatcatcggctggcacttggtggagctgttccgcgaggcgggcctccccgaaggggtctttaacttcacgccgggtcgcggctcggtcatgggcgactacctggtggatcacccggacatcagcctgatcgccttcaccggctccatggagaccggcctgcggatcatcgagcgtgccgccaaggtccatccgggccaggccaacgtgaagaagatcatctccgagatgggcggcaagaacgccattatcatcgacgacgacgccgacctcgacgaggcggtgccccatgtcctctactcggccttcggcttccaggggcagaaatgctccgcctgttcccgggtcatcgtgctggatgcagtttatgataaattcatcgagcggctcgtttccatggccaaggccaccaaggtgggcccctccgaggatccggccaactacatgggtgccgtggccgacgacaaggccatgaagagcatcaaggagtacgcggagatcggcaagcgggaagggcatgttctctatgagagcccggtgccggccggtgaggggtatttcgtccccatgaccatcattggcggcataaagcccgagcaccgtatcgcccaggaggagatcttcggaccggttcttgcggttatgcgggccaaggacttcgaccaggccatcgaatgggccaactccacgcagtttgccctcaccggcggtatcttcagccgcagccccgaacacctggccaaggcccgccgggagttccgggtggggaacctctacatcaaccggaacaacaccggtgccttggtggagcggcagcccttcggcggcgcccgcatgtccggggtcggcaccaaggccggcggtcccgactacctcctccacttcatggacccgcgggtggtcactgagaacaccatgcggcgcggtttcgctcctatcgaggaggacgacgactgggtcgattag

SEQ ID NO: 5284 - protein, 1004 aa, Geobacter sulfurreducens PCA
MLNSELNTKIVNRGKEFFGSISGEKPSLFNKGAWMGKAMDWSMQNEQFKIQMFRFVDVFPSLTTSKLLTEHIREYFGNEQDMPAFMSTGAKVAGMLGSFGGAVLNKVLTSNIEEMARQFIVGETTKEAVKNLEKLRKDGFAAVVDVLGEATLSEEEAEVYTNTYLELLEALKKEQGSWKGLPGKGGDPGLDWGHAPKVNIAVKPTALFCLANPQDFEGSVVAILDRMRRIFKKVMELNGFLCIDMESYRHKEIILEVFRRLKLEYRDYPHLGIVLQAYLKDNDKDLDDLLAWAKEHKVQISVRLVKGAYWDYETVKAKQNDWEVPVWTIKAESDAAYERQARKILENHQICHFACASHNIRTISAVMEMARELNVPEDRYEFQVLYGMAEPVRKGILKVAGRIRLYAPYGNMVPGMGYLVRRLLENTANESFLRQSFAEDAQIERLLEDPAVTVERERAARAAKPKKERKGLGGLPPFNNEAMVDFTRADHRAAFPKHIAQVRTQLGKTYPLFINGKEVRTNDLIPTVNPNKPSEVLGQICQAGTTEVGDAIAAAKAAFPAWRDTDPRTRAEYLLKAAQAARKRLFELSAWQVLEIGKQWDQAYADVTEAIDFLEYYAREMIRLGQPQRVGHAPGELNHYFYEPKGVAAVIAPWNFPLAISMGMASAAIVTGNCVVFKPSGITSIIGWHLVELFREAGLPEGVFNFTPGRGSVMGDYLVDHPDISLIAFTGSMETGLRIIERAAKVHPGQANVKKIISEMGGKNAIIIDDDADLDEAVPHVLYSAFGFQGQKCSACSRVIVLDAVYDKFIERLVSMAKATKVGPSEDPANYMGAVADDKAMKSIKEYAEIGKREGHVLYESPVPAGEGYFVPMTIIGGIKPEHRIAQEEIFGPVLAVMRAKDFDQAIEWANSTQFALTGGIFSRSPEHLAKARREFRVGNLYINRNNTGALVERQPFGGARMSGVGTKAGGPDYLLHFMDPRVVTENTMRRGFAPIEEDDDWVD

SEQ ID NO: 5285 - DNA, 1392 bp, Eremothecium gossypii
  CDS (1)..(1392)
atgaacagcagactcggacaggttttgcggcaggccgtaagggttcaaacagggcttcgtgggccagcgcgcagcatgcgagggtacgtgtcgcagacgcagacgaagcaaaacacggtggccgtggtggcaggcgcggcggagcggtttgtggcgccggccgcagacgcgcacctcaagacactatctcagcgggagctcgtggcgttgggcgtgatcgggtgcgtgacgacgaacgcgcggctgttgaagctggtgacgcaggcgttcccgtacgtgccgacgccggtggccaagctgctgatctcggcgctctactgcgggggggacacgatggcggaggtgcgcgagacgggccgcgcgctggcgcggcgcggcgtggggaacatgatgctctcgttgacggtggaggactcggaggggacaaaaaacattgacatcgactacattgtggaggagacagtgcgctcgctgcacggcgtactcctgccgcacatggaggaacagttggcgcgtgcggcggacgtgaacagcgtgccgcccggctacttggcgttgaagccttcggcgttggtgtccgacccggcgaacacgctcctgcactttgctgaccctgcttggcgggagaagcgggacgctctggtcgcgaacttctcccggatcgtcggggaggtgtacaagctcaaccaggagatgcttgcacggtaccccggccgcaaatcccccttctttgtggccacgatcgacgcggagaagtacgaggtccagtgtgcgggcgtctacgagctccagcgcctcatgtttgcgaagtacaaccccgtttcgtctcctattgtgtcgtgcatcggcacgtggcagctctacttgcgcgacgccgcggccgacttggtcgcgcaggcggagcgtgcggagcgcgagggatacaagttggggttgaagcttgtcaggggcgcctacctccattccgagcccaaccgcgacgtgatccacccgacgaaggaagcgactgatgagcactataacgaggtgatggccaaggtcatccaggacctcttggccaacggcgagcactctgtctttggccatcttgttgtggcatcccacaactatcagtctcagatgctagcaactatgctgctccaggcccatggggaatccgtggggaaaagcaacgtcgtattgggccaactactagggatggcggacaacgtgacgtacgatctcattcacaatcatggcgcaaggaacatcatcaagtatgtgccttgggggccgccaaaggaaactaaagactacatgcatcgccgtctccaggagaatggggacgctgtaagagctgacaacggctggcctttggttaaggctgtgtgtagagcattgttctatcgctga

SEQ ID NO: 5286 - protein, 463 aa, Eremothecium gossypii
MNSRLGQVLRQAVRVQTGLRGPARSMRGYVSQTQTKQNTVAVVAGAAERFVAPAADAHLKTLSQRELVALGVIGCVTTNARLLKLVTQAFPYVPTPVAKLLISALYCGGDTMAEVRETGRALARRGVGNMMLSLTVEDSEGTKNIDIDYIVEETVRSLHGVLLPHMEEQLARAADVNSVPPGYLALKPSALVSDPANTLLHFADPAWREKRDALVANFSRIVGEVYKLNQEMLARYPGRKSPFFVATIDAEKYEVQCAGVYELQRLMFAKYNPVSSPIVSCIGTWQLYLRDAAADLVAQAERAEREGYKLGLKLVRGAYLHSEPNRDVIHPTKEATDEHYNEVMAKVIQDLLANGEHSVFGHLVVASHNYQSQMLATMLLQAHGESVGKSNVVLGQLLGMADNVTYDLIHNHGARNIIKYVPWGPPKETKDYMHRRLQENGDAVRADNGWPLVKAVCRALFYR

SEQ ID NO: 5287 - DNA, 2010 bp, Drosophila melanogaster
  CDS (1)..(2010)
atggctctactccgttcgctgagcgcccaacgaacagccatcagtttggtctacggccgtaatagcagcaagtcgagcaattccgtggccgtcgccgcctgccggagtttccatcagcgcggcagcgggagcaccagcatcgccggagaaggagcagcatcggagtccacgagaggagtcaatggagcgcgcttcctgcacagcggcgaccggccgctgcaggcctccactctggtccaaccggaggtggtctccagcgagacggtgaagcgatcgatgaagcaggagtcgtcccaggaaaagaacccctcgcccgctggctcgccgcagagggatcccctggacgtgagctttaatgatccgattgctgctttcaagagcaagaccactggagagctaatacgcgcctatctcgtctacatgatatgttccagcgagaagctggtcgagcacaacatgacgcttatgaaatggtcaaagaacgtattgggtcaacggttatttacattattgatgaaggcgaccttctatggccactttgtcgccggcgaggatcagatcaagatcatacccacactggaaaggctaagatcctttggcgttaagccgattctcgattattccgttgaggaggatatcacccaggaggaggccgagaaacgtgaagttgaatcttccgtctccagtgcaggcgacaaaaaggaggagggcagcatgccgcagtaccatgtggacaagtcctttgcggatcggcgctacaaggtcagcagtgctcgcacctacttctacttgaacgaggccacctgcgagcggaacatggagatcttcatcaagtgtctggaggctgtttcgggcgccacctttggaactggcatcaccgccattaaactcaccgccctgggccgtccacaattgctgctgcaactgtccgaggtaatcatgcgcacacgcaagtacatggaggatatggtgggcggtcagggcaatgtgctgactcaccacaagaccatcaaggatctcgaaaagtattacgccacgctgggcgacaataaggacgtcaaggagttcctgaacaatgtaacgtccgataaggagggaattttgcatttgttcccctggtcgggcattgttgacgaggactcgcagctgagcgacacgttccgcgttcccgatccccaaaccggacagatgcgtcgactgatctcacaaataccgcccaaggaggaggagatgttcaggaacatgatccgtcgtctcaacacgattgtaaaggctgctgcggacttggatgtgcgtatcatggtggatgcggagcagacttacttccagccggccatctcccgtatcaccctggaaatgatgcgcaagtacaacaaggacaaggccattgtctttaatacgtaccagtgctatctgcgcgagacgttccgcgaggtgaacaccgatctggagcaggccaagcgccagaacttctacttcggcgccaagctggtgcgcggtgcctatatggaccaggagcgggaccgtgccaagtcgctgggctacccggatccggtaaatcccacgttcgaggccaccacggacatgtatcacaggacgttgtcggagtgcttgcgacgcattaagctgatgaaggactgtgatgacgatgccaggaagattggtattatggtggcctcgcacaacgaagacaccgtacgatttgccatccagcagatgaaggagatcggcatctcaccggaggacaaggtgatctgcttcggccaactgctgggcatgtgcgactacattacctttccactgggtcaagcgggatactcggcgtacaagtacataccatatggcccagtcgaagaggtgctgccctacttgtctcgtcgtgcccaggagaacaagggtgtgctcaagaagatcaagaaggaaaaacgcctgctgctctccgagattcggcgccgtctgatgcgtggccagttgttctacaagcccaagggcaattacgtgcccatctaa

SEQ ID NO: 5288 - protein, 669 aa, Drosophila melanogaster
MALLRSLSAQRTAISLVYGRNSSKSSNSVAVAACRSFHQRGSGSTSIAGEGAASESTRGVNGARFLHSGDRPLQASTLVQPEVVSSETVKRSMKQESSQEKNPSPAGSPQRDPLDVSFNDPIAAFKSKTTGELIRAYLVYMICSSEKLVEHNMTLMKWSKNVLGQRLFTLLMKATFYGHFVAGEDQIKIIPTLERLRSFGVKPILDYSVEEDITQEEAEKREVESSVSSAGDKKEEGSMPQYHVDKSFADRRYKVSSARTYFYLNEATCERNMEIFIKCLEAVSGATFGTGITAIKLTALGRPQLLLQLSEVIMRTRKYMEDMVGGQGNVLTHHKTIKDLEKYYATLGDNKDVKEFLNNVTSDKEGILHLFPWSGIVDEDSQLSDTFRVPDPQTGQMRRLISQIPPKEEEMFRNMIRRLNTIVKAAADLDVRIMVDAEQTYFQPAISRITLEMMRKYNKDKAIVFNTYQCYLRETFREVNTDLEQAKRQNFYFGAKLVRGAYMDQERDRAKSLGYPDPVNPTFEATTDMYHRTLSECLRRIKLMKDCDDDARKIGIMVASHNEDTVRFAIQQMKEIGISPEDKVICFGQLLGMCDYITFPLGQAGYSAYKYIPYGPVEEVLPYLSRRAQENKGVLKKIKKEKRLLLSEIRRRLMRGQLFYKPKGNYVPI

SEQ ID NO: 5289 - DNA, 1071 bp, Anopheles gambiae str. PEST
  CDS (1)..(1071)
atgcaggctcgccgctatatgatggatttggccggaagtaccgggaacattttaacgcatcacaaaaccattcaagatctcgaacgctatctcggcaacgtttccgataaggcggaggtaaagcagtttttggagaaggtgacatccgacaaagacggcattctgcatctgttcccgtggaccggtattattaacgaggactgtcagctgagcgaaaccttccgcgtgccggacccggttaccggtcaaatgcgtcgcttgatctcaaagattccacccaaagaagaggagatgttccgtaacatgatcagacgattgaatactattgttaagactgcccaagaccttgacgttcgtattatgattgacgccgagcaaacctacttccaaccagccatctctcgaatcacactcgaaatgatgcgaaagtataacaccgaaaaggccatagtgtttaacacctatcagtgttacctgaaggacacgtacaaagaggtgtgcacggatctggagcaagccaagcgtcaaaacttctatttcggcgcgaagcttgtgcgcggagcgtacatcgagcaggagcgtgcccgcgccgccgcactgggctatgaggatccaactaatccctccttcgaagcaactaccgaaatgtaccacaagacgttgactgagtgtttgagacgcatcaggattctcaaagatgcaaacatcgatccgaagaagattgccatcatggttgcatcgcacaacgaggatacggttcggtttgccattgagaagatgcaggagattggcatccatccggaagataaagtgatttgcttcggtcaattattgggcatgtgtgattacatcacgttcccgctcggtcaagccggttactcggcctacaaatacatcccgtacggtccagtcaacgaagtcctgccgtacctgtcgcgacgagcgcaggaaaacaagggcgtgctgcaaaagatcaagaaggagaagcgcctgctgctgtcggagatcaccaaacggctagccaaggggcaactgttttacaaaccgaagggcaaatacgttcctatctaa

SEQ ID NO: 5290 - protein, 356 aa, Anopheles gambiae str. PEST
MQARRYMMDLAGSTGNILTHHKTIQDLERYLGNVSDKAEVKQFLEKVTSDKDGILHLFPWTGIINEDCQLSETFRVPDPVTGQMRRLISKIPPKEEEMFRNMIRRLNTIVKTAQDLDVRIMIDAEQTYFQPAISRITLEMMRKYNTEKAIVFNTYQCYLKDTYKEVCTDLEQAKRQNFYFGAKLVRGAYIEQERARAAALGYEDPTNPSFEATTEMYHKTLTECLRRIRILKDANIDPKKIAIMVASHNEDTVRFAIEKMQEIGIHPEDKVICFGQLLGMCDYITFPLGQAGYSAYKYIPYGPVNEVLPYLSRRAQENKGVLQKIKKEKRLLLSEITKRLAKGQLFYKPKGKYVPI

SEQ ID NO: 5291 - DNA, 1653 bp, Neurospora crassa
  CDS (1)..(1653)
atgttccctacttcaacatcaccggccagcaggcagttggtttgcaacgtaggacatgctcgggcaagaaccattgcttcggcccttggacctgccgcggcttctatctcacgtcatcatgtctcacattcaattttaatggtcgggcgtatcaacggcgtcgggagaacatatgccacccgacttatacactcctccaccaaccgacctaagcctaccgaccacctaaccatcaacaacgcatcatcattaccagcaacaggcgggtctcagtccagtgagatgcccaagacaccgggaccttcgccattggcagtactgccactaacaaacgtcctccgatcatggatgaccaccaccgtttcctcctcgcccttcctcctaccgccttcactagctgtcatgtccgtcctagcccataccacaaacccagttcttaaccccgaccgaaaccctctcctccgcgcattcctcaagaagaccttctacgcccaattctgcgccggtgagaatccggccgaggtccgccaaaccatcgactccctcaagcaaatcggtttcagtggtgtcatcctcggctacgcccgtgaggtggtccttactgattcggagaccaaagatctcgcctcctgcgcggccgagggtggcgccgctgcggaggagtgcattcgcacggaaatcaacccttgggccgaaggaaccatggagaccgtccgccttgcctctcccggcgacttcgtagctctcaaattcaccggcgccggccgccaggccctttatagtctttccaaacagctcccaccctccgaggctctaggttctgccatcgacggaatctgcaacctcgccgccgagcggggcgtccgcctcctcttcgacgccgaacaaaatgctctccagcctggtatcgacgactggacgctcgactacatgcgccgctacaacaaaagcaacgccgtagtctacggcacttaccaagcctacctcaaatccacacctgccactctctctaagcacctcgccatcgccgcgtccgaagggttcaccctcggcgtgaaactcgttcgcggcgcttacttgggcgctgatcccagatatctcatctgcgacaccaaggccgacacggatggccagtacgatgggattgccgaagccttgctccgcaagacctggtctggccccttgcaacctcctgtcccccagtctggatctgctgaaaaggagacgaccaacttccccgacgtgggcgtcgttctagccacgcacaaccgcgaatcggtactcaagggcaaggcccttctcgacagcggcgtggccaagctgggctatgaacaggtggcgttcgcccagctgcagggaatggcggacgaggttagttgtgagcttgttgctgggccgcacgagactcccaaggaaatggagatggcggcggagaaggaaagtgagaagggcagtgagaagggaagtgaaatggtcaataagccgcaggtgtacaagtacctggtgtggggatcgacgggggagtgcatgaagtatttgttgcggagggcttatgagaatcgggatgcggtgcagaggacgaggagtggacgggaggcgatgggaagggaggttaggaggagagtgaaggggctatttggggtttcttcttaa

SEQ ID NO: 5292 - protein, 550 aa, Neurospora crassa
MFPTSTSPASRQLVCNVGHARARTIASALGPAAASISRHHVSHSILMVGRINGVGRTYATRLIHSSTNRPKPTDHLTINNASSLPATGGSQSSEMPKTPGPSPLAVLPLTNVLRSWMTTTVSSSPFLLPPSLAVMSVLAHTTNPVLNPDRNPLLRAFLKKTFYAQFCAGENPAEVRQTIDSLKQIGFSGVILGYAREVVLTDSETKDLASCAAEGGAAAEECIRTEINPWAEGTMETVRLASPGDFVALKFTGAGRQALYSLSKQLPPSEALGSAIDGICNLAAERGVRLLFDAEQNALQPGIDDWTLDYMRRYNKSNAVVYGTYQAYLKSTPATLSKHLAIAASEGFTLGVKLVRGAYLGADPRYLICDTKADTDGQYDGIAEALLRKTWSGPLQPPVPQSGSAEKETTNFPDVGVVLATHNRESVLKGKALLDSGVAKLGYEQVAFAQLQGMADEVSCELVAGPHETPKEMEMAAEKESEKGSEKGSEMVNKPQVYKYLVWGSTGECMKYLLRRAYENRDAVQRTRSGREAMGREVRRRVKGLFGVSS

SEQ ID NO: 5293 - DNA, 1371 bp, Rattus norvegicus
  CDS (1)..(1371)
atggtctggacgcgtctgccgctgtacggccactccaagccctctacaggtggctggcagcccctgcgctttgatggtggggccttccatctcaagagaaccgcagaactggcacgggctttgctggtgcttcgcctatgcgcctggccccctttggtcactcatggactagcgtttcaggcctggtctcagcgactcctgggatctcggctctcgggcgcacttctccgagcatccatctatggacagtttgtggccggggagacagcagaggaagtgaggggctgtgtccagcagctgcaggcgataggactccagcccctgttggcagtgcccaccgaggaggaaccagactccgctgccaagaccagtgaagcttggtatgaggggaaccttagcgccatgctgcactgtgtggacttgtcacgagctgtcgcagacgcccatggcccagccaggaacagcctcatgcagctgaaggtgaccgcgctaaccagccctcggctttgtaaggagctatcggcttggatccaaagaccaagaggctcctcggagctgaggcctgagaggctggcagaagccatggagtcaggtcggaacctccagctctcctgcctcagcacggaacagaatcaacacctgcaggcctccctcagccgcttgcaccgagtggcacagcacgcccgggcgcaggatgtgaggctgctggtggacgctgaatacacgttcatcaaccctgccctgtccctgctggtggctgccctggctatgcgctggaacagctcggaggaagagggcccgtgggtgtggaacacttaccaggcctatctgaaggacactcacgaacggctggagcgggatgctaaggcggcacacgaggctggcctggcatttggggtgaagttggtgagaggtgcctatctggacaaggagagatccgtgacacagctccacgggaaggaagactgtacccagcctgactatgaggccactagtcggagttacagccgctgtctggagctgatgctgcgccgcgtgtccaaccacggtccccggtgccacctcatggtggcttcccacaatgaagaatccattcgccaggcaacgaggcgcatgtgggagctgggcattcctctggatgggcctgtctgcttcggacaacttctgggcatgtgtgaccacgtctccctggcattagggcaagctggatacatggtatataagtctatcccctatggctgcctggaagaggtgataccctacctgatccgaagagcccaggagaacaggagtgtgctgcagggcgcccggagggagcaggcactactcagccaagaactgtggcggaggctgctgggaaggaaagcctaa

SEQ ID NO: 5294 - protein, 456 aa, Rattus norvegicus
MVWTRLPLYGHSKPSTGGWQPLRFDGGAFHLKRTAELARALLVLRLCAWPPLVTHGLAFQAWSQRLLGSRLSGALLRASIYGQFVAGETAEEVRGCVQQLQAIGLQPLLAVPTEEEPDSAAKTSEAWYEGNLSAMLHCVDLSRAVADAHGPARNSLMQLKVTALTSPRLCKELSAWIQRPRGSSELRPERLAEAMESGRNLQLSCLSTEQNQHLQASLSRLHRVAQHARAQDVRLLVDAEYTFINPALSLLVAALAMRWNSSEEEGPWVWNTYQAYLKDTHERLERDAKAAHEAGLAFGVKLVRGAYLDKERSVTQLHGKEDCTQPDYEATSRSYSRCLELMLRRVSNHGPRCHLMVASHNEESIRQATRRMWELGIPLDGPVCFGQLLGMCDHVSLALGQAGYMVYKSIPYGCLEEVIPYLIRRAQENRSVLQGARREQALLSQELWRRLLGRKA

SEQ ID NO: 5295 - DNA, 1593 bp, Magnaporthe grisea 70-15
  CDS (1)..(1593)
atggccaccgttgttgtcaaaaatagcagttgcttgtctgttttgcctctgaagactgtcctccgctccttggcagtaacaaccgtttcttcctcgcctctactcctcaatccatctctggcaatcatgtccggattggctcatagcaagagcccattactgaaccctgatcgaaaccccatattgagatgggcacttaaaaagacgttttatgcgcaattttgcgccggcgagaaccccttggaggttcggcaaaccatcgccgggctgaagaagattggtttcaccggcgtcttgcttggctatgcaaaggaggtggtccttagcgacaaggagacaaaggaacttcactcatgcacagaaggcaaagcttccgaggagtgtacgcaaaaagaggttataccgtgggccgaaggaaccatggagacagttaggcttgtcagccctggcgatttcgtctcggtaaaattcacgggagcaggaagacaagccctattctcgttgtcggagaaactccccccaccacccgccctcgccaaagccatagacgacatttgcaaactggcagccgcccgcggcgtccgcctcctctttgacgccgaacagcaggccctgcagcccggcatcgacgactggaccatgcactacatgcgcaagcacaacgcaccgggccgctgcgtcgtctacaacacgtaccaggcctacctcaaggccacgccgtccgtgctggcatcgcacctgcgcgccgcagcccagagcgccgccgagggcaaaccgtttgcggtcggcgccaagctcgtccgcggcgcctacctcggctcggacccgcggcacctgatccacgacaccaaggccgacacggacgcgtgctacgacggcgtggcggccgcgctcctgcgccagcgctgggagggacccctcgccggcaaggacgagggcagcgagttccccgaggtgcacatggtcctggcgtcgcacaactcggagtcggtgtgcaagggccgcgagatcatcaagcgcggcgaggccaggaccaccgaggtggcctttgcgcagctgcagggcatggccgacgaggtcagctgcgatttgatcgcgagcgcctgcgagaaggacgccgcagccgtcaagtcgtacaagtacctcgtctggggtaccacgggcgagtgcatgaagtatctactcaggagggcgcacgagaacagggatgcggtgcagaggacgcggagcggacgggatgccatggctgccgaggtctggcggagaatagcaggcacatcttggaagtcggtgcacgattcgatccagattgtcctttttagtcatatgggtggtgtgcttgtggcaggtaccggccaagccgacatggtagaatcgaacatgacccacctgattgagtatcgcacagacggcagtaatgcgaaggtcgccagttcgaccctggtaacgccttttgagagcgtagaaaaatgttgcggtgtgggtggcggatttctctggtcccttttggggtgcaggtgctgcgtgaatagaggtgttgtgtgggtggcgggggttttggagcttctttttcgtgtggtctctgctatatag

SEQ ID NO: 5296 - protein, 530 aa, Magnaporthe grisea 70-15
MATVVVKNSSCLSVLPLKTVLRSLAVTTVSSSPLLLNPSLAIMSGLAHSKSPLLNPDRNPILRWALKKTFYAQFCAGENPLEVRQTIAGLKKIGFTGVLLGYAKEVVLSDKETKELHSCTEGKASEECTQKEVIPWAEGTMETVRLVSPGDFVSVKFTGAGRQALFSLSEKLPPPPALAKAIDDICKLAAARGVRLLFDAEQQALQPGIDDWTMHYMRKHNAPGRCVVYNTYQAYLKATPSVLASHLRAAAQSAAEGKPFAVGAKLVRGAYLGSDPRHLIHDTKADTDACYDGVAAALLRQRWEGPLAGKDEGSEFPEVHMVLASHNSESVCKGREIIKRGEARTTEVAFAQLQGMADEVSCDLIASACEKDAAAVKSYKYLVWGTTGECMKYLLRRAHENRDAVQRTRSGRDAMAAEVWRRIAGTSWKSVHDSIQIVLFSHMGGVLVAGTGQADMVESNMTHLIEYRTDGSNAKVASSTLVTPFESVEKCCGVGGGFLWSLLGCRCCVNRGVVWVAGVLELLFRVVSAI

SEQ ID NO: 5297 - DNA, 1293 bp, Gibberella zeae PH-1
  CDS (1)..(1293)
atgcgtgccactcagatggcgcctccgaccaattgcctgtgtcacgaatcttcgtttgcaaatccaggcgagctcttcaccgctaaacctttgaacaccttgcggatagtttggtattacgaagccgaacttacatattatttatcccttcgcattctctgggtgatcgcccactcagataacgctttcctcaatccggataggaatttcattctcaacttcctgctcagaaagtccttctacgctcagttttgcgctggcgagactcatgctcaagtaaaatctactgtcaagcgtttgagagacattgggtttgggggagttatcttgacgcacgccaaagaagcagtccctcaggatgacgcaaagagtgcatctatcctcgatccaagtatagaaacatctcatgatatcacggccgacattataccatgggtgaacagtatcgttgagactatcaacatggctgatcctggcaattatgttgcactcaaactctctggtgctggccgtctagcattatacaacttgtctcggaacaagaatccctctccgtatctctcgaaatccctggacgacatttgtaacctagctcgacaacgacatgtcagtatccttgttgatgccgagcacgatgtgcaacaagaggggattgacagctggaccatgacttttgctcgccgacacaacactgataccgcaataatctatgggacctaccaggcctacaaaaaggttacaccggcgactatttcgcggcatcttgcagaagctcaggaaggcggctttgctcttggtgtgaaacttgtacgcggagcttacctcggttctgatcctcgagaatgcttctacgataccaagttcgagacagataattgctacaattcgatctccgagtctgttcttactcgacaatggagtccagtcgtttgcgggaatgggaatttcccagacactcaccttgttctggctacccataatgctgagtctgcatataaagcccgtactatctgcagccgtggcgaagccaagtcgagtattgtctttgctcagttgcagggaatggctgatgaactcggatgcgagcttatacaagctgactttggtggctccccagttgctttgccggcgtataaataccttgtttggggaagtacttcggagtgtatgaagtatctgttgcggcgtgcatatgagaatcgggatgctgttcaacgtacaaatagtggtcgcaaagctttgtggtctgagcttattcggaggttcaagtcagctctgtccctttcaagctga

SEQ ID NO: 5298 - protein, 430 aa, Gibberella zeae PH-1
MRATQMAPPTNCLCHESSFANPGELFTAKPLNTLRIVWYYEAELTYYLSLRILWVIAHSDNAFLNPDRNFILNFLLRKSFYAQFCAGETHAQVKSTVKRLRDIGFGGVILTHAKEAVPQDDAKSASILDPSIETSHDITADIIPWVNSIVETINMADPGNYVALKLSGAGRLALYNLSRNKNPSPYLSKSLDDICNLARQRHVSILVDAEHDVQQEGIDSWTMTFARRHNTDTAIIYGTYQAYKKVTPATISRHLAEAQEGGFALGVKLVRGAYLGSDPRECFYDTKFETDNCYNSISESVLTRQWSPVVCGNGNFPDTHLVLATHNAESAYKARTICSRGEAKSSIVFAQLQGMADELGCELIQADFGGSPVALPAYKYLVWGSTSECMKYLLRRAYENRDAVQRTNSGRKALWSELIRRFKSALSLSS

SEQ ID NO: 5299 - DNA, 2817 bp, Gibberella zeae PH-1
  CDS (1)..(2817)
atgtctacgcatcagcactcggcctttgcttccgctcagtacatttcgcccgaccccatctttgaagtcaccaagcgcttcaatgccgatcaagacccccagaaagtgaatctcggtcaaggtacataccgagacgagagtgctaagccttgggtcctaccttctgtgagagaagctgagaagttgattgcgaattctggacacgagtatttgcctattgagggcctgcagagctttcgcgatgcggcaaaagacagaatcgccacctgccaatctatatcaggaactgggtcgttgctcctggcaggccttgttctcaaaaaggcaaactcgggcattgagaacatcataattacggacccaacttggtctaaccacgatttgctattccatgagattggcttcaacgttatcaaggcaccttactacaaagaccgatcctttgacttcaaaggttatcttgatactatcaaggcagctgacaagcgttcggctgttgttcttcacgcatgtgctcataatccgaccggctgtgaccccacacgcgatcagtggaaacagattgcagaagtgatcaaagaaaatgggatatttccaatcatcgactcagcataccttggcttcaactcggggaactatgacgaagatgcctgggctgtcaagtacatcatcgaagagctgggtcttgaggcagccatatgtttgtcatttgcaaagaacatgggtctatacggcgagcgcgtcggcttgaccgcaattgtcacaaagtcagaggagacaaaaaaagcagtgttctcactactccagcagtctcagcgacaaaccgtgtctaacccacctgtacatggtgctcggattgccgcggctgtcctcagcaaccccgacacattgaagcaatggcatcaggatctagtgaccatgtcctcacggatcaagtcgatgagaagtaagcttttcgacgaattggtgagactagagacaccaggagattggtcccatatcgtcaaccaaacgggaatgtttgggtacactgggataagcaaaccccaaattgaatgcctagaagagaagtatcatatctacatggcggatacttcaaggattagtctggcgggtttgaacgaacacaatgttgacgtaacgcaaagagcggaaagacacgcaacccctgtcgtcgctttgacaagccgatgcacgatcccacgccgccgccatccaactaccgcaaatagtctagacaatcctgcaagcgacctcaagataggagtagaacaaaagaacggtgccattcccgacgcgaggcgcaaccaagctccatacaatgtccgtgtgacctcttcagacactaccccgctcccccagactccccgcgttatcaatggaggcaacaggagtatcggttggggtaccgacggcgtgatggtcgctttcgggcaacatcactctcaagtcccgggcagcccggaacttgactctcacactcaaggccgctgggccaagacttctggcaatgctgccgctgcccttgaggcgactcgcacaaacactcccgttgtgaacggagcagagacacctctatcagaactacctcccctgatcctttaccgatctctcttcatcaacgctgtttcatcaagaccatggcttctcattccctcccttcaccttctccagaagctctcgcacgcgggaaacccatacttgttcaatgtttcccgcaatcctttgctccgaactattctgaagcataccttctacaaacagttctgcgctggtgagacgggagctgaagcgcaagctacgatgaaggagttgcaggacatggggttcaaaggcacaattctcacatttgcaaaggaaactgtctttgattccaagacaggtaaggaacagggacacggcattgagacctctaccacaaatgaatgccagtggtgcgacaacattgaggcctggagagacggcacgttgaagactgtcgagctactccgagagggtgatcaactggctaccaaactcactggtgctggacctggagtctgcgaagcccttcacaacgacgcccaacttcccaagcaatttgtcgacgcgtgctacgaaatctcccaaaaagtcaaggaccgcggcgcatacattctcatcgacgctgaatcccagcattaccaatggggcatcttccgtctcggtatggagcttcaacaaaagttcaacaccgacggcaatgttgtcctctacaatacataccaggcgtatctcaagagcactcaggagagtctcgagaagcatcttcaaatcgcatccgacaagggcttcactcttggagtcaaggttgttcgcggtgcctacatgtcgtctgatcctcgctcgctcattcacgacacaaagcaagacacagacgacaactacaaccagatcgcgcaaggtgtcctacgtcaagatttccgtggcttcggtggctccaatgccaagccattcccctctgctcaattgcttctcgccagtcacaacaaagagtctctagtcaaagcgcacgagatgcaccaagagcgcacaaaggccaacttgcccacggttccagtcaagtttgctcagctacacggcatgtcggatgaggtcagtttcgggctactcaagctgaaggatgataacggtgttgcgcccgaggtgtacaagtgcactacgtggggtacactgggggagtgcatggcgtacttgaccagacgcgctatcgagaatcgggatgccgcctcaaggacgttggatgagtacacggctttgaagaatgaggcttggagacggcttgctttttggcgatga

SEQ ID NO: 5300 - protein, 938 aa, Gibberella zeae PH-1
MSTHQHSAFASAQYISPDPIFEVTKRFNADQDPQKVNLGQGTYRDESAKPWVLPSVREAEKLIANSGHEYLPIEGLQSFRDAAKDRIATCQSISGTGSLLLAGLVLKKANSGIENIIITDPTWSNHDLLFHEIGFNVIKAPYYKDRSFDFKGYLDTIKAADKRSAVVLHACAHNPTGCDPTRDQWKQIAEVIKENGIFPIIDSAYLGFNSGNYDEDAWAVKYIIEELGLEAAICLSFAKNMGLYGERVGLTAIVTKSEETKKAVFSLLQQSQRQTVSNPPVHGARIAAAVLSNPDTLKQWHQDLVTMSSRIKSMRSKLFDELVRLETPGDWSHIVNQTGMFGYTGISKPQIECLEEKYHIYMADTSRISLAGLNEHNVDVTQRAERHATPVVALTSRCTIPRRRHPTTANSLDNPASDLKIGVEQKNGAIPDARRNQAPYNVRVTSSDTTPLPQTPRVINGGNRSIGWGTDGVMVAFGQHHSQVPGSPELDSHTQGRWAKTSGNAAAALEATRTNTPVVNGAETPLSELPPLILYRSLFINAVSSRPWLLIPSLHLLQKLSHAGNPYLFNVSRNPLLRTILKHTFYKQFCAGETGAEAQATMKELQDMGFKGTILTFAKETVFDSKTGKEQGHGIETSTTNECQWCDNIEAWRDGTLKTVELLREGDQLATKLTGAGPGVCEALHNDAQLPKQFVDACYEISQKVKDRGAYILIDAESQHYQWGIFRLGMELQQKFNTDGNVVLYNTYQAYLKSTQESLEKHLQIASDKGFTLGVKVVRGAYMSSDPRSLIHDTKQDTDDNYNQIAQGVLRQDFRGFGGSNAKPFPSAQLLLASHNKESLVKAHEMHQERTKANLPTVPVKFAQLHGMSDEVSFGLLKLKDDNGVAPEVYKCTTWGTLGECMAYLTRRAIENRDAASRTLDEYTALKNEAWRRLAFWR

SEQ ID NO: 5301 - DNA, 1428 bp, Gibberella zeae PH-1
  CDS (1)..(1428)
atgagctcggcccttcggcgagggactgcccagccccttcgctgggcgacagcatcctccagcgccatcaccatcaacactctccgaccatgcctggctgcccgccgtcacatccactcttctgaccgacgaaccaacaccatcgtcgagcagcgccagatccgcgaccctctcccttccgtccccagcaaggcgcccctctccgtactgcctctgatcatgatcctgcgatccctggccaccatgactgtttcttcctcgcctctcctcctacctccttctctgcacgttatgggaatcctggccaacacctccaaccctatcctcaaccccgacaagaacccccttctgcgattcttcctcaaaaagaccttttacgctcaattctgcgctggcgaaaagtcacccgagattaaaaagactatcgacggactcaagaacattggcttcaacggtgtcattctcaactacgccaaggaggttgtcctcactaaggacgagggcgccgatctcaagaacgctgctgtcgagaccgaatcagccatccagaacgagatcctcccctgggcccgaggcacccttgagactgtccgactcgccgagcctggtgactttgtcgctctcaagtttactggtgccggtagcatcgccctccaccagctcaaagagcgtatgcctcccagtcccgccatgtacaaggccatcgactccatctgccagcttgcccacgagcgaggtgtccgtcttctctttgatgccgagcaggacatgctccaggacggtatcgatgactggactctcgagttcatccgcaagtacaacaagggtcttggtgaggctgtcatctttggcacttaccaagcctacaagaagaagtgccccgaggttctctctgcccacctcaagctcgccaaggaggagggcttcgctctcggtgtcaagcttgtccgtggtgcttacctcaactccgacccccgtgagctcttccacgacaccaaggaggacaccgacgcctgcttcgactccctctccgccagtgtcctcacccgcgagtggaacgccgacgtcaagggttccggtccttaccccgctgccagtctcgtcgtcgcctctcacaacgccgagtctgtccgtcttagccgtgccattatggaggccggccgtgccaagtctgacattgcttttgcccagctccagggcatggccgacgaagttagttgcgagctcgtcgaggccaaccagcaggacaagaccatgaacctgcccgcctacaagtacctcgtctggggtaccaccggcgagtgcatgaagtacctcctccgccgcgcgcacgagaacaaggatgccgtgcagcgcaccaagggcagccgagatgctctttggcatgagcttgtccgacgatgcaagagcgttgttggccttgcttaa

SEQ ID NO: 5302 - protein, 475 aa, Gibberella zeae PH-1
MSSALRRGTAQPLRWATASSSAITINTLRPCLAARRHIHSSDRRTNTIVEQRQIRDPLPSVPSKAPLSVLPLIMILRSLATMTVSSSPLLLPPSLHVMGILANTSNPILNPDKNPLLRFFLKKTFYAQFCAGEKSPEIKKTIDGLKNIGFNGVILNYAKEVVLTKDEGADLKNAAVETESAIQNEILPWARGTLETVRLAEPGDFVALKFTGAGSIALHQLKERMPPSPAMYKAIDSICQLAHERGVRLLFDAEQDMLQDGIDDWTLEFIRKYNKGLGEAVIFGTYQAYKKKCPEVLSAHLKLAKEEGFALGVKLVRGAYLNSDPRELFHDTKEDTDACFDSLSASVLTREWNADVKGSGPYPAASLVVASHNAESVRLSRAIMEAGRAKSDIAFAQLQGMADEVSCELVEANQQDKTMNLPAYKYLVWGTTGECMKYLLRRAHENKDAVQRTKGSRDALWHELVRRCKSVVGLA

SEQ ID NO: 5303 - DNA, 1587 bp, Apis mellifera
  CDS (1)..(1587)
atgaacgtttttgccaagaccgtattgatcctgttaatgaaatttgccaagcaaatacttggggagaaactttttacaaaattaatgagagcatctttttacggccactttgtcgccggcgaggacgagttgcaaatcactcctgtcctagataggttacggcaattcggcgtgaaaccgattcttgattattccgtcgaagaagatatctcgcaagaggaagcggaacgacgagaaatgcaaggttccgtgtcagaagctggagatgaaaaaagggaaggtccgttaaaaaagtatcatgtcgcgaaaccattcgcggatcgtcggtataaggtatcctcggcaagaacgtacttttatcttaacgaagctaattgtgaacgaaatatggacatattcatcagatgtctcgagtctgtggctggtgcttcaatgggagttggctttaccgctgttaaattaactgcccttggccgtccacaattattgcttcaactatcagaagtaattatgcgagcgcgacaatatatgtcggatgtagttggtggtgaaggcgccgttttaactcatcatgctaagccagatgattttatgaaaaaatttgaggaagcacacatcaaagatgaagaaacagtacaaaagtttttacaaaaaattcaatcggataaagaaggtgtcattcatttgttcccatggagtggtattctagatgagaactacgagctcagcgaaacgttccaagtaccagacattaaaacaggaaagatggttaggcttatgtcacagcttacgtccaaagaagaggaaatgttccgaaatatgataagacgtctcaataatatcgtcacggtggccgataaattagacgtacgtataatgatagatgccgaacaaacgtatttccaacctgcgatatcgcgattaacgttggagatgatgcgcaagtacaatacacgtaaggccgtggtgttcaatacgtaccagacatacttgcaagacgcttttaatgaagtgaaaacggatctagaacaggctgaacgtcagaacttctactttggtgctaaactcgttcgaggcgcgtacattgaacaggaaagagcaagagccgcagcgatgggttatcctgatccaacaaatcctacatacgaagctacaactgattcttatcatagaactttaatggaatgcttaaggcggatgaaacaatacaaagacaaaggagaggatccaaagaaaattggaattatggttgcatcacacaatgaagatacagtacgctttgcgatagaaaaaatgaaggagataggaatctcgccagaagataaagtgatttgttttggtcaattgttaggaatgtgtgactacataacatttccactaggtcaatctggatattcagcatacaaatatattccttatggcccagtcaaagaagtattaccatatctttctcggcgtgcacaagagaaccgaggtatacttaaaaaaattaagaaagagaaacgtctgttattaactgaaattttgaggcgtttcgcgagtgggcagatattttacaaaccgaagggaaattatactcccgtctga

SEQ ID NO: 5304 - protein, 528 aa, Apis mellifera
MNVFAKTVLILLMKFAKQILGEKLFTKLMRASFYGHFVAGEDELQITPVLDRLRQFGVKPILDYSVEEDISQEEAERREMQGSVSEAGDEKREGPLKKYHVAKPFADRRYKVSSARTYFYLNEANCERNMDIFIRCLESVAGASMGVGFTAVKLTALGRPQLLLQLSEVIMRARQYMSDVVGGEGAVLTHHAKPDDFMKKFEEAHIKDEETVQKFLQKIQSDKEGVIHLFPWSGILDENYELSETFQVPDIKTGKMVRLMSQLTSKEEEMFRNMIRRLNNIVTVADKLDVRIMIDAEQTYFQPAISRLTLEMMRKYNTRKAVVFNTYQTYLQDAFNEVKTDLEQAERQNFYFGAKLVRGAYIEQERARAAAMGYPDPTNPTYEATTDSYHRTLMECLRRMKQYKDKGEDPKKIGIMVASHNEDTVRFAIEKMKEIGISPEDKVICFGQLLGMCDYITFPLGQSGYSAYKYIPYGPVKEVLPYLSRRAQENRGILKKIKKEKRLLLTEILRRFASGQIFYKPKGNYTPV

SEQ ID NO: 5305 - DNA, 2019 bp, Ustilago maydis 521
  CDS (1)..(2019)
atgtcgaacatccaccgcctagtccagtctttggcacgatcatcagcatggcgatccgaagccttgacaagccggacgaccaagcttgcatcgccgccagctctaccgtggtccggtagagtcgcacctgcagccaagcgttgggcctcccaccatgctcgtccagcttctattggtagctcagccgaccgcgcttatcgatctggagtcattgcctttcgagcaacccttggcgcgaccgccttggctgccctcgctttttccatcactgacccacttcatcttgacgcgcaagctgcttcgcacgctaaagagatcgccagggcgcacgagcaggatgtccagcgcgaagacgagagccatcgcccatatcgcccgcttcgttcacagccagtttccatgctgctgaccaactatgccgtttttacgctctgctctttcggatctctcgcaaaggtggggccctccctcatcgagtggtcttccaacacgtcgctgcctttcgtctgggccgtcaccgagtacatcattcgtcgcactttcttccgtcaattcatcagcgatgatacggccgaaggctcgctgccgctgctctcgtcgctctcgcgagacaatctaggtgccatgctcaacttctcggtcgaagtcaaccacgatggcaagcctgccaaagcttccgacgcagacaaaactcccaagtctgccgttcaccgacccttcgtcgacgagctcttgcacagtatcgacgtttcggccaagctcgcctctctacccgcttgtcacggtgctgctgataacgaccaagctgccgagctagccgctcgacctgaccgatccggaagcacctttgtcgccatcaagctgtccggtctgctctacgattcgtcagtgctcgagcgcgcctcggctgccatcgtgcccagggagtggtttagctcgcctcccgagcccttgcccccgcttagcatcaacggcaagggtccttgcggtggactcgccatacccgtcgccgcgctaccacccaaggatgttgaagcacttaagcaactctgggaagcactacgtgagatcgccgagcgcgccaagcagcacggtagtgtgcgcctcgcgatcgacgctgaatacagctggtaccagccagccatcgatgccatgtacgaagccattgctgccgagtacaaccgacctgccaaagcatccagcgatactcctcaaggcagtgtcaccggacccttggtctacaacacattccaggcttaccttcgccgaacgccttcgcacctcgcagcatcatttgaacgcgccaggctcaacggatacacgctcggtgtcaagctcgttcgcggcgcgtatgtcgacattgaaaatcgcatctggtccgacaagattgtcgatgcgcctcctgtgcccggcaagggtgcagacgctgctgcttatcagggatggggaagccccgtatggcccaacaaagatctgactgatcgatgctacgatggctgcgccatccgcctcgttcaggaaatccacgaggatctagttcgcggcgccaaaaggggcttgctaccgagcctcgccgttgtttttgccagtcacaacactcagtcatcactcaaagtgatccgcgaaatggttcgactaggtatggccaagcctgtgccagcgctgctgcaggcaaccaaggatgctcatccgggcaaggatctgggcgaattgcttgagcgcgttccgctcatcgacctgcagctgcaagagtcagtgcgtggacgcatttttttcgcccagctctacggtatggcttcggtgcttaccgcccgtattcaggctgcctttgacgccaactcgggcggtgtaggcccgcacatggtgctcaagtacattccctatggacctctcgagctgacgctgccctatctgattcgccgtgctcttgaaaacggcgatatcatgaccggtggtgctgcggccgagaagacgctcgtccgtgacgagctgatgcaccgcatcggtctgcgtcgctaa

SEQ ID NO: 5306 - protein, 672 aa, Ustilago maydis 521
MSNIHRLVQSLARSSAWRSEALTSRTTKLASPPALPWSGRVAPAAKRWASHHARPASIGSSADRAYRSGVIAFRATLGATALAALAFSITDPLHLDAQAASHAKEIARAHEQDVQREDESHRPYRPLRSQPVSMLLTNYAVFTLCSFGSLAKVGPSLIEWSSNTSLPFVWAVTEYIIRRTFFRQFISDDTAEGSLPLLSSLSRDNLGAMLNFSVEVNHDGKPAKASDADKTPKSAVHRPFVDELLHSIDVSAKLASLPACHGAADNDQAAELAARPDRSGSTFVAIKLSGLLYDSSVLERASAAIVPREWFSSPPEPLPPLSINGKGPCGGLAIPVAALPPKDVEALKQLWEALREIAERAKQHGSVRLAIDAEYSWYQPAIDAMYEAIAAEYNRPAKASSDTPQGSVTGPLVYNTFQAYLRRTPSHLAASFERARLNGYTLGVKLVRGAYVDIENRIWSDKIVDAPPVPGKGADAAAYQGWGSPVWPNKDLTDRCYDGCAIRLVQEIHEDLVRGAKRGLLPSLAVVFASHNTQSSLKVIREMVRLGMAKPVPALLQATKDAHPGKDLGELLERVPLIDLQLQESVRGRIFFAQLYGMASVLTARIQAAFDANSGGVGPHMVLKYIPYGPLELTLPYLIRRALENGDIMTGGAAAEKTLVRDELMHRIGLRR

SEQ ID NO: 5307 - DNA, 1410 bp, Candida glabrata CBS138
  CDS (1)..(1410)
atgctaagaatctaccgtcccagagttatggctattgccagaagatatgtctcgcagactgcgcagaccagcaacgctatggtcgctgataccactgatcccatgatgaaccctatgcagcccaagttgagtagccactcgcagctgccacccagcagtgtcgcttacttgaagacgctgtctcgtgctgaggttttctcgctggggatgatagggctggccaccaccagcaagcctgtgctaaaccttgtgatcaagctgttcccatatgtgcctatgcctttgatcaagatgtttgtgtcccgtctgtactgtggtggtgacaacatcaacgaggtcaagaccttcggcgagaaattgcagaaaagaggcatctcgaacatgatgctgtccctaaccatagaggattccgaaggtacaaagaacatcgatatcaactacattgtcgaggagactatcaagtccgtgcacggcgtgctaaaaccaaacctggtcaaccagctggagaagtgcggcaacgacgcgaagaagatcaacgagatcgccccgggttacatcgctttgaaaccttctgcactggtgtctaacccacatgacgtgctaatgaacttcaacaacccagaccctcactgggtcgcacaacgcgagaagctgatcgacaactgctctagaatcgcccaggagatttacgacttgaacaacgacttgcttaagaagtacccttctagaacagctccattctgcgtcgctaccatcgacgctgagaagtacgacctgcaaaacagcggggtctacgaactacaaagaattctgttccagaaattcaacaagctaagctccccaatggtttccgtgattggtacttggcaactatacttggtcgactccgcagcacaacttgctcgcgaacacgcaagagctatgaaggaaggttacaagttgggtgtcaaattagttagaggcgcttatatccactctgagacaaagcgcgactctatcatcttcaaaactaaagaaggcacagacgaaaactacgatgcggtcatgaccactgttatccaagaccttttaaagaatggtaccaaatcctactatggtcacttggtcgtcgcatctcacaattatgggtctcagatgctggctaccaaaatcttgaaagatgctccagaaaatgtcggtaaggccaatatcgtccttggacaattgctaggtatgtcagacaacgtcactcacgatttgatcaccaagcatggcgcaaagaacattattaagtacgtcccatggggtcctccattggaaactaaggactatctattgagaagattacaagaaaacggtgatgcagttaagtcagacaatggtttcccactagtgaaggcagtaattaaatcactcttctctagggcttga

SEQ ID NO: 5308 - protein, 469 aa, Candida glabrata CBS138
MLRIYRPRVMAIARRYVSQTAQTSNAMVADTTDPMMNPMQPKLSSHSQLPPSSVAYLKTLSRAEVFSLGMIGLATTSKPVLNLVIKLFPYVPMPLIKMFVSRLYCGGDNINEVKTFGEKLQKRGISNMMLSLTIEDSEGTKNIDINYIVEETIKSVHGVLKPNLVNQLEKCGNDAKKINEIAPGYIALKPSALVSNPHDVLMNFNNPDPHWVAQREKLIDNCSRIAQEIYDLNNDLLKKYPSRTAPFCVATIDAEKYDLQNSGVYELQRILFQKFNKLSSPMVSVIGTWQLYLVDSAAQLAREHARAMKEGYKLGVKLVRGAYIHSETKRDSIIFKTKEGTDENYDAVMTTVIQDLLKNGTKSYYGHLVVASHNYGSQMLATKILKDAPENVGKANIVLGQLLGMSDNVTHDLITKHGAKNIIKYVPWGPPLETKDYLLRRLQENGDAVKSDNGFPLVKAVIKSLFSRA

SEQ ID NO: 5309 - DNA, 1404 bp, Kluyveromyces lactis NRRL Y-1140
  CDS (1)..(1404)
atgctaccatacggaactagagctgctgttagatcagtaggaagatttggaacgagatctgtacccatggggttaacttacagattcgtttctcaaaccaatgctaccaaaagtaccatggcgcctgctactgcgatccacgatatggctgcttcgcagcatactgtacctgccccagatgctcatttgagaactttatccaaaagcgaactgttctcattgggtatgatcggtgtatgtactattaacaaaccaatgttggatttagtgatcaaacttttcccatacgtacctcttttcatggtcaagttgttcatttctcccttatattgcggtggtgataccccggcggaagtggttgaaactggtaaaaggttgcagaatagaggtatcaacaatatgatgctttctttgaccatcgaagatgcggaaggtactaagaatgtggacatcaattatatcgtgagcgaaactatcaagtctgtccacaccattctgaaacctctgttagttgaacaattggaatcaggtaaagatatcaactcgataccacctggttacatcgctttgaaaccttctgcattagttgctaacccagcacaagttttgcttaactttaataatccagaatggaaaactcaacgtgatgagttggtaaacaattgttccaagatcacacaagaggtttacaatttaaatcaagaacttttggccaagtatccagaaagaaaatccccattttttgtctctaccattgacgctgaaaaatatgatctacaaaaagctggtgtttatgaattacaaagaattttgttctctaaatttaaccctgcttcctcaccattgatctcctgtgttggtacttggcaattataccttgttgattctgcagccgatttggctaaggattatgagagagctaagaaggaaggttacaagctcgggttgaaattggttcgtggtgcctacatccattctgaaccaaaccgttctgtcgtgtatgcaaccaaggaaggtactgatgccaactataacaaggtcatgactactgctatcaaagatttactcgtaaacggagagaaatcatactacggtcatttagtcgtcgcatctcacaattatgattcacaaatgttggccaccaagctattggcggaccaaaagaactctgtaggtaaggctaacgtgactttggcccaattattgggtatgtcggataatgttactcatgatttgatcacaaaccacaaggtcgaaaacattatcaaatacgtcccatggggtccacctttagagacaaaggactatctattgagaagattacaagaaaacggcgacgctgtcagagcagataatggtataccactaatcaaggctgttttgaaaacagctttacatctataa

SEQ ID NO: 5310 - protein, 467 aa, Kluyveromyces lactis NRRL Y-1140
MLPYGTRAAVRSVGRFGTRSVPMGLTYRFVSQTNATKSTMAPATAIHDMAASQHTVPAPDAHLRTLSKSELFSLGMIGVCTINKPMLDLVIKLFPYVPLFMVKLFISPLYCGGDTPAEVVETGKRLQNRGINNMMLSLTIEDAEGTKNVDINYIVSETIKSVHTILKPLLVEQLESGKDINSIPPGYIALKPSALVANPAQVLLNFNNPEWKTQRDELVNNCSKITQEVYNLNQELLAKYPERKSPFFVSTIDAEKYDLQKAGVYELQRILFSKFNPASSPLISCVGTWQLYLVDSAADLAKDYERAKKEGYKLGLKLVRGAYIHSEPNRSVVYATKEGTDANYNKVMTTAIKDLLVNGEKSYYGHLVVASHNYDSQMLATKLLADQKNSVGKANVTLAQLLGMSDNVTHDLITNHKVENIIKYVPWGPPLETKDYLLRRLQENGDAVRADNGIPLIKAVLKTALHL

SEQ ID NO: 5311 - DNA, 1488 bp, Debaryomyces hansenii CBS767
  CDS (1)..(1488)
atgactttagttgctagaggtgctactagagttagcattagagctcgcattccacattgtaagaaattggtacctggagtaggatactatagattattccatgaatctccaaacaagctgaatggtacattcggagttaatattccacacgaacaggctggtagaagtagcagttcaactacgtctggcattgctaaggtcggtattgaccatgagaattttaagatcccagacagtactacctacttgaaggattttaaagttagtgagttattgtcgtatgtagttattggagctgcaacattgaacaaaccgattttgaatatgtgtattaaaatgtttccatatgtacctatgtcggttataaaggcatttgtatacaaattatactgtggtggtgagaatattgaagaggtgaaacagacagggttgcggttaagcaaaaggggcatcaataatatgatgctttcattaactattgaagcatgtaacgggaatgataacatagatcccgagtttatagtcagcgaaacgcaacgttcggtcaccgagatcttaattccgcacatattgaccattatcaaggagtccgggaaggatattaattctatccctccaggatatgttgcattgaagccaactgggttcgctaaagatgcatcaaatgtcttaaaatactataaaactgatcctcattatgctgccatgttcgaagaattggttgataaggcttccaatgtatgcggaacaatttacgaagaaaacctaaaattatcgcaaaaatttcctgataggactgcaccattcattgtaggtgttattgatgccgagaagcacgaattacaggaaggtgtctatgaattacaaagaagattatatgcgaaatataatccactcaataagcctgtttctatagttggtacgttgcagatgtatttggctggttcgtctgatttgttggctttagaagaaaagttggcgatggaaaacaattatagattaggtttaaaattggtcagaggtgcctatattcattcagagaagaatagagaagtcatccataaaacaaaagaatgtacagacctgaactataatcaaggtattacttattgcattgaatctattttggccaataaggagaatgaattaacaattggtcatttggttgtagcttctcataatgccgattccttaaaattgactactgaaaaattgaaaaaatctaccctggtgaataataaaaacaaaaataatgttattttaggccaattattaggtatggctgataatattactcataatttgatcaaaactcataatgttgataacgtcattaaatatgttgcttggggccctccattagaaaccaaagaatacttacttagacgtttagaagaaaatggtgatgccgttagagctgacagtggatttaatttaatcaaaggtgttataggcgtattgtttaagcggttattccgcgtggtctaa

SEQ ID NO: 5312 - protein, 495 aa, Debaryomyces hansenii CBS767
MTLVARGATRVSIRARIPHCKKLVPGVGYYRLFHESPNKLNGTFGVNIPHEQAGRSSSSTTSGIAKVGIDHENFKIPDSTTYLKDFKVSELLSYVVIGAATLNKPILNMCIKMFPYVPMSVIKAFVYKLYCGGENIEEVKQTGLRLSKRGINNMMLSLTIEACNGNDNIDPEFIVSETQRSVTEILIPHILTIIKESGKDINSIPPGYVALKPTGFAKDASNVLKYYKTDPHYAAMFEELVDKASNVCGTIYEENLKLSQKFPDRTAPFIVGVIDAEKHELQEGVYELQRRLYAKYNPLNKPVSIVGTLQMYLAGSSDLLALEEKLAMENNYRLGLKLVRGAYIHSEKNREVIHKTKECTDLNYNQGITYCIESILANKENELTIGHLVVASHNADSLKLTTEKLKKSTLVNNKNKNNVILGQLLGMADNITHNLIKTHNVDNVIKYVAWGPPLETKEYLLRRLEENGDAVRADSGFNLIKGVIGVLFKRLFRVV

SEQ ID NO: 5313 - DNA, 1509 bp, Yarrowia lipolytica CLIB99
  CDS (1)..(1509)
atgttccgacctgcatacttgcgccgattgccaaccctaaaggcctccacccggcttatttccacctcgctcaagtccaaccagcccctggcgaccaacaaccctcctgctcccctgtccaaggccgatgtgccccagaccatgcagcagctcggaaacctgcctggaggctctcccgtgaccggtcccggccatcacaacctgtccaccctctcgccctccccctttggaggcgatattgcatccgccgaggaccgatcttccgactcccacgaggcccgtctgctccccgagaaccaccctcccatgtacctctcttccatgaagacctcggacgtggttgctctcatgctcacttcggcagcaacttcccaccccactctcatcaagctgtgcaccaagctcatgccctacacccccaacgcgctcatcaaggccattgtctactcgctgtactgcggcggcgccaaccacgctgaggtcgtcgagaccggcaagaagctgctggatcgaggctttggcaacatgatgctgtcctactccgttgaggacgccgagggaggagactctgccaacgctctgatggactctgccgttgattccatcatcgagtccattgacaatgtcctggtcaagtacgctcacgagtccgagaagaagaccggcaagtccatcaccggctttgtggctctcaagcccaccggtctgatgaagaacgccaccgccattctccgaaaccacgacaagcccgagtacgccgagcagtggaagcagtacctcgccgtgtgccgaaagatctgccgacacgctgccgagaacggtgagggcaaggttggaattgtttttgacgccgagaagaaggttctccagcccggtgtctacgctgcccagcgagccatgatgcaggagttcaacgtcaacggagccgtccccgtgattggcaccatccagatgtacctccaggactccattattcagctgcaggacgacatttctcacgccgctgccaacggataccagatcggcatgaagctggtgcgaggagcctacatccactccgagcccgaccgatggaccactattcaccgaaccaaggaggactctgacatttcttacaaccgaggcgtggctctgtgcctcgacggcatcatccccgatatccagtccggcacccaccactctgctgttggtaagctgattgtcgcttcccacaacgagtgctccatggctctggctgcccacagactgtctgctgacctcactcccgagcagctcgagtcccaggacaaggtcatcttcgcccagctcatgggcatggctgaggatctgggtgaggagctcgctcaccgaggctacaaggtgctcaagtacgtgccttggggtcccgttaacgagaccaaggactacctggtgcgacgaatggaggagaacggcgacactctttccgatggcggcatgactgttgctttccagtgtgccaccgagcttgccaagcgactggtgaagtaa

SEQ ID NO: 5314 - protein, 502 aa, Yarrowia lipolytica CLIB99
MFRPAYLRRLPTLKASTRLISTSLKSNQPLATNNPPAPLSKADVPQTMQQLGNLPGGSPVTGPGHHNLSTLSPSPFGGDIASAEDRSSDSHEARLLPENHPPMYLSSMKTSDVVALMLTSAATSHPTLIKLCTKLMPYTPNALIKAIVYSLYCGGANHAEVVETGKKLLDRGFGNMMLSYSVEDAEGGDSANALMDSAVDSIIESIDNVLVKYAHESEKKTGKSITGFVALKPTGLMKNATAILRNHDKPEYAEQWKQYLAVCRKICRHAAENGEGKVGIVFDAEKKVLQPGVYAAQRAMMQEFNVNGAVPVIGTIQMYLQDSIIQLQDDISHAAANGYQIGMKLVRGAYIHSEPDRWTTIHRTKEDSDISYNRGVALCLDGIIPDIQSGTHHSAVGKLIVASHNECSMALAAHRLSADLTPEQLESQDKVIFAQLMGMAEDLGEELAHRGYKVLKYVPWGPVNETKDYLVRRMEENGDTLSDGGMTVAFQCATELAKRLVK

SEQ ID NO: 5315 - DNA, 825 bp, Pan troglodytes
  CDS (1)..(825)
atgcggaagtttgcagcttccagcccaacctgcctccagagcctccaggtctcctgcctcaatgctgagcagaaccagcacctccgggcctccctcagccgcttgcatcgggtggcacagtatgcccgggcccagcacgtgcggctcctggtggatgcagagtacacctcactgaaccctgcgctctcgctgctggtggctgccctggctgtgcgctggaacagcccgggtgaaggcgggccctgggtgtggaacacctaccaggcctgtctaaaggacacattcgagcggctggggagggatgcagaggctgcgcacagggccggcctggccttcggagtgaagctggtacgaggtgcatatctggacaaggagagagcggtggcccagctccatgggatggaagaccccactcagcctgactatgaggccaccagtcagagttacagccgctgcctggaactgatgctgacgcacgtggcccgccatggccccacgtgccacctcatggtggcttcccacaatgaggaatctgttcgccaggcaaccaagcgcatgtgggagctgggcattcctctggatgggactgtctgtttcggacaacttctgggcatgtgtgaccacgtctctctagcactggggcaggccggctatgtagtgtataagtccatcccctatggctccttggaggaggtaatcccctacctgatccggagggcccaggaaaaccggagcgtgcttcagggtgcccgcagggaacaggagctgctcagccaagaactgtggcggcggctgctgccaggatgccgaaggataccccactag

SEQ ID NO: 5316 - protein, 274 aa, Pan troglodytes
MRKFAASSPTCLQSLQVSCLNAEQNQHLRASLSRLHRVAQYARAQHVRLLVDAEYTSLNPALSLLVAALAVRWNSPGEGGPWVWNTYQACLKDTFERLGRDAEAAHRAGLAFGVKLVRGAYLDKERAVAQLHGMEDPTQPDYEATSQSYSRCLELMLTHVARHGPTCHLMVASHNEESVRQATKRMWELGIPLDGTVCFGQLLGMCDHVSLALGQAGYVVYKSIPYGSLEEVIPYLIRRAQENRSVLQGARREQELLSQELWRRLLPGCRRIPH

SEQ ID NO: 5317 - DNA, 1059 bp, Pan troglodytes
  CDS (1)..(1059)
atggctctgcggcgcgtcttgcccgcgctgcgcccctacattccccgctttgcgccgctgtccacggcgccggccgccagcgagcagcccgccgcgggcccaggggccgtgccaggacgtgggtcggccagcgcagtgcggccgctggtgcccgccgtggacttcggcaacgcgcacgaggcgtactgcagccggcgaacctgggagctggcgcgcagcctgctggtgctgcgcttgtgcgcctggcccgcgctgctggcgcgccacgagcaggtgaaggatcagagagccccatgccccatccttggggccaggggctgggaccagatcaccaggagcctccagttgaacaccgtggacctgctggactggagcagcctcatcgacagcaggaccaagctgtccaagcacctggtggtccccaatgcacagggcccgcgtagggcagtgcactggctgcgttggaggttccggggcactgtgctgcttgtccaggtggccctccctcccagccctgcacagacgggtgagagggttcccacaggacagctggagcccctgctgtcccggttcactgaggaggaggagctacagatgacgaggatgctacagtggatggatgtcctggccaagaaagccacagagatgggcgtgcggctgatggtggatgccgagcagacctacttccagccggccatcagccgcctgacgctggagatgcagcggaagttcaatgtggagaagccgctcatcttcaacacataccagtgctacctcaaggatgcctatgacaatgtgaccctggacatggagctggctcaccgtgagggctggtgttttggggccaagctggtgcggggtgcacacctggcccaggagcgagcctgtgcagcagagatcggatatgaggaccccatcaaccccacgtacgaggccaccaacgccatgtaccacaggtgcctggactacgtgctggaggagctgaagcacaacgccaaggccaaggtgatggtggcctcccacaatgaggacacggtgcgcttcgcactgcgcaggtag

SEQ ID NO: 5318 - protein, 352 aa, Pan troglodytes
MALRRVLPALRPYIPRFAPLSTAPAASEQPAAGPGAVPGRGSASAVRPLVPAVDFGNAHEAYCSRRTWELARSLLVLRLCAWPALLARHEQVKDQRAPCPILGARGWDQITRSLQLNTVDLLDWSSLIDSRTKLSKHLVVPNAQGPRRAVHWLRWRFRGTVLLVQVALPPSPAQTGERVPTGQLEPLLSRFTEEEELQMTRMLQWMDVLAKKATEMGVRLMVDAEQTYFQPAISRLTLEMQRKFNVEKPLIFNTYQCYLKDAYDNVTLDMELAHREGWCFGAKLVRGAHLAQERACAAEIGYEDPINPTYEATNAMYHRCLDYVLEELKHNAKAKVMVASHNEDTVRFALRR

SEQ ID NO: 5319 - DNA, 1920 bp, Canis familiaris
  CDS (1)..(1920)
atggaggctgtcttgctccgtgaagttgctcccctgcctgcggagcaggaccctgcccccggcccacctgccaagcagaggtctctgtgcttccagaagttaccttctccaggaggtgtggtgcagtggcgacatcgctctgtcgccgtgggcccgcatcctgggatcccagaccagggcctggcggtgcggatctcctgctggattctctctggcggacagcaggggtcagcctggcacgtggcctccgaagaggggcagcagcaggagggcctctttggggccacagcccaggtggtgggggcgatgacaggaaacatcacctcgtgtgccctgcactactgctccccattcttggccctcgagctggggggtctaagggaggctaagctgctccatctcaccaggaggcttctggggcaaaggctgtttgaaaagctgatgaagatgaccttctacgggcagtttgtggccggcgaggaccaggagtccatccggcccgtgatccagcacaacagggcattcggagtgggctccatcttggactatggggtggaggaggatctgagccccgaggaggccgagcgcaaggagatggagtcctgtacatcggctgtcgagagggagggcagtggtacgagtaagagggagaggcagtaccaggcccacccggccttcggagaccgcagggacggtgtcatcagtgcccgcacctacttctatgccagtgaagccaagtgtgacagccacatggagacgttcctgcgctgcatcgaggcctcaggcggagccagtgatgatggcttctcagccatcaagctcactgcgctggggagacctcagtttctgctgcagttctcagacgtgctgaccaagtggagacgattctttcaccaaatggctgcagagcaagggaagactggtctggctgccatggataccaagttggaggtggctgtgctacaggaaagtgtggcaaagatgggcatcgcctccaggacggagattgagaactggttcactgcggagaccctgggcgtgtctggcaccctggacctgctggactggaacagcctcatcgacagcaggaccgagctctccaagcacctggtggttcctaacatgcagacaggacagctggagcctctgctgtcacggtttactgaggaggaagagctgcagatgacgaggatgctgcagaggatggacatcctggccaagaaagctgccgagatgggcgtgcggctgatggtggacgccgagcagacgtacttccagccggccatcagccgcctgacgctggaaatgcagcgcaagttcaacgtggagaagccgctcatattcaacacgtaccagtgctacctcaaggacgcctatgacaacgtcaccctggacgtggagctggctcgccgtgaaggctggtgctttggggccaagctagtgcgtggtgcctacatggcccaggaacgtacccgtgccgcagagatcggctacgaggaccccatcaaccctacgtacgaggccaccaatgccatgtaccacaggtgcctcaactatgtcctggaggagctgaagcacaacagcaaggccaaagtgatggtggcctcccacaatgaagacacggttcacttcacgctgcgcaggatggaggagcttggcctgtaccctgccgatcgccaggtgtactttggacagctactgggcatgtgtgaccagatcagcttcccactaggccaggccgggtttcctgtgtacaagtatgtgccttatggccctgtgatggatgtgctgccctacctatcccggcgtgccctggagaacagcagcgtcatgaagggcgcctggcgggagcggcagctgctgtggcaggagctcaagcggaggatccgcacaggcagcctcttccaccgtccagcctag

SEQ ID NO: 5320 - protein, 639 aa, Canis familiaris
MEAVLLREVAPLPAEQDPAPGPPAKQRSLCFQKLPSPGGVVQWRHRSVAVGPHPGIPDQGLAVRISCWILSGGQQGSAWHVASEEGQQQEGLFGATAQVVGAMTGNITSCALHYCSPFLALELGGLREAKLLHLTRRLLGQRLFEKLMKMTFYGQFVAGEDQESIRPVIQHNRAFGVGSILDYGVEEDLSPEEAERKEMESCTSAVEREGSGTSKRERQYQAHPAFGDRRDGVISARTYFYASEAKCDSHMETFLRCIEASGGASDDGFSAIKLTALGRPQFLLQFSDVLTKWRRFFHQMAAEQGKTGLAAMDTKLEVAVLQESVAKMGIASRTEIENWFTAETLGVSGTLDLLDWNSLIDSRTELSKHLVVPNMQTGQLEPLLSRFTEEEELQMTRMLQRMDILAKKAAEMGVRLMVDAEQTYFQPAISRLTLEMQRKFNVEKPLIFNTYQCYLKDAYDNVTLDVELARREGWCFGAKLVRGAYMAQERTRAAEIGYEDPINPTYEATNAMYHRCLNYVLEELKHNSKAKVMVASHNEDTVHFTLRRMEELGLYPADRQVYFGQLLGMCDQISFPLGQAGFPVYKYVPYGPVMDVLPYLSRRALENSSVMKGAWRERQLLWQELKRRIRTGSLFHRPA

SEQ ID NO: 5321 - DNA, 1704 bp, Canis familiaris
  CDS (1)..(1704)
atgcttcggacctgtcgtgtgctccgttcccaggctggatcctccactgggggctggcagcccctgagctttgatgggggtgcttttcatctcaaaggcacaggagaactgacacgagctttgctggtgctacggctgtgcgcctggccccctctggtcacacacggcctggtgctccaggcctggtctcagcgactcctgggctcccggctctcgggagcgtttctccgagcatccttctacgggcagtttgtggctggtgagacagcagaggaggtgaagggctgcgtccaacagctccagaccctaggccttcgacccctgctggcggtacccatcgaagaggagccagactcagctgtcaaggctggcgaggcctggtatgaggggaacctcagtgctatgcttcggtgcgtggacatgtcacgaggcgtcctggagacccccagcccgactgggaacatccttatgcagctgaagatgacggcgctgaccagtactcggctctgtaaggagctaacctcctggatcagaaaaccgggggcttccttggagctgagccccgagaggctggcagaagccatggactctgggcaggacctccagatctcctgcctcaacgcccagcaaaaccagcatctccaggcctctctgagccgcttgcaccgggtagtacagcatgcccgggcccagcgtgtgaggatcctggtggatgccgagtacaccttcctgaaccctgctctctgtctgctggtggacgccctggccctgcgctggaacggccccggggagggcgggccctgggtgtggaacacttaccaggcctatctgaaggacacacacgagcggctgaggcgggccgcggaggccgctgacagggctggccgggccttcggagtcaagttggtccgaggggcgtatctggacaaggagagagaggtggctcggcaccaggggaccgaagaccccattcagcccaactacgaggctaccaatcagagttacagccgctgtctggagctgatgctgactcaagtgtcccaccggggccccatgtgccacctcatggtggcttcccacaatgaggaatctgttcaccatgccaccaagcgcatgtgggacctgggcattcctctggatgggcctgtctgttttggacaacttctagggatgtgtgaccacgtctccttggcattggggcaggccggctatgccgtgtataagtccatcccttatggttccctggaggaggtgatcccctacctgatccggagggcccaggaaaaccggagcgtgctgcagggtgcccgcaaggaacagacgctgctcagccaagaactcaagcggagactgctgagacggggcctgaggaggaagcggctactgcaagcgcagacgtggcaagcagccactggtgcgcatgcgcctctgatgcccgagcgggagtgcctgggtcacgtggcaggcacgtggccgcagaccccaccccgcacccgacgcttccctgaacctcagtccgagtccccaaccctgagaccctcccccagcctgcagagcctgcctcagggcctttgcaccagccccagccctcggactaggactatcctcctccctaacactgccccgcccagcctggagacccccgtcctctccgtcccaaccctcaggcccttcttccgccagactccttccctgaacccctag

SEQ ID NO: 5322 - protein, 567 aa, Canis familiaris
MLRTCRVLRSQAGSSTGGWQPLSFDGGAFHLKGTGELTRALLVLRLCAWPPLVTHGLVLQAWSQRLLGSRLSGAFLRASFYGQFVAGETAEEVKGCVQQLQTLGLRPLLAVPIEEEPDSAVKAGEAWYEGNLSAMLRCVDMSRGVLETPSPTGNILMQLKMTALTSTRLCKELTSWIRKPGASLELSPERLAEAMDSGQDLQISCLNAQQNQHLQASLSRLHRVVQHARAQRVRILVDAEYTFLNPALCLLVDALALRWNGPGEGGPWVWNTYQAYLKDTHERLRRAAEAADRAGRAFGVKLVRGAYLDKEREVARHQGTEDPIQPNYEATNQSYSRCLELMLTQVSHRGPMCHLMVASHNEESVHHATKRMWDLGIPLDGPVCFGQLLGMCDHVSLALGQAGYAVYKSIPYGSLEEVIPYLIRRAQENRSVLQGARKEQTLLSQELKRRLLRRGLRRKRLLQAQTWQAATGAHAPLMPERECLGHVAGTWPQTPPRTRRFPEPQSESPTLRPSPSLQSLPQGLCTSPSPRTRTILLPNTAPPSLETPVLSVPTLRPFFRQTPSLNP

SEQ ID NO: 5323 - DNA, 1812 bp, Cryptococcus neoformans var. neoformans JEC21
  CDS (1)..(1812)
atgtccgcaatccgaccgatcatgagaccttttcgaatgacaactccttttcgacaatcttctagcttccgccagctaaggattacctgggctccttcctttggcgctggaagcagccgttgcctcactatcggcctttctccttcctctggttctgggtccagctttcgccgccgactcctttatccccttgctatcctccctgttggcttgctcttactccctgtcctctctgccgactctgagccagatgccattcctgtgcccacttctctctccacttctacgacctccgagcttctccggacttggttcatctacgccatcatctctatgcctggcgttgttgactactctcctgccgttcttaacttctttatcaactcttctttacgcggccccactgaatggttcgtccgacacaccttttttggccaattcgtcgctggtgagaccgtagagggatgtatgcctactttgaaggctttcagggagaggaacgttggtgccatgttaaactactctgccgaagtagacgagtcgcagttgaccgagactgctccttccaaggaggaaaggaacaggaaggagagagaaaagaagtttgagactatcatcactgctttggaggctgctggagaatatgaaagaagcttgcccgttgaccagagaggtgttactggtttcgctctaaagatcactggccttattgaccccaacatccttgaaagagcttcgtacacccttctccgattacgtcctcttgccaagtccaattctcccacagcccccaacactcatcttttcgtcccctaccctggtactcccgaaaccctggaccggcaagtcgttgcccgcactcccgagcttaagctaggtgatggcaaggagctccttgctttgaagggcaagtgggatgacatgggtgttttggaaaaggatcctggattgcaagagggtgaccttgaggagcttagacagttgtggtacaagttgcagaagattggtcacaaggctaaggagaacgacatcattctctatgttgatgccgagtacacttggtaccagccagctttggacgcatacacccttcttctttctcaagagttcaatcgacctcccacttccaaagaggagatctggactggtcctctgatttacggtacttatcagacctacctctgccgtcaacccacacaccttattcacgccatacaacacgccgaagtcaacggctacgccctcggtgtcaagctcgtccgtggtgcctactttgagcaagaacgcaagaagtggtccgacgagggccgtgtcggtgccgctcccatctggcccaacaaatctgctactgacgtcgcttacaatggctctatctccaccatcatgaccactctcgcctcccaacttaagtctccccaccccgagctcgctttgagcgttgcgttcggtacccacaaccctgagtcttgtgatctcgtctgcgagaacttgctcaggaacggccttgccaaggaagtaggggaagcgaagatgttgaggttgagagaggacgtgcggggtaaggttaggattgcacagttgctgggtatgaaggacgacctcacagatcgtatggccagaaagttcgtcaatgatggcaagcccgttgctctcaaatacatggcatacggcaagctttcagaggttatgccttaccttggtaggcgggcgattgagaacaagagtttgatgagcggtgatcacggtgcagcagcagaaatgaggcgagtggcggccgagttaaagagaagattttttggtggctcagtataa

SEQ ID NO: 5324 - protein, 603 aa, Cryptococcus neoformans var. neoformans JEC21
MSAIRPIMRPFRMTTPFRQSSSFRQLRITWAPSFGAGSSRCLTIGLSPSSGSGSSFRRRLLYPLAILPVGLLLLPVLSADSEPDAIPVPTSLSTSTTSELLRTWFIYAIISMPGVVDYSPAVLNFFINSSLRGPTEWFVRHTFFGQFVAGETVEGCMPTLKAFRERNVGAMLNYSAEVDESQLTETAPSKEERNRKEREKKFETIITALEAAGEYERSLPVDQRGVTGFALKITGLIDPNILERASYTLLRLRPLAKSNSPTAPNTHLFVPYPGTPETLDRQVVARTPELKLGDGKELLALKGKWDDMGVLEKDPGLQEGDLEELRQLWYKLQKIGHKAKENDIILYVDAEYTWYQPALDAYTLLLSQEFNRPPTSKEEIWTGPLIYGTYQTYLCRQPTHLIHAIQHAEVNGYALGVKLVRGAYFEQERKKWSDEGRVGAAPIWPNKSATDVAYNGSISTIMTTLASQLKSPHPELALSVAFGTHNPESCDLVCENLLRNGLAKEVGEAKMLRLREDVRGKVRIAQLLGMKDDLTDRMARKFVNDGKPVALKYMAYGKLSEVMPYLGRRAIENKSLMSGDHGAAAEMRRVAAELKRRFFGGSV

SEQ ID NO: 5325 - DNA, 1719 bp, Dictyostelium discoideum
  CDS (1)..(1719)
atgataaaaaatacagttagaataataaataaaaatagtaatacttttattaatattagaaataataataataataatattaatagctcattaaaaagtggctttggtacaataaaaagatttaatacaacactaaatcataatagcagtaatagtaatattcaaacaccaatttcaattaattctacaatcataaataataataataatagtaataacaataatagtaataacattattaataatgatttaaatgttgttaaattttcaacaatttcaacaccaaattcaattttggatacattaaatgaaaatcattcaaatcaaaccaacaatgtaaataataaaaattataataataataataataattttgaaaaagatgataaatttggtcctccaaataaccaaaataataataaattggatttggatacttcaaaattatatgtttcaaaatcaacaggtgaattattttttacttttatgattttaaaagtttgttcaattaattttatttctgataatagtcaaaaatttttaaatttatttgaaaaattaggattgtcaaaaccattaaattttttcattaaatattcattttttaaacaattttgcgcaggagagacaattagagaaactgaaatatttacagagaaattaaataaattaggtattggtacaattttagattatgcaattgaagagttggcaggtagttcagaaggtttcgatagtgttgcagagaatatttgtgaaaccattagagttgcagcaaagaatccaaccaattcattcagttgtgttaagttcacaggattggttacaccatcagtattggagaaaatgaatactttagtatccaatgtaacaaccaatgtatcggaattaccaattgaatcatttaattcaccattggatttctatttaaatcaatcatcatcattgatgaaacaaggaagtgaaccattgttaacaagtaaagatatcaaagagattaaagaattctttaatagaatggacaagatttttcaattatgtcatcaacgtggtgtaccgattttagtggatgccgaacaaagttattatcaagttgcaattcaccatttaacaatgtcctattcaattaagtataataaagagaaaccaataatttacaatacctatcaaatgtatttagttaatggtatgaatgtattgaaacaacattttgagctatcgtcatcacaaaagtttaactttaaattgggtgctaaaatcgtacgtggtgcttatatggttacagagagtgaacgttctcaaagattgtcaactgaaaatccagtcttaccaacaattcaagatacacataaaagttataatacagcattggatttcttattgaatcaaattaaatccgatccaaattcaattggtctcatgatagcttcacataatgaagattcaatcaatttaggtacaaaattaattaaacaatataaaattgatccaactaatccaaatatacaatttggtcaattatttggtatggccgatttccttagttttaatttggtggatcaacatcaaagaattttcaaatatgtaccgtttggtccggttgaagaagttttaccttatttaattagaagaatgcatgaaaataaaggtttcattggtagtaatagtgataaagaattattttatttaaagaaagaaattaaaagaagattattttaa

SEQ ID NO: 5326 - protein, 572 aa, Dictyostelium discoideum
MIKNTVRIINKNSNTFINIRNNNNNNINSSLKSGFGTIKRFNTTLNHNSSNSNIQTPISINSTIINNNNNSNNNNSNNIINNDLNVVKFSTISTPNSILDTLNENHSNQTNNVNNKNYNNNNNNFEKDDKFGPPNNQNNNKLDLDTSKLYVSKSTGELFFTFMILKVCSINFISDNSQKFLNLFEKLGLSKPLNFFIKYSFFKQFCAGETIRETEIFTEKLNKLGIGTILDYAIEELAGSSEGFDSVAENICETIRVAAKNPTNSFSCVKFTGLVTPSVLEKMNTLVSNVTTNVSELPIESFNSPLDFYLNQSSSLMKQGSEPLLTSKDIKEIKEFFNRMDKIFQLCHQRGVPILVDAEQSYYQVAIHHLTMSYSIKYNKEKPIIYNTYQMYLVNGMNVLKQHFELSSSQKFNFKLGAKIVRGAYMVTESERSQRLSTENPVLPTIQDTHKSYNTALDFLLNQIKSDPNSIGLMIASHNEDSINLGTKLIKQYKIDPTNPNIQFGQLFGMADFLSFNLVDQHQRIFKYVPFGPVEEVLPYLIRRMHENKGFIGSNSDKELFYLKKEIKRRLF

SEQ ID NO: 5327 - DNA, 1437 bp, Aspergillus nidulans FGSC A4
  CDS (1)..(1437)
atgaaggccgcaactccacgtccttcagtgcgggcactctctagcgggcgatcttatcgcaccgccagattcgtcagccgaacaagcaacgcgaggtcgtcactcgctgccgataccaacagcttgctgcaacaggctcctccgtcacctaagaagcagctggcctcgccgctagcaaagctgcctctttcctccgttctccgctccttgctcattctctctgtttcctcctcctctatactgctaaagccatgcatctacacgctctcagctctagcgcatcccaagacggctctgctggacgtcgcaaagaacccgctattgaacctgcttgtgaaacacaccatctacaaacagttcaatgcgggcgagaacaagcttgaggtccaacgctccatcaatgcgatcaaggagctaggataccgcggcgtgctcttgggctatgcccgtgaagtcctagtgggggagtccaagacagacccgcgcgatgagcaggctagccggcaggagatccagacgtggctggacgggaccctccagaccgtggacatggcccaggagggtgactttgtagccttgaaattcacgggcatgggtatccaagcgctcgaatacctccagaaccaggcgccgccttcaccgtttatggacgaagcaatcaaacaggtctgcgatcttgcgatctcccggaacgtgcgactactggtagacgcggaggaacaggcggtccagccagggatcgaagagtgggcgacaatgtaccagaaatactgcaactctcgcacccctggccgcgccatcttctacaacacctaccaagcatacctgtgctctactccggccacactcgcgcgccatctcgagatctctcgcaaggaaggatacacgcttggagtcaagctggtccgcggagcatacttgaagaccgaaccccgccatctgatctgggccaagaaggaacagacagatgagtgctacgacgggattgtagaagcccttcttacccggcgatacaaccacatgctaaagcccgcttcggctgaacacaccaccgagcttccccccgtcagtgtgatcgtcgccacgcacaaccgggactctgtccgtaaggcccacgctctgcgtctcgaacaggcaagccggggagagaaatcagatgtcgagcttagctacgctcagctccagggaatggcagatgagatcagctgcgagctcttgcagggcttccaaactgcaggccccgagaatactaaagttgctgaatcaccaaacgtgtacaaactgctcacttggggctcagtcaaagagtgcatgggtttcttgcttcggcgggcagtcgagaacacagaggccgttggacgcacgaagcagtcccaggaggctatgttttctgagctcaggcgaagagctcgtcgcgcttttggtctgcgttactga

SEQ ID NO: 5328 - protein, 478 aa, Aspergillus nidulans FGSC A4
MKAATPRPSVRALSSGRSYRTARFVSRTSNARSSLAADTNSLLQQAPPSPKKQLASPLAKLPLSSVLRSLLILSVSSSSILLKPCIYTLSALAHPKTALLDVAKNPLLNLLVKHTIYKQFNAGENKLEVQRSINAIKELGYRGVLLGYAREVLVGESKTDPRDEQASRQEIQTWLDGTLQTVDMAQEGDFVALKFTGMGIQALEYLQNQAPPSPFMDEAIKQVCDLAISRNVRLLVDAEEQAVQPGIEEWATMYQKYCNSRTPGRAIFYNTYQAYLCSTPATLARHLEISRKEGYTLGVKLVRGAYLKTEPRHLIWAKKEQTDECYDGIVEALLTRRYNHMLKPASAEHTTELPPVSVIVATHNRDSVRKAHALRLEQASRGEKSDVELSYAQLQGMADEISCELLQGFQTAGPENTKVAESPNVYKLLTWGSVKECMGFLLRRAVENTEAVGRTKQSQEAMFSELRRRARRAFGLRY

SEQ ID NO: 5329 - DNA, 1137 bp, Aspergillus nidulans FGSC A4
  CDS (1)..(1137)
atggctatcgatggtgcatatccccccgcaactcttccagccggcgacaccaagactgaatcagagtctgccgctataacagccgctgctcatcctctctctgccctccccacccccgttctccttcgctccctgctcattgctaccatttcctcgaaaccctccctcctcatcccctccctctcagccttgtcattcctctgcaagccccgcgctggtcctctgctcaatgtcgaccggaatcccatcctgcactttatcctcaaagcaaccttttacagacagttctgtgccggtgagacgcccgacgaagtgcgctcaaccatccgccagctcgccggtatggggttccagggaacaatcatgacatatgcgaaggaatcggtgtttgatgcaaagaccaagatgcagacgggcttgggcgttagtaccaagatgtccgggaaacaggaagttaccgagcccacgttggccaggggcgaggccttttgcccgcagatagaagcgtggaggaaggagactgtcgagacgattgagctactgggcgcgaatgattacctggctctaaagttggcgtacctgaagagcacacccgccacaattgcacggcatctccaagctgcaagcgacgtggggtttacgctaggacttaaacttgttcgtggcgcatacattttctcagacgagcggagcctgatccacgagacgaaggcggatacagatgcggcttataacgggattgcacagggggtgctgtgccggcagctcggcgcgttcgggacagagaagccgttcccatctgtggagttgttcctggcgagccataataaggagagtgtcatgaaggcgcatgcgcttcgactgcagagactgaaggagggattgccgactgtgccggtgggattcgggcagctgcatgggatatccgatgaggtgagctttaggttgttaacgctgaagaatgagcgtaacgagccgatggtgtataagtgctcgacctggggcaggctgagcgagtgtctggcatacctggtaaggagggcggttgagaatcgggacgcggtaggccggacggaggatgagtatcgagccctgaagagggagatggctagaaggtcatggtactccttactttag

SEQ ID NO: 5330 - protein, 378 aa, Aspergillus nidulans FGSC A4
MAIDGAYPPATLPAGDTKTESESAAITAAAHPLSALPTPVLLRSLLIATISSKPSLLIPSLSALSFLCKPRAGPLLNVDRNPILHFILKATFYRQFCAGETPDEVRSTIRQLAGMGFQGTIMTYAKESVFDAKTKMQTGLGVSTKMSGKQEVTEPTLARGEAFCPQIEAWRKETVETIELLGANDYLALKLAYLKSTPATIARHLQAASDVGFTLGLKLVRGAYIFSDERSLIHETKADTDAAYNGIAQGVLCRQLGAFGTEKPFPSVELFLASHNKESVMKAHALRLQRLKEGLPTVPVGFGQLHGISDEVSFRLLTLKNERNEPMVYKCSTWGRLSECLAYLVRRAVENRDAVGRTEDEYRALKREMARRSWYSLL

SEQ ID NO: 5331 - DNA, 753 bp, Danio rerio
  CDS (1)..(753)
atgcatgctgtggagaacggtgtaaggctgatggtggatgcagaacagacgtatttccagccagccatcagcagactcacgctggagatgcagaggatcttcaacagagagaaaccacacatcttcaacacctaccagtgctacctgagagtgagtctctcacacacagacacacgcacttgcttatctgttgtatggaggcgtatgataacgtgtctgtggacgtggagctcgtcgcggcgcgagggctggtatttcggcgctaagctggtcagaggagcgtacatgtgtcaggagagatccagagcgtcggagatcggctacgaagaccccatcaatcctgactacgaggccaccaacaacatgtaccacaagtgtctggagtacattctggaggagatcaaccacaaccggatggcaaacgtcatggtggcgtctcacaatgaggacacggtcaaattcacactggagaagatgaacgagatgaatctctctcccactgagaataaggtttactttgggcagctgctgggaatgtgtgaccagatcagtttccctctgggtcaggctggttttccggtgtacaaatatgtgccgtacgggccggtaaacgaggtgatcccgtacttgtcccgccgcgcgcaggaaaaccgcggattcatgaagggctcacagagagagcgaagcctgctgtggaaggagatcaagcgcagactcttcagcggacagctgctatacacacctgtgtactga

SEQ ID NO: 5332 - protein, 250 aa, Danio rerio
MHAVENGVRLMVDAEQTYFQPAISRLTLEMQRIFNREKPHIFNTYQCYLRVSLSHTDTRTCLSVVWRRMITCLWTWSSSRREGWYFGAKLVRGAYMCQERSRASEIGYEDPINPDYEATNNMYHKCLEYILEEINHNRMANVMVASHNEDTVKFTLEKMNEMNLSPTENKVYFGQLLGMCDQISFPLGQAGFPVYKYVPYGPVNEVIPYLSRRAQENRGFMKGSQRERSLLWKEIKRRLFSGQLLYTPVY

SEQ ID NO: 5333 - DNA, 1473 bp, Candida albicans SC5314
  CDS (1)..(1473): transl_table=12
atgtcaattagattatattctaaacaatctttaaatacattcaaaaaagctacatttataccccttactactactgctactactgctattactactactcaatttagatatttccatgacaccccaaataaacaaaatgtcactgtcaataatatgatgccaagagttactaaaccaaccccaaccaacacttttactacatctccacaattaccttctacagaatatttaaaagcatttaataataaagaattgatttcatttttcatgattggattagccacattaaataaaccaattttacaactttgtattaaattatttccttatgtacccatgtcaattattaaagctcttgtttatcgtatttattgtggtggtgaaaccattgatcaagttaaaaaaactggcttaagattgcatgaacgaggtattaataatatgatgatttctttaaccattgaagcttgtgatggtaatgataatgttgatcctaaatatattgttgaagaaactgccaaatcaattgaaaccattttagttcctcatactgtagccatgattgaacaagccaccgatgacattaatgatataccaccagggtatgttgcattaaaaccaacaggatttgctaaagatgcagcaaatgtattgaaaaattataatactactatgattaaagaatttgatgaattggttgataaagcaattattgtttgtcaaaaaatttatgattccaataaagaattgagtcaaaaatatcctgaaagagtatcaccatttgttgttggagttattgatgctgaaaaacatgaattacaagaaggtgtttatgaattacaaagaagattatatcaaaaatttaataaattaaatcaaccaatttcaattgttggtactttacaaatgtatctttctgattcagccaatttattaactaaagaagaaaatttagctaatgaaaataattatcgtttaggtttaaaattagttcgtggggcttatattcattcagaaaaaaatcgtgatattgttattcataaaactaaacaagatactgataataattataattccgggatttcttattgtattgattctattttaaatcaaaatcaaaatcaaaatggctctactattggtcatttagttgttgcttctcataatgctgaatcaatgagattagccagtgataaagtttataatccaatgaatgaatccaataaaaataaaactaatgttgttttaggtcaattattaggtatggctgataatgttacttatgatttaattactaataataaaattggtaatgttatcaaatatgttccatggggtccaccattagaaactaaagaatatttattaagaagattagaagaaaatggtgatgctgtcaaaaatgataatggttggcctttagttaaagcttcatttaaaatgttaaccaaaagattatttggaagtggttaa

SEQ ID NO: 5334 - protein, 490 aa, Candida albicans SC5314
MSIRLYSKQSLNTFKKATFIPLTTTATTAITTTQFRYFHDTPNKQNVTVNNMMPRVTKPTPTNTFTTSPQLPSTEYLKAFNNKELISFFMIGLATLNKPILQLCIKLFPYVPMSIIKALVYRIYCGGETIDQVKKTGLRLHERGINNMMISLTIEACDGNDNVDPKYIVEETAKSIETILVPHTVAMIEQATDDINDIPPGYVALKPTGFAKDAANVLKNYNTTMIKEFDELVDKAIIVCQKIYDSNKELSQKYPERVSPFVVGVIDAEKHELQEGVYELQRRLYQKFNKLNQPISIVGTLQMYLSDSANLLTKEENLANENNYRLGLKLVRGAYIHSEKNRDIVIHKTKQDTDNNYNSGISYCIDSILNQNQNQNGSTIGHLVVASHNAESMRLASDKVYNPMNESNKNKTNVVLGQLLGMADNVTYDLITNNKIGNVIKYVPWGPPLETKEYLLRRLEENGDAVKNDNGWPLVKASFKMLTKRLFGSG

SEQ ID NO: 5335 - DNA, 1392 bp, Aspergillus fumigatus Af293
  CDS (1)..(1392)
atgtctttagtgccaaagcgacccggcattgtgtctttgcttgcaggcaaacaattacggtgtcaagtttcaacattgaatacaacacctcctacacaccggcctcaagatgccatcatttcacagccatctccatcttcaaagaaggcgcctctctcagtgttaccaacaggagcccttattcgttcgcttttgttcacatccatcatgtcctctcccttactgaacccctgtttagcaataatgaaatacgttgtggattcaaactctcccctcctcaatccatcaaagaacccgctcatagactacctcctccgaaaaacaatctacaatcacttctgcgcaggcacgaacgaggatgaagtgcgcaagaccgttcaggatatgaaaagcctaggatttaagggtgttatccttggatacgctagagaatcaattgcgaaggctgacgaaaacgacaacagcagctttcatgccgagaaaagtcaactagcaattcaagaccaagcagtggaggaatggagacaaggaaacctacggacactgaagatgattggcgcaggagacttccttggaatcaaattcaccggtgcaggccccaaagctgtcgcagccctttctcagggcgacctcgttccgcccccctctatcgctcaagctattgatgagatctgcgaggccacagcatcccagaactcccgtctttggatcgatgcagaacagcaagtctttcagccggcgatagacgcatggacgattgacctaatgcgaagattcaaccgaaacggacaaatagtcgtctacaacactatccaggcgtatttgaagtcctcgagcgagaacgtccatcggcacctttgcctagcgcaaaagcaaggatggacattgggaatcaagcttgtccgcggggcttacatcgcacatgatatcagatcccggatacacgatactaaggcagatacggataacagctacgaccatatcgttgaaagccttttatcacggaagttcccgctgaaagtagcggctgataatgcggcagcgttcccggatgtacggttgttcgtggcctctcataacgcggaaagcgtgcgcaaggcgtcggcgctgtatagacagaggatcaataacggtcaacccacgattccacttgagattggccagttgcaagggatggcagacgaagtgagctgtgagttgttggctgggaacagcacgggtcagtcggagatgccgacgcctggagtattcaagtgcctggcttggggaacaacggaagaatgtctgcatttcctgttgcgaagagcgattgagaataaatcggccctggagaggaccaaagacacagcagtagcgatgcgacgggaagcctggaggagactttggtggtga

SEQ ID NO: 5336 - protein, 463 aa, Aspergillus fumigatus Af293
MSLVPKRPGIVSLLAGKQLRCQVSTLNTTPPTHRPQDAIISQPSPSSKKAPLSVLPTGALIRSLLFTSIMSSPLLNPCLAIMKYVVDSNSPLLNPSKNPLIDYLLRKTIYNHFCAGTNEDEVRKTVQDMKSLGFKGVILGYARESIAKADENDNSSFHAEKSQLAIQDQAVEEWRQGNLRTLKMIGAGDFLGIKFTGAGPKAVAALSQGDLVPPPSIAQAIDEICEATASQNSRLWIDAEQQVFQPAIDAWTIDLMRRFNRNGQIVVYNTIQAYLKSSSENVHRHLCLAQKQGWTLGIKLVRGAYIAHDIRSRIHDTKADTDNSYDHIVESLLSRKFPLKVAADNAAAFPDVRLFVASHNAESVRKASALYRQRINNGQPTIPLEIGQLQGMADEVSCELLAGNSTGQSEMPTPGVFKCLAWGTTEECLHFLLRRAIENKSALERTKDTAVAMRREAWRRLWW

SEQ ID NO: 5337 - DNA, 1167 bp, Strongylocentrotus purpuratus
  CDS (1)..(1167)
atgggtgagactctcttcacagccctcatgagggcatccttttacggccaatttgcggcaagtccgcagtcggtccggcaggtagcaaacaagttcaacgctgctgacatcgcacctatgctggccacaactgctgaagagaaagtgggagatagcccagatgccataaatgaggaaaagtatgagaggaacgtagaaactatgctactgtgccttgacatgcaaactgaagtggcccggcctaatcagccaatcctttctcaactcagaataacatcttatatcaaggctgatcttctggccagactctcggacattcttgcaacgatggataataacttcttgacggacaaccctgtttgtgttgccaatttgatgaatggactggatggcgacttaatggatattccagagctgacagacatggagttaacccatctcaagcatgctcttaagagaattgatactgttgttcagagagcaatacaaaatgggatcaagactctagtggatgctgagtatgtgtctgtcaatcaagcgatgtccctcatcacacttgctataatgaagaaatacaacagcaaggagcctctggtatggaacacataccagtgctatctgaaggatgctctggtgaacttgaagaggggtgtagccgtggcagatgcggaggggtttcagtttggagtgaaggtggtgaggggggcgtacatggcacaggaaagggagactgctagattagaaggcctgccagaccctgtgaatgatacctatgaagataccaacaacatgtatgacacagtggtggcacatcttttggatcttgtccatcagcgtagcagcagcagcgttaatttgatcatcgcaacccacaacatagagtcagtgagcaaggcaatgaaaaggatgtgggaactgggcttgccaccaagagagggcagtgttgtcttcggtcagctgatgggaatgtgcgaccatgtttcttatgggctaggacaagctggatatctgacgtacaagtccattccatttggctgcatggaggatgtgctagccaacatgtcaagacgcgcccaggagaacaagactgtcttccatcgcttgaagcaggagaagaagatgctgagacaggagataagccgtcgaactctctccatcagtcaataa

SEQ ID NO: 5338 - protein, 388 aa, Strongylocentrotus purpuratus
MGETLFTALMRASFYGQFAASPQSVRQVANKFNAADIAPMLATTAEEKVGDSPDAINEEKYERNVETMLLCLDMQTEVARPNQPILSQLRITSYIKADLLARLSDILATMDNNFLTDNPVCVANLMNGLDGDLMDIPELTDMELTHLKHALKRIDTVVQRAIQNGIKTLVDAEYVSVNQAMSLITLAIMKKYNSKEPLVWNTYQCYLKDALVNLKRGVAVADAEGFQFGVKVVRGAYMAQERETARLEGLPDPVNDTYEDTNNMYDTVVAHLLDLVHQRSSSSVNLIIATHNIESVSKAMKRMWELGLPPREGSVVFGQLMGMCDHVSYGLGQAGYLTYKSIPFGCMEDVLANMSRRAQENKTVFHRLKQEKKMLRQEISRRTLSISQ

SEQ ID NO: 5339 - DNA, 1701 bp, Trypanosoma cruzi
  CDS (1)..(1701)
atgtttcgtggttatgccagattagcctcaaaatgtgcacggaacgtgtctccaacttcacgcaaaattcagccggtaaatttcaaggatgacactatctttaggaagaaatctctttggtggttagtgcgagccttagtggtgcttcgcatatgccaaatttcatttttttccaggaacgcggtgtatttgatgaagaaatcagaatctgttttgggtcctttccttatctacaacactctcgtgaagatgacagcatatggccatttttgtgccggagaggatgagcgtgggctgaagaatacggtgaaagcccttgaaaggcagggaattggctctgtccttgattatgctgccgaggcagacgtcgcgggatttgccccgccacccggcttggaagaggccccaaacctatccatggcttctctcgttcacaaaacgacggtgaattattcgtctcatgaggagctgtacgatgagaatatgaagttgtatgttatgtgcgttatgcatgcttcgctcaatcagcccgtaaatggggtaggcctggcggctgtgaaagttacgggcatgtgtgatccgcagctactcgcccgcgtctcggctatacttcactcggtgcacgccggttgggtgcaaaattttactaatgaaaaacctcctcctatcgaggaatgccgtgtcgtgatggggactaacaaagagtatcagttatacattacttatgatcaattacgtaaaggacttacggcttatggttcagcacgaaaatacacggaggaagaggcggaggctgtcattaaggcacttgatgagaaaaatgaaggcaaagtgaactattatcagttcaagaaggtggtttcagaagcggttctttccatggagcccacacctgtccaaaagcttatcgttgagaagcttccaaaactcacagaagaagagcgcgagctttggcgggcattgcataggcgtttgtctgttattgtacgaacggctaaggatttacgggtgcgtgttctgtttgatgccgaacaaacattctatcaagttgccattgataatattgtgctgcagtttcagcgtcagttcaaccttgaggaaccaactgtttacaatacgtatcagtgttatttgacatacacggaggatcgcgtgtttaacgatttgacgcggtctgagcttgaggggtgggtttggggtggaaaggttgtgcgtggagcgtatatggtacaagagagagaaacggcatctaaatacagctacaagagtcctgtgtggccgacatatgaggaaaccaatgcatgttaccaggcgtgtgcaaggcgtattttgagggaatttactcggttgcccaatacaccctttgaagtgttatttggtacgcataacaaagaatctgtagaggaaatatctgaagctattctcaagcttcctcccgtaaagggtctagcagtgtttgcacagctgtacggtatggcagaccatttaacgattcccttgcaaaaagcgggatttcgcgtattcaagtatcttccttatggccctgtgaaggagactattcattacttgggccggcgggccacggagaacgcttctgttctcgcgaatgggggctcagaagaggttgatttgatgaggaaggaactgcgccgtcgtctgttttgtttcaagagctaccgggaaaaagatgtaaaggcttag

SEQ ID NO: 5340 - protein, 566 aa, Trypanosoma cruzi
MFRGYARLASKCARNVSPTSRKIQPVNFKDDTIFRKKSLWWLVRALVVLRICQISFFSRNAVYLMKKSESVLGPFLIYNTLVKMTAYGHFCAGEDERGLKNTVKALERQGIGSVLDYAAEADVAGFAPPPGLEEAPNLSMASLVHKTTVNYSSHEELYDENMKLYVMCVMHASLNQPVNGVGLAAVKVTGMCDPQLLARVSAILHSVHAGWVQNFTNEKPPPIEECRVVMGTNKEYQLYITYDQLRKGLTAYGSARKYTEEEAEAVIKALDEKNEGKVNYYQFKKVVSEAVLSMEPTPVQKLIVEKLPKLTEEERELWRALHRRLSVIVRTAKDLRVRVLFDAEQTFYQVAIDNIVLQFQRQFNLEEPTVYNTYQCYLTYTEDRVFNDLTRSELEGWVWGGKVVRGAYMVQERETASKYSYKSPVWPTYEETNACYQACARRILREFTRLPNTPFEVLFGTHNKESVEEISEAILKLPPVKGLAVFAQLYGMADHLTIPLQKAGFRVFKYLPYGPVKETIHYLGRRATENASVLANGGSEEVDLMRKELRRRLFCFKSYREKDVKA

SEQ ID NO: 5341 - DNA, 1671 bp, Trypanosoma brucei
  CDS (1)..(1671)
atgtttcgcctcctgtgccgacgctccgccgcgaatgtaaaaatgcaagacgccagtctccgcaccatgacaaaagtggatttctcggacccatccatatttcgtcagaaatctctgtggtggttgttgcgcgcactctttgtgctccgcatttgcaagtttgaattcatttccaacaattctgtggctcttatgaagcgtgctgaggcaatttttggaccctttttgacctataacacacttgtgaaggggacagtgtacggccacttttgtgctggcgagtccgatcgtgaagtcaagaacaccgtcaaatcgcttgaaaatttgggtattggatctgttcttgactatgccgctgaagctgaagctgagggtttcgcaccctccccaggtattgcagaagcgccgaacttgtctatggcaagtcttgtcaacaacacatccgttacctatctgcctcacaagcaagcctttgacgaaaacatgaaactatacgtaatgtgtgttttacatgccgcactacataaaccggagggtggcgttggattggctgctgttaaggtgacaggcatgtgtgatccacagcttctcgcccgcgtctcggcaatcctgcactccgttcaccgtgactggatagaatactttacggaggagcaaccaccaccagtggaggagtgtaatgttgtgatgggaacaaaaacggagcacaagcgatatattacgcgtgaccaagtgcggaagggactcacaaaattggcctcttcgcaaaaatacacagaagatgagatcaatgccgtcttacaagttctcgatccaaataatgaaggaaaaacaaactactacaagtttaaaacggttgtgtctgaggccgtacttgcactggatcccacaccagtgcagaagataattatcgacaaacttccaaaacttactacagaggagcgcgaactatggcgccatttgcactggaggttgtcagtcattgttcggactgcgaaggacttgcgggtgcgagttttgtttgacgccgagcaaacgttttatcaacttgccattgataatattgtgttgcagtttcagcgccagttcaataaaaaggaggctatagtttataacacatatcaatgctatttgacttacaccgaagaccgtgttttcaatgacttaacccgagcagagctcgaggggtgggtttggggagggaaaattgttcgaggtgcctacatgaggcaggagagggagacagcagaaaaataccattacaaaagccccatttggccaacgtacgaggaaactaacgcgtgctacaaagctgtggctgagcgaatactaagagagatagcccggttacctgaaacacgttttgaggccctgttcggaactcacaatcaaaaatcacttgaagaaataactgaggctgttcttcaacttcctcctgttaaaggttatgtggcatttgcccaattgtatggcatgtcggacaacttgacaattccgcttaagagagccggttttccagtttttaaatatgttccgtacggacctgtcaaagagactgttcactacctgggaaggcgtgctatggagaatgcgtcaattttatcgaatgggggtagccgggaagtgcggttgatgaggaaagagcttaggcgtcgcgtcttttggatgtga

SEQ ID NO: 5342 - protein, 556 aa, Trypanosoma brucei
MFRLLCRRSAANVKMQDASLRTMTKVDFSDPSIFRQKSLWWLLRALFVLRICKFEFISNNSVALMKRAEAIFGPFLTYNTLVKGTVYGHFCAGESDREVKNTVKSLENLGIGSVLDYAAEAEAEGFAPSPGIAEAPNLSMASLVNNTSVTYLPHKQAFDENMKLYVMCVLHAALHKPEGGVGLAAVKVTGMCDPQLLARVSAILHSVHRDWIEYFTEEQPPPVEECNVVMGTKTEHKRYITRDQVRKGLTKLASSQKYTEDEINAVLQVLDPNNEGKTNYYKFKTVVSEAVLALDPTPVQKIIIDKLPKLTTEERELWRHLHWRLSVIVRTAKDLRVRVLFDAEQTFYQLAIDNIVLQFQRQFNKKEAIVYNTYQCYLTYTEDRVFNDLTRAELEGWVWGGKIVRGAYMRQERETAEKYHYKSPIWPTYEETNACYKAVAERILREIARLPETRFEALFGTHNQKSLEEITEAVLQLPPVKGYVAFAQLYGMSDNLTIPLKRAGFPVFKYVPYGPVKETVHYLGRRAMENASILSNGGSREVRLMRKELRRRVFWM

SEQ ID NO: 5343 - DNA, 2970 bp, Nostoc punctiforme PCC 73102
  CDS (1)..(2970)
atggtattacaagtacaaacaagcagctacgaagctaaaacccaagaaattgctaaacaacttctagccgcaacgcaggaaaatcgttcgtttttttcttcactgcgggatcaaatgcgttgggatgataaattattagcttgggcgatgagtaatcctggattacgggtgcaactatttcgctttatagacacgctacctgctttgcacagtaaatcagaaattgcctcacatttacaagaatatttaggagatgaatctgtagaattaccggcagctttgaagggaatgctaaactttgctaaccctgattcgatgccaggtcaagttgctgcgacaactgttggtacagctgttgagactcttgctcataaatatatttctggggaaaatattaaacaagtcatcaaaacagttgaacgactgcgaaaagaaaaaatggctttcaccattgatttacttggtgaggcggtgattaccgaagccgaagcgcagtcttatctagaacgctatctagaattaatgcaacaattggtagaagcatcaaagaattgggcagctatcccggctattgatgaggctgatggtgaaccgatacccaaagttcaggtttctgtgaaattaacggcgttttattcccaatttgaccctttagatgctaagggtagtgaggagcgagttagcgatcgcattcggattctcttacgccgtgctaaagagttgggcgcagctgtgcattttgatatggaacagtatgcttataaggacataactctcagcattctgaaaaaactgttactagaagaagaatttcggcaacgcacagatattggcatgacaattcaagcatatctgcgtgatagcgagcaagatgccaaaaacgtaatttcttggttaaaagaacgcggttatccgctgacaatccgcttggtgaaaggcgcatattgggatcaagaaactatcaaagcatcccagaagcattggaaacagccagtttacaacgacaaagcggcaactgatgctaactttgaaaccattactcagttattgctagaaaatcatcaatatgtgtattctgccattggtagtcataatgtgcgatcgcactctcgcgccattgccatagctgaaagtttaaatgtcccccgccgtcgctttgaattacaagtcctctacggtatgggggataaagttgctaaggcattggttgacaggggttatcgggtgagagtttactgtccctacggtgaattattgccgggaatggcgtatttaattcgccgattgttggaaaataccgctaatagttcatttttacgccaaaatctcgaaaatagaccaattgaagagctattagcgccgccaattgtcaaagaaggaaaatctttaactcctaactctcatttcctcggtgcggctgataccgattatgcggtggaagagataagaacaaaagcggcgcaagctttccaaagcgttcgtcaacaattgggtaaaacttatttgccgttgattaatggggaatatgttaatacgccggaatttgttgattctctcaacccttctaatttcagtgaagtagttggtaaagtaggcttaatcagcgttgaacaggctgaacaggcgatgcaagcagccaaagcagcgtttcctgggtggagaaaaacacctgcgaaacaacgcgctgatattttgcggaaagcgggtgatttgatggaactccgccgcgccgaactttcagcttggatagttttggaagttggaaaaccagttaaggaagctgatggagaggtttcggaagcgatagacttttgtcggtactacgctgatgagatagaaaggctggataaaggtgttaattatgaccttgccggggaaactaaccgttatatctaccatccacggggaattgttgtagtaatttctccctggaattttccgcttgcgatcgcatgtggaatgactgtcgcagccttggtttcagggaattgtactcttcttaaacctgcggaaacatcttctgtaattgcagccaaactcacagaaatcttgatagatgctggttttcccaaaggtgtgtttcaatacgtgccaggcaagggttcgcaagtcggcgcttacttggtaaatcatccagatacgcatgtaattgcttttacgggttctcaagaagttggctgtagaatttacgcagaagctgcaatattaaaacccggacaaaagcacatgaaacgggtgattgctgaaatgggcggcaaaaatgccatcattgttgatgaaagtgctgatttagaccaagcagttgtaggggtagtgcaatcggcatttggttacagtggacaaaaatgttctgcggcttccagggtgattgtgctggaaccgatttatgaagcctttgtgcaacgattggtagaagcgacaaaatccttgaacattggggaagcagagttacctagtacccaagttgggcctgtgattgatgccaatgcccgcgatcgcatccagaagtatattgagataggtcggcaatcagctgaggtagccttggaattaccagcacccaaacaaggatattttattggccctgtgatttttagtgaagtatcgccaaatgcggtaatttcccaggaagaaatttttggccctgtgctggcggtaattcgggtgaaagatttccaggaagcgttagcagtcgccaacgggacaaattacgccttaactggtggactttattctcgaacaccttcgcacattcagcaggcgcagacagaatttgaagttgggaatttgtacattaaccgcaatattaccggagcgatcgttgggcggcaaccctttggtggattcaaactttctggagtcggttctaaagcaggcggtcctgattacctactgcaattcctagaaccacgcgcggtaacagaaaatattcagcgccaaggttttgcaccaattgaaggtgcagattaa

SEQ ID NO: 5344 - protein, 989 aa, Nostoc punctiforme PCC 73102
MVLQVQTSSYEAKTQEIAKQLLAATQENRSFFSSLRDQMRWDDKLLAWAMSNPGLRVQLFRFIDTLPALHSKSEIASHLQEYLGDESVELPAALKGMLNFANPDSMPGQVAATTVGTAVETLAHKYISGENIKQVIKTVERLRKEKMAFTIDLLGEAVITEAEAQSYLERYLELMQQLVEASKNWAAIPAIDEADGEPIPKVQVSVKLTAFYSQFDPLDAKGSEERVSDRIRILLRRAKELGAAVHFDMEQYAYKDITLSILKKLLLEEEFRQRTDIGMTIQAYLRDSEQDAKNVISWLKERGYPLTIRLVKGAYWDQETIKASQKHWKQPVYNDKAATDANFETITQLLLENHQYVYSAIGSHNVRSHSRAIAIAESLNVPRRRFELQVLYGMGDKVAKALVDRGYRVRVYCPYGELLPGMAYLIRRLLENTANSSFLRQNLENRPIEELLAPPIVKEGKSLTPNSHFLGAADTDYAVEEIRTKAAQAFQSVRQQLGKTYLPLINGEYVNTPEFVDSLNPSNFSEVVGKVGLISVEQAEQAMQAAKAAFPGWRKTPAKQRADILRKAGDLMELRRAELSAWIVLEVGKPVKEADGEVSEAIDFCRYYADEIERLDKGVNYDLAGETNRYIYHPRGIVVVISPWNFPLAIACGMTVAALVSGNCTLLKPAETSSVIAAKLTEILIDAGFPKGVFQYVPGKGSQVGAYLVNHPDTHVIAFTGSQEVGCRIYAEAAILKPGQKHMKRVIAEMGGKNAIIVDESADLDQAVVGVVQSAFGYSGQKCSAASRVIVLEPIYEAFVQRLVEATKSLNIGEAELPSTQVGPVIDANARDRIQKYIEIGRQSAEVALELPAPKQGYFIGPVIFSEVSPNAVISQEEIFGPVLAVIRVKDFQEALAVANGTNYALTGGLYSRTPSHIQQAQTEFEVGNLYINRNITGAIVGRQPFGGFKLSGVGSKAGGPDYLLQFLEPRAVTENIQRQGFAPIEGAD

SEQ ID NO: 5345 - DNA, 3183 bp, Pseudomonas aeruginosa UCBPP-PA14
  CDS (1)..(3183)
atgttcaaagccagtcacgtcttgcagggcgaggaccagacccggtccgcagccgaattcttccctgtcatcagcgccaactacgcggtcgacgaggaagcctacctgggcgaactgctgcagctcgccgaccccggtcccgacggcatcgaggctatccgccgcaacgcccgcgcactgatcgaaaccgtgcgcagccgggacaacgccgtcgataccctcgacgcactcctgcgccaatacagcctggacacccaggaaggcctgatgctgatgtgtctggccgaggcgctgttgcgtgtgcctgacgcggcgaccgccgacgcgctgatccgcgacaagctgtccgccgccgactggcagcgccatctcggccagagcgacaacgttctggtcaatttcgccgcctggggcctggtgatgaccggcaaggtggtgaacatcgacgaacgcaccgacggccgcgccccgagcgtcatcagccggctggtgcagcgctctggcgaaccggtgatccgcgccgcgatgaatcaggcgatgaagctgatgggcaagcagttcgtgcttggccggaccatctccgaagcgctgaagaacggtcgtccatgccgcgagcagggctacacctattccttcgacatgctcggcgaggccgcgctgaccgccgccgacgccgagaaatacatggccgactaccgccaggccatcgacactgtcggcgccgagccgcaggtcggtccggggccgcggccgtcgatctcgatcaagctctcggcgctgcatccgcgctacgaagtggcgcagcgcgagcgggtgctcagcgagctgttcgccaacgtcctggaactggcggtgcgcgcgcgcaagctgaacgtcggcatcaccatcgacgccgaggaagccgatcgcctggagctgtccctcgaactctacgagaagctgatgcgcgacccggccatcgccggctggggcgagttcggcctggtcatccaggcctactccaagcgctgcctgccggtgctggtatggctgaccctgctcggccgcgagcttggcgcacgcatcccgctgcgcctggtgaagggtgcctactgggacagcgagatcaagcagtgccaggtgcagggcgccgatggctaccccgtctacacccgcaaggaaggcaccgacacttcctacctggcctgcgcccgctacctgctcagcgagcacacccgcggggtgatctacccgcagttcgccagccacaacgcccacaccgtgaccgccatcctcgccctggccgacgaagccagggccgccggcggcgaggagcgcgacttcgagttccagcgcctgcacggcatgggcgacgcgctgtacgacacggtgatcgagaagtaccgccgcaacgtgcgcatctacgccccggtcggcgcgcacaaggacctgctgccgtacctggtccgccgcctgctggagaacggcgccaactcttccttcgtgcacaagctggtggacccgcgcgtgccggtggagacgctgatccagcacccggttacccaactgcgccagttcaagacgctggccaacgaccgtatccctctgccccaggcgatcttcggcgccgggcggaaaaactcccagggcatcaacatgaacatccagaaccagtggaacgagctggagctcgcctacaagccgcacctgacccgccagtggcaagccgcgccgatcgtcaacggcgagaaactttccggcccggcccacgaagtgcgttgcccgtacgacctggagaggctggtcggcagcgtccagtacgcgtccgccgagcaggccggcaaggccctcgacgtgttgcaggcggcctggccgcgctggagcgccaccccggtggacgagcgcgccggcatcctcgaacgtctcgccgacctgctggaagcccagcgcggcgagctgatggcgctgtgcaccctggaagccggcaagtcgttgcaggacggtatcgacgagatccgcgaggcggtcgacttctgccgctactacgcccagcaggcccgccagcgcctggtccgcgaggaactgcgcggcccgaccggcgagcgcaacgagctgttctacgaaggccgcggcatcttcgcctgcgtcagcccgtggaacttcccgctggcgatcttcctcggccagatcagcgccgcgctggtggccggcaacaccgtgctggccaagccggccgagcagaccagcctgatcgccgcgcgcaccgtcgaactgatgttcgaagccggcctgccgagggacgttatcgccctgctgccgggcgacggcgccaccctcggcggcgtgttctgccgtgacgcgcgggtcgccggggtggccttcaccggctccaccgacaccgcccgcatcatcaaccgccaactggccgagaagcccggcgccatcgccaccctgatcgccgagaccggcgggcagaacgcgatgatcgtcgattccaccgctttgccggaacaggtgatcaaggatgcggtacaatccgcgttcaccagcgccggccagcgctgctccgcgctgcgcgtgatgtacgtgcagcaggacatcgccgagcgggtgatcgagttgctcaagggcgccatggccgagctgaaggtcggcccgaccgacgtgcgcgtcagcgacgtcggcccggtgatcgacgccgaggccaaggccggcctggagcagcacatcgccgcgctgaaggccgccggcaagctgatcgccgagaccaaggtgccgggcaacctgaacggtcacttcgtcgctcccgtcgcgttcgagatcagcggcatcgacgagctgaagaaagagaacttcggcccggtgctgcacgtggtgcgttatgccgcgcaggacctggaaaaggtcgtgcaggcgatcaacgccaccggtttcggcctgaccatgggggtccatagccgcaacgaggaaaccgcccgtcgcatcgaagagctggcgcgggtcggcaacctctacatcaaccgcaaccagatcggcgcggtggtgggcgtgcaaccgttcggcggccacgggctgtccggcaccggtcccaaggccggcgggccgaactacctgctgcgtttcgtcagcgagcgcaccacgtcggtgaacaccaccgcggtgggcggcaacgcgtcgctgctgtcgctggccgacgccgagtga

SEQ ID NO: 5346 - protein, 1060 aa, Pseudomonas aeruginosa UCBPP-PA14
MFKASHVLQGEDQTRSAAEFFPVISANYAVDEEAYLGELLQLADPGPDGIEAIRRNARALIETVRSRDNAVDTLDALLRQYSLDTQEGLMLMCLAEALLRVPDAATADALIRDKLSAADWQRHLGQSDNVLVNFAAWGLVMTGKVVNIDERTDGRAPSVISRLVQRSGEPVIRAAMNQAMKLMGKQFVLGRTISEALKNGRPCREQGYTYSFDMLGEAALTAADAEKYMADYRQAIDTVGAEPQVGPGPRPSISIKLSALHPRYEVAQRERVLSELFANVLELAVRARKLNVGITIDAEEADRLELSLELYEKLMRDPAIAGWGEFGLVIQAYSKRCLPVLVWLTLLGRELGARIPLRLVKGAYWDSEIKQCQVQGADGYPVYTRKEGTDTSYLACARYLLSEHTRGVIYPQFASHNAHTVTAILALADEARAAGGEERDFEFQRLHGMGDALYDTVIEKYRRNVRIYAPVGAHKDLLPYLVRRLLENGANSSFVHKLVDPRVPVETLIQHPVTQLRQFKTLANDRIPLPQAIFGAGRKNSQGINMNIQNQWNELELAYKPHLTRQWQAAPIVNGEKLSGPAHEVRCPYDLERLVGSVQYASAEQAGKALDVLQAAWPRWSATPVDERAGILERLADLLEAQRGELMALCTLEAGKSLQDGIDEIREAVDFCRYYAQQARQRLVREELRGPTGERNELFYEGRGIFACVSPWNFPLAIFLGQISAALVAGNTVLAKPAEQTSLIAARTVELMFEAGLPRDVIALLPGDGATLGGVFCRDARVAGVAFTGSTDTARIINRQLAEKPGAIATLIAETGGQNAMIVDSTALPEQVIKDAVQSAFTSAGQRCSALRVMYVQQDIAERVIELLKGAMAELKVGPTDVRVSDVGPVIDAEAKAGLEQHIAALKAAGKLIAETKVPGNLNGHFVAPVAFEISGIDELKKENFGPVLHVVRYAAQDLEKVVQAINATGFGLTMGVHSRNEETARRIEELARVGNLYINRNQIGAVVGVQPFGGHGLSGTGPKAGGPNYLLRFVSERTTSVNTTAVGGNASLLSLADAE

SEQ ID NO: 5347 - DNA, 1182 bp, Cytophaga hutchinsonii
  CDS (1)..(1182)
atgaaaaccttacacactattaatttcagcgatactgctatcgcatttgcttcaaaatcaacgaaggaattgaaacacatgaagtttcttttccgcacgatggcatggagcaagatcacaaatataagtgtttctttcttaaaattcgcattaaagtaccattttcccatcaaaaatattgtccgaaataccctctttaaacaattttgcggcggcgaaacctactgggaatgtggtacaaccatggagaaactgcatgcatcgggcattttttctatcccggattacagcgtggaaggcaaggaagatgaagcatctttcaatcagacagtcaaagagttagtgaaaggaattgagctcgcagcgggtcttccgatggtatctttttcagtgtttaaaatgagtggaattgcgcgttttgctttgcttgaaaagattcagcgcggtgagcaactttcggcagatgaaagcaaagaatttgatcgggtgaaagagcgtgtaacacgattgtgttttgaagctgaaacgcataatgtgcgcctgatggttgatgccgaagaaacatggatacaaacggctatagatgtgttgtacgttggatacatgaagcgtttcaatgcacagcgcccgattctttttcttaccatacagctgtatcgcaaagatggattggagcgtttaaaaaacatgtatgcacaggcacaaaaagaaggatatcacataggttttaagctggtgcgcggcgcgtatatggaaaaggaacgggcacgggcaaacgaactaaaatatccgtccccgataaatgatacaaaagaacagaccgatgcgttgtacaaccaagccgtttcgttttgtctgcacgaagatattgcaacctgcattgccacacacaaccagctgagcattgaaagagctgtgcgtgagatggatcccaaagaccagcagatatcaggttttgcgcagctgtatggtatgggagattttctgagttacaacctggcacatgcaggatacaacgtttcaaaatatctgccgtatggtccgctgcgtgaagtgatgccctatctgttcagaagagcagaagaaaataaatccatcaccggcgaaacaacacgtgagttattttttattgagaaagaattgaagaggcgaaaggcagcaggctttaagcttaaagcttaa

SEQ ID NO: 5348 - protein, 393 aa, Cytophaga hutchinsonii
MKTLHTINFSDTAIAFASKSTKELKHMKFLFRTMAWSKITNISVSFLKFALKYHFPIKNIVRNTLFKQFCGGETYWECGTTMEKLHASGIFSIPDYSVEGKEDEASFNQTVKELVKGIELAAGLPMVSFSVFKMSGIARFALLEKIQRGEQLSADESKEFDRVKERVTRLCFEAETHNVRLMVDAEETWIQTAIDVLYVGYMKRFNAQRPILFLTIQLYRKDGLERLKNMYAQAQKEGYHIGFKLVRGAYMEKERARANELKYPSPINDTKEQTDALYNQAVSFCLHEDIATCIATHNQLSIERAVREMDPKDQQISGFAQLYGMGDFLSYNLAHAGYNVSKYLPYGPLREVMPYLFRRAEENKSITGETTRELFFIEKELKRRKAAGFKLKA

SEQ ID NO: 5349 - DNA, 2973 bp, Crocosphaera watsonii WH 8501
  CDS (1)..(2973): transl_table=11
ttggtagtacaacttgattctacaacctacgaacaacgaacccaggaaatagctaaggaattaatcgcccaaacccgtgaaaaacgatcactttggtctaaattaggcgaccaaatgcgtttagacgataaactattagactttgctatggctaaccctggtttacgggtgcaattattccattttatcgacacattacccgcgctacaaagtaatgcagaaatagcccatcatctgcaacaatacttaggggatgagtccgtagaattacctagttcattaaagggtattcttaactttactgattataattcccttcctgctaaagtagcagccgaaactataagtaaagcggtgcaaaccttagcattcaagtatatttctggtgaaactgtcccccaagtcattaaaaccgtcgaacgtctccgaaaagagaaaatgggttttactattgacttgttaggagaagcagttattacggaaagcgaggccaaagcttatcttgatagttatctcgacttgatggaaaaattggctacagagtcaaaaaaatggtcaaatgtagctcaaatagacacagcaggtgatgaaaacttatctaaggttcaagtttctgttaaattaaccgctttttattcccagtttgatcccatcgatccccaaggaagtaaagaaaaagtctgtacacttattcgtattctactgcgccgggcccaagagttaggggttgccatccattttgatatggaacaatatgtttacaaggatctgactctatctatcctaagagaattattgttagaagaggagtttcgcaaccgtagcgatattggtgttaccttacaagcatatttaagagactccaaacaagacttacacgatctcatttcttgggccaaacaacgaggtactcccattacaataagattggtgaaaggggcgtactgggatcaagaaaccattaaatctgaacaaaatcactggccacaacctgtatataaccaaaaatcagctacagatgttaactacgaagagatgacccaattattattggaaaatcatcaatatttgtacgctgctattggttcccataacgtgcgatcgcaagcaagggcgatcgccatcgctgaaaccttaaaagtcccctctcgcgctttcgagatgcaggtattatatggaatgggggatcagttagccaaagcgttagttaaaacagggcatcgtgtgcgagtttatgcgccctacggtaacttgttaccaggtatggcctacttaatccgtcgtttactggaaaataccgctaatagttccttcttgcgccaaaatttagaagaaagacccatcgaagacttaatcgcctccccaacgctttcggggaataccgaacgcatagcacaaaaagagagttttgtcaatgtccctgatacagattactctcgggaagtcctacgggataaagcagagaaagctttagctaaagtcaaagatagtttaggtaagacctatttacccttaattaacggggaatatgtccaaacagatgtcattgtcgaatccgtgaacccttccaagtcttctgaagtggtgggacaaattggtttaatttctgtttctcaggcagaacaagctttaaatgctgcaagagaagcctttaaagactggaagaaaacccctgcgacagaaagagcgagaataatacgtaaagctggcgatttaatggaagaacgccgtcatgagttatccgcttggatctgtgtagaagtcggtaaagtattgcagcaagcagacgcagaagtatccgaggccatcgacttttgccgttattatgccgatgaaatggaacggttagacaagggttataactacgatgtagcaggggaaaccaaccgttatcattatcaacccagaggcatcgctttagttatctctccctggaactttccctttgctatttccacaggcatgacagtagcagccttagtaacaggaaattgtaccttattgaagccagccgaaacttctacggttatcgctgctaaaattgccgaaatattggtagatgccggtattcctaaaggagtatttcaactggttcctggtaagggttccaaagtaggggcatatatggtcaaccatcctgacgtacatttgatcgcctttaccgggtcgagggaagtaggatgtcgcatctatgccgatgctgctatcttacaaccaggacaaaaacacctaaaacgggttattgcagagatggggggcaaaaacgctattattgttgatgaaagttccgatctggatcaagcggtagcaggggctgtattttctgcctttggatatagcggtcaaaaatgttccgcagcctcccgtatcattgttttagacccggtttatgatgctttcttagaaaggtttgtggaggctactaagtcgttgaatgtgggggcaacagatcaaccctctacccaagttgggccagtgatcgacgcaacggcacaaaaacgcattctagagtacatcgaaatagcaaaacaagagtcaacccttgccctgcaaatggaagcccctgacaacggtttttatgtgggtcccaccattttcggggatgtcttacccaaccatactattgcccaagaggagatatttggtccagtggtggcggtgatgcgagttaaaagctttgccgaagcgttaggagttgccaatggaaccgactacgctttgactgggggtttatattcccgtagtcccgaacatatcgaacaggcccagaaagagtttgaagtaggtaacttgtacataaaccgaactattaccggggcgatcgtttcccgtcaaccttttggtgggttcaagttgtccggtgtgggttccaaagcaggaggccccgactatttattacagttcctcgaacctcgtcatattagcgagaatattcagcgtcaagggtttgcacccatagaaggcaacgagtaa

SEQ ID NO: 5350 - protein, 990 aa, Crocosphaera watsonii WH 8501
MVVQLDSTTYEQRTQEIAKELIAQTREKRSLWSKLGDQMRLDDKLLDFAMANPGLRVQLFHFIDTLPALQSNAEIAHHLQQYLGDESVELPSSLKGILNFTDYNSLPAKVAAETISKAVQTLAFKYISGETVPQVIKTVERLRKEKMGFTIDLLGEAVITESEAKAYLDSYLDLMEKLATESKKWSNVAQIDTAGDENLSKVQVSVKLTAFYSQFDPIDPQGSKEKVCTLIRILLRRAQELGVAIHFDMEQYVYKDLTLSILRELLLEEEFRNRSDIGVTLQAYLRDSKQDLHDLISWAKQRGTPITIRLVKGAYWDQETIKSEQNHWPQPVYNQKSATDVNYEEMTQLLLENHQYLYAAIGSHNVRSQARAIAIAETLKVPSRAFEMQVLYGMGDQLAKALVKTGHRVRVYAPYGNLLPGMAYLIRRLLENTANSSFLRQNLEERPIEDLIASPTLSGNTERIAQKESFVNVPDTDYSREVLRDKAEKALAKVKDSLGKTYLPLINGEYVQTDVIVESVNPSKSSEVVGQIGLISVSQAEQALNAAREAFKDWKKTPATERARIIRKAGDLMEERRHELSAWICVEVGKVLQQADAEVSEAIDFCRYYADEMERLDKGYNYDVAGETNRYHYQPRGIALVISPWNFPFAISTGMTVAALVTGNCTLLKPAETSTVIAAKIAEILVDAGIPKGVFQLVPGKGSKVGAYMVNHPDVHLIAFTGSREVGCRIYADAAILQPGQKHLKRVIAEMGGKNAIIVDESSDLDQAVAGAVFSAFGYSGQKCSAASRIIVLDPVYDAFLERFVEATKSLNVGATDQPSTQVGPVIDATAQKRILEYIEIAKQESTLALQMEAPDNGFYVGPTIFGDVLPNHTIAQEEIFGPVVAVMRVKSFAEALGVANGTDYALTGGLYSRSPEHIEQAQKEFEVGNLYINRTITGAIVSRQPFGGFKLSGVGSKAGGPDYLLQFLEPRHISENIQRQGFAPIEGNE

SEQ ID NO: 5351 - DNA, 3195 bp, Shewanella baltica OS155
  CDS (1)..(3195): transl_table=11
atggaagcgataactatgttcaaagcgagtgaagtgctggcaggccgctacgattctgccaatctcgacgaactgttcaaagcgatcagcgacaactacattgtcgatgaagaacaatacttgtcagagttgatccaactagttccctccagtgatgaagccatagagcgcgtcactcgtcgtgcccacgaactggttaacaaggttcgtcaattcgataaaaaaggtttgatggttggcatagatgccttcctgcaacagtacagcttagaaacacaggaaggcattatcctgatgtgtttagccgaagcgctgctgcgtattcctgatgcggccactgccgatgcactgattgaagacaagctttcaggcgctaagtgggatgagcacatgagtaagagtgattctgtactcgttaacgcatcgacctggggccttatgctcacgggtaaaattgtcaagctcgataaaaaaatcgatggcaccccaagcaacttactgagccgcttagttaatcgtctcggcgagccagtgatccgccaagcaatgatggccgcgatgaagatcatgggtaagcagtttgtgctgggccgcaacatgaaagaagccctgaagaacagtgaagacaagcgtaagttaggctatacccattcctacgacatgctgggcgaagcggcgttaacgcgtaaagatgctgagaaatactataccgattacgccaatgcgatcactgagctcggtgctcaaagctataacgaaaatgaatcaccgcgcccaacgatttcaatcaagctatcggcattgcacccacgttacgaagtggccaatgaagaccgcgttttaactgaactgtacgacacagttatccgcctgattacactggctcgcggcttaaatatcggtatttctatcgatgctgaagaagtcgatcgcctcgagttgtcactgaaactgttccaaaaactatttaattcagaagcggcaaaaggctggggattactcggtattgtggttcaagcttactctaagcgtgccctgcccgtactggtttggttaactcgccttgcgaaagagcaaggggatgaaatccccttgcgtctggtaaaaggcgcctattgggatagcgaactgaaatgggcccaacaagctggcgaagccgcttacccactttacactcgcaaagccggtactgacgtttcttacctcgcctgcgcccgctacttgttatcggatgcgactcgcggcgctatctacccacaatttgctagccacaatgcgcaaaccgttgcggcgatttcagatatggcgggagatcgtcaccatgagttccaacgcttacacggcatgggacaagagctgtacgacacgattttgtcggaagctggcgccaaatcggtacgtatttatgcgcccatcggtgcccataaggatctactgccctacttagtgcgtcgtctgctggaaaacggggccaacacttcgttcgtccacaagctcgttgatcctaaaaccccaatcgactcattagtggtgcatccgctaaaaacgctgacgggctataaaaccctggctaacaatagaatcgttttacctgccgatattttcggtagtgatcgcaaaaattccaagggactcaatatgaacatcatttccgaatctgagccatttttcgcggcaatagaacagtttaaaaatacccaatggcaagcaggccctctggttaacggcaaaaccttaaccggtgagcacaaaaccatagtcagcccatacgacaccacccaaacagtgggtcaagtagcctttgccgatgatgcggccatagaacaagcactcgcgtctgctgaagcggcgtttgcctcatgggcacgtacgccggttgaaacccgtgcctctgcgctgcaaaaactcgctgacttattagaagaaaaccgcgaagaattgatcgccttgtgtacccgtgaagcgggcaagagcattcaagacggtatcgacgaagtacgtgaagccgttgatttctgtcgttactacgcagtacaagccaagaaaatgatggcgaagcctgaactgcttcctggcccaacaggagagctgaacgaactgttcctccaaggccgcggcgtattcgtgtgtattagcccgtggaacttcccattggccatcttcctcggccaagtgtctgcggcattagcggcaggtaacacagtgatcgcgaaacctgcggagcaaacctcgattattggttaccgtgcagtacaacttgctcaccaagcaggtattcctgttgaggttctgcaattcctaccaggtacgggtgcgactgtgggtagcgcaattacagccgatgaacgtatcggcggcgtatgctttaccggttcaactggcactgcaaaactgattaaccgtacactggccaaccgtgatggcgcgattattcctttaatcgccgaaactggtggtcaaaatgccatggtagtggactcaacctcacaacctgagcaagtggttaacgatgtggtttcatcgtcattcaccagcgcgggtcaacgctgttcagcattgcgcgtactcttcctacaagaagacatcgccgatcgcgtgatcgaagtgctgcaaggcgcgatggatgaattagtgattggcaacccaagctcagtgaaaactgacgtaggcccagtgattgacgccaccgccaaagccaacttagatgcgcacatcgaccacataaagcaagtcggcaagcttattaagcaaatgccgttgcctgctggtacagagaacggtcacttcgtttcacccactgcggttgaaatcgattcgattaaagtgcttgagaaagaacactttggcccaatcctgcacattattcgctacaacgctgcagagctaagccaagtgatcaacgagatcaatagcacaggctttggcttaaccttaggcatccacagccgtaacgaaggccatgcccttgaggttgcagataaagtcaacgtgggtaacgtgtacattaaccgtaaccaaatcggcgctgtggtgggtgtacagcctttcggcggtcaaggcctgtcaggcactggtcctaaagccggtggcccacactacttaacccgttttgtgactgaaaagactcgcaccaacaacatcaccgccataggtggtaatgcaacgttattgtcactgggtgatggcgaagaataa

SEQ ID NO: 5352 - protein, 1064 aa, Shewanella baltica OS155
MEAITMFKASEVLAGRYDSANLDELFKAISDNYIVDEEQYLSELIQLVPSSDEAIERVTRRAHELVNKVRQFDKKGLMVGIDAFLQQYSLETQEGIILMCLAEALLRIPDAATADALIEDKLSGAKWDEHMSKSDSVLVNASTWGLMLTGKIVKLDKKIDGTPSNLLSRLVNRLGEPVIRQAMMAAMKIMGKQFVLGRNMKEALKNSEDKRKLGYTHSYDMLGEAALTRKDAEKYYTDYANAITELGAQSYNENESPRPTISIKLSALHPRYEVANEDRVLTELYDTVIRLITLARGLNIGISIDAEEVDRLELSLKLFQKLFNSEAAKGWGLLGIVVQAYSKRALPVLVWLTRLAKEQGDEIPLRLVKGAYWDSELKWAQQAGEAAYPLYTRKAGTDVSYLACARYLLSDATRGAIYPQFASHNAQTVAAISDMAGDRHHEFQRLHGMGQELYDTILSEAGAKSVRIYAPIGAHKDLLPYLVRRLLENGANTSFVHKLVDPKTPIDSLVVHPLKTLTGYKTLANNRIVLPADIFGSDRKNSKGLNMNIISESEPFFAAIEQFKNTQWQAGPLVNGKTLTGEHKTIVSPYDTTQTVGQVAFADDAAIEQALASAEAAFASWARTPVETRASALQKLADLLEENREELIALCTREAGKSIQDGIDEVREAVDFCRYYAVQAKKMMAKPELLPGPTGELNELFLQGRGVFVCISPWNFPLAIFLGQVSAALAAGNTVIAKPAEQTSIIGYRAVQLAHQAGIPVEVLQFLPGTGATVGSAITADERIGGVCFTGSTGTAKLINRTLANRDGAIIPLIAETGGQNAMVVDSTSQPEQVVNDVVSSSFTSAGQRCSALRVLFLQEDIADRVIEVLQGAMDELVIGNPSSVKTDVGPVIDATAKANLDAHIDHIKQVGKLIKQMPLPAGTENGHFVSPTAVEIDSIKVLEKEHFGPILHIIRYNAAELSQVINEINSTGFGLTLGIHSRNEGHALEVADKVNVGNVYINRNQIGAVVGVQPFGGQGLSGTGPKAGGPHYLTRFVTEKTRTNNITAIGGNATLLSLGDGEE

SEQ ID NO: 5353 - DNA, 3195 bp, Shewanella denitrificans OS-217
  CDS (1)..(3195): transl_table=11
atggaaaccattatgatgttcaaagcgagtgaagtattggccggccgctatgacgatgccactcttgaccaacttttccaagccgtgaccgacaactatattgtcgatgaagaagcttatctcacagagcttatcaagcttgtgccttccactgatgagcaaattgagcaggtgactcaacgcgcccatgatttagtcagtaaggtgcgtaagtttgagaaaaaaggcttaatgattggcgtcgatgctttcttgcagcaatatagcctggaaactcacgaaggcattatccttatgtgcctggctgaggccctactgcgtatacctgatgcggaaactgccgatgcccttatcgaagataagctttcaggtgccaaatgggatgctcacttaaaacagagtgactctgtgttagtgaatgcctcgacttggggactcatgctcacgggtaaaatcatcaagctagataaaaagctcgatggcaccccgagcaacttacttaagcgcttagtcaatcgcttaggtgagccagttattcgccaggccatgtacgctgccatgaaaatcatgggcaagcaatttgtcttgggccgcaatgtaaaagaagccctcaataacagtgaagctaagcgcagtttaggctacacccacagctacgatatgctcggtgaagccgcactcacggacaaggatgccaagaaatatttcaatgattatagcaacgccattaaagaacttggcgctcaaagctatgatgaaaatgaatcaccgcgtccgactatctcaattaagctttcggctctgcatccaaggtatgaagtcgccaacgaaggccgagtattaactgagctttacgccacagttatcaagctgattgtgcaggctcgtgagcttaacattggcatttcaatcgatgccgaagaagtggatagactggaactttcccttaaactattcaaaaaactatttaactcagtagaatcccaaggctggaatttactcggcatagtggtgcaagcttactctaaacgcgcactacctgtactgtgctggttgacccgccttgccaaagagcaaggggatgaaatcccagtacgtttagtcaaaggcgcttactgggacagtgaacttaaatgggcgcagcaagcaggtgaagcaggctacccactatttacccgtaaagcgggcactgacgtgtcctaccttgcctgtgcacgcttcttattgtctgacgccactcgcgctgccatctatccgcaatttgcgactcataatgcgcaaactgtggccagcatagatgccatggcaacggataggaactacgagtttcaacgtttgcacggcatgggccaagagctctatgacacgattttggctgaaagcggtgccaagacagtgcggatctacgcccccattggtgcccataaggaactattgccttacttggttcgtcgtctgctagaaaacggggctaacacctcattcgtgcacaagctggttgaccctaaaacccctatcgcttcgttagtggttcatcctctggtcaccttgcaagcctacaaaagccttgctaataaaaacatcgctttacccgccgatatttttggcgctgaacgtaaaaattctaagggattaaatatgaatatcttgtctgaagctcagccatttttcgccgccatagataaattcaatgacactcagtggcaagcaggcccactggtagacggtaaaaccttaaccggtgatattaatactgtcgtcagcccctatgataccaagcagactgtgggccaagtggtgttcgccgatcaacaagccatagagcaggcgctagcctctgccagtcacgccttccctagttgggcccgtactccggtagaaacccgcgccagcgcgctgcaaaaacttgccgacctattggaagagaaccgcgaagagctgattgcactttgtacccgtgaagccggtaagagtattcaggacggtatagatgaagtccgtgaagccgtggatttctgtcgctactacgccgttcaagccaagaagcttatgggtcaacctgagctactcccaggcccaacgggtgagcttaacgagttattccttcaaggccgcggtgtatttgtctgtatcagcccatggaacttcccattggcgatatttttaggccaagtatcggcggcattagctgccggtaacactgtcgttgctaagcctgcggagcaaacctcactcataggttatcgcgctgtgcagctggctcaccaggcaggtattccggttgaagtgctgcaatacctgcctggtacaggtgcaaccgtaggttcagccatcacagccgatgagcgcattggcggtgtgtgctttactggctcgacaggcacagccaaactcattaaccgcaccttagcaaaccgtgatggcgcgattattcctttgattgccgaaaccggtggtcaaaatgccatggtggtcgactcaacctcacagcctgagcaagtggttaacgatgtagtttcatcttcattcaccagtgctggccaacgctgctcggcgctgcgggtgttattcttgcaagaagatatcgccgacagagtcatagaagtgatgcaaggcgccatggagcagcttgctattggtcaccctggcaaggtgcaaaccgatgtcggtcctgtgattgacgcaacagctaaagcgaacttaaatgcgcatatcgatcacatcaagcaagtgggcaagcttatcaagcaaattcaactaccagccggcactgaagatggtcactttgtcgcgccaatcgcggttgaaattgactcaatcaaggtgttagaaaaagaacacttcggcccaatattgcatgttatccgctacaaggccgctgatttaagtaaagtgattgatgaaatcaacagcacaggctttggcttaaccttaggtattcatagccgtaacgaaggtcacgcgcttaatttggctgacaaagtgaatgttggtaacgtctacatcaaccgtaaccaaattggcgccgtggttggggtacagccattcgggggtcaaggcctatctggcacgggtcctaaagcgggcggtcctcactatttgacccgttttgtaaccgagaaaacgcgcactaacaacatcaccgccattggtggtaatgcgaccctattgtcattaggcgatagcgacgagtaa

SEQ ID NO: 5354 - protein, 1064 aa, Shewanella denitrificans OS-217
METIMMFKASEVLAGRYDDATLDQLFQAVTDNYIVDEEAYLTELIKLVPSTDEQIEQVTQRAHDLVSKVRKFEKKGLMIGVDAFLQQYSLETHEGIILMCLAEALLRIPDAETADALIEDKLSGAKWDAHLKQSDSVLVNASTWGLMLTGKIIKLDKKLDGTPSNLLKRLVNRLGEPVIRQAMYAAMKIMGKQFVLGRNVKEALNNSEAKRSLGYTHSYDMLGEAALTDKDAKKYFNDYSNAIKELGAQSYDENESPRPTISIKLSALHPRYEVANEGRVLTELYATVIKLIVQARELNIGISIDAEEVDRLELSLKLFKKLFNSVESQGWNLLGIVVQAYSKRALPVLCWLTRLAKEQGDEIPVRLVKGAYWDSELKWAQQAGEAGYPLFTRKAGTDVSYLACARFLLSDATRAAIYPQFATHNAQTVASIDAMATDRNYEFQRLHGMGQELYDTILAESGAKTVRIYAPIGAHKELLPYLVRRLLENGANTSFVHKLVDPKTPIASLVVHPLVTLQAYKSLANKNIALPADIFGAERKNSKGLNMNILSEAQPFFAAIDKFNDTQWQAGPLVDGKTLTGDINTVVSPYDTKQTVGQVVFADQQAIEQALASASHAFPSWARTPVETRASALQKLADLLEENREELIALCTREAGKSIQDGIDEVREAVDFCRYYAVQAKKLMGQPELLPGPTGELNELFLQGRGVFVCISPWNFPLAIFLGQVSAALAAGNTVVAKPAEQTSLIGYRAVQLAHQAGIPVEVLQYLPGTGATVGSAITADERIGGVCFTGSTGTAKLINRTLANRDGAIIPLIAETGGQNAMVVDSTSQPEQVVNDVVSSSFTSAGQRCSALRVLFLQEDIADRVIEVMQGAMEQLAIGHPGKVQTDVGPVIDATAKANLNAHIDHIKQVGKLIKQIQLPAGTEDGHFVAPIAVEIDSIKVLEKEHFGPILHVIRYKAADLSKVIDEINSTGFGLTLGIHSRNEGHALNLADKVNVGNVYINRNQIGAVVGVQPFGGQGLSGTGPKAGGPHYLTRFVTEKTRTNNITAIGGNATLLSLGDSDE

SEQ ID NO: 5355 - DNA, 2102 bp, Mus musculus
  CDS (4)..(1803)
gacatggctctcaagcgcgtcttcttgctgcggtcggtggcaccacgcgtcgctgccctctcaaccaaaccgcaagcccaggaacagcctcccgcgagccctgaggctcttcggggatgtggggcggccaaggctgtgcggccgcctgtgccagccgtggacttcaccaacacgcaggaggcgtatcgcagccggcggagttgggagttggtgcgcaacctgctagtgctgcggctgtgtgcgtcgccggtgctgctagcgcaccacgagcagttgttccaagttgccaggaagcttctggggcaaaggatgttcgagagattgatgaagatgaccttctatggccattttgtggctggcgaggaccaggagtctatcaggcctctgatccggcacaacaaagcctttggtgttggctttatcctggactatggagtggaggaagatctgagccctgaggaggcggagcgcaaagagatggagtcatgcacttctgaagcagagagagatggcagtggagcaaataagagggagaagcagtatcaggtgcaccccgcctttggagaccgcagagatggtgtcatcagtgcccgcacctacttctatgccaatgaagccaagtgtgacaactacatggagaacttactgcagtgcatcaaggcctcaggtggagccagtgatggtggtttctcagccattaagctcactgcactggggagaccacagtttctgctgcagttctcagacgtgctgaccaggtggagacggttcttccatcaaatggctgcagagcagggacaggctgggcgtgctgctgtagacacaaagctggaggtggcggtgctccaggacagcatcgcaaagatgggcatcgcatccagggctgagattgaagggtggttcacgccagtgacgctgggagtgtctggcaccgtggacttgctggactggaacagcctcattgacagcaggacccggctctccaggcacttggtggtccccaatgtgcagactggccagctggagcccctgctgtcacggttcactgaggaggaagagcagcagatgaaaaggatgctgcagaggatggatgtactggccaagaaagcaaaagaggcaggtgtgcgcctgatgattggtgctgagcagagctacttccaaccagccatcagccgcctgaccctggagatgcagcgcaggttcaatgtggataagccgttcatcttcaacacattccagtgctacctcaaggatgcctatgacaatgtgaccttggatatggaactggctcgccgtgagggctggtgttttggggccaagctggtacgtggtgcatacatggcccaagagcgtgtcagggcagcagagatcggttatgaggaccccatcaaccctacatatgaagccaccaatgctatgtaccacaggtgccttaactatgttctggaggagctgaagcacagcaccaaggcagaggtgatggtggcttcccacaacgaggacaccgtgcacttcacgttgtgcaggatgaaggagataggcctgcatcctgctgatggtcaggtgtgcttcggacagctgctggggatgtgtgaccaaatcagcttcccactaggccaggcaggctttcctgtgtacaagtatgtgccctatggccctgtgatggaggtactcccttacctgtcccgccgtgccctggagaacagcagcatcatgaagggtgctcagcgagagaggcagctgctatggcaggagctccgcaggcggctgcgcactggcagcctcttccaccatccggcctagtcaccgcaggagccttgcccacccgctcgtactccactcaaccccttacctctggggcttcaggcggggcacagcttgggattgggctggggttccttagcccaacctgcccagacacagttcacctttttatgcccaaggctttttatgcccaaggcgggatttcatcagtggacagctcctgaggaacagtgcccaagatggtcgtctggtcacagaggctgccctctgggacttcctgtaccccaaggaacagacactcaggagtggggtcagctagagcccctgggagctgcccc

SEQ ID NO: 5356 - protein, 599 aa, Mus musculus
MALKRVFLLRSVAPRVAALSTKPQAQEQPPASPEALRGCGAAKAVRPPVPAVDFTNTQEAYRSRRSWELVRNLLVLRLCASPVLLAHHEQLFQVARKLLGQRMFERLMKMTFYGHFVAGEDQESIRPLIRHNKAFGVGFILDYGVEEDLSPEEAERKEMESCTSEAERDGSGANKREKQYQVHPAFGDRRDGVISARTYFYANEAKCDNYMENLLQCIKASGGASDGGFSAIKLTALGRPQFLLQFSDVLTRWRRFFHQMAAEQGQAGRAAVDTKLEVAVLQDSIAKMGIASRAEIEGWFTPVTLGVSGTVDLLDWNSLIDSRTRLSRHLVVPNVQTGQLEPLLSRFTEEEEQQMKRMLQRMDVLAKKAKEAGVRLMIGAEQSYFQPAISRLTLEMQRRFNVDKPFIFNTFQCYLKDAYDNVTLDMELARREGWCFGAKLVRGAYMAQERVRAAEIGYEDPINPTYEATNAMYHRCLNYVLEELKHSTKAEVMVASHNEDTVHFTLCRMKEIGLHPADGQVCFGQLLGMCDQISFPLGQAGFPVYKYVPYGPVMEVLPYLSRRALENSSIMKGAQRERQLLWQELRRRLRTGSLFHHPA

SEQ ID NO: 5357 - DNA, 1686 bp, Leishmania major
  CDS (1)..(1686)
atgcgtcgtctcctccccctgcgaccggcagctgtggcctttgccggctctgctcgtcactcctccttgacaatgcaggacaagcagccgaagctgccgaacttcaacgacgacacaacctaccgccagcgctcggcatggtacttgataaaggcgttggtggtgctccgcctgtgcagtgtgaactatttggcaatgaactcggtgccgctgatgaagagagtggaaaagatccttggcagcaagcttacctacagcatcctcgtcaagaagtccttctacaactacttctgcgcgggcgaaaacgaccaggagctgcgcgacacggtgcgaaagctttcacgcaacaacatcggcgctgtactcgactacgcggcggaggccgacacggagggcttcgcaccggagccgggtgtggcgtccggccccgatatttcgatgtctagtctcgttatgaagcccaatgttcagtacccaatggacgaggggttctttaacgagaacatgaagctctacatgatgagcatcatgcacgcctcgctgtacagcccgcgaaacgtcgccggtgtaaccgctgttaaggtaacgggcatgtgcgaccctcagctgcttgcacgcgtatcggcgctgctcatgtccgtccaccagagctggtgcaagcacttcacgaacgaggagtcgctgaagctggaagagtgccgcgtcgtcatgggcgtgaaccgcaagcaccagctgttcatcacctacgatcagctacgcgccggtttcgagaagtacaacccctctaacaagctgtcggatgcccagttcaaggagattacggaggccctggacccccgcaagacgggcaaggtgaactactttgagtacaaggagatgctgacgaacgccctcatcgccgtggagccgacgccggtgcagcaggcgctgattgagggactgccgcagatgagtgcaaaggagaaggtgctgtggaaaaacgtcaacaaccgactcttgttgatcgcctccatggcaaaggagctcaatgtgcgcatgcttgtcgacgcggagcagaccttttatcagctggccatcgacgcgatcgtggcgaccctacagaagacctacaacacggagctgccggtggtgtacaacacttaccagtgctacctgacatacgcagaggaccgcattgacaacgacctcgttcgcgctcgccacatgaacttccactggggcggcaagatcgtgcgcggcgcctatatagtgcaagagcgcgcgacggcggctcagtacggctacaccagccccatctggtctacctacgaggagacgaacaagtgctataatgccgccgcgaagcgcatcttcgacaccttcgaggcgcagccagcgaaaaagcacgaggtcttctttggcactcacaacaagaagtctctagagattatcacggccagcgtcttggaacgaccgagcatccagtctcgcgtgtcctttgggcagctgtttgggatgcgcgacaacctgacggtgccccttgcccgagccggctttcaggtctacaagtacgtgccgtacggccccgtgaaggagacgatccactacctcggccgccgcgccgtggagaattcgtcgatcttgacaaccggtgacaacgagacggtgatgatgatcaaggagctgaagcgccgctgcggtttttaa

SEQ ID NO: 5358 - protein, 561 aa, Leishmania major
MRRLLPLRPAAVAFAGSARHSSLTMQDKQPKLPNFNDDTTYRQRSAWYLIKALVVLRLCSVNYLAMNSVPLMKRVEKILGSKLTYSILVKKSFYNYFCAGENDQELRDTVRKLSRNNIGAVLDYAAEADTEGFAPEPGVASGPDISMSSLVMKPNVQYPMDEGFFNENMKLYMMSIMHASLYSPRNVAGVTAVKVTGMCDPQLLARVSALLMSVHQSWCKHFTNEESLKLEECRVVMGVNRKHQLFITYDQLRAGFEKYNPSNKLSDAQFKEITEALDPRKTGKVNYFEYKEMLTNALIAVEPTPVQQALIEGLPQMSAKEKVLWKNVNNRLLLIASMAKELNVRMLVDAEQTFYQLAIDAIVATLQKTYNTELPVVYNTYQCYLTYAEDRIDNDLVRARHMNFHWGGKIVRGAYIVQERATAAQYGYTSPIWSTYEETNKCYNAAAKRIFDTFEAQPAKKHEVFFGTHNKKSLEIITASVLERPSIQSRVSFGQLFGMRDNLTVPLARAGFQVYKYVPYGPVKETIHYLGRRAVENSSILTTGDNETVMMIKELKRRCGF

SEQ ID NO: 5359 - DNA, 1854 bp, Xenopus laevis
  CDS (1)..(1854)
atgcccccagttttccgccttgctttcaggccttcaggctggttcatggttaggctgcaatctactgcagcagctcccaaagtaaaaggatctgcagatcctgagggggcgcagacaggggagaagaaatggcaactagggtcccaagtggatcacatagaaagaagcgagaatgtgatgctgaaatcttgtcctgctgctacaatgaactttgataacactcaggaagcatacaagagcaaagccacatgggagctgttgagaagcataatggtcttctggctgtgctccattgatacacttgtggaccggaatcagcagattttaagcttgtctaaaaaagtccttggccagaagctctttgagaaaatgatgaagatgacgttctatgggcagtttgttgctggtgaagaccaagaatctatcaaaccactgatcagacgcaatcaggcatttggtgttgggtcagtcttggattacagtgtagaagaagaccttactcaggaggaggcagagaagaaagaaattgaatcttgcacagctgaagctgaaaaagagaatattggttcagaacatcgagagaagaaataccaggttcagcctggctttggtgaccgccgaggtggagtcattagtgctcggacatatttctatgccgatgaagcaaaatgtgaccatcatatggagacttttcttaaatgcattgaagcttcaggtggaagttcagaggatggattttctgctattaagctaacagcattaggaagacctcagtttctgctgcagttttctgaagtgcttatgagatggcgacagtttttccaccaactagctgcagaccagggcaaggctggactggctgctgttgaaattgaattggaagtggagaaactgcaggagagcctagcaaaattaggaattgcaacaaaagatgaaagtcataactggttcagtggagaaaaccttgggctgtctgggacagtggacttgctggactggaacagtctgattgacagcagaaccaagatttcaagactcctgcttgttccaaatttacagagtggtcagctagagcccctcctttcccgattcacagaggaagaagatctacagatgaaaagaatgcttcagagaatggatgtccttgccaagagagccttggaaaaaggagttcggcttatggtcgatgcagaacagacctactttcagccagcaatcagccggctgacccttgaaatgcagcgcaaattcaatatagagaatcccattatcttcaatacatatcaatgctatttaaaggaagcatatgacaatgtaacagctgacgttgaattgtcccgaagagaaggctggcattttggtgccaaattggtaagaggggcctatatgcagcaggaaagaaatcgtgccgcagaagtgggctatgaggatcccattaatcccacatatgagaaaacaagtgaaatgtaccacagatgtcttgattatatcttagaagagatccgacacgatcgcaaggcaaatgttatggtggcctcacacaatgaagacactgtgaaattcacgctcaagagaatgaatgaactgggcatttatcctgaggagaacaaggtttattttggccagcttctgggtatgtgtgaccaaataagctttccactaggtcaggctggttatccagtatataaatacgttccctatggaccagtccatgaagttctcccatacctgtctaggagggcccaagagaaccgtgggatcatgaaaggagcaataaaggagagacggctcttatggagcgagttcaaaaggcgcctgctcagtggcaatcttttctacagtcctagattctag

SEQ ID NO: 5360 - protein, 617 aa, Xenopus laevis
MPPVFRLAFRPSGWFMVRLQSTAAAPKVKGSADPEGAQTGEKKWQLGSQVDHIERSENVMLKSCPAATMNFDNTQEAYKSKATWELLRSIMVFWLCSIDTLVDRNQQILSLSKKVLGQKLFEKMMKMTFYGQFVAGEDQESIKPLIRRNQAFGVGSVLDYSVEEDLTQEEAEKKEIESCTAEAEKENIGSEHREKKYQVQPGFGDRRGGVISARTYFYADEAKCDHHMETFLKCIEASGGSSEDGFSAIKLTALGRPQFLLQFSEVLMRWRQFFHQLAADQGKAGLAAVEIELEVEKLQESLAKLGIATKDESHNWFSGENLGLSGTVDLLDWNSLIDSRTKISRLLLVPNLQSGQLEPLLSRFTEEEDLQMKRMLQRMDVLAKRALEKGVRLMVDAEQTYFQPAISRLTLEMQRKFNIENPIIFNTYQCYLKEAYDNVTADVELSRREGWHFGAKLVRGAYMQQERNRAAEVGYEDPINPTYEKTSEMYHRCLDYILEEIRHDRKANVMVASHNEDTVKFTLKRMNELGIYPEENKVYFGQLLGMCDQISFPLGQAGYPVYKYVPYGPVHEVLPYLSRRAQENRGIMKGAIKERRLLWSEFKRRLLSGNLFYSPRF

SEQ ID NO: 5361 - DNA, 1812 bp, Cryptococcus neoformans var
  CDS (1)..(1812)
atgtccgcaatccgaccgatcatgagaccttttcgaatgacaactccttttcgacaatcttctagcttccgccagctcaggattacctgggctccttcctttggcgctggaagcagccgttgcctcacaatcggcctttctccttcctctggttctgggtccagctttcgccgccgactcctttatccccttgctatcctccctgttggcttgctcttactccctgtcctctctgccgactctgagccagatgccattcctgtgcccacttctctctccacttctacgacctccgagcttctccggacttggttcgtctacgccatcatctctatgcctggcgttgttgactactctcctgccgttcttaacttctttatcaactcttctttacgcggccccactgaatggttcgtccgacacaccttttttggccaattcgtcgctggtgagactgtagagggatgtatgcctactttgaaggctttcagggagaggaacgttggtgccatgttaaactactctgccgaagtagacgagtcgcagttgaccgagactgctccttccaaggaggaaaggaacaggaaggagagagaaaagaagtttgagactatcatcactgctttggaggctgctggagaatatgaaagaagcttgcccgttgaccagagaggtgttactggtttcgctctaaagatcactggccttattgaccccaacatccttgaaagagcttcgtacacccttctccgattacgtcctcttgccaagtccaattctcccacagcccccaacactcatcttttcgtcccctaccctggtactcccgaaaccctggaccggcaagtcgttgcccgtactcccgaccttaagctaggtgatggcaaggagctccttgctttgaagggcaagtgggatgacatgggtgttttggaaaaggatcctggattgcaagagggtgaccttgaggagcttagacagttgtggtacaagttgcagaagattggtcacaaggctaaggagaacgacatcattctctatgttgatgccgagtacacttggtaccagccagctttggacgcatacacccttcttctttctcaagagttcaatcgacctcccacttccaaagaggagacctggactggtcctctgatttacggtacttatcagacctacctctgccgtcaacccacacaccttattcacgccatacaacacgccgaagccaacggctacgccctcggtgtcaagctcgtccgtggtgcctactttgagcaagaacgcaagaagtggtccgacgagggccgtgtcggtgccgctcccatctggcccaacaaatctgctactgacgtcgcttacaatggctctatctccaccatcatgaccactctcgcctcccaacttaagtctccccaccccgaactcgctttgagcgttgcgttcggtacccacaaccctgagtcttgtgatctcgtctgtgagaacttgctcaggaacggtcttgccaaggaagtaggggaagcgaagatgttgaaattgagagaggacgtgcggggcaaggttaggattgcgcagttgctgggtatgaaggacgacctcacagatcgtatggccagaaagttcgtcaatgatggcaagcccgttgctctcaaatacatggcatacggcaagctttcagaggttatgccttaccttggtaggcgggcgattgagaacaagagtttgatgagcggtgatcacggtgcagcagcagaaatgaggcgagtggcggccgagttaaagagaagattttttggtggctcagtataa

SEQ ID NO: 5362 - protein, 603 aa, Cryptococcus neoformans var
MSAIRPIMRPFRMTTPFRQSSSFRQLRITWAPSFGAGSSRCLTIGLSPSSGSGSSFRRRLLYPLAILPVGLLLLPVLSADSEPDAIPVPTSLSTSTTSELLRTWFVYAIISMPGVVDYSPAVLNFFINSSLRGPTEWFVRHTFFGQFVAGETVEGCMPTLKAFRERNVGAMLNYSAEVDESQLTETAPSKEERNRKEREKKFETIITALEAAGEYERSLPVDQRGVTGFALKITGLIDPNILERASYTLLRLRPLAKSNSPTAPNTHLFVPYPGTPETLDRQVVARTPDLKLGDGKELLALKGKWDDMGVLEKDPGLQEGDLEELRQLWYKLQKIGHKAKENDIILYVDAEYTWYQPALDAYTLLLSQEFNRPPTSKEETWTGPLIYGTYQTYLCRQPTHLIHAIQHAEANGYALGVKLVRGAYFEQERKKWSDEGRVGAAPIWPNKSATDVAYNGSISTIMTTLASQLKSPHPELALSVAFGTHNPESCDLVCENLLRNGLAKEVGEAKMLKLREDVRGKVRIAQLLGMKDDLTDRMARKFVNDGKPVALKYMAYGKLSEVMPYLGRRAIENKSLMSGDHGAAAEMRRVAAELKRRFFGGSV

SEQ ID NO: 5363 - DNA, 858 bp, Homo sapiens
  CDS (1)..(858)
atgcctgggcctcagggtggcactttcccgcccttgctgtggcctgaccgcgtgttgcacccccagacaggacagctggagcccctgctgtcccggttcactgaggaggaggagctacagatgaccaggatgctacagcggatggatgtcctggccaagaaagccacagagatgggcgtgcggctgatggtggatgccgagcagacctacttccagccggccatcagccgcctgacgctggagatgcagcggaagttcaatgtggagaagccgctcatcttcaacacataccagtgctacctcaaggatgcctatgacaatgtgaccctggacgtggagctggctcgccgtgagggctggtgttttggggccaagctggtgcggggcgcatacctggcccaggagcgagcccgtgcggcagagatcggctatgaggaccccatcaaccccacgtacgaggccaccaacgccatgtaccacaggtgcctggactacgtgttggaggagctgaagcacaacgccaaggccaaggtgatggtggcctcccacaatgaggacacagtgcgcttcgcactgcgcaggatggaggagctgggcctgcatcctgctgaccaccaggtgtactttggacagctgctaggcatgtgtgaccagatcagcttcccgctgggccaggccggctaccccgtgtacaagtacgtgccctatggccccgtgatggaggtgctgccctacttgtcccgccgtgccctggagaacagcagcttcatgaagggcacccatcgggagcggcagttgctgtggctggagctcttgaggcggctccgaactggcaacctcttccatcgccctgcctag

SEQ ID NO: 5364 - protein, 285 aa, Homo sapiens
MPGPQGGTFPPLLWPDRVLHPQTGQLEPLLSRFTEEEELQMTRMLQRMDVLAKKATEMGVRLMVDAEQTYFQPAISRLTLEMQRKFNVEKPLIFNTYQCYLKDAYDNVTLDVELARREGWCFGAKLVRGAYLAQERARAAEIGYEDPINPTYEATNAMYHRCLDYVLEELKHNAKAKVMVASHNEDTVRFALRRMEELGLHPADHQVYFGQLLGMCDQISFPLGQAGYPVYKYVPYGPVMEVLPYLSRRALENSSFMKGTHRERQLLWLELLRRLRTGNLFHRPA

SEQ ID NO: 5365 - DNA, 705 bp, Schistosoma japonicum
  CDS (132)..(521)
atgctgctacagaaaacttctatttcggtgcaaagttagtcagaggggcttacatagatcaggagcgtgcacgcgccaaagagttaggatatgaagatccaatctgtacagatttcaacgctacaacacttatgtatgaatcatgcttagaggaagttttgaaagcaattaaaaagtgtaaaactggtcaagttagtgttatgatagctagccataatgaagatactgtccagtttgctttaaaaaagatgcgggaatataatgtatcacctgcggatcgacttatttgttttggtcagttacttggaatgtgtgatcagattagttttgcactaagtcaagctggctattctgtatataaatatattccatatggtcctgttgaagaagttctaccttatttatctagacgcgcattagaaaatggttcattactaaattctacacttagagaacgtcaacttttatggtctgaattaaaaagacgtctgttaagtggacaatttttctataaaccataaatttttttataaaaaattatagagtaaatatatataaatgagaaaatgtctatgtacagaaattaatttgaattttcgcttgttaacttgactttctatcttacattcaccttttttattttcattcttatttattgttacataatacagaatacagtgcatatatgttaaaacaaaaaaaaac

SEQ ID NO: 5366 - protein, 129 aa, Schistosoma japonicum
MYESCLEEVLKAIKKCKTGQVSVMIASHNEDTVQFALKKMREYNVSPADRLICFGQLLGMCDQISFALSQAGYSVYKYIPYGPVEEVLPYLSRRALENGSLLNSTLRERQLLWSELKRRLLSGQFFYKP

SEQ ID NO: 5367 - DNA, 1377 bp, Xenopus tropicalis
  CDS (1)..(1377)
ctgagactcgggtcccctcggatctgctctggggtctgctccttagtcccaccctcctgctccccgcacagcacggcggccccccgggcacaggggcccctcactttctccgatggcggagtctttaaactgaagagcaactgggaagtggcccgcgggctcctcatatttagggtgtgctcgttcccgagtctggtccggcactcagagaagatgatggctgtctctcgtcgcctcctgggtcgccgtctctttgagtggggcatgaagggctcggtatatgggcagtttgtagctggagagacacttccagagatccgagagtgcgtagagcgactgagacagttgggcatccgccccatgttggccgtgcccatcgaggaagatctgggccaagccaaaagcggagagcgctggtaccagcagaatgagacagtcatgttggactgcgtggatctctcggccgctgggggagaccgacccatgatgcaactgaaaataactgctctcatgagcgctgacctgtgtaagttgctgtctgtgcatctgtcccacccgacccaccggccccaactgtgtcccacgaggctcgtgtctatcatggagggagaggaatccacgtttcccttcctgtcggaggcggagaacactcacttgcggaactcgttgcgcagactcagccgcatcgccaagcatgcaacagccaatagggtgcgagtcctggtggatgcagaatacacctacatgaaccccgccctcagcttggttaccatggcaatgatggcccagtgcaaccaatcagagccttggatctggaatacctaccagtgttacctgaaggactccttctccctcctctccctggatctgggcagagctgagagcctgggcctgtgctttggggtgaagttggtgcgcggcgcctacatggacaaagagcgcaaattggcccaacagaagggttaccccgaccccacccagcaggactgggaagcgaccaatcaaagttaccagcgctccctggataagatgctggaattgataggccagaacgggcagcggtacaacctgatcgtagccagtcacaacgaggagtcggttctgcacgcagtcgccaggatggcagaacttggcatcgagaggggcagcggcagtgtgagcttcgggcagttgctgggcatgtgtgaccatgtgtccctgacgctgggccaggccggcttcctcgtctacaagtctctcccctatgggagcgtcaattccgtcctcccctacctgatccgacgggcccaggagaaccagagcgtcctgcaggggatccgtaaggagagggaccttctacgctgggagctgaagagacggctgttcaggcagcgctaa

SEQ ID NO: 5368 - protein, 458 aa, Xenopus tropicalis
LRLGSPRICSGVCSLVPPSCSPHSTAAPRAQGPLTFSDGGVFKLKSNWEVARGLLIFRVCSFPSLVRHSEKMMAVSRRLLGRRLFEWGMKGSVYGQFVAGETLPEIRECVERLRQLGIRPMLAVPIEEDLGQAKSGERWYQQNETVMLDCVDLSAAGGDRPMMQLKITALMSADLCKLLSVHLSHPTHRPQLCPTRLVSIMEGEESTFPFLSEAENTHLRNSLRRLSRIAKHATANRVRVLVDAEYTYMNPALSLVTMAMMAQCNQSEPWIWNTYQCYLKDSFSLLSLDLGRAESLGLCFGVKLVRGAYMDKERKLAQQKGYPDPTQQDWEATNQSYQRSLDKMLELIGQNGQRYNLIVASHNEESVLHAVARMAELGIERGSGSVSFGQLLGMCDHVSLTLGQAGFLVYKSLPYGSVNSVLPYLIRRAQENQSVLQGIRKERDLLRWELKRRLFRQR

SEQ ID NO: 5369 - DNA, 1647 bp, Caenorhabditis briggsae
  CDS (1)..(1647)
atggaacattttcagagcaaatccaacacagagctcatccgtgctctcgtcgtcctccgactatgcggagttcaaacccttgtcaaccagaatcaaatgattctcgccacaatgcgacgagtcctcggcaaaaatttgttcaagaaaacgctcaaaaacacattctacggacactttgtcgccggtgagaccgaggaagaagttcgaccagtggctggaaaattaaggaagtacggtgtgaaatccattttggactactcggttgaggcggatatttcgggacaagaggcgacggataagacagttaaagggacatcgcaggctactgtgaaaccagcggcaatgacaccagtggtggacgcgaagacgctggaaacgacacgcgaacgctacacggttcatcaagagttcggtgatcggcggcagggtgtggctagtgcgagaacctatttctacgaaggcgaggagcagtgtgacaagaatcgtgacatctttaagcaatccatcgacgccgtggcgtcagccacaggaaacgagggattcgtggcagtgaaggtgacggcgttgggacgtcctcaactgcttctgaagctttcggaagccattgttcagactcaaaactttttccaagcattgacaggaggaatgacacttcaggagggtagattgtcggtgaaggatttgactaagagattgcatgacctcggtgtgaaaacagacacagagagtgtcaagaaattcttccacgacgttgactttgattcggatggtgttgtcgatctccatggatggaatcagcttctcgaggatcatgtgaaacttggacaactgtttcaagtgttgaatatcaagaccggagccctggagcctttgatccagaacttgtcggaggcggaggagcaggaattccgaaacatggttcgacgaactttggatgttgccgagtatgccatttccaagggtgtcaggattatggtggacgctgagcagacgtatttgcaaccggcaatttcgaagattactattgaaatgatgaagaagtacaacaaggatcgtggaaacgtgttcaacacctatcaagcctatctcaggtgtacccttcaatgcatggaggctgatatgcaagttgccagacgagagggatggcactttggcgccaaacttgtccgtggagcgtatatggaacaggagaggtctagagctaaagcaattggatatgaggatccggttaatgttgatttccaggccaccacaaaaatgtacgaatcatgcctaacccgaatcgccgatgaggttgatcgacgtggccgaacgaatgtgtcggtgatggttgccagccacaacgaggatacggtacgattcgcggtcaatttgatgaaggaacgatgcatcgcaccgtcggaacgggtcatgtgcatggcacagttgtatggaatgtgtgatcaggtatcattctcattgggtcaagccggtttctcagtctacaaatatctaccatatggaccagtggaagaagtgttaccgtacctgagcagacgtgcgctggagaatggaagtgtgctgaaaaaggcgaataaggagcgtgatctcttgtggaaggagcttaaacgacgaatctcatctggcgaattcaaagttcgcacttaa

SEQ ID NO: 5370 - protein, 548 aa, Caenorhabditis briggsae
MEHFQSKSNTELIRALVVLRLCGVQTLVNQNQMILATMRRVLGKNLFKKTLKNTFYGHFVAGETEEEVRPVAGKLRKYGVKSILDYSVEADISGQEATDKTVKGTSQATVKPAAMTPVVDAKTLETTRERYTVHQEFGDRRQGVASARTYFYEGEEQCDKNRDIFKQSIDAVASATGNEGFVAVKVTALGRPQLLLKLSEAIVQTQNFFQALTGGMTLQEGRLSVKDLTKRLHDLGVKTDTESVKKFFHDVDFDSDGVVDLHGWNQLLEDHVKLGQLFQVLNIKTGALEPLIQNLSEAEEQEFRNMVRRTLDVAEYAISKGVRIMVDAEQTYLQPAISKITIEMMKKYNKDRGNVFNTYQAYLRCTLQCMEADMQVARREGWHFGAKLVRGAYMEQERSRAKAIGYEDPVNVDFQATTKMYESCLTRIADEVDRRGRTNVSVMVASHNEDTVRFAVNLMKERCIAPSERVMCMAQLYGMCDQVSFSLGQAGFSVYKYLPYGPVEEVLPYLSRRALENGSVLKKANKERDLLWKELKRRISSGEFKVRT

SEQ ID NO: 5371 - DNA, 1500 bp, Nicotiana tabacum
  CDS (1)..(1500)
atggccaacaaggttgtttgtccaaaactcctcaaaaacctcggatttcatgtccgccgtttaaactcagctccgtctcccctttccgtcgtcccgcctttaagtttcaccggcgattttaacgccaccaccgtcacgacaccaaatctggtggacaccgtaccacagattaatacagttcccgacaagaataacattatcaattttgacgatgttaaggagctgttttacggcgttcctacctcaaagttgataagatcatcgctgacgctacagatggcagcgattgaaccaatggttgatatggggatgtgggtaatgaattctaagctcatggaaatgcctatttttagggaggtaatgttggggtttgttaagaatacattttatgaacatttttgtgctggaaaagacttaacggaagtccgtaggaccgttagcaaactatcggacggcggcttaaaagccatgcttgattatggggtggaacatgccacccacaatgaatcttgtgaacagagtatgaaggcctttattcagacaattgaatcaaccaagtcacttccacaatcttcgactagctttgtggtggtgaagataactgcaatttgtacacctcggctgctcaaaagaatgagtgatttgctgagatgggaacacaaagatccttcattcaatcttccttggaagcaaaagacacttccacttttcgccgaatcaagccctctttatcatacttcgaaaaaaccagagcctctaacggtagaggaagagcgtgatctgcaattagctcacaaaagacttacgaaaatttgcgagaaatgcttggaacacgacgttcctttactcattgatgccgaggatacaactattcaacctggaattgattacatggcttattctgcagcaattaagtaccacaaagacgatggccctttgattttcggaacaattcaagcttacttgaaagacgcgaaagaaagaatggcgatagcgaaaaaagctgcagagaaaatgggagttccaatgggatttaagttggtgaggggtgcttatatgtgtagtgagagagagttggcttctcgattaggattccaatctccaattcatgatagcattgaacaaacacatgcttgcttcaattcttgcgctgagtttatgattgaagagattgctaatggctctggagcggttgttcttgctactcataacattgagtcaggaaaacttgctgcaactaaagcaatagatttgggaatcaaggatagtcaaaagctccaatttgctcagctatatggtatggcagagggactttcttttggcctgagaaatgcaggatttcaagtgagcaagtatttgccatttggacctgtagaccagattatgcactaccttatgaggagagctgaagaaaacagaggcatgttatctacatcggcattcgacagacaactcatgaggaaggagttgagcaggagacttaaagtggcaacttcttga

SEQ ID NO: 5372 - protein, 499 aa, Nicotiana tabacum
MANKVVCPKLLKNLGFHVRRLNSAPSPLSVVPPLSFTGDFNATTVTTPNLVDTVPQINTVPDKNNIINFDDVKELFYGVPTSKLIRSSLTLQMAAIEPMVDMGMWVMNSKLMEMPIFREVMLGFVKNTFYEHFCAGKDLTEVRRTVSKLSDGGLKAMLDYGVEHATHNESCEQSMKAFIQTIESTKSLPQSSTSFVVVKITAICTPRLLKRMSDLLRWEHKDPSFNLPWKQKTLPLFAESSPLYHTSKKPEPLTVEEERDLQLAHKRLTKICEKCLEHDVPLLIDAEDTTIQPGIDYMAYSAAIKYHKDDGPLIFGTIQAYLKDAKERMAIAKKAAEKMGVPMGFKLVRGAYMCSERELASRLGFQSPIHDSIEQTHACFNSCAEFMIEEIANGSGAVVLATHNIESGKLAATKAIDLGIKDSQKLQFAQLYGMAEGLSFGLRNAGFQVSKYLPFGPVDQIMHYLMRRAEENRGMLSTSAFDRQLMRKELSRRLKVATS

SEQ ID NO: 5373 - DNA, 1500 bp, Nicotiana tabacum
  CDS (1)..(1500)
atggccaacaaggttgtttgtccgaaactactcaagaacctcggatttcatgtccgccgtttaaactcagctccgtctcccctttccgccgtcccgcctttaagtttcaccggcgattttaacgccaccaccgtcacgacaccaaatctggtggataccgtaccacagattaatacagtccctgacaagaataacattatcaattttgacgatgttaaggagctgttctacggcgttcctacctcaaagttgataagatcaacgctgacgctacagatggcagcgattgatccaatggttgatatggggatgtgggtaatgaattctaagctcatggaaatgcctatttttagggaggtaatgctgggatttgttaagaatacattttatgaacatttttgtgctggaaaagacttaacggaagtccgtaggaccgttagcaaactatcggacggcggcttaaaagccatgcttgattatggggtggaacatgccaccaataatgagtcttgtgaacagagtatgaaagcctttattcagacaattgaatcaaccaaatcactaccacaatcttcgactagctttgtggtggtgaagataactgcaatttgtacacctcggctgctcaaaagaatgagtgatttgctgagatgggaacacaaagatccttcattcaatcttccatggaagcaaaagacacttccacttttcgccgaatcaagccctctttatcacacttcgaaaaaaccagagcctctaacggtagaggaagagcgtgatctacaattagctcgtgaaagactaacgaaaatttgcgagaaatgtttggaacacgatgttcctttactcattgatgccgaggatacaactattcaacctggaattgattacatggcttattctgcagcaattaagtaccacaaagacgacgacccgttgattttcggaacaattcaagcttacttgaaagatgcgaaagaaagaatggcgatagcgaaaaaagctgcagagaaaatgggagttccaatgggatttaagttggtgagaggtgcttatatgtgtagtgaaagagagttggcttctcgattaggattccaatctcctattcatgatagcattgaacaaacacatgcttgcttcaattcttgtgctgagtttatgatcgaagagattgctaatggctctggagcagttgttcttgctactcataacattgagtcaggaaagcttgctgcaactaaagcaatagatatgggaatcaaggatagtcaaaagctccaatttgctcagctatatggtatggcagagggacttacttttgggctgagaaatgcaggatttcaagtgagcaagtatttgccatttggacctgttgaccagattatgcactaccttatgaggagagctgaagaaaacagaggcatgttatctacatcggcattcgacaggcaactcatgaggaaggagttgagcaggagacttaaagtcgcaacttcttga

SEQ ID NO: 5374 - protein, 499 aa, Nicotiana tabacum
MANKVVCPKLLKNLGFHVRRLNSAPSPLSAVPPLSFTGDFNATTVTTPNLVDTVPQINTVPDKNNIINFDDVKELFYGVPTSKLIRSTLTLQMAAIDPMVDMGMWVMNSKLMEMPIFREVMLGFVKNTFYEHFCAGKDLTEVRRTVSKLSDGGLKAMLDYGVEHATNNESCEQSMKAFIQTIESTKSLPQSSTSFVVVKITAICTPRLLKRMSDLLRWEHKDPSFNLPWKQKTLPLFAESSPLYHTSKKPEPLTVEEERDLQLARERLTKICEKCLEHDVPLLIDAEDTTIQPGIDYMAYSAAIKYHKDDDPLIFGTIQAYLKDAKERMAIAKKAAEKMGVPMGFKLVRGAYMCSERELASRLGFQSPIHDSIEQTHACFNSCAEFMIEEIANGSGAVVLATHNIESGKLAATKAIDMGIKDSQKLQFAQLYGMAEGLTFGLRNAGFQVSKYLPFGPVDQIMHYLMRRAEENRGMLSTSAFDRQLMRKELSRRLKVATS

SEQ ID NO: 5375 - DNA, 1476 bp, Medicago sativa
  CDS (1)..(1476)
atggccaccagagtaatcccaccaagaattctaaggaaactccgatacaacaccgccacaaaacccttccaacctgcccttacctcgcccgctctcgctcctacgtctaatattttagaccaaaaaccgccatcatcgacaacaaccctcctccctcccgacgccgagctcaacttccacgacgtcgaaaaactcttttcgcacgtcccaactaccaaacttctcaaatcaactgccatcctccatgctaccgcggtcgagccaatggttgacctcggtacatggatgttgaggtctgatctcatgcagaccaataatcctttacgtaacattgctatggctaccacacgtgccacttttttcgatcatttttgtgccggagaagatgctatcaccgctggaaaaagtattgccgggttgaatgaagccggtttacgtggaatgctggtttacggcgttgaagatgctcatgataacgctggctgtgatcgcaatctcaaaggttttcttcacaccgttgatgtcagcagatcgcttcctccatcttcggtaagctttgtgattgtgaagattactgcaatatgtccaatgagtttgcttgaaagaatgagtgatttgctgagatggcagaagaaagacccttcatttgttttaccatggaagcaagattcattgccaattttctctgagtcaagtcctttgtaccatacaaggaagagaccagagccattaacagcagaagaagagagtgatcttgatcttgctaacaagagattccttgagctttgtcagaaatgtgtgcaagccaatattccattattggttgatgctgaacatacttcagttcaacctgctattgattactttacttactcttctgctattatgcataacaaaggtgaaaaccctattgtgtttggaacccttcagacttatttgaaagatgctaaggagagaatgttgttggcatcaaaggctgctgagaaaatggggataccaatgggatttaagttggttagaggtgcttatatgtctagtgaaagaaaattggctgctgatttgggttatgcttctccaattcataacactattaaggatacacataagtgtttcaatgattgttcaaattacatgcttgagaagattgctaatggtcctggtggagttgttcttgcaactcataacattgaatcaggaaaattggctgctgcaaaagcacatgaattagggattggaaaggtgaaccataagatggaatttgcacaactatatggaatgtctgaggcactatcttttggtttaagcaatgcagggtttcaagttagcaagtatatgccatttggtcctgtggagactgttatgccatacctcttgagaagggctgaggagaatagaggagtgttggctgcatcaggctttgacaggcaactgatgaggaaggagttggtcaggagagtaaaagcttctgtgctttaa

SEQ ID NO: 5376 - protein, 491 aa, Medicago sativa
MATRVIPPRILRKLRYNTATKPFQPALTSPALAPTSNILDQKPPSSTTTLLPPDAELNFHDVEKLFSHVPTTKLLKSTAILHATAVEPMVDLGTWMLRSDLMQTNNPLRNIAMATTRATFFDHFCAGEDAITAGKSIAGLNEAGLRGMLVYGVEDAHDNAGCDRNLKGFLHTVDVSRSLPPSSVSFVIVKITAICPMSLLERMSDLLRWQKKDPSFVLPWKQDSLPIFSESSPLYHTRKRPEPLTAEEESDLDLANKRFLELCQKCVQANIPLLVDAEHTSVQPAIDYFTYSSAIMHNKGENPIVFGTLQTYLKDAKERMLLASKAAEKMGIPMGFKLVRGAYMSSERKLAADLGYASPIHNTIKDTHKCFNDCSNYMLEKIANGPGGVVLATHNIESGKLAAAKAHELGIGKVNHKMEFAQLYGMSEALSFGLSNAGFQVSKYMPFGPVETVMPYLLRRAEENRGVLAASGFDRQLMRKELVRRVKASVL

SEQ ID NO: 5377 - DNA, 1494 bp, Glycine max
  CDS (1)..(1494)
atggcaacacgcgtgatccctccaagaatcctcaagaatcttcgttacaacacaacaaccaagcccctcaacgccgcccaaccctccatctctccggccatcgcctcaccgtcgctcttcgagaggtcgccgtcccctcctgccgcggacgtcattccggcatctgcggctgggacggcagcgctcaacctggacgacgcggagcggctattcgcatcggtgtcgacaaagaggctgctccggtcgtccgcagttctgcacgcgacggcggtggggcccatggtggacctgggaatgtggatgatgaagtcgagggtgttccagagcggggtgctgaaggatctcgtcatggccgccacgaaggagacgttcttctcgcacttctgcgccggcgaggacgccgccgccgccggacggagcatcagcgcgctcaaggaggccggcttacgtggcatgctggtgtacggtgtggaagacgcgcatgaaaacgatgggtgtgatagaaacctcaaagggttccttcacactgtggatgttagcaaatcgcttccaccatcctctgtgagttttgtcattgtgaaaatcactgcaatatgccccatgacattgcttgaaagaatgagtgatcttctaagatggcaacagaaagatccttcatttgttttgccatggaagcaagattcgcttccaatttttgcagaatctagccctttgtatcacacgcagaaaagaccagagcctctaaccccagaagaagagagtgatcttcaacttgccaaccagagactccttgaactttgccaaagatgtgaggaagccaatatgcctttgttggttgatgcagaacacaccacagttcaaccggctatcgattacttcacatactcttcttccataaggcacaataaggatgacaaccccattgtgtttggaaccattcagacttatttgaaagatgccaaggagaggttgttgctcacaacaaaggcagcagaaaaaatgggagttccattggggttcaaattggttagaggtgcctacatgtccacagagagtaaattggctgagtcatttgggtatgcatccccaattcacaataccattcaagaaacacacaattgcttcaatggctgctcatcatttcttcttgagaagattgctaatggacccggttcaatttcagttgttcttgcaactcacaatattgaatcagggaaattggctgcagcaaaagcatatgaattgggggttggaaaggtaaaccacaagctagaatttgcacaactgtatggaatgtcagaggcactttcctttggtttgagcaatgcagggtttcaagttagcaagtatatgccatttgggccggtagatatggttatgccttaccttctgagaagggctgaagaaaatagagggcttttggctgcatcaggttttgataggcaattgatgagaaaggagttgggaagaagattaaaagctgcaatgttctaa

SEQ ID NO: 5378 - protein, 497 aa, Glycine max
MATRVIPPRILKNLRYNTTTKPLNAAQPSISPAIASPSLFERSPSPPAADVIPASAAGTAALNLDDAERLFASVSTKRLLRSSAVLHATAVGPMVDLGMWMMKSRVFQSGVLKDLVMAATKETFFSHFCAGEDAAAAGRSISALKEAGLRGMLVYGVEDAHENDGCDRNLKGFLHTVDVSKSLPPSSVSFVIVKITAICPMTLLERMSDLLRWQQKDPSFVLPWKQDSLPIFAESSPLYHTQKRPEPLTPEEESDLQLANQRLLELCQRCEEANMPLLVDAEHTTVQPAIDYFTYSSSIRHNKDDNPIVFGTIQTYLKDAKERLLLTTKAAEKMGVPLGFKLVRGAYMSTESKLAESFGYASPIHNTIQETHNCFNGCSSFLLEKIANGPGSISVVLATHNIESGKLAAAKAYELGVGKVNHKLEFAQLYGMSEALSFGLSNAGFQVSKYMPFGPVDMVMPYLLRRAEENRGLLAASGFDRQLMRKELGRRLKAAMF

SEQ ID NO: 5379 - DNA, 3132 bp, Vibrio vulnificus
  CDS (1)..(3132): transl_table=11
atgtttacagcaacagatgtgttaaagccggagtttgtcgcgcagccgctcgataagctatgggcattgatctccccattgtatatggtggacgaatctcaatggctggagcagctcctgccactggcaaccccttcagcggaagagaagcaagcgatcgccagccgaacgactcagttaattgaagcgattcgcgccgacaagaagtcgattcaattgatcgatgcactgttgttggaatacagcctagacacgcacgaaggcatcttgctgatgtgtttggcagaagcgctgatgcgtattccggatgcggccacggctgacgctctgatcaaagataaaatgagcgtggcagattggaaatcgcatcttaaaaattccgaatctgtgtttgtcaacgcctcgacatggggcctcatgctgacaggtaaagtggtgggcttgggtgatgatgaaacgcaaagtgccagccaagcgctcaatcgcttagtgaacaagctttctgagccggtgatccgcaaagccatgtatcaggcgatgaagatcatgggccatcagttcgttcgtggccgcaccatcgaagaggcgcagaaaaatggccgcccaatgcgcgataaaggcttcacttactcttttgacatgctgggtgaagcggcgctgaccaccgcggatgccaataaatacttcaaagattatttgatggcgattgaggctgtgggccgtgaaacgtatggtaatgacaccagccctgcgccatcggtatcgatcaaactctctgccttgcatcctcgctatgaagtggccaatgaacaccgcgtgatgagcgagctgtttgacaccttggcacaactgctgaaacgcgctgtcgagctagacgttgcgattaccattgatgcggaagaagccgaccgcctagagctctctctcaaactgtttgaaaaactctaccgcagtgaaacggtcaaaggctggggtaagtttggcctggtggtgcaagcgtattccaaacgcgctctgccggtgttggtgtggctcaatgctctcgctaaagagcaaggcgatttgatcccgctgcgtttggtgaaaggcgcgtattgggacagcgaagtgaagtggtctcagcagcgtggttacgataactacccggtttacactcgcaaagaagccaccgatgtggcgtacttagcgtgtgctcgcttcctattaagcgatgacgtgcgcggcaacattttcccgcaatttgctagccataacgcgcaaaccgtttcctcgatcgccaccatggcgactcacagcgactatgagttccaacgtctgcatggcatgggcgattcactttataaccatgtgatggagcagtatcgtcagccagtacgaatttacgcgccagtgggcagccacaaagatttgctgccatacctagtgcgtcgtctgctggaaaacggtgccaacagctcgtttgtccaccgtttggtcgatgcgcgctgcccagtggcagagcttaccaaacacccagtagaagcgctgacctcatttgaaaccctgaacaataccaagatcccattgccagcggcgattttccctgagcgtaaaaactcctatggcgttaacgtggatatcgaaagtgaagccaagccgtttgaagcacaggtcgagtccttcttgagcaagcagtggttagctggcccgatcatcaacggcgcatcgctggccgaaagcatgatcaaggacggtcaagcggaaagtgtcacagcgccgtatgatcgtcgtatccaagtggggcaaattgcgtttgctaaccttgatcatgtttcccaagcgatcgatatcgcacaagcggcttttgctgattggaatcgcacaccgttggtggagaaagcgcgttgcctagacaacctcgctgacttgatggaagccaacttggctgagctggtggcactttgtcaccaagaagcgggcaagacactgcatgacagtattgatgaagtgcgtgaagcggtcgatttctgtcgttactacgccaaacaagcgcaaaatctgcaaccttttgagttagaaggctttgatggcgtgaaacgcattgccagccgtgaaggtttgggggtgttcgtctgtattagcccgtggaacttcccactggcgattttccttggtcaagtgaccgcagcgctcgtggcgggcaacacggtcgtagcgaaaccagcggaacaaaccagtttgatcgcggtacgtgcggtagaactcatgctacaagcgggtttcccagcgagtgttgttcaactgattcctggtcgtggtgcggatattggctcggcgctcacctctcacccatccattgcgggtgtggcgtttacgggctccaccgccacggcgcaacgcatcaacgtaactttggcacaacgtgaagccaaaccggtgccgtttatcgccgaaaccggtggtcaaaacgcgatgatcgtggacagtactgcgctgccagagcaggtggtgcgtgatgtgattcgttctgcctttgcttctgcaggtcaacgctgttcagcactgcgtgtgctgtttgttcagcaagacattgccgatcgagtgattggcttgatccaaggggcaatgaatgaactgagtgttggtgtgccgtatctacacaaaaccgatgtggggccagtgatcgacgctcgcgcgaaagaaaagctgctgcagcatatcgagcagatgaaccaaactcagaagccgattgcgcaactgacactggcggacgattgtcagcatggtgattttgtcacaccaacggcgtttgaaatctcaggtatcgatgtgcttaaagaagagcagtttggcccgatcctgcacattgtgcgtttcaaagcgtctgaactgactcgcgtggtggaacacatcaaccaaacgggtttcggtttgaccatgggtattcacagtcgtaacgaaaccacctaccgctggatcgaaaaacacgctcgagtagggaactgctacatcaaccgtgaccaagtgggtgcggtggttggcgtgcagccattcggtggtcagggcttatcggggactgggccaaaagcaggtggtccacactacttgtaccgctttacccaagtgcaatttaaccagactgagaacgcataa

SEQ ID NO: 5380 - protein, 1043 aa, Vibrio vulnificus
MFTATDVLKPEFVAQPLDKLWALISPLYMVDESQWLEQLLPLATPSAEEKQAIASRTTQLIEAIRADKKSIQLIDALLLEYSLDTHEGILLMCLAEALMRIPDAATADALIKDKMSVADWKSHLKNSESVFVNASTWGLMLTGKVVGLGDDETQSASQALNRLVNKLSEPVIRKAMYQAMKIMGHQFVRGRTIEEAQKNGRPMRDKGFTYSFDMLGEAALTTADANKYFKDYLMAIEAVGRETYGNDTSPAPSVSIKLSALHPRYEVANEHRVMSELFDTLAQLLKRAVELDVAITIDAEEADRLELSLKLFEKLYRSETVKGWGKFGLVVQAYSKRALPVLVWLNALAKEQGDLIPLRLVKGAYWDSEVKWSQQRGYDNYPVYTRKEATDVAYLACARFLLSDDVRGNIFPQFASHNAQTVSSIATMATHSDYEFQRLHGMGDSLYNHVMEQYRQPVRIYAPVGSHKDLLPYLVRRLLENGANSSFVHRLVDARCPVAELTKHPVEALTSFETLNNTKIPLPAAIFPERKNSYGVNVDIESEAKPFEAQVESFLSKQWLAGPIINGASLAESMIKDGQAESVTAPYDRRIQVGQIAFANLDHVSQAIDIAQAAFADWNRTPLVEKARCLDNLADLMEANLAELVALCHQEAGKTLHDSIDEVREAVDFCRYYAKQAQNLQPFELEGFDGVKRIASREGLGVFVCISPWNFPLAIFLGQVTAALVAGNTVVAKPAEQTSLIAVRAVELMLQAGFPASVVQLIPGRGADIGSALTSHPSIAGVAFTGSTATAQRINVTLAQREAKPVPFIAETGGQNAMIVDSTALPEQVVRDVIRSAFASAGQRCSALRVLFVQQDIADRVIGLIQGAMNELSVGVPYLHKTDVGPVIDARAKEKLLQHIEQMNQTQKPIAQLTLADDCQHGDFVTPTAFEISGIDVLKEEQFGPILHIVRFKASELTRVVEHINQTGFGLTMGIHSRNETTYRWIEKHARVGNCYINRDQVGAVVGVQPFGGQGLSGTGPKAGGPHYLYRFTQVQFNQTENA

SEQ ID NO: 5381 - DNA, 1500 bp, Arabidopsis thaliana
  CDS (1)..(1500)
atggcaacccgtcttctccgaacaaactttatccggcgatcttaccgtttacccgcttttagcccggtgggtcctcccaccgtgactgcttccaccgccgtcgtcccggagattctctcctttggacaacaagcaccggaaccacctcttcaccacccaaaacccaccgagcaatctcacgatggtctcgatctctccgatcaagcccgtcttttctcctctatcccaacctctgatctcctccgttccaccgccgtgttgcatgcggcggcgataggtcctatggtcgacctagggacgtgggtcatgagctctaaacttatggacgcttcggtgacgcgtggcatggttttagggcttgtgaaaagtacgttttatgaccatttttgcgccggtgaagatgccgacgcagccgctgagcgcgtgagaagcgtttatgaagctactggtcttaaagggatgcttgtctatggcgtcgaacacgccgatgacgctgtatcttgtgatgataacatgcaacaattcattcgaaccattgaagctgccaaatctttaccaacatctcactttagctcagtggttgtgaagataactgccatttgtccaattagtcttctgaaacgagtgagcgatctgctgcggtgggaatacaaaagtccgaacttcaaactctcatggaagctcaaatcgtttccggttttctccgaatcgagtcctctctaccacacaaactcagaaccggaaccgttaaccgcggaagaagaaagggagctcgaagcagctcatggaaggattcaagaaatctgtaggaaatgccaagagtccaatgtaccattgttgattgatgcggaagacacaatcctccaacccgcgatcgattacatggcttattcatcggcgatcatgttcaatgctgacaaagaccgaccaatcgtttacaacacgattcaggcgtacttgagagacgccggtgagagactgcatttggcagtacaaaatgctgagaaagagaatgttcctatggggttcaagttggtgagaggggcttacatgtctagcgaagctagcttggcggattccctgggttgcaagtcgccagtccacgacacaattcaggatactcactcttgttacaatgattgtatgacattcctgatggagaaagcatcaaacggttctggtttcggtgtcgctctcgcaacacataacgctgattcggggagacttgcgtcgaggaaagcgagtgacctcgggatcgataaacagaacgggaagatagagtttgcacagctatatggtatgtcagatgcattgtccttcgggttaaagagagcagggttcaatgttagcaagtacatgccgtttggacccgtcgcaaccgctataccgtatcttctccgacgcgcttatgagaaccggggaatgatggccaccggagctcatgaccgtcaactcatgaggatggaacttaagaggagattaatcgccgggattgcgtaa

SEQ ID NO: 5382 - protein, 499 aa, Arabidopsis thaliana
MATRLLRTNFIRRSYRLPAFSPVGPPTVTASTAVVPEILSFGQQAPEPPLHHPKPTEQSHDGLDLSDQARLFSSIPTSDLLRSTAVLHAAAIGPMVDLGTWVMSSKLMDASVTRGMVLGLVKSTFYDHFCAGEDADAAAERVRSVYEATGLKGMLVYGVEHADDAVSCDDNMQQFIRTIEAAKSLPTSHFSSVVVKITAICPISLLKRVSDLLRWEYKSPNFKLSWKLKSFPVFSESSPLYHTNSEPEPLTAEEERELEAAHGRIQEICRKCQESNVPLLIDAEDTILQPAIDYMAYSSAIMFNADKDRPIVYNTIQAYLRDAGERLHLAVQNAEKENVPMGFKLVRGAYMSSEASLADSLGCKSPVHDTIQDTHSCYNDCMTFLMEKASNGSGFGVALATHNADSGRLASRKASDLGIDKQNGKIEFAQLYGMSDALSFGLKRAGFNVSKYMPFGPVATAIPYLLRRAYENRGMMATGAHDRQLMRMELKRRLIAGIA

SEQ ID NO: 5383 - DNA, 1482 bp, Nicotiana tabacum
  CDS (1)..(1482)
atggcaaacaaagttgtatgtccaaaggctttccgtgacctccgatcatttgtccgatgtctaaacacggccccaactgtcccgccgatgaacttcaccggcgcctatgatgctacgactgtcacaacaccggccttaataccaacggaccaagtaatcactgccgacaaaaaagtgattaattttgaggatgttaaggagctgtttacgggtgtgtcaaccttaaagttgataagatcaacgttgacacttcaaatggcagcgactgagcctatggttgacgtaggtatatgggtaatgaattcaaagctcatgcatatgccaatagtcaaggaggtaattctggggtttgtaaaaggtacattttatgaacatttttgtgctggaaaagacttaattgaagtacgcagaactgttactaagctgtcggatgtcgggttaaaaggaatgcttgattatggggtggaacatgcaactgaaaatgagtcttgtgatcagagtatgaaggtttttcttcagactgctgaatcaaccaagtcacttccatcctcttcggtcagctttgtggtagtgaagataacagcaatttgtacacctaagcttctcaaaagaatgagcgatttgctgagatgggaacacaagaatccatcattcaatctcccatggaagcaaaagtcccttccacttttctctgattccagccctttttatcacactccacaaaagccagagcctctaacggtcgaagaagaacatgatctacaattagctcatgaaagactcatgactatttgcaagaaatgcttagaacttgatgttgatttacttattgatgctgaagatacagctattcaacctgcaattgattattttgcatattctgcagcaattaagtatcacaaagatgatgaccctatgatttttggaacaattcaagcttacttaaaagattctaaagaaagaatggtgatagctaaaaaggctgcagagaaaatgggagttccaatgggttttaagcttgtgagaggtgcttatatgtcaagtgaaagagaattggcttctcgtttaggtgttcagtctccaattcatgatagcattgagcaaacacatgactgctttaattcttgtgctgagtttatgcttgacgagatttctaatggctctggagcagttgttcttgcaactcataatattgactcaggaaaacttgctgcatcgaaggctatagatctaggaatcagaaaggatagtcaaaaactccaatttgctcagctatatggtatggcagaaggtctttcatttggcctgagaaatgcaggatttcaggtaagcaagtatttaccgttcggaccagtagagcaagtgatgccataccttatacggagagctgaagaaaacagaggtctcttgtctacatctgccttcgacaggcaactaatgaggaaggagttaaccaggagatttaaagtggcaacttcatga

SEQ ID NO: 5384 - protein, 493 aa, Nicotiana tabacum
MANKVVCPKAFRDLRSFVRCLNTAPTVPPMNFTGAYDATTVTTPALIPTDQVITADKKVINFEDVKELFTGVSTLKLIRSTLTLQMAATEPMVDVGIWVMNSKLMHMPIVKEVILGFVKGTFYEHFCAGKDLIEVRRTVTKLSDVGLKGMLDYGVEHATENESCDQSMKVFLQTAESTKSLPSSSVSFVVVKITAICTPKLLKRMSDLLRWEHKNPSFNLPWKQKSLPLFSDSSPFYHTPQKPEPLTVEEEHDLQLAHERLMTICKKCLELDVDLLIDAEDTAIQPAIDYFAYSAAIKYHKDDDPMIFGTIQAYLKDSKERMVIAKKAAEKMGVPMGFKLVRGAYMSSERELASRLGVQSPIHDSIEQTHDCFNSCAEFMLDEISNGSGAVVLATHNIDSGKLAASKAIDLGIRKDSQKLQFAQLYGMAEGLSFGLRNAGFQVSKYLPFGPVEQVMPYLIRRAEENRGLLSTSAFDRQLMRKELTRRFKVATS

SEQ ID NO: 5385 - DNA, 1500 bp, Arabidopsis thaliana
  CDS (1)..(1500)
atggcaacccgtcttctccgaacaaactttatccggcgatcttaccgtttacccgcttttagcccggtgggtcctcccaccgtgactgcttccaccgccgtcgtcccggagattctctcctttggacaacaagcaccggaaccacctcttcaccacccaaaacccaccgagcaatctcacgatggtctcgatctctccgatcaagcccgtcttttctcctctatcccaacctctgatctcctccgttccaccgccgtgttgcatgcggcggcgataggtcctatggtcgacctagggacgtgggtcatgagctctaaacttatggacgcttcggtgacgcgtggcatggttttagggcttgtgaaaagtacgttttatgaccatttttgcgccggtgaagatgccgacgcagccgctgagcgcgtgagaagcgtttatgaagctactggtcttaaagggatgcttgtctatggcgtcgaacacgccgatgacgctgtatcttgtgatgataacatgcaacaattcattcgaaccattgaagctgccaaatctttaccaacatctcactttagctcagtggttgtgaagataactgccatttgtccaattagtcttctgaaacgagtgagcgatctgctgcggtgggaatacaaaagtccgaacttcaaactctcatggaagctcaaatcgtttccggttttctccgaatcgagtcctctctaccacacaaactcagaaccggaaccgttaaccgcggaagaagaaagggagctcgaagcagctcatggaaggattcaagaaatctgtaggaaatgccaagagtccaatgtaccattgttgattgatgcggaagacacaatcctccaacccgcgatcgattacatggcttattcatcggcgatcatgttcaatgctgacaaagaccgaccaatcgtttacaacacgattcaggcgtacttgagagacgccggtgagagactgcatttggcagtacaaaatgctgagaaagagaatgttcctatggggttcaagttggtgagaggggcttacatgtctagcgaagctagcttggcggattccctgggttgcaagtcgccagtccacgacacaattcaggatactcactcttgttacaatgattgtatgacattcctgatggagaaagcatcaaacggttctggtttcggtgtcgttctcgcaacacataacgctgattcggggagacttgcgtcgaggaaagcgagtgacctcgggatcgataaacagaacgggaggatagagtttgcacagctatatggtatgtcagatgcattgtccttcgggttaaagagagcagggttcaatgttagcaagtacatgccgtttggacccgtcgcaaccgctataccgtatcttctccgacgcgcttatgagaaccggggaatgatggccaccggagctcatgaccgtcaactcatgaggatggaacttaagaggagattaatcgccgggattgcgtaa

SEQ ID NO: 5386 - protein, 499 aa, Arabidopsis thaliana
MATRLLRTNFIRRSYRLPAFSPVGPPTVTASTAVVPEILSFGQQAPEPPLHHPKPTEQSHDGLDLSDQARLFSSIPTSDLLRSTAVLHAAAIGPMVDLGTWVMSSKLMDASVTRGMVLGLVKSTFYDHFCAGEDADAAAERVRSVYEATGLKGMLVYGVEHADDAVSCDDNMQQFIRTIEAAKSLPTSHFSSVVVKITAICPISLLKRVSDLLRWEYKSPNFKLSWKLKSFPVFSESSPLYHTNSEPEPLTAEEERELEAAHGRIQEICRKCQESNVPLLIDAEDTILQPAIDYMAYSSAIMFNADKDRPIVYNTIQAYLRDAGERLHLAVQNAEKENVPMGFKLVRGAYMSSEASLADSLGCKSPVHDTIQDTHSCYNDCMTFLMEKASNGSGFGVVLATHNADSGRLASRKASDLGIDKQNGRIEFAQLYGMSDALSFGLKRAGFNVSKYMPFGPVATAIPYLLRRAYENRGMMATGAHDRQLMRMELKRRLIAGIA

SEQ ID NO: 5387 - DNA, 1482 bp, Arabidopsis thaliana
  CDS (1)..(1482)
atggcaaaccgtttcctccgaccaaacctcatccaccgtttctccaccgtgagtcccgtcggtcctccgaccaccatcatcccagaaatcctttcctttgaccaaccaaaaccagaagttgatctagatctctccgaccaagctcgactctttgcttctgtcccaatctccaccctcctccgctcaaccgcaattctccatgccacgtccataggccctatggtcgatcttggctcgtggctcatgagttccaagctcatggacacgaccgttacacgcgatctagtactccgtatcgtgaaaggaacgttttacgaccatttctgcgccggtgaagacgcggctgccgcagcaaggcgcgtgagtagcgtgtatgagtcgacgggacttaaaggtatgttagtgtacggcgtagaacacgctgaagacggtggcgcatgtgatgaaaacattcaaaaattcattgaaaccgtcgaagctgctaaaaccctaccttcgtctcacttaagctcagtggtggtcaagatcacagcgatttgtccaatgaatgtcctaaaacgggttagtgatttgcttcggtggcaatacaagaaccctaatttcaaacttccatggaaactcaattcatttccggttttctccggcttaagtcctctgtaccacacaacgtctgaaccggaaccattaaccgtagaggaagaacgagagcttgaaaaagctcatgaacgcctcaaatccgtgtgtcttagatgtcaagaatcgaacgtaccgttactaattgatgccgaagacaccattctccaaccagcaatcgattacatggcgtattggtcggcgattatgttcaattcggataaagatcgacctatagtttacaacacgattcaagcctacttgaaagatgctggagagagattacacttggctttacgagagtcagagaaaatgaatgttcctattgggtttaaattggtgagaggtgcttatatgtctagtgaagctaagttagcagattccttgggttacaagtcaccggttcacgacacaattcaaaatacacatgattgctacaatgactgtatgagtttccttatggagaaagcctcaaatggatcaggcattgcggtcattctagctacgcataacacagactcgggtaaactaggggcaagaaaagcaagtgagctagggatcaataaagaaaacgggaagatcgagtttgcgcagctttacgggatgtcggatgcgttatcttttggattgaaaagggccggtttcaatgtgagtaagtacatgccatacgggccggttgatactgcaattccataccttatccggcgggcatatgagaatcggggtatgatgtccacaggtgctttagaccgccaacttatgaggagcttaagagaagagttatggcttggtgaagacacaggagataaatgtgtttcattcatggaatatggcaaatatagattttaa

SEQ ID NO: 5388 - protein, 493 aa, Arabidopsis thaliana
MANRFLRPNLIHRFSTVSPVGPPTTIIPEILSFDQPKPEVDLDLSDQARLFASVPISTLLRSTAILHATSIGPMVDLGSWLMSSKLMDTTVTRDLVLRIVKGTFYDHFCAGEDAAAAARRVSSVYESTGLKGMLVYGVEHAEDGGACDENIQKFIETVEAAKTLPSSHLSSVVVKITAICPMNVLKRVSDLLRWQYKNPNFKLPWKLNSFPVFSGLSPLYHTTSEPEPLTVEEERELEKAHERLKSVCLRCQESNVPLLIDAEDTILQPAIDYMAYWSAIMFNSDKDRPIVYNTIQAYLKDAGERLHLALRESEKMNVPIGFKLVRGAYMSSEAKLADSLGYKSPVHDTIQNTHDCYNDCMSFLMEKASNGSGIAVILATHNTDSGKLGARKASELGINKENGKIEFAQLYGMSDALSFGLKRAGFNVSKYMPYGPVDTAIPYLIRRAYENRGMMSTGALDRQLMRSLREELWLGEDTGDKCVSFMEYGKYRF

SEQ ID NO: 5389 - DNA, 1437 bp, Emericella nidulans
  CDS (1)..(1437)
atgaaggccgcaactccacgtccttcagtgcgggcactctctagcgggcgatcttatcgcaccgccagattcgtcagccgaacaagcaacgcgaggtcgtcactcgctgccgataccaacagcttgctgcaacaggctcctccgtcacctaagaagcagctggcctcgccgctagcaaagctgcctctttcctccgttctccgctccttgctcattctctctgtttcctcctcctctatactgctaaagccatgcatctacacgctctcagctctagcgcatcccaagacggctctgctggacgtcgcaaagaacccgctattgaacctgcttgtgaaacacaccatctacaaacagttcaatgcgggcgagaacaagcttgaggtccaacgctccatcaatgcgatcaaggagctaggataccgcggcgtgctcttgggctatgcccgtgaagtcctagtgggggagtccaagacagacccgcgcgatgagcaggctagccggcaggagatccagacgtggctggacgggaccctccagaccgtggacatggcccaggagggtgactttgtagccttgaaattcacgggcatgggtatccaagcgctcgaatacctccagaaccaggcgccgccttcaccgtttatggacgaagcaatcaaacaggtctgcgatcttgcgatctcccggaacgtgcgactactggtagacgcggaggaacaggcggtccagccagggatcgaagagtgggcgacaatgtaccagaaatactgcaactctcgcacccctggccgcgccatcttctacaacacctaccaagcatacctgtgctctactccggccacactcgcgcgccatctcgagatctctcgcaaggaaggatacacgcttggagtcaagctggtccgcggagcatacttgaagaccgaaccccgccatctgatctgggccaagaaggaacagacagatgagtgctacgacgggattgtagaagcccttcttacccggcgatacaaccacatgctaaagcccgcttcggctgaacacaccaccgagcttccccccgtcagtgtgatcgtcgccacgcacaaccgggactctgtccgtaaggcccacgctctgcgtctcgaacaggcaagccggggagagaaatcagatgtcgagcttacgtacgctcagctccagggaatggcagatgagatcagctgcgagctcttgcagggcttccaaactgcaggccccgagaatactaaagttgctgaatcaccaaacgtgtacaaactgctcacttggggctcagtcaaagagtgcatgggtttcttgcttcggcgggcagtcgagaacacagaggccgttggacgcacgaagcagtcccaggaggctatgttttctgagctcaggcgaagagctcgtcgcgcttttggtctgcgttactga

SEQ ID NO: 5390 - protein, 478 aa, Emericella nidulans
MKAATPRPSVRALSSGRSYRTARFVSRTSNARSSLAADTNSLLQQAPPSPKKQLASPLAKLPLSSVLRSLLILSVSSSSILLKPCIYTLSALAHPKTALLDVAKNPLLNLLVKHTIYKQFNAGENKLEVQRSINAIKELGYRGVLLGYAREVLVGESKTDPRDEQASRQEIQTWLDGTLQTVDMAQEGDFVALKFTGMGIQALEYLQNQAPPSPFMDEAIKQVCDLAISRNVRLLVDAEEQAVQPGIEEWATMYQKYCNSRTPGRAIFYNTYQAYLCSTPATLARHLEISRKEGYTLGVKLVRGAYLKTEPRHLIWAKKEQTDECYDGIVEALLTRRYNHMLKPASAEHTTELPPVSVIVATHNRDSVRKAHALRLEQASRGEKSDVELTYAQLQGMADEISCELLQGFQTAGPENTKVAESPNVYKLLTWGSVKECMGFLLRRAVENTEAVGRTKQSQEAMFSELRRRARRAFGLRY

SEQ ID NO: 5391 - DNA, 1785 bp, Mus musculus
  CDS (1)..(1785)
atgcacgagctgcggtcggtggcaccacgcgtcgctgccctctcaaccaaaccgcaagcccaggaacagcctcccgcgagccctgaggctcttcggggatgtggggcggccaaggctgtgcggccgcctgtgccagccgtggacttcaccaacacgcaggaggcgtatcgcagccggcggagttgggagttggtgcgcaacctgctagtgctgcggctgtgtgcgtcgccggtgctgctagcgcaccacgagcagttgttccaagttgccaggaagcttctggggcaaaggatgttcgagagattgatgaagatgaccttctatggccattttgtggctggcgaggaccaggagtctatcaggcctctgatccggcacaacaaagcctttggtgttggctttatcctggactatggagtggaggaagatctgagccctgaggaggcggagcgcaaagagatggagtcatgcacttctgaagcagagagagatggcagtggagcaaataagagggagaagcagtatcaggtgcaccccgcctttggagaccgcagagatggtgtcatcagtgcccgcacctacttctatgccaatgaagccaagtgtgacaactacatggagaacttactgcagtgcatcaaggcctcaggtggagccagtgatggtggtttctcagccattaagctcactgcactggggagaccacagtttctgctgcagttctcagacgtgctgaccaggtggagacggttcttccatcaaatggctgcagagcagggacaggctgggcgtgctgctgtagacacaaagctggaggtggcggtgctccaggacagcatcgcaaagatgggcatcgcatccagggctgagattgaagggtggttcacgccagagacgctgggagtgtctggcaccgtggacttgctggactggaacagcctcattgacagcaggacccggctctccaggcacttggtggtccccaatgtgcagactggccagctggagcccctgctgtcacggttcactgaggaggaagagcagcagatgaaaaggatgctgcagaggatggatgtactggccaagaaagcaaaagaggcaggtgtgcgcctgatgattgatgctgagcagagctacttccaaccagccatcagccgcctgaccctggagatgcagcgcaggttcaatgtggataagccgttcatcttcaacacattccagtgctacctcaaggatgcctatgacaatgtgaccttggatatggaactggctcgccgtgagggctggtgttttggggccaagctggtacgtggtgcatacatggcccaagagcgtgtcagggcagcagagatcggttatgaggaccccatcaaccctacatatgaagccaccaatgctatgtaccacaggtgccttaactatgttctggaggagctgaagcacagcaccaaggcagaggtgatggtggcttcccacaacgaggacaccgtgcacttcacgttgtgcaggatgaaggagataggcctgcatcctgctgatggtcaggtgtgcttcggacagctgctggggatgtgtgaccaaatcagcttcccactaggccaggcaggctttcctgtgtacaagtatgtgccctatggccctgtgatggaggtactcccttacctgtcccgccgtgccctggagaacagcagcatcatgaagggtgctcagcgagagaggcagctgctatggcaggagctccgcaggcggctgcgcactggcagcctcttccaccatccggcctag

SEQ ID NO: 5392 - protein, 594 aa, Mus musculus
MHELRSVAPRVAALSTKPQAQEQPPASPEALRGCGAAKAVRPPVPAVDFTNTQEAYRSRRSWELVRNLLVLRLCASPVLLAHHEQLFQVARKLLGQRMFERLMKMTFYGHFVAGEDQESIRPLIRHNKAFGVGFILDYGVEEDLSPEEAERKEMESCTSEAERDGSGANKREKQYQVHPAFGDRRDGVISARTYFYANEAKCDNYMENLLQCIKASGGASDGGFSAIKLTALGRPQFLLQFSDVLTRWRRFFHQMAAEQGQAGRAAVDTKLEVAVLQDSIAKMGIASRAEIEGWFTPETLGVSGTVDLLDWNSLIDSRTRLSRHLVVPNVQTGQLEPLLSRFTEEEEQQMKRMLQRMDVLAKKAKEAGVRLMIDAEQSYFQPAISRLTLEMQRRFNVDKPFIFNTFQCYLKDAYDNVTLDMELARREGWCFGAKLVRGAYMAQERVRAAEIGYEDPINPTYEATNAMYHRCLNYVLEELKHSTKAEVMVASHNEDTVHFTLCRMKEIGLHPADGQVCFGQLLGMCDQISFPLGQAGFPVYKYVPYGPVMEVLPYLSRRALENSSIMKGAQRERQLLWQELRRRLRTGSLFHHPA

SEQ ID NO: 5393 - DNA, 1398 bp, Mus musculus
  CDS (1)..(1398)
atgtgtggtggtaaccaggcacttgcaatgatctggacgcgtctgccgctgtatggcccctccaagccctctacaggtggctggcagcccctgcgctttgatggtggggccttccatgtcaagggaaccgcagaactggcacgggctttgctagtgcttcgcctatgcgcctggccccctttggtcactcatggactagcgtttcaggcctggtctcagcgactcctgggatcccggctctcaggcgcacttcttcgagcatccatctacgggcagtttgtggccggggagacagcagaggaagtgaggaactgtgtcgggcagctgcaggccctgggactccagcccctgttggcagtacccaccgaggaggaaccagactccactgccaagaccagtgaggtctggtatgaggagaaccttagcgccatgctgcgctgtgtggacttatcccgagccctcgtggacgcccacggcccagccaggaacagcctcatgcagctgaaggtgaccgcgctagccagcactcggctttgtaaagagctgtcggcttggatccaaagacccagaggctcctcggagctgagccctgagaggctggcagaagccatggactcgggtcggaacctccagctatcctgcctcagcacagaacagaatcagcacctgcaggcctccctcagccgcttgcaccgagtggcacagcacgcccgggcgaagtgtgtgcggctgctggtggacgctgaatatactttcattaaccctgcactgtccctgctggtggctgccctggctgtacgctggaacagccctgaggaaggtggtccgtgggtgtggaacacttaccaggcctatctaaaggacactcaccaacggctggagcaggacgccgaggcagcacacaaggctggcctggcatttggggtgaagttggtgcgaggtgcctatctggacaaggagagatccatgacacagctccaagggaaggaagactgtacccagcctgactatgaggccactagtcggagttacagccactgtctagagctgatgctgcgctgcgtgtcgaaccacggtcccccgtgtcacctcatggtggcttcccacaatgaagaatccgttcgccaggcaactaagcgcatgtgggagctgggcattcctctggatgggcctgtctgttttggacaacttctgggcatgtgtgaccatgtctccctggcattagggcaggctggatatatggtgtacaagtctattccctatggctgcctgaaggaggtgattccctacctgatccgaagagcccaggagaacaggagtgtgctgcagggtgcccgcagggagcaggcactactcagccaggaactgtggcggagactgctgggaaggacggcctaa

SEQ ID NO: 5394 - protein, 465 aa, Mus musculus
MCGGNQALAMIWTRLPLYGPSKPSTGGWQPLRFDGGAFHVKGTAELARALLVLRLCAWPPLVTHGLAFQAWSQRLLGSRLSGALLRASIYGQFVAGETAEEVRNCVGQLQALGLQPLLAVPTEEEPDSTAKTSEVWYEENLSAMLRCVDLSRALVDAHGPARNSLMQLKVTALASTRLCKELSAWIQRPRGSSELSPERLAEAMDSGRNLQLSCLSTEQNQHLQASLSRLHRVAQHARAKCVRLLVDAEYTFINPALSLLVAALAVRWNSPEEGGPWVWNTYQAYLKDTHQRLEQDAEAAHKAGLAFGVKLVRGAYLDKERSMTQLQGKEDCTQPDYEATSRSYSHCLELMLRCVSNHGPPCHLMVASHNEESVRQATKRMWELGIPLDGPVCFGQLLGMCDHVSLALGQAGYMVYKSIPYGCLKEVIPYLIRRAQENRSVLQGARREQALLSQELWRRLLGRTA

SEQ ID NO: 5395 - DNA, 1803 bp, Homo sapiens
  CDS (1)..(1803)
atggctctgaggcgcgccctgcccgcgctgcgcccctgcattccccgcttcgtccagctgtccacggcgccggcctcccgcgagcagcccgcagcgggcccagcggccgtgccaggaggtgggtcggccacggcagtgcggccgccggtgcccgccgtggacttcggcaacgcgcaggaggcgtaccgcagccggcgaacctgggagctggcgcggagcctgctggtgctgcgcttgtgcgcctggcccgcgctgctggcgcgccacgagcagctgctgtatgtttccaggaaacttctaggacagaggctattcaacaagctcatgaagatgaccttctatgggcattttgtagccggggaggaccaggagtccatccagcccctgcttcggcactacagggccttcggtgtcagcgccatcctggactatggagtggaggaggacctgagccccgaggaggcagagcacaaggagatggagtcctgcacctcagctgcggagagggatggcagtggcacgaataagcgggacaagcaataccaggcccaccgggccttcggggaccgcaggaatggtgtcatcagtgcccgcacctacttctacgccaatgaggccaagtgcgacagccacatggagacattcttgcgctgcatcgaagcctcaggtagagtcagcgatgacggcttcatagccattaagctcacagcactggggagaccccagtttctgctgcagttctcagaggtgctggccaagtggaggtgcttctttcaccaaatggctgtggagcaagggcaggcgggcctggctgccatggacaccaagctggaggtggcggtgctgcaggaaagtgtcgcaaagttgggcatcgcatccagggctgagattgaggactggttcacggcagagaccctgggagtgtctggcaccatggacctgctggactggagcagcctcatcgacagcaggaccaagctgtccaagcacctggtagtccccaacgcacagacaggacagctggagcccctgctgtccgggttcactgaggaggaggagctacagatgaccaggatgctacagcggatggatgtcctggccaagaaagccacagagatgggcgtgcggctgatggtggatgccgagcagacctacttccagccggccatcagccgcctgacgctggagatgcagcggaagttcaatgtggagaagccgctcatcttcaacacataccagtgctacctcaaggatgcctatgacaatgtgaccctggacgtggagctggctcgccgtgagggctggtgttttggggccaagctggtgcggggcgcatacctggcccaggagcgagcccgtgcggcagagatcggctatgaggaccccatcaaccccacgtacgaggccaccaacgccatgtaccacaggtgcctggactacgtgttggaggagctgaagcacaacgccaaggccaaggtgatggtggcctcccacaatgaggacacagtgcgcttcgcactgcgcaggatggaggagctgggcctgcatcctgctgaccaccaggtgtactttggacagctgctaggcatgtgtgaccagatcagcttcccgctgggccaggccggctaccccgtgtacaagtacgtgccctatggccccgtgatggaggtgctgccctacttgtcccgccgtgccctggagaacagcagcctcatgaagggcacccatcgggagcggcagttgctgtggctggagctcttgaggcggctccgaactggcaacctcttccatcgccctgcctag

SEQ ID NO: 5396 - protein, 600 aa, Homo sapiens [sequence omitted]

SEQ ID NO: 5397 - DNA, 1732 bp, Arabidopsis thaliana
  CDS (1)..(1500)
atggcaacccgtcttctccgaacaaactttatccggcgatcttaccgtttacccgcttttagcccggtgggtcctcccaccgtgactgcttccaccgccgtcgtcccggagattctctcctttggacaacaagcaccggaaccacctcttcaccacccaaaacccaccgagcaatctcacgatggtctcgatctctccgatcaagcccgtcttttctcctctatcccaacctctgatctcctccgttccaccgccgtgttgcatgcggcggcgataggtcctatggtcgacctagggacgtgggtcatgagctctaaacttatggacgcttcggtgacgcgtggcatggttttagggcttgtgaaaagtacgttttatgaccatttttgcgccggtgaagatgccgacgcagccgctgagcgcgtgagaagcgtttatgaagctactggtcttaaagggatgcttgtctatggcgtcgaacacgccgatgacgctgtatcttgtgatgataacatgcaacaattcattcgaaccattgaagctgccaaatctttaccaacatctcactttagctcagtggttgtgaagataactgccatttgtccaattagtcttctgaaacgagtgagcgatctgctgcggtgggaatacaaaagtccgaacttcaaactctcatggaagctcaaatcgtttccggttttctccgaatcgagtcctctctaccacacaaactcagaaccggaaccgttaaccgcggaagaagaaagggagctcgaagcagctcatggaaggattcaagaaatctgtaggaaatgccaagagtccaatgtaccattgttgattgatgcggaagacacaatcctccaacccgcgatcgattacatggcttattcatcggcgatcatgttcaatgctgacaaagaccgaccaatcgtttacaacacgattcaggcgtacttgagagacgccggtgagagactgcatttggcagtacaaaatgctgagaaagagaatgttcctatggggttcaagttggtgagaggggcttacatgtctagcgaagctagcttggcggattccctgggttgcaagtcgccagtccacgacacaattcaggatactcactcttgttacaatgattgtatgacattcctgatggagaaagcatcaaacggttctggtttcggtgtcgttctcgcaacacataacgctgattcggggagacttgcgtcgaggaaagcgagtgacctcgggatcgataaacagaacgggaagatagagtttgcacagctatatggtatgtcagatgcattgtccttcgggttaaagagagcagggttcaatgttagcaagtacatgccgtttggacccgtcgcaaccgctataccgtatcttctccgacgcgcttatgagaaccggggaatgatggccaccggagctcatgaccgtcaactcatgaggatggaacttaagaggagattaatcgccgggattgcgtaaagagagagtatggagccattaaatgaaattgggaaatgtagatgaataaatttcttctatgtagtttaagaaattgaaaacaaaaaattataatataagaaatggagtaggtaagaacatttcctgtggctaaatatttttcatgagggactatgtttttactatcaatatatcattcacaaatgtatattcaccttatcaataaaaatgctttttacttttttatatattt

SEQ ID NO: 5398 - protein, 499 aa, Arabidopsis thaliana
MATRLLRTNFIRRSYRLPAFSPVGPPTVTASTAVVPEILSFGQQAPEPPLHHPKPTEQSHDGLDLSDQARLFSSIPTSDLLRSTAVLHAAAIGPMVDLGTWVMSSKLMDASVTRGMVLGLVKSTFYDHFCAGEDADAAAERVRSVYEATGLKGMLVYGVEHADDAVSCDDNMQQFIRTIEAAKSLPTSHFSSVVVKITAICPISLLKRVSDLLRWEYKSPNFKLSWKLKSFPVFSESSPLYHTNSEPEPLTAEEERELEAAHGRIQEICRKCQESNVPLLIDAEDTILQPAIDYMAYSSAIMFNADKDRPIVYNTIQAYLRDAGERLHLAVQNAEKENVPMGFKLVRGAYMSSEASLADSLGCKSPVHDTIQDTHSCYNDCMTFLMEKASNGSGFGVVLATHNADSGRLASRKASDLGIDKQNGKIEFAQLYGMSDALSFGLKRAGFNVSKYMPFGPVATAIPYLLRRAYENRGMMATGAHDRQLMRMELKRRLIAGIA

SEQ ID NO: 5399 - DNA, 2046 bp, Drosophila melanogaster
  CDS (1)..(2046)
atggctctactccgttcgctgagcgcccaacgaacagccatcagtttggtctacggccgtaatagcagcaagtcgagcaattccgtggccgtcgccgcctgccggagtttccatcagcgcggcagcgggagcaccagcatcgccggagaaggagcagcatcggagtccacgagaggagtcaatggagcgcgcttcctgcacagcggcgaccggccgctgcaggcctccactctggtccaaccggaggtggtctccagcgagacggtgaagcgatcgatgaagcaggagtcgtcccaggaaaagaacccctcgcccgctggctcgccgcagagggatcccctggacgtgagctttaatgatccgattgctgctttcaagagcaagaccactggagagctaatacgcgcctatctcgtctacatgatatgttccagcgagaagctggtcgagcacaacatgacgctgatgaaactggcgcgcaacctgctcggccagaagctcttcgtcctgctgatgaagtccagcttctacggacactttgtggccggcgagaatcgtcacacgatcgtgcccgccctagagaggctaagatcctttggcgttaagccgattctcgattattccgttgaggaggatatcacccaggaggaggccgagaaacgtgaagttgaatcttccgtctccagtgcaggcgacaaaaaggaggagggcagcatgccgcagtaccatgtggacaagtcctttgcggatcggcgctacaaggtcagcagtgctcgcacctacttctacttgaacgaggccacctgcgagcggaacatggagatcttcatcaagtgtctggaggctgtttcggatgatgatcgcaaggcgccccgggcagtggccacgggcgccacctttggaactggcatcaccgccattaaactcaccgccctgggccgtccacaattgctgctgcaactgtccgaggtaatcatgcgcacacgcaagtacatggaggatatggtgggcggtcagggcaatgtgctgactcaccacaagaccatcaaggatctcgaaaagtattacgccacgctgggcgacaataaggacgtcaaggagttcctgaacaatgtaacgtccgataaggagggaattttgcatttgttcccctggtcgggcattgttgacgaggactcgcagctgagcgacacgttccgcgttcccgatccccaaaccggacagatgcgtcgactgatctcacaaataccgcccaaggaggaggagatgttcaggaacatgatccgtcgtctcaacacgattgtaaaggctgctgcggacttggatgtgcgtatcatggtggatgcggagcagacttacttccagccggccatctcccgtatcaccctggaaatgatgcgcaagtacaacaaggacaaggccattgtctttaatacgtaccagtgctatctgcgcgagacgttccgcgaggtgaacaccgatctggagcaggccaagcgccagaacttctacttcggcgccaagctggtgcgcggtgcctatatggaccaggagcgggaccgtgccaagtcgctgggctacccggatccggtaaatcccacgttcgaggccaccacggacatgtatcacaggacgttgtcggagtgcttgcgacgcattaagctgatgaaggactgtgatgacgatgccaggaagattggtattatggtggcctcgcacaacgaagacaccgtacgatttgccatccagcagatgaaggagatcggcatctcaccggaggacaaggtgatctgcttcggccaactgctgggcatgtgcgactacattacctttccactgggtcaagcgggatactcggcgtacaagtacataccatatggcccagtcgaagaggtgctgccctacttgtctcgtcgtgcccaggagaacaagggtgtgctcaagaagatcaagaaggaaaaacgcctgctgctctccgagattcggcgccgtctgatgcgtggccagttgttctacaagcccaagggcaattacgtgcccatctaa

SEQ ID NO: 5400 - protein, 681 aa, Drosophila melanogaster
MALLRSLSAQRTAISLVYGRNSSKSSNSVAVAACRSFHQRGSGSTSIAGEGAASESTRGVNGARFLHSGDRPLQASTLVQPEVVSSETVKRSMKQESSQEKNPSPAGSPQRDPLDVSFNDPIAAFKSKTTGELIRAYLVYMICSSEKLVEHNMTLMKLARNLLGQKLFVLLMKSSFYGHFVAGENRHTIVPALERLRSFGVKPILDYSVEEDITQEEAEKREVESSVSSAGDKKEEGSMPQYHVDKSFADRRYKVSSARTYFYLNEATCERNMEIFIKCLEAVSDDDRKAPRAVATGATFGTGITAIKLTALGRPQLLLQLSEVIMRTRKYMEDMVGGQGNVLTHHKTIKDLEKYYATLGDNKDVKEFLNNVTSDKEGILHLFPWSGIVDEDSQLSDTFRVPDPQTGQMRRLISQIPPKEEEMFRNMIRRLNTIVKAAADLDVRIMVDAEQTYFQPAISRITLEMMRKYNKDKAIVFNTYQCYLRETFREVNTDLEQAKRQNFYFGAKLVRGAYMDQERDRAKSLGYPDPVNPTFEATTDMYHRTLSECLRRIKLMKDCDDDARKIGIMVASHNEDTVRFAIQQMKEIGISPEDKVICFGQLLGMCDYITFPLGQAGYSAYKYIPYGPVEEVLPYLSRRAQENKGVLKKIKKEKRLLLSEIRRRLMRGQLFYKPKGNYVPI

SEQ ID NO: 5401 - DNA, 1494 bp, Mus musculus
  CDS (1)..(1494)
  misc_feature (1209)..(1209): k is g or t
atgttcgagagattgatgaagatgaccttctatggccattttgtggctggcgaagaccaggagtctatcaggcctctgatccggcacaacaaagcctttggtgttggctttatcctggactatggagtggaggaagatctgagccctgaggaggcggagcgcaaagagatggagtcatgcacttctgaagcagagagagatggcagtggagcaaataagagggagaagcagtatcaggtgcaccccgcctttggagaccgcagagatggtgtcatcagtgcccgcacctacttctatgccaatgaagccaagtgtgacaactacatggagaacttactgcagtgcatcaaggcctcaggtggagccagtgatggtggtttctcagccattaagctcactgcactggggagaccacagtttctgctgcagttctcagacgtgctgaccaggtggagacggttcttccatcaaatggctgcagagcagggacaggctgggcgtgctgctgtagacacaaagctggaggtggcggtgctccaggacagcatcgcaaagatgggcatcgcatccagggctgagattgaagggtggttcacgccagagacgctgggagtgtctggcaccgtggacttgctggactggaacagcctcattgacagcaggacccggctctccaggcacttggtggtccccaatgtgcagactggccagctggagcccctgctgtcacggttcactgaggaggaagagcagcagatgaaaaggatgctgcagaggatggatgtactggccaagaaagcaaaagaagcaggtgtgcgcctgatgattgatgctgagcagagctacttccaaccagccatcagccgcctgaccctggagatgcagcgcaggttcaatgtggataagccgttcatcttcaacacattccagtgctacctcaaggatgcctatgacaatgtgaccttggatatggaactggctcgccgtgagggctggtgttccggggccaagctggtacgtcgtgcatacatggcccaagagcgtgtcagggcagcagagatcggttatgaagaccccatcaaccctacatatgaagccaccaatgctatgtaccacaggtgccttaactatgttctggaggagctgaagcacagcaccaaggcagaagtgatggtggcttcccacaacgaggacaccgtgcacttcackttgtgcaggatgaaggagataggcctgcatcctgctgatggtcaggtgtgcttcggacagctgctggggatgtgtgaccaaatcagcttcccactaggccaggcaggctttcctgtgtacaagtatgtgccctatggccctgtgatggaggtactcccttacctgtcccgccgtgccctggagaacagcagcatcatgaagggtgctcagcgagagaggcagctgctatggcaggagctccgcaggcggctgcgcactggcagcctcttccaccatccggcctag

SEQ ID NO: 5402 - protein, 497 aa, Mus musculus
MFERLMKMTFYGHFVAGEDQESIRPLIRHNKAFGVGFILDYGVEEDLSPEEAERKEMESCTSEAERDGSGANKREKQYQVHPAFGDRRDGVISARTYFYANEAKCDNYMENLLQCIKASGGASDGGFSAIKLTALGRPQFLLQFSDVLTRWRRFFHQMAAEQGQAGRAAVDTKLEVAVLQDSIAKMGIASRAEIEGWFTPETLGVSGTVDLLDWNSLIDSRTRLSRHLVVPNVQTGQLEPLLSRFTEEEEQQMKRMLQRMDVLAKKAKEAGVRLMIDAEQSYFQPAISRLTLEMQRRFNVDKPFIFNTFQCYLKDAYDNVTLDMELARREGWCSGAKLVRRAYMAQERVRAAEIGYEDPINPTYEATNAMYHRCLNYVLEELKHSTKAEVMVASHNEDTVHFTLCRMKEIGLHPADGQVCFGQLLGMCDQISFPLGQAGFPVYKYVPYGPVMEVLPYLSRRALENSSIMKGAQRERQLLWQELRRRLRTGSLFHHPA

SEQ ID NO: 5403 - DNA, 1479 bp, Schizosaccharomyces pombe
  CDS (1)..(1479)
atgcgtgcctttcgccttgcttccggtgttttgagaaatcgaaaagtcattttaggtattggtgctggttcgttaataacagctggcaatattaagattcgcaatgacagcaaattcgatgcgttttttgccaaaggatttcctgatgaattgcagcaccgttctctcttcagcgtcctccgtagtgcctttgtctatgaaatttgttctcgagcttggctagtgaagctatcgctaggtgcgatgagtttatgcgacgtcttccatctatcatttttatacaatccgttttgccgctatacattttacaaacatttctgtggtggcgagacgcctcaggctgtcatggctacgatggatacgttgcaagcagcaggtattacctcttgtttgaattactctcgtgaagttgacttggacggcgatatggatgtaaataagatcgcttctcaaggggtagtacctcctcaggttcctgttccttctgagaagaaccagaaagtgttacgacaaattgcggacaaggcttttgaatcaaacatgcacatcattgatatggcaacctataagcctggaactgtttgcgctgttaagcttaccccattcattaatcctctggttttacaacgatacaactccattttgaaccagtatccggtagaatcagcgtgtaactatttggagcatctgaagtctcctgaattatcaacttatgaagttagcgaattaaagaaattttgggagtatgccgacaaactgtgtcaatttgcaaaagagaaacaaatcccactctttattgatgctgagcaaacttatttccaagattgcatgcatgccgtcacagttgacttaatgagaaaatacaataaggaggttgcaatcgttcataatacttatcagttgtatttgaagaaatctagaaaaattatggacgaccacatcaagaaatgtgttgctgagggctggctaatgggcgcaaaactcgttcgtggtgcttatttgaactcggaaccaagattcttaattcacgacacaaaagccgagacagacaaagattttgattcagctgtggaagctataattgccgcagctgccaaatttgctccaggtgaccctgcctctgcttctgacccgattgcctctcgtaaaggaaaatggggaattatggttgctagtcacaataagaaaacaatgtttgaatcggtgaatttggcagaaaccaaaaaagttgactttacgaaaacctctttctatttggctcaattgttgggtatggctgatgatattacctatgctttggcttattctcagcgcaatcaacagcccaatttttgcattgtaaaatatgtttcttgtggacctatcagtgaagtccttccttacttagtacgcagggcacgtgagaatattgatgctcttgatagatgtaaagaggaacgagcctactaccgacaagctcttcgtcgtcgtatattttaa

SEQ ID NO: 5404 - protein, 492 aa, Schizosaccharomyces pombe
MRAFRLASGVLRNRKVILGIGAGSLITAGNIKIRNDSKFDAFFAKGFPDELQHRSLFSVLRSAFVYEICSRAWLVKLSLGAMSLCDVFHLSFLYNPFCRYTFYKHFCGGETPQAVMATMDTLQAAGITSCLNYSREVDLDGDMDVNKIASQGVVPPQVPVPSEKNQKVLRQIADKAFESNMHIIDMATYKPGTVCAVKLTPFINPLVLQRYNSILNQYPVESACNYLEHLKSPELSTYEVSELKKFWEYADKLCQFAKEKQIPLFIDAEQTYFQDCMHAVTVDLMRKYNKEVAIVHNTYQLYLKKSRKIMDDHIKKCVAEGWLMGAKLVRGAYLNSEPRFLIHDTKAETDKDFDSAVEAIIAAAAKFAPGDPASASDPIASRKGKWGIMVASHNKKTMFESVNLAETKKVDFTKTSFYLAQLLGMADDITYALAYSQRNQQPNFCIVKYVSCGPISEVLPYLVRRARENIDALDRCKEERAYYRQALRRRIF

SEQ ID NO: 5405 - DNA, 25 bp, Artificial sequence
  primer
atgatagcttccaaaagctccttat

SEQ ID NO: 5406 - DNA, 25 bp, Artificial sequence
  primer
tcataggcctactctttttggaatc

SEQ ID NO: 5407 - protein, 707 aa, Artificial sequence
  consensus sequence
  Variant (2)..(25): Xaa in position 2 to 25 is any amino acid
  Variant (26)..(28): Xaa in position 26 to 28 is any or no amino acid
  Variant (30)..(121): Xaa in position 30 to 121 is any amino acid
  Variant (122)..(399): Xaa in position 122 to 399 is any or no amino acid
  Variant (401)..(425): Xaa in position 401 to 425 is any amino acid
  Variant (426)..(494): Xaa in position 426 to 494 is any or no amino acid
  Variant (496)..(496): Xaa in position 496 is any amino acid
  Variant (499)..(508): Xaa in position 499 to 508 is any amino acid
  Variant (509)..(560): Xaa in position 509 to 560 is any or no amino acid
  Variant (562)..(562): Xaa in position 562 is any amino acid
  Variant (564)..(565): Xaa in position 564 to 565 is any amino acid
  Variant (567)..(571): Xaa in position 567 to 571 is any amino acid
  Variant (573)..(580): Xaa in position 573 to 580 is any amino acid
  Variant (581)..(646): Xaa in position 581 to 646 is any or no amino acid
  Variant (648)..(651): Xaa in position 648 to 651 is any amino acid
  Variant (653)..(659): Xaa in position 653 to 659 is any amino acid
  Variant (661)..(661): Xaa in position 661 is any amino acid
  Variant (662)..(662): Xaa in position 662 is any or no amino acid
  Variant (664)..(666): Xaa in position 664 to 666 is any amino acid
  Variant (668)..(685): Xaa in position 668 to 685 is any amino acid
  Variant (686)..(706): Xaa in position 686 to 706 is any or no amino acid
GXXXXXXXXXXXXXXXXXXXXXXXXXXXEXXXXXXXXXXXXXXXXXXXXXXXXXXXXXXXXXXXXXXXXXXXXXXXXXXXXXXXXXXXXXXXXXXXXXXXXXXXXXXXXXXXXXXXXXXXXXXXXXXXXXXXXXXXXXXXXXXXXXXXXXXXXXXXXXXXXXXXXXXXXXXXXXXXXXXXXXXXXXXXXXXXXXXXXXXXXXXXXXXXXXXXXXXXXXXXXXXXXXXXXXXXXXXXXXXXXXXXXXXXXXXXXXXXXXXXXXXXXXXXXXXXXXXXXXXXXXXXXXXXXXXXXXXXXXXXXXXXXXXXXXXXXXXXXXXXXXXXXXXXXXXXXXXXXXXXXXXXXXXXXXXXXXXXXXXXXXXXXXXXXXXXXXXXXXXXXXXXXXXXXXXXXXXXXXXGXXXXXXXXXXXXXXXXXXXXXXXXXXXXXXXXXXXXXXXXXXXXXXXXXXXXXXXXXXXXXXXXXXXXXXXXXXXXXXXXXXXXXXXXXXXXXXAXHNXXXXXXXXXXXXXXXXXXXXXXXXXXXXXXXXXXXXXXXXXXXXXXXXXXXXXXXXXXXXXXLXGXXDXXXXXLXXXXXXXXXXXXXXXXXXXXXXXXXXXXXXXXXXXXXXXXXXXXXXXXXXXXXXXXXXXXXXXXXXXXXXXXXXKXXXXGXXXXXXXYXXRXXXEXXXXXXXXXXXXXXXXXXXXXXXXXXXXXXXXXXXXXXXR

SEQ ID NO: 5408 - DNA, 1827 bp, Saccharomyces cerevisiae
  CDS (1)..(1827)
atgcacactaactcacccttacgagcggataaccaagatctagaaactcaaccactgttgagaccaaacactgaagaaagccaactcctcaatgatgaagtgagaatcaacgttgcaaatgagacccttattaaatctcgttggcggagtataaagtgcttaattatatatctgctaggtattgttttattaagtttctttggcgtcagcatagtgcagtatattaggggacatgtgccgcccacagatgtgatagaaaagaatctagttcaagtaacaaatttcaaactggtggagtttcagcttgatggttggaaagataatatgggctctgacctgaacaatgatacaggtaagtatttgcaggtgtctatacactctcaaatttggttcgattatgacaaatggccaggaacggaaaatgactcggacgccagaagccaacgtgactggatacggtacatcaatgaaaaagttcttaaaaccatttgtatagatctgaataacgtgaccacattcgatggagatctagtgttcaagaataaactgggagatgttgttggcatggaacccatttgttttaatttggctcaccgacagattaataacctacagttcaaaattttagttaaaccgtctatttggaaaatcgtaaaagttttgaaaaaattttggaatagggattttgaatccttaaatataaaatcgaatttagatatgactatcttcaagagaaaatttggcacgaggtttaatttattgaaacttaatgacgaaatcttagattggaaagatattattgattgggaaaaaatatcggcaacgccccttcggatgattcaaaatatgatcgatggaatatctcttcaaggatttacattgcgggactccagttctgatggatttcatgccgatatgagactgaatccgatcacgattcttggaggggtggactggcttcaccttccgccaggcacgtcaatccctttcatcaattgggaaatcaagctaccggactgtaacggtgagcctgctatcgcaattccaaccttgtcttgctttaacgaaccgattaatctgcaccacgacaaggataatatcgtcgtctgtttacaaaatgaaattgaaggtcctctgcccgatgaactactataccaagaatgtcctcaaaatagtcttacaccaatgagccaaatagtgaatgcggtcctgaaccagaacgagactgttacgttcgcagcaagaggccatgtccttgaagatggtatagataataactcattgattccagcagacatgctggaggatattttccaagaagcatcgtttattcccattactaccaatgctacgtttaactccagtgaattgattcaagagtttcagatcaacgatcttcagctacggtgggcagcgcgcaaaaagctcagtcttgtggggacatttttaggattctttgatctatccttctacgagacgcaccagcaagaccgagttcgcatcgataccattcggggacagatcgatctgtaccataacgacatcaatttcttaaacttacccatgaagcaatggatcaactcttcatcgcacattctgcacgatgaggacacaggaaatacgcagatgaagcttcaatttgatctagaaaatgacgacatggaagtcgtcaatagcttggaactaacacgaaccctgaacgaaatactattccagggttttacagttattcactttaatgcgacgatagatgcgtcacttacgacggcattgggcccgtgggttctcaccgggttagccggagagggtgacactttggtcacgtga

SEQ ID NO: 5409 - protein, 608 aa, Saccharomyces cerevisiae
MHTNSPLRADNQDLETQPLLRPNTEESQLLNDEVRINVANETLIKSRWRSIKCLIIYLLGIVLLSFFGVSIVQYIRGHVPPTDVIEKNLVQVTNFKLVEFQLDGWKDNMGSDLNNDTGKYLQVSIHSQIWFDYDKWPGTENDSDARSQRDWIRYINEKVLKTICIDLNNVTTFDGDLVFKNKLGDVVGMEPICFNLAHRQINNLQFKILVKPSIWKIVKVLKKFWNRDFESLNIKSNLDMTIFKRKFGTRFNLLKLNDEILDWKDIIDWEKISATPLRMIQNMIDGISLQGFTLRDSSSDGFHADMRLNPITILGGVDWLHLPPGTSIPFINWEIKLPDCNGEPAIAIPTLSCFNEPINLHHDKDNIVVCLQNEIEGPLPDELLYQECPQNSLTPMSQIVNAVLNQNETVTFAARGHVLEDGIDNNSLIPADMLEDIFQEASFIPITTNATFNSSELIQEFQINDLQLRWAARKKLSLVGTFLGFFDLSFYETHQQDRVRIDTIRGQIDLYHNDINFLNLPMKQWINSSSHILHDEDTGNTQMKLQFDLENDDMEVVNSLELTRTLNEILFQGFTVIHFNATIDASLTTALGPWVLTGLAGEGDTLVT

SEQ ID NO: 5410 - DNA, 1875 bp, Eremothecium gossypii
  CDS (1)..(1875)
atgagtgaaagggagcacgcgcgggcgattgaggaagcggacgagcgggcgcccatgttggcggagcaggccgcgggcggcactgcggggtacgggacagggaggacatcgcaggaaacgctgcccgaactgccggccagccagctcagcataccgcagagatttgcgctttttctgttgtttgttgtgcttctgccgttgagctacgtttacaccacgatgccggcgcccgatgtgctccagaaatatgtggcggacatcacggagttggaggtgcgccgggtcagcttccagggctgggctgaggcgcctcctgggatggcgggcgcggcgcagggcaacagcgggaagtggatggcgttcggtgtaaatgtgtcgatggcggtggactacgagaaggagacgacggtgccggtgactgcgaaccaacgctctcttttgcgcctcatggggaacgacatactcggggatatctgcgtgagcctcaacgaaggagcggtgtacacgcacaacgctgccggggaggtggtgccgcttgtgacggtggcggatagacagcccgtgtgcgtgagcctacttgacggcgaggtgaccgacattctgacgcaggtctacgtacgcccgaacctcaccaacatggtgtggctcgtgggcgagctccagagaaaccgcaaatggcagccacagttgttgtcgaatctttcggtgtccactcgcaagctgttctttgaagatctctacttgccagtgcgggatttccatgttgctggcacctcggttgatgaatacgttgactggcaaaaactgaggcgaatgcttaggcatggcggtgctatttttgaaaccataaccagaaactcgaccattttggaattggcggtgacggatgtgcccaaggacagtgcgctcaggttgcaagccagtgtgcgcatccccattgtgggccaggggatggaccagtttattttgcccgaggacatagtgtttcctgccaccgagtggatggttgcgctaccgggctgtgacggcaacggcaccattgggttacccaatgcgactatagtggtagatcctgtaaaggcgctcaagtgggagcagcagtccagcattgatataagtatgaccgctgtggttgcgggacggcttcctgatccattgctctacgaggtttgtgaatacgataatggcaacgtagtaacccccatgagcctcatttttagaaagatgtttgaccctgcgcagctggttgaattgacagtgaagggtaggcgtgcgcttgaaagtgacgatttggaaactattccagtggaggttgttactgagttggtcgcagctacaaaattgccgctagccttcaacttcaccgtctcgcagtccgatatgatcgaagacctgagtatacaacgtctaaaactacgcttgcggaggaaccggcatggcgaaaaggttcttcacgtcgcagggaaagtgcgaattcttttcaacccgccattctataatgttactgaggattcatcagtcagcattaccgctgtcaagggcgtaatagatctctaccatcataatgtccgttttgcgtctaccccattgcggacttggctgccctgtgatacggcgatcgatggtggcagattggaagttagtctagagctagatcaggatgaggtagatataatagatcctgttcagctttctgtttgtctcaatgagatcatattcaatggacagacagagatatacattgatggcaaggtcgatattctgactaaaacagtattgggcgaattagtgctattcgatatgccagcccacggtaagacggttgtgaagaaggatgatgatgtgctcctcataaatcagctggatactgtctag

SEQ ID NO: 5411 - protein, 624 aa, Eremothecium gossypii
MSEREHARAIEEADERAPMLAEQAAGGTAGYGTGRTSQETLPELPASQLSIPQRFALFLLFVVLLPLSYVYTTMPAPDVLQKYVADITELEVRRVSFQGWAEAPPGMAGAAQGNSGKWMAFGVNVSMAVDYEKETTVPVTANQRSLLRLMGNDILGDICVSLNEGAVYTHNAAGEVVPLVTVADRQPVCVSLLDGEVTDILTQVYVRPNLTNMVWLVGELQRNRKWQPQLLSNLSVSTRKLFFEDLYLPVRDFHVAGTSVDEYVDWQKLRRMLRHGGAIFETITRNSTILELAVTDVPKDSALRLQASVRIPIVGQGMDQFILPEDIVFPATEWMVALPGCDGNGTIGLPNATIVVDPVKALKWEQQSSIDISMTAVVAGRLPDPLLYEVCEYDNGNVVTPMSLIFRKMFDPAQLVELTVKGRRALESDDLETIPVEVVTELVAATKLPLAFNFTVSQSDMIEDLSIQRLKLRLRRNRHGEKVLHVAGKVRILFNPPFYNVTEDSSVSITAVKGVIDLYHHNVRFASTPLRTWLPCDTAIDGGRLEVSLELDQDEVDIIDPVQLSVCLNEIIFNGQTEIYIDGKVDILTKTVLGELVLFDMPAHGKTVVKKDDDVLLINQLDTV

SEQ ID NO: 5412 - DNA, 1803 bp, Candida glabrata CBS138
  CDS (1)..(1803)
atggagactcagtcgcttttgccaaatgaaaggcctaatggttattcatatacaggtgatgagttgccatccgatggacaagaaaatggcatcgaacccactgtcatggttcagagaaagaagcaatggtatcttaattggaaggttcttctttctctgtttattttggttaatctagttattgtcagccttgttgttgtctcatggatacctgatactgacgagatgcaagacaagtttgggaggataaccaacggtaagttagaaagctttcatattgatggttggctagatgaggataacggtgggttgaatactgagtatggaaaagaattacaaatatctacatcaatgaaagtatggtttgactatgatcttttagaggatgttgaagagcgtaaaaagtttaaacgtcttagcgaaggtataattaaaagtttttgtttcaatgttcaaaacataagcacatatgattcgagcacctttttgggcagcttgagaatagttgaaccaatttgtttggatttaaaggatgggtatgtcaataccataaatgttactgtactggtgaaaccaaaaatgatcaagatcgtgggtgttctgaagaagctatggaggcatgaatatgataacttgaatattcgctcacatttggatattaatgttcacaaatatttgattccgggaatgcattttaaggatataagagttaaatgggatgattttatagattgggataaaattgctattagtgttaaagaattacacgatttactacagaggagcaatctcggattaaagacgataaatgtgaaagagcaaacaaacgggttccatgtacgactagtgccaaaggtgaccgatcttgtcaatgatatcagtcgatttcttaggcatcgcctattctttaaccaggcatttgtaatcccggcccttaaattagatgttaaagttcccgattgtttggagctttttagtattgggttgtctaatgcttatataaggactgaagagtttaggtttgatccacgagttgatcttgaagattcacaagagcctattgaattacaatgtgagctagaagccccgttacctgaacaattcatcactcaggagtgttggagttttaatgggcatcgaattactcccttgaccaagatgttaaacaagctattgaactccaaggataaagttggagttggtatttctgctgatgttttagatcagaagcatgataaaaatcaaatgatgtctcaattattagtagcagttggatatgtgcctgtatatggccatatttcggtgaatagttctacactattacaggaatgcgtgctagaagatatcagtttgaaatggcaggatggtcgtttgaaatttgtcggtagtattcatgagcaagtcaacttatcattttacgaaccgatgctatacaagaatgacgatagtgatgatagaaatagcaccgatgccataactgtgactggtataaagggcaagatcaaactatatcacgaaggggtgcatttcttaaacgttcccatggaggaatggatcccggtcaactcagtaatcgaaagggacgattgtgggacacctcagcttgtggttgatgtagatgttggcagcgacaatgtcgaggtattaaacaagtgggagttgagtaaagtatttaacgagatggtgtttcaaggtgaaacccaggtagagtatcgaaacgcgctggacgtgcaagtaactacactactgggtggattcgatgtcttagggctggaatggacaggagagaccacagtgacatag

SEQ ID NO: 5413 - protein, 600 aa, Candida glabrata CBS138
METQSLLPNERPNGYSYTGDELPSDGQENGIEPTVMVQRKKQWYLNWKVLLSLFILVNLVIVSLVVVSWIPDTDEMQDKFGRITNGKLESFHIDGWLDEDNGGLNTEYGKELQISTSMKVWFDYDLLEDVEERKKFKRLSEGIIKSFCFNVQNISTYDSSTFLGSLRIVEPICLDLKDGYVNTINVTVLVKPKMIKIVGVLKKLWRHEYDNLNIRSHLDINVHKYLIPGMHFKDIRVKWDDFIDWDKIAISVKELHDLLQRSNLGLKTINVKEQTNGFHVRLVPKVTDLVNDISRFLRHRLFFNQAFVIPALKLDVKVPDCLELFSIGLSNAYIRTEEFRFDPRVDLEDSQEPIELQCELEAPLPEQFITQECWSFNGHRITPLTKMLNKLLNSKDKVGVGISADVLDQKHDKNQMMSQLLVAVGYVPVYGHISVNSSTLLQECVLEDISLKWQDGRLKFVGSIHEQVNLSFYEPMLYKNDDSDDRNSTDAITVTGIKGKIKLYHEGVHFLNVPMEEWIPVNSVIERDDCGTPQLVVDVDVGSDNVEVLNKWELSKVFNEMVFQGETQVEYRNALDVQVTTLLGGFDVLGLEWTGETTVT

SEQ ID NO: 5414 - DNA, 1767 bp, Kluyveromyces lactis NRRL Y-1140
  CDS (1)..(1767)
atgtcggaagatgcagagagacaacccttactccgagacgttaatcaaggattgaggagttccgagccctcgaaccgattccacaaatcgtccaggaatagagttactgcgggaattatagcattcattgtgctattaactactaccatatttctgggtcttatatatgttaaatctgtgcttccagatgatgtttcatttaaggagcatattggagatatcacaaatgttgaaatcaatgatatttcatttaacggatggacatacattgacgagaagcggtactacaaacttggagtaaaatcctcggtgtggttagattatgaagctggatcagccgtatcggaacgacaaaagaagcttatctcttttgccgggactaggattatgaaggaactgtgtttcgatttgaacagtttagacactttcaagcaagaaaacgacaccgacgtcgtttcattgggaaaaattattatacccaacactacatgtattaacattcagcaaaatagtaccactgacttggatctgttagtattagtgaagcccaacacagagcagttgattccaattttgaaacaaatttgggagaagaagtacgatggacttaacttatggagtagtatggatctgaagttgaaaaagagagttttctcacacgaaattgttttattgagtataaacaaagcaaagttgtattggagagatttcggtttatggaaaagtgtgattgatacacttaggcatctctcagccgaaatttatgacacaattgaaagaattgaaataaacaatataaacttgaaggaaatagaagatggatatgatatttcctgttctatcggagttccaaaccctctaagcagtacctgcaataaattaggccccggactcctaatatctcctggcatgcaatggcaaacaactttcccaggatgtcgtaatgaaaatgggattaagcttgataatgtagttgtgcacagccctgagttgacctcagagtcagtatccaaaccattcatcaatataaccttagatagtacactgataggtgagctaccaaacgaatttcttaatcatgtatgcgcatcagatgattctaacgttataacaccactgtcaaaattgatcaaacaactactcgatcccaaatacctcattaatttagaagttacttgcactgctgtggatagcaaaaattatccaaatactttacttgaagattatactgccttacttccatacctttttacaccgctttcggtaaactatacagttgatgtgaacaatatagtccaagaagtaggtactagaggtatcaagctacaatggtccactgatctacttggtcggaaaaggctgaatgtcaagggtaagattgtagctaaagttcaaataccgttttaccagttgaaacaagatacgacattctcgatgcaaagaattaaaggacgaacaaaattgtatcacaatgatgttcatatgctaactgtaccattggattcctggacgaaatgtatcagcaatgttgtgatcgatgaggataagcctgaaaaatcgtacttcgatgtctcatttgacatagataacgaccaagttattatagcagatactctagcactcactcattgcataaacgaagtagtgtttaaaggggaatcaacaatttttttgaaggggaaacttgatttgatggtcgcaacaagtattggagatattgttctattagctcttccaggtgagggctcagcagtcgttcgaccatag

SEQ ID NO: 5415 - protein, 588 aa, Kluyveromyces lactis NRRL Y-1140
MSEDAERQPLLRDVNQGLRSSEPSNRFHKSSRNRVTAGIIAFIVLLTTTIFLGLIYVKSVLPDDVSFKEHIGDITNVEINDISFNGWTYIDEKRYYKLGVKSSVWLDYEAGSAVSERQKKLISFAGTRIMKELCFDLNSLDTFKQENDTDVVSLGKIIIPNTTCINIQQNSTTDLDLLVLVKPNTEQLIPILKQIWEKKYDGLNLWSSMDLKLKKRVFSHEIVLLSINKAKLYWRDFGLWKSVIDTLRHLSAEIYDTIERIEINNINLKEIEDGYDISCSIGVPNPLSSTCNKLGPGLLISPGMQWQTTFPGCRNENGIKLDNVVVHSPELTSESVSKPFINITLDSTLIGELPNEFLNHVCASDDSNVITPLSKLIKQLLDPKYLINLEVTCTAVDSKNYPNTLLEDYTALLPYLFTPLSVNYTVDVNNIVQEVGTRGIKLQWSTDLLGRKRLNVKGKIVAKVQIPFYQLKQDTTFSMQRIKGRTKLYHNDVHMLTVPLDSWTKCISNVVIDEDKPEKSYFDVSFDIDNDQVIIADTLALTHCINEVVFKGESTIFLKGKLDLMVATSIGDIVLLALPGEGSAVVRP

SEQ ID NO: 5416 - DNA, 24 bp, Artificial sequence
  primer
atgcacactaactcacccttacga

SEQ ID NO: 5417 - DNA, 23 bp, Artificial sequence
  primer
tcacgtgaccaaagtgtcaccct

SEQ ID NO: 5418 - protein, 572 aa, Artificial sequence
  consensus sequence
  Variant (2)..(4): Xaa in position 2 to 4 is any amino acid
  Variant (5)..(11): Xaa in position 5 to 11 is any or no amino acid
  Variant (13)..(24): Xaa in position 13 to 24 is any amino acid
  Variant (26)..(35): Xaa in position 26 to 35 is any amino acid
  Variant (38)..(56): Xaa in position 38 to 56 is any amino acid
  Variant (57)..(66): Xaa in position 57 to 66 is any or no amino acid
  Variant (69)..(91): Xaa in position 69 to 91 is any amino acid
  Variant (92)..(98): Xaa in position 92 to 98 is any or no amino acid
  Variant (100)..(113): Xaa in position 100 to 113 is any amino acid
  Variant (114)..(118): Xaa in position 114 to 118 is any or no amino acid
  Variant (120)..(128): Xaa in position 120 to 128 is any amino acid
  Variant (130)..(145): Xaa in position 130 to 145 is any amino acid
  Variant (147)..(147): Xaa in position 147 is any amino acid
  Variant (149)..(171): Xaa in position 149 to 171 is any amino acid
  Variant (173)..(179): Xaa in position 173 to 179 is any amino acid
  Variant (181)..(200): Xaa in position 181 to 200 is any amino acid
  Variant (201)..(205): Xaa in position 201 to 205 is any or no amino acid
  Variant (207)..(265): Xaa in position 207 to 265 is any amino acid
  Variant (266)..(270): Xaa in position 266 to 270 is any or no amino acid
  Variant (272)..(279): Xaa in position 272 to 279 is any amino acid
  Variant (281)..(281): Xaa in position 281 is any amino acid
  Variant (283)..(287): Xaa in position 283 to 287 is any amino acid
  Variant (289)..(320): Xaa in position 289 to 320 is any amino acid
  Variant (321)..(324): Xaa in position 321 to 324 is any or no amino acid
  Variant (327)..(333): Xaa in position 327 to 333 is any amino acid
  Variant (335)..(339): Xaa in position 335 to 339 is any amino acid
  Variant (340)..(342): Xaa in position 340 to 342 is any or no amino acid
  Variant (345)..(388): Xaa in position 345 to 388 is any amino acid
  Variant (389)..(393): Xaa in position 389 to 393 is any or no amino acid
  Variant (395)..(416): Xaa in position 395 to 416 is any amino acid
  Variant (418)..(423): Xaa in position 418 to 423 is any amino acid
  Variant (424)..(428): Xaa in position 424 to 428 is any or no amino acid
  Variant (430)..(432): Xaa in position 430 to 432 is any amino acid
  Variant (434)..(442): Xaa in position 434 to 442 is any amino acid
  Variant (445)..(458): Xaa in position 445 to 458 is any amino acid
  Variant (459)..(469): Xaa in position 459 to 469 is any or no amino acid
  Variant (471)..(473): Xaa in position 471 to 473 is any amino acid
  Variant (477)..(484): Xaa in position 477 to 484 is any amino acid
  Variant (486)..(488): Xaa in position 486 to 488 is any amino acid
  Variant (490)..(509): Xaa in position 490 to 509 is any amino acid
  Variant (510)..(516): Xaa in position 510 to 516 is any or no amino acid
  Variant (518)..(526): Xaa in position 518 to 526 is any amino acid
  Variant (528)..(531): Xaa in position 528 to 531 is any amino acid
  Variant (534)..(535): Xaa in position 534 to 535 is any amino acid
  Variant (537)..(537): Xaa in position 537 is any amino acid
  Variant (539)..(548): Xaa in position 539 to 548 is any amino acid
  Variant (550)..(553): Xaa in position 550 to 553 is any amino acid
  Variant (555)..(556): Xaa in position 555 to 556 is any amino acid
  Variant (558)..(567): Xaa in position 558 to 567 is any amino acid
  Variant (569)..(571): Xaa in position 569 to 571 is any amino acid
VXXXXXXXXXXPXXXXXXXXXXXXTXXXXXXXXXXGWXXXXXXXXXXXXXXXXXXXXXXXXXXXXXDYXXXXXXXXXXXXXXXXXXXXXXXXXXXXXXCXXXXXXXXXXXXXXXXXXXLXXXXXXXXXCXXXXXXXXXXXXXXXXVXPXXXXXXXXXXXXXXXXXXXXXXXSXXXXXXXKXXXXXXXXXXXXXXXXXXXXXXXXXWXXXXXXXXXXXXXXXXXXXXXXXXXXXXXXXXXXXXXXXXXXXXXXXXXXXXXXXXXXXXXXXXPXXXXXXXXPXCXXXXXIXXXXXXXXXXXXXXXXXXXXXXXXXXXXXXXXXXXXLPXXXXXXXCXXXXXXXXTPXXXXXXXXXXXXXXXXXXXXXXXXXXXXXXXXXXXXXXXXXXXXXXXXXPXXXXXXXXXXXXXXXXXXXXXXLXXXXXXXXXXXLXXXGXXXXXXXXXFYXXXXXXXXXXXXXXXXXXXXXXXXXGXXXLYHXXXXXXXXPXXXWXXXXXXXXXXXXXXXXXXXXXXXXXXXDXXXXXXXXXLXXXXNEXXFXGXXXXXXXXXXDXXXXTXXGXXXXXXXXXXGXXXV

SEQ ID NO: 5419 - DNA, 2328 bp, Saccharomyces cerevisiae
  CDS (1)..(2328)
atgtcatttgatagaccggaaatatacagtgctcctgttttacaaggagaatctcctaacgacgatgataatactgaaatcataaagtcctttaagaatttcattttggagttcagacttgactcgcaatttatttacagagatcagttaaggaacaacatccttgtgaagaattattctttaacggttaacatggagcatttgatcggatataacgaagacatatataagaaactatcagacgaaccttcagatatcattccattattcgaaaccgcgatcacacaagtggctaaaaggataagtattctaagcagagctcaatctgctaataacaatgacaaagatccagaaaatactagtatggatactgattctctcttattgaactctttaccaacatttcaattaattttaaactccaatgcaaatcagattccattgagagatttggattctgaacacgtctccaagattgtccgtttatcaggtattataatatccacgtcagttttatcttcccgtgccacgtacctttctataatgtgcagaaattgcagacacacaacatcaataacaatcaacaatttcaattctatcacaggcaataccgtcagtttaccacgttcttgcttatctacgattgagagtgaatcttctatggcaaacgagtcgaatattggtgatgaatcgaccaagaaaaattgtggacctgatccatatattattatccatgagtcttcaaagtttattgatcaacagtttttaaaattacaggaaatcccagaactggttccagtaggtgagatgcctagaaacttaacaatgacttgtgaccgatacctaacaaacaaagttattcctggtacgagagtcactatagtaggtatttattccatctataattctaaaaatggtgccggatccggaaggagcgggggtggaaatggaggaagtggtgttgctattagaacaccttatatcaaaatattaggtattcagtccgatgtagaaacctcctctatttggaattcagtaactatgtttactgaggaggaagaagaggaatttctacagctaagtagaaacccgaagctttatgaaattttgaccaactctattgccccctctatttttggtaatgaagatataaaaaaagccattgtatgtttattgatgggtggttccaagaagatattacccgatggtatgaggttaagaggtgatatcaatgtactattattaggtgatccaggtaccgccaaatctcaactattgaaatttgtggagaaagtgtcacctattgcggtatatacatctggtaagggatcttctgcagctgggttaactgccagtgtacaaagagatccgatgacaagagaattttatttggaaggtggtgctatggtgcttgccgatggtggtgttgtatgcatcgatgaattcgataaaatgagagatgaagatagagtggccattcatgaagctatggagcagcaaacaatctccatcgcaaaagctggtatcactacagtgctaaattctagaactagtgttttagcggctgctaatccgatatacggccggtatgatgatttgaagtctcctggtgacaacattgatttccaaactactattttatcccgttttgatatgatttttattgttaaggatgaccataatgaagaacgtgatatttcaatagctaaccacgttattaatattcatacaggaaatgctaatgctatgcaaaaccaacaagaggaaaatggcagtgaaattagtattgaaaagatgaaacgttacattacgtattgtagattgaaatgtgcaccaagactttcaccgcaggccgctgaaaaactgtcatcgaacttcgtcaccattaggaagcaattattaatcaacgaattagagtcaacggaaaggtcgtctattccaattaccattcgtcaattagaagctattattagaataacagaatcattagccaagttagaattaagtcctattgcacaggagagacatgttgacgaagctattagattgtttcaagcttccacaatggacgcagcgtctcaggatccaattggcggcttaaatcaagcaagcggaacatctttgtcagaaatccgtcgttttgaacaagaactaaaaagaagattacctataggctggtctacttcttatcaaactttgaggagagaatttgtagatacacatagattttctcaattagcactggataaggccttatatgccctagagaagcatgaaacaattcaattgagacaccagggacagaatatttacagaagtggtgtatga

SEQ ID NO: 5420 - protein, 775 aa, Saccharomyces cerevisiae
MSFDRPEIYSAPVLQGESPNDDDNTEIIKSFKNFILEFRLDSQFIYRDQLRNNILVKNYSLTVNMEHLIGYNEDIYKKLSDEPSDIIPLFETAITQVAKRISILSRAQSANNNDKDPENTSMDTDSLLLNSLPTFQLILNSNANQIPLRDLDSEHVSKIVRLSGIIISTSVLSSRATYLSIMCRNCRHTTSITINNFNSITGNTVSLPRSCLSTIESESSMANESNIGDESTKKNCGPDPYIIIHESSKFIDQQFLKLQEIPELVPVGEMPRNLTMTCDRYLTNKVIPGTRVTIVGIYSIYNSKNGAGSGRSGGGNGGSGVAIRTPYIKILGIQSDVETSSIWNSVTMFTEEEEEEFLQLSRNPKLYEILTNSIAPSIFGNEDIKKAIVCLLMGGSKKILPDGMRLRGDINVLLLGDPGTAKSQLLKFVEKVSPIAVYTSGKGSSAAGLTASVQRDPMTREFYLEGGAMVLADGGVVCIDEFDKMRDEDRVAIHEAMEQQTISIAKAGITTVLNSRTSVLAAANPIYGRYDDLKSPGDNIDFQTTILSRFDMIFIVKDDHNEERDISIANHVINIHTGNANAMQNQQEENGSEISIEKMKRYITYCRLKCAPRLSPQAAEKLSSNFVTIRKQLLINELESTERSSIPITIRQLEAIIRITESLAKLELSPIAQERHVDEAIRLFQASTMDAASQDPIGGLNQASGTSLSEIRRFEQELKRRLPIGWSTSYQTLRREFVDTHRFSQLALDKALYALEKHETIQLRHQGQNIYRSGV

SEQ ID NO: 5421 - DNA, 2160 bp, Rattus norvegicus
  CDS (1)..(2160)
atggcgcttaaggactatgcgattgagaaagaaaaagtgaagaagttcctgcaagagttttattatgatgatgagcttggaaagaagcagttcaagtatgggacccagttggttcatctggctcatcgggaacaagtggcattgtacgtggacctagatgatgtagctgaagatgaccctgagttggtcgactcaatttgcgagaatgccaagcgctactcgaggctgtttgctgacgtagtacaggagcttctgcctgagtacaaggagaaggaggtggtgaataaggatgtcctggatgtttacattgaacaccgattgatgatggagcagcggagcagagaccctggggcagtccggaaccctcaaaaccagtatccttctgagctcatgcgtagatttgagttgtatttccaaggcccaagtagcagcaagcctcgagtgatccgggaagtacgggctgattctgtagggaaattgttaactgtgcgtgggattgtcactcgtgtgtctgaagtcaagcccaggatggtggtggccacatacacttgcgatcaatgtggggcagagacctaccagccgatccagtctcccaccttcatgcctctgatcatgtgccccagccaggagtgccaaaccaaccgctcaggggggcggctgtacctacagactcgtggctccaaatttattaaattccaggaaatgaagattcaagaacatagtgaccaagttccggtgggaaacatccctcggagcatcacagtggttctagaaggagagaacacaaggattgcccagcctggtgaccatgtcagcgtcactggcatcttcttgccagtcttgcgcacagggttccaacagatggcacagggcttactctcggaaacttacctggaagcccatcgggttgtgaagatgacgaagagcgaggatgatgtgtctggggccggagagctgagtgccgaggagctgaagcagattgccgaggaagatttctatgaaaagctggctgcttctattgctccggagatctatggtcatgaagatgtgaagaaggcgctcttactgctcctggtgggtggtgtggaccagtctcctcaaggcatgaagataagaggaaacatccacatctgccttatgggagatcctggtgtggccaagtctcagctcctgtcttacattgaccgtctggcgccccgaagtcagtacacaacgggccggggctcctctggtgtagggctcacagcagctgtgttgagagactctgtgagtggggaattgaccttagagggtggtgccctggtgctggctgaccagggcgtgtgctgcattgatgagtttgacaagatggcagaagctgaccgcacagccatccatgaggttatggagcagcagaccatctccattgccaaggcaggaattctcaccacactcaatgcccgatgctctatcctggctgctgccaaccctgcctatggacggtataacccccgccgcagtttggagcagaacatacagcttcctgctgctctgctctcccgattcgacctcctctggctgattcaggaccggcccgacagagacaacgacctccggttggcccagcacataacctatgtccaccagcacagccggcagccccctgctcaatttgaacctttggacatgaaacttatgagacggtacattgccatgtgccgcgagaggcagcccacagtgcctgactctctggctgactacatcactgcagcgtatgtggagatgaggcgagaggcccgggccagtaaggatgccacctacacttctgcccggaccctgctggccattctccgactttctactgctctggctcgccttcggatggtagatattgtggagaaggaagatgtgaatgaagccataaggttgatggagatgtcaaaggactcccttctgggtgaaaagggacaaacggctaggacccagaggccagcagatgtgatatttgctaccgtccgtgagttggtatcagggggacggagtgtccgcttttctgaggctgaacagcgctgcatatcacgtggcttcacaccagcccagttccaggcagctctggatgaatatgaggagctaaatgtctggcaggtcaatacttctcggacacggatcacctttgtctga

SEQ ID NO: 5422 - protein, 719 aa, Rattus norvegicus
MALKDYAIEKEKVKKFLQEFYYDDELGKKQFKYGTQLVHLAHREQVALYVDLDDVAEDDPELVDSICENAKRYSRLFADVVQELLPEYKEKEVVNKDVLDVYIEHRLMMEQRSRDPGAVRNPQNQYPSELMRRFELYFQGPSSSKPRVIREVRADSVGKLLTVRGIVTRVSEVKPRMVVATYTCDQCGAETYQPIQSPTFMPLIMCPSQECQTNRSGGRLYLQTRGSKFIKFQEMKIQEHSDQVPVGNIPRSITVVLEGENTRIAQPGDHVSVTGIFLPVLRTGFQQMAQGLLSETYLEAHRVVKMTKSEDDVSGAGELSAEELKQIAEEDFYEKLAASIAPEIYGHEDVKKALLLLLVGGVDQSPQGMKIRGNIHICLMGDPGVAKSQLLSYIDRLAPRSQYTTGRGSSGVGLTAAVLRDSVSGELTLEGGALVLADQGVCCIDEFDKMAEADRTAIHEVMEQQTISIAKAGILTTLNARCSILAAANPAYGRYNPRRSLEQNIQLPAALLSRFDLLWLIQDRPDRDNDLRLAQHITYVHQHSRQPPAQFEPLDMKLMRRYIAMCRERQPTVPDSLADYITAAYVEMRREARASKDATYTSARTLLAILRLSTALARLRMVDIVEKEDVNEAIRLMEMSKDSLLGEKGQTARTQRPADVIFATVRELVSGGRSVRFSEAEQRCISRGFTPAQFQAALDEYEELNVWQVNTSRTRITFV

SEQ ID NO: 5423 - DNA, 2592 bp, Xenopus tropicalis
  CDS (1)..(2592)
atgtcatctccaacatctacaccaagccgcagaaggaacaaacgtgggcgaggcagtaaccctccaactcctcatggagaggaagtgcagtctcctccatcgcagagacgtcggacagaagattccacatctattggcgaacttctgcccatgccaacctcaccttcaggggaccttcagagccccagcgggcaagagcttatgttttctagccctgcaccatcaaggcattctgcccttcaaagtgagcttgatctcagctcacctctcacttatggcacccctagctcaagagttgagggtacccctagaagtggtatccgagggactcctgctcgacagagacctgacttgggatcagcacgcaaagttaagcaggtggatttacattcagaccaacctgctgcagaggagctggttacgagtgagcaatctttgggacagaagctggtgatctggggaactgatgtcaatgttgccacttgcaaagaaaagtttcagcgttttgttcagcgattcattgatcctttagctaaagaagaggaaaatgtaggactggatctgaatgagcctatatatatgcagcgacttgaagagataaatgtagtaggtgagccatttctcaatgttgactgtgaccatctcagaagctttgatcaggatctttacaggcagctggtttgctacccacaggaagttattccaacatttgatatggctgctaatgagattttctttgagcggtaccctgactccattttagagcaccagattcaagttagaccctataatgcattgaaaactagaaatatgagaagcttaaatccagaagatattgatcagcttatcacaattagtggcatggttatcagaacttctcaaatcatcccagagatgcaggaagcattttttaaatgtcaagtgtgtgcctttactactagagtggagattgatcgtggtcgcatttcagagccatcagtctgcaaacactgcaacaccacacacagcatggctcttattcacaatcgctctatgttctcagacaagcaaatgattaaactgcaagagtctccagaagatatgcctgctggtcagacccctcatacaactattctctatggtcataatgacttggtggataaggtacagcctggtgatagagtgaatgtcacaggtatttacagagctgtcccaattcgagttaaccctagagttcgaaatgtaaagtctgtttacaaaactcacattgatgttattcattaccgaaaaactgatgcaaagcggttgcatggtattgatgaggacacagaacagaagatgttcactgaagaaagggttgcaatgttaaaagaacttgcagcaaaaccagacatctatgagaggcttgcttcagctcttgcaccaagtatatatgagcatgaagatattaaaaagggaattttgcttcagttgtttggtggaacacggaaagacttcagtcataccggaagaggcaaattccgtgctgaagtaaacatacttctgtgtggtgatccaggaaccagtaaatctcagcttctccaatatgtatacaatttggtacctagaggccagtacacctctggaaagggatctagtgcggttggattaaccgcatacgtgatgaaggatccagaaacgcggcagttggtactgcagacaggtgcattagttctcagtgacaatggcatttgctgcattgatgaatttgacaaaatgaatgagagcactagatctgtgctacatgaagtaatggaacagcagactctctccattgcaaaggccggaataatatgtcagctgaatgcccgtacatctgttttggctgctgcaaacccagtggagtcacaatggaatcccaagaaaaccactattgaaaacatccagcttccacatacgctcttatcaaggtttgatctaatatttttgatgctggatccacaagatgaaacctatgaccgccgcctagcccaccaccttgtggctttgtactaccagagtgaggagcagatgaaagaagagcatttggacatggcagttttaaaggattatatagcatatgctcggacttatgtcaatccaagacttggtgaagaagcaagtcaagctctaatagaggcttatgtagacatgaggaaaattggcagtggtcgtggaatggtttctgcctatcctaggcaacttgagtctctgattcgtctatccgaagctcatgcaaaagtacgcttttctagcaaggtggaaacaattgatgtagaagaggccaaacgtcttcatcgcgaggctttgaaacagtctgccactgatcctagaacaggcattgtcgatatatctattcttacaacaggaatgagtgcaactgctcgaaaacgtaaagaggaattggcccaagttttaaagaaacttatccagtccaagggcaaaactccagctttaaaataccagcagctgtttgaggatctacgtgggcagtctgatgcagctgttacaaaagacatgtttgatgaagctttgcatgcacttgcggatgaagactacttaacagtgacaggaaagactgtaagattgctgtaa

SEQ ID NO: 5424 - protein, 863 aa, Xenopus tropicalis
MSSPTSTPSRRRNKRGRGSNPPTPHGEEVQSPPSQRRRTEDSTSIGELLPMPTSPSGDLQSPSGQELMFSSPAPSRHSALQSELDLSSPLTYGTPSSRVEGTPRSGIRGTPARQRPDLGSARKVKQVDLHSDQPAAEELVTSEQSLGQKLVIWGTDVNVATCKEKFQRFVQRFIDPLAKEEENVGLDLNEPIYMQRLEEINVVGEPFLNVDCDHLRSFDQDLYRQLVCYPQEVIPTFDMAANEIFFERYPDSILEHQIQVRPYNALKTRNMRSLNPEDIDQLITISGMVIRTSQIIPEMQEAFFKCQVCAFTTRVEIDRGRISEPSVCKHCNTTHSMALIHNRSMFSDKQMIKLQESPEDMPAGQTPHTTILYGHNDLVDKVQPGDRVNVTGIYRAVPIRVNPRVRNVKSVYKTHIDVIHYRKTDAKRLHGIDEDTEQKMFTEERVAMLKELAAKPDIYERLASALAPSIYEHEDIKKGILLQLFGGTRKDFSHTGRGKFRAEVNILLCGDPGTSKSQLLQYVYNLVPRGQYTSGKGSSAVGLTAYVMKDPETRQLVLQTGALVLSDNGICCIDEFDKMNESTRSVLHEVMEQQTLSIAKAGIICQLNARTSVLAAANPVESQWNPKKTTIENIQLPHTLLSRFDLIFLMLDPQDETYDRRLAHHLVALYYQSEEQMKEEHLDMAVLKDYIAYARTYVNPRLGEEASQALIEAYVDMRKIGSGRGMVSAYPRQLESLIRLSEAHAKVRFSSKVETIDVEEAKRLHREALKQSATDPRTGIVDISILTTGMSATARKRKEELAQVLKKLIQSKGKTPALKYQQLFEDLRGQSDAAVTKDMFDEALHALADEDYLTVTGKTVRLL

SEQ ID NO: 5425 - DNA, 2667 bp, Gallus gallus
  CDS (1)..(2667)
atggcggactcctccgagtcgcaggcggcggtcaccagccctgtgcgcagctcccgccgcggtgatgccttcacgtccagccccggccgggacctgccccccttcgaggatgagtccgaagggctcctgggcaccggggggctccccgaagatgaggaagaaggagaagagctcatcggagaggggatggagagggactaccggcccatcccagagctggatgtctacgaggcagagggcctggccttggatgatgaagatgtggaggagctgactgccagccagcgggaagctgcagagagagtaatgaggcagcgggaccgtgagctggagcagggcatgggccgcatgaggagggggctgctctatgatagcgacgatgaagatgaagaccgtcctttgcggaagaggcggctggcggagcgggctgctgatggcgtagaggaggaagatgaagacatgatagagagcattgagaatctggaagacatgaaagggcattcggtgagggagtgggtttccatggcagctccccggcttgagatctaccaccgcttcaagaacttcttgaagacctatgtggatgaccatgggcacaatgtcttcaaggagaggatcagcgacatgtgcaaagagaacagagagagtctggtggtgaactacgaggatctggctgcccaggaacatgtccttgcctactttctacctgaagccccagcagaaatgctgaagatctttgatgaagcagccaaggaagtggtgttggccatgtaccccaagtatgatcgtattgctcaagagatccatgttcgtatctcccatctcccactagtggaagagttgcgatcactcaggcaactacatttgaaccagttgatccggaccagtggagtggtgacaagttgcacaggggtcctgcctcagctgagcatggtcaagtacaactgcaccaagtgcagcttcatcttgggaccctttttccagtcccagaaccaggaggtgaaacctggttcctgcccagagtgtcagtctcttggcccctttgaaatcaacatggaagagacagtctatcagaactatcagcgcatcaaaatccaggagagccctggcaaggtggctgctggtaggctgccccgctccaaggatgccattctccttgctgatctggttgacagctgcaagccaggggatgagattgagctcacagggatctatcacaacaactatgatggctccttgaacactgccaatggattcccagtgtttgcaaccgtgatcctggccaaccacattgccaagaaggacaacaagcttgctgtaggggagctgactgatgaggatgtgaaaatgcttgtggctctgtccaaggatgagcaaattggggagaagatttttgccagcattgccccatccatttatgggcatgaagatatcaagaggggtttggctttagctctgtttggtggagagcccaaaaacccaggtggcaaacacaaagtccgcggggatatcaacgtgcttctgtgtggagaccctggtactgcgaagtcacagtttcttaagtacatagagaaggtgtccagcagggccatcttcaccactggccagggtgcttctgctgtgggtctcacagcttatgtccagaggcacccggtcagcaaagagtggactttggaagcaggagccctcgtgctggctgacagaggtgtctgcctgattgatgaatttgacaagatgaacgaccaggataggaccagcatacatgaagccatggaacagcagagtatttccatctccaaagcaggcattgtcacatccttacaggctcgctgcactgttattgctgctgccaatcccataggtggtcgatatgatccatcattgactttcttggagaatgtagacctgacagagcccatcatctctcgatttgatatcctgtgtgtggtgagagatacagtggaccctgtgcaggatgaaatgcttgcccggtttgttgttaacagccatgtcaagcaccacccaggtagcaaggaggcagtgaatggagatgctgatgaggttattcttcccaatacatatggggtggaaccccttccccaggagatcctgaggaaatatatcgtctatgccaaagagaaggtccaccccaaactcaaccagatggaccaggacaaagtggcccggatgtacactgacctcaggaaagagtctatggcaactggcagcatccccatcacagtgcggcacattgagtccatgatccggatggctgaggctcatgcccgtatgcacttgagagattatgtggtggaggatgatgtcaacatggccatccgggtgatgctggagagtttcattgacacgcagaagttcagtgtcatgcgaagcatgcgcaagacgttctcccgctacctttccttcaagcgagacaacaatgagctgctgctgttcatccttaagcagctggttgcagagcaggtgatgtaccagagaaaccgctatggggcccagcaagacaccatagaagtcccagagaaggatctggtggataaggctcggcagatcaacatccacaacctctctgccttctatgacagtgaggtgttcaagatgaaccggttcagccgtgatgtgaagcggaagctgatagtccagcagttctga

SEQ ID NO: 5426 - protein, 888 aa, Gallus gallus
MADSSESQAAVTSPVRSSRRGDAFTSSPGRDLPPFEDESEGLLGTGGLPEDEEEGEELIGEGMERDYRPIPELDVYEAEGLALDDEDVEELTASQREAAERVMRQRDRELEQGMGRMRRGLLYDSDDEDEDRPLRKRRLAERAADGVEEEDEDMIESIENLEDMKGHSVREWVSMAAPRLEIYHRFKNFLKTYVDDHGHNVFKERISDMCKENRESLVVNYEDLAAQEHVLAYFLPEAPAEMLKIFDEAAKEVVLAMYPKYDRIAQEIHVRISHLPLVEELRSLRQLHLNQLIRTSGVVTSCTGVLPQLSMVKYNCTKCSFILGPFFQSQNQEVKPGSCPECQSLGPFEINMEETVYQNYQRIKIQESPGKVAAGRLPRSKDAILLADLVDSCKPGDEIELTGIYHNNYDGSLNTANGFPVFATVILANHIAKKDNKLAVGELTDEDVKMLVALSKDEQIGEKIFASIAPSIYGHEDIKRGLALALFGGEPKNPGGKHKVRGDINVLLCGDPGTAKSQFLKYIEKVSSRAIFTTGQGASAVGLTAYVQRHPVSKEWTLEAGALVLADRGVCLIDEFDKMNDQDRTSIHEAMEQQSISISKAGIVTSLQARCTVIAAANPIGGRYDPSLTFLENVDLTEPIISRFDILCVVRDTVDPVQDEMLARFVVNSHVKHHPGSKEAVNGDADEVILPNTYGVEPLPQEILRKYIVYAKEKVHPKLNQMDQDKVARMYTDLRKESMATGSIPITVRHIESMIRMAEAHARMHLRDYVVEDDVNMAIRVMLESFIDTQKFSVMRSMRKTFSRYLSFKRDNNELLLFILKQLVAEQVMYQRNRYGAQQDTIEVPEKDLVDKARQINIHNLSAFYDSEVFKMNRFSRDVKRKLIVQQF

SEQ ID NO: 5427 - DNA, 2205 bp, Gallus gallus
  CDS (1)..(2205)
atgtcgggcttcgacgagcccggtatttactacagcgacagctttggggtggacacatcggcggatgagggacaagtacggaaatcgcaactgcagcgacgctttaaagaattcctgcggcagtatcgcgtggggacggaccggactggcttcaccttcaaatacagggatgagctcaagcggcactacaacctgggccagtactgggtggaggtggagatggaggacctggccagctttgatgaggatctggccgactatctgtacaagcagcccactgagcacctgcagctgctggaagaagcagcgaaggaggtggcggatgaggtcactcgtcctcgtcctgctggggaagaagctctccaggacgtacaggtcatgctcaggtccgatgctaacgcggccaacatccgcagcctgaagtccgaccagatgtcccacctcgtgaagatccctggcattgtcattgcggcgacccccgtgagagccaaagccaccaaaatcgccatccagtgccgcagctgtcgcaacaccatcaacaacatcgccgtgcgcccgggtctggagggctacgctctgcccaggaaatgcaacacagaacaggctggccgccccaggtgcccactggatccctatttcatcatgccagacaaatgcaagtgtgtcgacttccagatcctgaagctgcaggagtcccctgacgctgtgccacatggggagatgccccggcacctacagctgtactgtgacaggtacttgtgtgacagagttgtcccagggaacagagtcaccatcatgggcatctactccatcaagaagtctgcccagagcaagaacaaaagccgggacaacgtgggcgtgggcatccgaagcgcttacatccgtgtggtgggcatccaggtggatgtggagggctcaggacacagctttgctggtgcagtgacccctcaggaagaggaggaacttcgccgcctcactgccatgcccaacatctacgaggtggttgccaagagcatcgcgccttccatctatggcagcaccgacatcaagaaggccattgcttgcctcttgtttggaggctctcgcaagaggctcccagatgggctgacccgcagaggagacatcaacttattgatgctgggtgaccctgggacggccaaatcccagctgctgaagtttgtagagaagtgttcgcccatcggggtatacacctcagggaaaggcagcagtgctgctggcttgacagcctcagtcatccgtgacccttcctcaaggagcttcttcatggagggaggagccatggtgctggcggatgggggagtggtgtgcatcgatgagttcgacaagatgcgggaggacgaccgtgtggccatccacgaggccatggagcagcagaccatctccattgcgaaggcaggaatcacaaccacgctgaactcccgctgctcagtgctcgcagctgccaactctgtcttcggacgctgggatgagaccaagggagaggacaatattgattttatgcctaccatcctgtctcggtttgacatgatcttcattgtcaaggatgagcacaacgaggaacgagacatgacgttggccaagcacgtgatgtccctgcatgtgagtgccctgacgcagacgcaggctgtggaaggtgaaatcgagctgaacaagctgaagaagctcatctccttctgccggacgaagtgcggccctcggctgtctgtagcagcagcagagaagctgaagaaccgctacatcctgatgcggagtggcagtcggcagcatgagcaggagagcgaccgccgctccagcatccccatcactgtcaggcaactggaggccattgtgcgcatcgccgagtccctcagcaagatgaagctgcagccctttgccactgaggctgatgttgaggaggccttgaggctcttccaggtgtccacgctcgatgcggccatgtcaggcagcctgtcaggggcagaaggcttcacgacgcaggaggaccaagagatgctgtcccgtattgagaagcagctcaagcgccgctttgccatcggctcacaggtgtcggagcacagcatcgtgcaggacttcatacggcagaaataccctgagcatgccatctacaaggtgctgcagctgatgatgcgccggggggagatccagcaccgcatgcaacgcaaagtcctctaccgcatcaagtaa

SEQ ID NO: 5428 - protein, 734 aa, Gallus gallus
MSGFDEPGIYYSDSFGVDTSADEGQVRKSQLQRRFKEFLRQYRVGTDRTGFTFKYRDELKRHYNLGQYWVEVEMEDLASFDEDLADYLYKQPTEHLQLLEEAAKEVADEVTRPRPAGEEALQDVQVMLRSDANAANIRSLKSDQMSHLVKIPGIVIAATPVRAKATKIAIQCRSCRNTINNIAVRPGLEGYALPRKCNTEQAGRPRCPLDPYFIMPDKCKCVDFQILKLQESPDAVPHGEMPRHLQLYCDRYLCDRVVPGNRVTIMGIYSIKKSAQSKNKSRDNVGVGIRSAYIRVVGIQVDVEGSGHSFAGAVTPQEEEELRRLTAMPNIYEVVAKSIAPSIYGSTDIKKAIACLLFGGSRKRLPDGLTRRGDINLLMLGDPGTAKSQLLKFVEKCSPIGVYTSGKGSSAAGLTASVIRDPSSRSFFMEGGAMVLADGGVVCIDEFDKMREDDRVAIHEAMEQQTISIAKAGITTTLNSRCSVLAAANSVFGRWDETKGEDNIDFMPTILSRFDMIFIVKDEHNEERDMTLAKHVMSLHVSALTQTQAVEGEIELNKLKKLISFCRTKCGPRLSVAAAEKLKNRYILMRSGSRQHEQESDRRSSIPITVRQLEAIVRIAESLSKMKLQPFATEADVEEALRLFQVSTLDAAMSGSLSGAEGFTTQEDQEMLSRIEKQLKRRFAIGSQVSEHSIVQDFIRQKYPEHAIYKVLQLMMRRGEIQHRMQRKVLYRIK

SEQ ID NO: 5429 - DNA, 2439 bp, Gallus gallus
  CDS (1)..(2439)
atggcagccccggcgggcgggctgggcgacgcggagctgcgggaagcgcagcgcgattacctggatttcctggacgatgaggaagatcaaggggtttaccacggcaaagtgcgcgacatgatcagcgacaaccagtaccgcctcctggtcaacatcaacgacctgcggaggaggaacgagaagagagccaaccggcttttgagcaatgccttcgaggagctcatcgcctttcaacgtgctctgaaggactttgttgcctctgttgatgccacctatgccaagcagtatgaggacttctacattgggctggagggcagctttggttccaagcatgtctcgccacggacgctgactgcctgcttcctgagctgcatcgtttgcgtggagggcatcgtgacgaagtgctctctgattcgtcccaaggttgtccggagcgtccattattgcccagctaccaagaagactattgagcgccgatacacagacttgacatccctggatgctttcccttccagcactgtctaccctacaaaggatgaggagaataaccccctggagacagagtatggcctctcagtctacaaggaccatcagaccatctccatccaggagatgcctgagaaggcaccagcagggcagctgccacgctcggtggatgtcatcctggatgatgacctggtggacaaggtgaagcctggagatcgcatccaggtggttgggacgtatcgctgcctgccaggaaagaaaggaggttacacatcagggacgttcaggactatcctcattgcctgccatatcaagcagatgagcaaagatgctcggcctctctactctgctaatgatgtggccaagatcaagaggttcagtaagagtcgctccaaggatatcttcaaccagctggcgagatccctggcacccagcatccacgggcacgagttcatcaagaaggccctcctgtgcatgctgcttggaggggtggagaaggtcctggagaatgggagccgtatccgaggagacatcaacatcttgctgataggagacccttctgtcgccaaatcccagctgctgcgctatgtgctgggcactgctccccgtgctgttggcactactggcaggggctcctctggtgttggcctgactgctgctgtcaccaccgaccaagaaaccggtgaacggcgtctggaagcaggggccatggtgttggctgaccggggtgtggtgtgcatcgatgagtttgacaagatgtctgacattgaccgcacggccatccacgaggtgatggagcagggccgtgtcaccatcgccaaggccggcatccacgctcgcctcaactcccgctgcagtgtcctggcggctgccaaccccgtctatggccggtatgaccagtacaagacgcccatggagaacattggcctgcaggactccctgctctcccgctttgacctgctcttcatcatgctggaccagatggactctgagcaggacagggagatctcagatcacgtcctgcgaatgcaccgctaccgcaaccccaatgagcaggatggggatgccatgcccctgggcagcgccgtggagatcctggctacggatgatcctgattttgcacaggaggaggaacaggagcttcaagtgtatgagaaacacgatgacctcctgcatgggcccaaccgccgcaaggagaagatcgtcagcatggagttcatgaggaagtacatccatgtggcaaaaatgatcaagcctgtcttgacccaggagtcagcagattacatagcagaggagtactcaagcctgcgcagccagaaccagatgaactcagacattgccaggacctccccggtcacagcccgtaccctggagacattgatccgcctctccacagcccatgctaaggccaggatgagcaagacagttgatctgcaggatgcagaggcagctttggagctggtgcagtttgcctacttcaaaaaggtgctggaaaaggagaagaagcgcaaaaagcaggtggaggacgactcagagactgagaaggaggaggaggaggaggagacgcagcctgagaaggagggcaggaagcaaaggaggaagaaggcacgcacagagggcgaggaggagtcctacgacccctatgacttcagtgacgccgagcaggagatgccagaggtccaggcacatactcccaagacacctgaaagctcagccactggcgaagcgaagaagccagagttggctgacccacggttgaaagcattcaaggctgccttgctggaagtcttcaagtcttcccatgctcaatctgtgggcctgaagaatgtgatggagtccatcaaccgtgacaaccctgagcccttctcgctcgccggagtgaaggtggcattggcccacatgcaagatgacaaccagatcatggtgtctgatgacattatcttcctaatctga

SEQ ID NO: 5430 - protein, 812 aa, Gallus gallus
MAAPAGGLGDAELREAQRDYLDFLDDEEDQGVYHGKVRDMISDNQYRLLVNINDLRRRNEKRANRLLSNAFEELIAFQRALKDFVASVDATYAKQYEDFYIGLEGSFGSKHVSPRTLTACFLSCIVCVEGIVTKCSLIRPKVVRSVHYCPATKKTIERRYTDLTSLDAFPSSTVYPTKDEENNPLETEYGLSVYKDHQTISIQEMPEKAPAGQLPRSVDVILDDDLVDKVKPGDRIQVVGTYRCLPGKKGGYTSGTFRTILIACHIKQMSKDARPLYSANDVAKIKRFSKSRSKDIFNQLARSLAPSIHGHEFIKKALLCMLLGGVEKVLENGSRIRGDINILLIGDPSVAKSQLLRYVLGTAPRAVGTTGRGSSGVGLTAAVTTDQETGERRLEAGAMVLADRGVVCIDEFDKMSDIDRTAIHEVMEQGRVTIAKAGIHARLNSRCSVLAAANPVYGRYDQYKTPMENIGLQDSLLSRFDLLFIMLDQMDSEQDREISDHVLRMHRYRNPNEQDGDAMPLGSAVEILATDDPDFAQEEEQELQVYEKHDDLLHGPNRRKEKIVSMEFMRKYIHVAKMIKPVLTQESADYIAEEYSSLRSQNQMNSDIARTSPVTARTLETLIRLSTAHAKARMSKTVDLQDAEAALELVQFAYFKKVLEKEKKRKKQVEDDSETEKEEEEEETQPEKEGRKQRRKKARTEGEEESYDPYDFSDAEQEMPEVQAHTPKTPESSATGEAKKPELADPRLKAFKAALLEVFKSSHAQSVGLKNVMESINRDNPEPFSLAGVKVALAHMQDDNQIMVSDDIIFLI

SEQ ID NO: 5431 - DNA, 2466 bp, Xenopus tropicalis
  CDS (1)..(2466)
atggaactgggaggccctgcaacagctggagcgactgacacagctggacaactgtttaaagatgaactttctgacaaatgtcaaaagcttttccttgagtttttggaagagtgcaaaggtaaagatggaagcaatctttatgtgtctgcagcagaagaacttgtccgacctgaaaggaacactttggttgtaaatttcactgatattgaatattacaatcaacaactagcgacaactatacaagaagagtattacagggtctaccctcatctttgccgagctgtgcgaagttttgcaaggcagatgggaaacatcccagcaaataaggaattctatgtagccttttctgactttcctgcaagacaaaagattcgagaactcagctctgccaaaattggtacattactaagaattagtggtcaagttgtcagaacccatcctgttcacccagaactggtcagtggtacatttctttgtatggactgccaatcagttgtaaaagatgtggaacaacaatttagatatactcaaccaacgatctgcaagaacccagtctgtgccaatcgccgccgattcacattggatacaaataagtcccgttttgttgattttcaaaaggtaagaattcaagagacacaggcagagttaccacgtggggctattccacgtagcgtggaaataattctacgtgcagaagctgtggaaaccgcaatggctggtgatcgttgtgatttcactggtacactaattgttgtacctgatatctctgctttggcagcaggagatgctcgaatggagactggagccaaagtaacaggtggagaaggttttaactctgaaggtgttcaaggcctaaaagcattgggagtaagagatctgtcttatcggctggcatttttagcctgccacgtgggcgctacaaatccacggtttggaggcaaagatttaagagaggaagaccaaactgctgaaagtataaaaaatcaaatgactgtgcaagaatgggaaaaagtatttgaaatgagtcaagacaaaaatctttaccacaatttatgtacaagccttttccccacaatacatggtaatgatgaaattaaaagaggggtattactgatgctctttgggggggttccgaagaccactatggaaggtacttctctgagaggagatatcaatgtgtgcattgttggagaccccagcacatctaagagtcagtttttaaagcatgtagaagaattcagtcctagagcagtatacactagtgggaaagctagcagtgctgcgggtttaactgctgctgttgtaaaagatgaagagtcacatgagtttgtgattgaagctggagctttaatgttagcagataatggtgtttgctgcatagatgaatttgataagatggatctgaaagatcaagtggccattcatgaagctatggagcaacaaacaatttccatcacgaaagcaggagtgaaggccacattaaatgctcgtacatctatcctggctgcagcaaatcctgttggaggaagatatgaaagatcaaaatcattaaagcataatgtcaatctatccgcgcccattatgtcacgatttgatctatttttcattttggttgatgaatgcaatgaggtaacagattatgcaatagcacgaaggatagtagatttgcatgcgagaaatgaagaatcaattgagcgagtttattcaattgaagatattcagaggtatttgttgttcgctcgtcaattccagccaaaaataacaaaggaagctgaggaattcattgttgagcagtatcgacgactcagacagcgtgatggcagtggagtagcaaagtcatcttggagaattacagtcagacagcttgagagtctgatacgattatctgaaagtatggctcgaatgcactgctctgatgaagttcagccaaaacatgtgaaagaagcctttagactgcttagtaaatcgataattcgtgtggacacaccagatgtcagcttcgatcaaggagaagatgaaaagaacgttgaagaagaggttaataacgctaatctgaacaatggtgaagaagcaatggaaacaaatcaggatgaaccaataaatgacaagccatccacaaatgcaggattaaaaatgtcctttgccgagtacaagcagatctccaacttgttggttttgcacatgcagaagatggaagaagttgaagaagagtgccatctaacaacaactgacttggttaactggtatctgaaagaaatggaagctgaaatagagactgaaacagagctaatccttaaaaagcgtttaattgagaaggtcattcacagattgataaattatgatcatattctgatagaactgaacaaatcagaattaaaaacaatggatgattcaaaggagacaagtgaagatgctgctgaagatcgaattttagttgtgaatccaaattatatgctggaagattaa

SEQ ID NO: 5432 - protein, 821 aa, Xenopus tropicalis
MELGGPATAGATDTAGQLFKDELSDKCQKLFLEFLEECKGKDGSNLYVSAAEELVRPERNTLVVNFTDIEYYNQQLATTIQEEYYRVYPHLCRAVRSFARQMGNIPANKEFYVAFSDFPARQKIRELSSAKIGTLLRISGQVVRTHPVHPELVSGTFLCMDCQSVVKDVEQQFRYTQPTICKNPVCANRRRFTLDTNKSRFVDFQKVRIQETQAELPRGAIPRSVEIILRAEAVETAMAGDRCDFTGTLIVVPDISALAAGDARMETGAKVTGGEGFNSEGVQGLKALGVRDLSYRLAFLACHVGATNPRFGGKDLREEDQTAESIKNQMTVQEWEKVFEMSQDKNLYHNLCTSLFPTIHGNDEIKRGVLLMLFGGVPKTTMEGTSLRGDINVCIVGDPSTSKSQFLKHVEEFSPRAVYTSGKASSAAGLTAAVVKDEESHEFVIEAGALMLADNGVCCIDEFDKMDLKDQVAIHEAMEQQTISITKAGVKATLNARTSILAAANPVGGRYERSKSLKHNVNLSAPIMSRFDLFFILVDECNEVTDYAIARRIVDLHARNEESIERVYSIEDIQRYLLFARQFQPKITKEAEEFIVEQYRRLRQRDGSGVAKSSWRITVRQLESLIRLSESMARMHCSDEVQPKHVKEAFRLLSKSIIRVDTPDVSFDQGEDEKNVEEEVNNANLNNGEEAMETNQDEPINDKPSTNAGLKMSFAEYKQISNLLVLHMQKMEEVEEECHLTTTDLVNWYLKEMEAEIETETELILKKRLIEKVIHRLINYDHILIELNKSELKTMDDSKETSEDAAEDRILVVNPNYMLED

SEQ ID NO: 5433 - DNA, 1416 bp, Xenopus tropicalis
  CDS (1)..(1416)
atgtcgggatttgacgatcttggaatctactacagcgatagttttggcggagagcagccggtgggtgacgacggacaagccaagaaatcacaacttaagaagcggttcagagagttcctcaggcagtaccgtgtagggaccgatcgcaccggcttcaccttcaaatacagagatgaactcaagcgtcactataatctgggagaatactggatagaggtggaaatggaggacctggccagctttgatgaggaccttgcagattatttgtacaaacagccaactgaacatctgcagctgctggaagaggcagcccaggaagttgcagatgaggtgactcgcccacgacctgcaggtgaagaaactatacaggaaatccaagttatgttgcggtctgatgccaaccctgctaatattcgaagcctgaagtccgagcaaatgtctcatcttgtcaaaattcccggcattatcattgctgccaccgctgtgagagccaaggctacgaagatctcaatccagtgtcgtagctgccgaaacacaattggcaacatagctgtgcgtcctggtctagagggatatgctatgccacgtaaatgcaacacggaacaggctggccgtccaaagtgcccattggacccatactttattatacctgacaagtgcaaatgtgtagattttcaaactctgaagcttcaggagtctccagatgctgtacctcatggagagcttccaagacacatgcagttgtattgtgacaggtacttgtgtgataaggttgttcctggaaacagagtgacaatcatgggtatttactcaatccggaagagtggaaagacctcaacaaagggccgggatcgagtgggagttgggatccgcagttcctatataagggtagtgggcatccaagtggatacagaaggaacaggaagaagtgcagcaggtgctataacgccacaagaggaagaggagtttaggcgcctatctgcaaagcctgatatctatgagactgttgctaaaagtattgccccctccatttatggcagtagtgacatcaagaaagccattgcttgcctgctgtttggaggctcccgcaagaggcttccagatggattgaccagaagaggtgatgttaatctgctgatgcttggggatcctggcacagctaaatcacagctgctaaagtttgtggaacgttgctctcctataggggtctatacttctgggaaaggcagcagtgcagctggcctcactgcttcagttatgcgagatccagtgtcccgtaactttattatggaaggaggtgcaatggtgctggcagatggaggggtggtctgcattgatgagtttgataagatgcaaggtgtagttatagtccacctccccagcagcctaactgcaaaatgggaaggtagcaagtaa

SEQ ID NO: 5434 - protein, 471 aa, Xenopus tropicalis
MSGFDDLGIYYSDSFGGEQPVGDDGQAKKSQLKKRFREFLRQYRVGTDRTGFTFKYRDELKRHYNLGEYWIEVEMEDLASFDEDLADYLYKQPTEHLQLLEEAAQEVADEVTRPRPAGEETIQEIQVMLRSDANPANIRSLKSEQMSHLVKIPGIIIAATAVRAKATKISIQCRSCRNTIGNIAVRPGLEGYAMPRKCNTEQAGRPKCPLDPYFIIPDKCKCVDFQTLKLQESPDAVPHGELPRHMQLYCDRYLCDKVVPGNRVTIMGIYSIRKSGKTSTKGRDRVGVGIRSSYIRVVGIQVDTEGTGRSAAGAITPQEEEEFRRLSAKPDIYETVAKSIAPSIYGSSDIKKAIACLLFGGSRKRLPDGLTRRGDVNLLMLGDPGTAKSQLLKFVERCSPIGVYTSGKGSSAAGLTASVMRDPVSRNFIMEGGAMVLADGGVVCIDEFDKMQGVVIVHLPSSLTAKWEGSK

SEQ ID NO: 5435 - DNA, 2475 bp, Danio rerio
  CDS (1)..(2475)
atggagcctggtgtcgaagcggcgggcgtgcacgtgcgcgatgaactgtccgagaagtgtcagaagttgtttctggagtttttggaagagtttcaggataaaaacggcgacgctctatatctgtcggacgcgcaggagctgatccgaccggagagaaacacgctgaccgtgagcttcagcaacatcgagcactacaaccagcagctcgccaccaccatccaggaggagtactacagggtttacccgtttctctgcagagcagttcgtcactttgccagagatcatggaaatattccaccttccaaagagttttatgtggctttttcggagtttccatcaaggcaaaagattcgtgagctctccactgtacgtattggcactttgttgcgcatcagcggtcaggtggtccgaacccaccctgtgcacccagagctggtcagcggcaccttcctctgcctggactgtcagtcggtcatcaaagatgtggagcagcagttcaaatacactcagcccaccatctgcaagaacccagtgtgcgcaaaccgccgccgcttcatgctcgacaccaacaagtcacgcttcgttgacttccagaaggggcgcatccaggagacgcaggcagagctgcctagaggatcaattccccgcagtgtggaggtgattctgagagcagaggctgtggaaactgcacaagcaggagatcgctgtgacttcaccggcactttggttgttgttcctgatgtgtccgccatggcgcttgctggcacaagagcagaaaccagcagcagggtgactgggaaggagggttttgaaactgatggtattcagggactcaaagctttgggtgtccgagagctctcctaccgactggccttcctggctaactatgtggcgccaaccaacccacggtttggagggaaggagcttcgtcaggaggatcagacagctgagagcgtgaagaaccagatgaccgtgctggagtgggagaaagtgttcgagatgagccaagacaagaatctctatcacaacctctgcacgagtctcttccccaccattcatggtaatgatgagattaaacgtggcatcctgctcatgttatttggtggtgttgctaaaacaaccatggaggggacgtctttgcgtggagacatcaacgtgtgtatagttggagaccccagcacatctaagagccagtttctcaagcatgtggaggattttgctcccagagcggtgtacaccagtggtaaagccagcagtgccgcaggtctgactgctgctgtggtcaaagatgaagagtcgcatgagtttgtcattgaagcaggagcactcatgttagcagataatggggtttgttgtattgatgaatttgataagatggatcttaaggaccaggtggccattcatgaagcaatggagcagcagaccatttccatcacgaaggcaggagttaaggccactctgaatgcccgcacatccatcttggctgctgccaaccctatagatggcagatacaaccgtgccaagtctctgaaacagaacgtcaacatgtctgcacctatcatgtctagatttgatctcttcttcattctggtggatgaatgcaatgaggtaacagactatgccattgcccggcgtattgttgatcttcatgccaggaacgttgaatccgtagaaagagtttacagtactgatgaaatccagcgatacatcttgtttgcccgccagtttcagccaaagataaccgtggaggcccaggagtttgtggtggatcagtacaagcgcctgcggcagcgtgatggaggaggaaccactaaatcagcctggcggatcaccgtgaggcagctggagagtatgctgcgtctgtctgagggcatggccaggctctactgctcagatgaggttcaacccaaacatgtgaaagaggcatttaggctcctgaataagtccatcattcgtgtcgactcgcctgatatcaattttgaccaggagcatgatgaagacaatataaacgatcagaatgagctgtttggtaaggagactgaaggtcagaatggaggtgatgtgaacggtcatgcagtggaggacatggagactgatcagactgaaaaaccagagaaaccagccgcagccaaacctgctctcaggatgtcttttgcagagtacaagagagtctccaacctgctggtgctgcacatgcagaagatggagcagctggatgaagactcgtctctgaagaagagtgaactcattaactggtacctgaaggagatcgagagtgaaattgattcggaagctgaactcgttgctaagaagaacctcatcgagagagtgctgtacagactcatcaattttgatcatatcatcatagagctgactaaaacagggctgaaaaagatcagtgaggatggagaagaacccgtctctgaggatgatccgtttctggttgtggatcccaattatatactggaagactaa

SEQ ID NO: 5436 - protein, 824 aa, Danio rerio
MEPGVEAAGVHVRDELSEKCQKLFLEFLEEFQDKNGDALYLSDAQELIRPERNTLTVSFSNIEHYNQQLATTIQEEYYRVYPFLCRAVRHFARDHGNIPPSKEFYVAFSEFPSRQKIRELSTVRIGTLLRISGQVVRTHPVHPELVSGTFLCLDCQSVIKDVEQQFKYTQPTICKNPVCANRRRFMLDTNKSRFVDFQKGRIQETQAELPRGSIPRSVEVILRAEAVETAQAGDRCDFTGTLVVVPDVSAMALAGTRAETSSRVTGKEGFETDGIQGLKALGVRELSYRLAFLANYVAPTNPRFGGKELRQEDQTAESVKNQMTVLEWEKVFEMSQDKNLYHNLCTSLFPTIHGNDEIKRGILLMLFGGVAKTTMEGTSLRGDINVCIVGDPSTSKSQFLKHVEDFAPRAVYTSGKASSAAGLTAAVVKDEESHEFVIEAGALMLADNGVCCIDEFDKMDLKDQVAIHEAMEQQTISITKAGVKATLNARTSILAAANPIDGRYNRAKSLKQNVNMSAPIMSRFDLFFILVDECNEVTDYAIARRIVDLHARNVESVERVYSTDEIQRYILFARQFQPKITVEAQEFVVDQYKRLRQRDGGGTTKSAWRITVRQLESMLRLSEGMARLYCSDEVQPKHVKEAFRLLNKSIIRVDSPDINFDQEHDEDNINDQNELFGKETEGQNGGDVNGHAVEDMETDQTEKPEKPAAAKPALRMSFAEYKRVSNLLVLHMQKMEQLDEDSSLKKSELINWYLKEIESEIDSEAELVAKKNLIERVLYRLINFDHIIIELTKTGLKKISEDGEEPVSEDDPFLVVDPNYILED

SEQ ID NO: 5437 - DNA, 2715 bp, Mus musculus
  CDS (1)..(2715)
atggcggagtcttctgagtctctctcagcatctagccctgcccgtcagcggcgccggatcagtgatcccctcacctccagcccaggccgcagctccagacgtgctgacgccctgacctccagccctggcagagacctccccccatttgaagatgagtctgaggggcttctgggcacagaggggcccatggaggaagaagaggatggagaggaactcattggtgatggcatggagagagactaccgtcccattccggagctcgatgtctacgaggccgagggattggccctggatgatgaagatgtggaggagctgacagccagtcagagagaggcagctgagcggaccatgaggcagcgggaccgtgaggctggcagaggcctgggacgcatgcgccgggggctgctctatgacagcagcgaggaagatgaggagcggcctgcccgtaagcgccgccacgtagaacgcgccacagaggatggcgaggaggatgaagagatgatcgagagtattgagaatctggaggacctcaagggccactcggtgcgcgagcgggtgagcatggcagggcccaggctggagatccaccaccgcttcaagaacttcctgcgcacccacgtggacagccatggccacaacgtcttcaaggagcgcatcagtgatatgtgcaaagagaaccgtgagagtttggtggtaaattatgaagacctggcagcccgggagcacgtgttggcatacttcctgccggaagcaccggctgagttgctgcagatctttgacgaggctgccctggaggtcgtgttggccatgtaccctaaatatgaccgtatcaccaaccacatccatgtgcgcatctcccacctgcctctggtggaggagctgcgttcactgaggcagttgcacctgaaccagctgatccgtaccagtggcgtggtgaccagctgcaccggagtcctgccccagctcagcatggtcaagtacaactgtagcaagtgcaactttgtactggggcctttctgccagtctcagaatcaggaggtgaagcctggctcctgccctgagtgccagtctgctgggccctttgagatcaacatggaggagaccatctatcagaactaccaacgtatccgcatccaggagagtcccggcaaggtggcggctggccgactgccccgttccaaggatgccattctcctcgctgatctggtggacagctgcaagccaggggacgagattgagctgaccggcatttaccataataactatgacggctcgcttaacaccgccaacggctttccagtctttgccactattatcttggccaaccatgttgccaagaaggacaacaaagtagctgtgggggagctcaccgatgaggacgtgaagatgatcaccggtctctccaaggatcagcaaattggagagaagatctttgccagcattgcaccctccatctatgggcatgaagacatcaagagaggcctggctctggccctgtttggaggggagcccaagaacccaggtggaaagcacaaggttcgaggtgacattaatgtgctcttgtgtggggaccctggcacagcaaagtcccaattcctcaaatacatcgagaaagtgtctagccgtgccatcttcaccactggccagggtgcgtcagcagtgggtctcaccgcgtacgttcagcggcatcccgtcagcagagagtggaccttagaggcgggagccctggttctggctgaccggggggtgtgtctcattgacgagtttgacaagatgaatgaccaggacaggaccagcatccacgaggccatggaacagcaaagcatctccatctccaaggctggcatcgttacctcgctgcaagcccgctgcactgtcatagctgctgccaaccccataggaggccgctacgacccttcactgaccttctcagagaatgtagacctcacagagcccatcatttcccgctttgatgtcctgtgtgtggtgagggacactgttgatccagttcaggatgagatgctggcccgctttgtggttggcagccacgtcagacaccaccccagtaacaagaaggatgaagggttgactaatggtggcaccttggagccagccatgcccaacacatatggcgtggagcccctgcctcaggaggtgctgaagaagtatatcatctatgccaaggagagggtccgcccgaagctcaaccagatggaccaggataaagtggccaggatgtacagtgacctgaggaaggagtccatggcaacgggcagcattcccatcacggtgcgccacatcgagtccatgatccgcatggccgaggcccatgcccgcatgcacctgcgggactacgtgatggaagacgatgtcaacatggccatccgagtgatgatggagagcttcattgacacccagaagttcagcgtcatgcggagtatgcgcaagacttttgcccggtatctctccttccggcgagataacaatgatctgctgctcttcatactgaagcagttggtggctgagcaggtgacatatcaacgcaaccgctttggggcccagcaggacaccattgaaatacctgagaaggatctgatggacaaggccaggcagatcaatattcacaacctctctgccttctacgacagcgacctcttcaaattcaacaagttcagccgtgacctgaaacgcaaactgatcctacagcagttctga

SEQ ID NO: 5438 - protein, 904 aa, Mus musculus
MAESSESLSASSPARQRRRISDPLTSSPGRSSRRADALTSSPGRDLPPFEDESEGLLGTEGPMEEEEDGEELIGDGMERDYRPIPELDVYEAEGLALDDEDVEELTASQREAAERTMRQRDREAGRGLGRMRRGLLYDSSEEDEERPARKRRHVERATEDGEEDEEMIESIENLEDLKGHSVRERVSMAGPRLEIHHRFKNFLRTHVDSHGHNVFKERISDMCKENRESLVVNYEDLAAREHVLAYFLPEAPAELLQIFDEAALEVVLAMYPKYDRITNHIHVRISHLPLVEELRSLRQLHLNQLIRTSGVVTSCTGVLPQLSMVKYNCSKCNFVLGPFCQSQNQEVKPGSCPECQSAGPFEINMEETIYQNYQRIRIQESPGKVAAGRLPRSKDAILLADLVDSCKPGDEIELTGIYHNNYDGSLNTANGFPVFATIILANHVAKKDNKVAVGELTDEDVKMITGLSKDQQIGEKIFASIAPSIYGHEDIKRGLALALFGGEPKNPGGKHKVRGDINVLLCGDPGTAKSQFLKYIEKVSSRAIFTTGQGASAVGLTAYVQRHPVSREWTLEAGALVLADRGVCLIDEFDKMNDQDRTSIHEAMEQQSISISKAGIVTSLQARCTVIAAANPIGGRYDPSLTFSENVDLTEPIISRFDVLCVVRDTVDPVQDEMLARFVVGSHVRHHPSNKKDEGLTNGGTLEPAMPNTYGVEPLPQEVLKKYIIYAKERVRPKLNQMDQDKVARMYSDLRKESMATGSIPITVRHIESMIRMAEAHARMHLRDYVMEDDVNMAIRVMMESFIDTQKFSVMRSMRKTFARYLSFRRDNNDLLLFILKQLVAEQVTYQRNRFGAQQDTIEIPEKDLMDKARQINIHNLSAFYDSDLFKFNKFSRDLKRKLILQQF

SEQ ID NO: 5439 - DNA, 2589 bp, Mus musculus
  CDS (1)..(2589)
atgtcgtccccggcatccaccccgagccgccgcagcagccgacgcggacgagtcaccccaacccagtcccttcgaagtgaggaaagcaggtcgtcacccaatcggagacgtagaggcgaagattcttccaccggagagctactgccaatgcccacctcaccaggagccgacctgcagagcccacctgcacagaatgccttgttttccagccctcctcagatgcattctttagctattcctttggactttgatgttagttcaccattgacatatggcactcccagctcgcgagtggaaggaaccccaagaagtggggtgagaggcacacctgtaaggcagaggccagatctgggctcagcacgaaagggtttgcaggtggatctgcagtctgatggcgcagcagcagaagacatcgtaccaagtgaacagtctctaggccaaaagcttgtgatttggggaacagatgtgaatgtggcaacatgtaaagagaattttcagagattccttcagtgttttactgatcctctggccaaagaagaagaaaatgttggcatagatattactcaacctttgtacatgcaacaacttggagagattaatattacaggagagccatttttaaatgtgaactgcgaacacataaaatcatttagcaaaaatctgtatagacagctcatctcctacccacaggaggttataccaacctttgacatggctgtcaatgagatcttctttgaccgttatcctgactccatcttagaacatcagattcaagtcagaccttttaatgcgttgaagacaaagagtatgagaaacttgaatccagaagacattgatcagctcatcaccatcagtggcatggtcatcagaacatcacagctgattccggagatgcaggaggcctttttccaatgccaagtctctgcccacaccacccgggtggagatagatcgaggcagaattgctgagccctgcagttgtgtgcactgccacactacccacagcatggcactgatccacaaccgatcattcttctctgacaagcaaatgatcaaacttcaagagtctcctgaagacatgcctgctgggcagacacctcacactattgtcctttttgcccacaatgaccttgttgacaaggttcaaccaggggacagagtgaacgtcacaggcatatatcgagcagtaccaattcgagttaatccaagagtgagcaacgtgaagtctgtctataaaacccacattgatgtcattcattatcggaaaacggatgcaaaacgtctgcatggccttgatgaagaagcagaacagaaacttttttcagagaaacgtgtgaaattgcttaaggaactttccaggaagccagatatttatgagcggcttgcttcagccttggctcccagcatttatgaacatgaagatatcaaaaagggaatcttacttcagctctttggtggaacaaggaaggatttcagtcacactgggaggggtaaattccgtgctgagatcaacatccttctgtgtggggaccctggcaccagcaagtcccagctgctacagtatgtgtacaacctggtccccagaggccagtacacgtctggaaaaggctccagtgcggtcggcctcaccgcctatgtgatgaaagaccctgagaccaggcagcttgtcctccagacaggtgccctcgtcctgagtgacaatgggatatgctgcatcgatgagtttgacaaaatgaatgaaagcacaaggtctgtgctgcatgaggtcatggaacagcagactctgtccattgcaaaggctgggatcatctgtcagctcaatgcgcgcacctctgtcctggcagcagcaaatcctattgagtctcagtggaatcctaaaaaaacaaccattgaaaatatccaactaccgcacacattgttgtcaaggtttgatctcattttcctcatgctagaccctcaggatgaggcatatgaccggcgtctagctcatcacctggtttcattgtactaccaaagtgaggagcaagtggaggaggagttcctggacatggccgtgctgaaagactacattgcatatgcccatagtaccatcatgccccgactgagtgaggaggccagccaggctctcattgaggcttatgtaaacatgaggaagattgggagtagccgggggatggtttctgcttaccctcgacagctagagtcattaattcgcttagcagaagcccatgctaaagtaagattttcaaacaaagttgaagcaattgatgtggaagaggcaaaacgcctccaccgggaggctctgaagcagtctgcaactgaccctcgtactggcattgtggatatttctattcttactacaggaatgagtgccacttctcgtaaacggaaagaagaattagctgaagcattgagaaaacttattttatctaagggtaaaacaccagccttaaagtaccaacagctgtttgaggatattcggggacagtctgacacagcaattaccaaggacatgtttgaagaagccctgcgagctttggctgatgatgatttcctaacagtgactgggaagactgtccgcctgctctga

SEQ ID NO: 5440 - protein, 862 aa, Mus musculus
MSSPASTPSRRSSRRGRVTPTQSLRSEESRSSPNRRRRGEDSSTGELLPMPTSPGADLQSPPAQNALFSSPPQMHSLAIPLDFDVSSPLTYGTPSSRVEGTPRSGVRGTPVRQRPDLGSARKGLQVDLQSDGAAAEDIVPSEQSLGQKLVIWGTDVNVATCKENFQRFLQCFTDPLAKEEENVGIDITQPLYMQQLGEINITGEPFLNVNCEHIKSFSKNLYRQLISYPQEVIPTFDMAVNEIFFDRYPDSILEHQIQVRPFNALKTKSMRNLNPEDIDQLITISGMVIRTSQLIPEMQEAFFQCQVSAHTTRVEIDRGRIAEPCSCVHCHTTHSMALIHNRSFFSDKQMIKLQESPEDMPAGQTPHTIVLFAHNDLVDKVQPGDRVNVTGIYRAVPIRVNPRVSNVKSVYKTHIDVIHYRKTDAKRLHGLDEEAEQKLFSEKRVKLLKELSRKPDIYERLASALAPSIYEHEDIKKGILLQLFGGTRKDFSHTGRGKFRAEINILLCGDPGTSKSQLLQYVYNLVPRGQYTSGKGSSAVGLTAYVMKDPETRQLVLQTGALVLSDNGICCIDEFDKMNESTRSVLHEVMEQQTLSIAKAGIICQLNARTSVLAAANPIESQWNPKKTTIENIQLPHTLLSRFDLIFLMLDPQDEAYDRRLAHHLVSLYYQSEEQVEEEFLDMAVLKDYIAYAHSTIMPRLSEEASQALIEAYVNMRKIGSSRGMVSAYPRQLESLIRLAEAHAKVRFSNKVEAIDVEEAKRLHREALKQSATDPRTGIVDISILTTGMSATSRKRKEELAEALRKLILSKGKTPALKYQQLFEDIRGQSDTAITKDMFEEALRALADDDFLTVTGKTVRLL

SEQ ID NO: 5441 - DNA, 1761 bp, Archaeoglobus fulgidus DSM 4304
  CDS (1)..(1761): transl_table=11
atggcgatagaggggattgtcaggaaggttactgaagtcaggccgagaattgttgaagccgcctttgcctgcctgaactgcggaagcataaccatggttcctcaggaggacagccagctcagacagccctttgagtgcagcaagtgcagcacgaagaagatgatttttctcccggacagcagcatctccgttgacagtcaaagggtgaagattcaggagtaccccgaaaatctcaggggtggggagcagccgcagacgatagacgtcatacttgaaggtgatttggcaggctccgtgaatccgggggacagggtgataataaacgggatcgtgagggcgaagccgagagggcttgggcagaggaaaatgacgcatatggacctttacatcgaagggaactccgttgaggttctccagcaggagtacgaggagttcgagattaccgagaaggacagggaactgataatgcagcttgccgcaagcgacgacatctacgagaagatagtaaagtcgatagccccctcaatatacggtcatgaggacgtgaagcttgccattgcccttcagcttttcggcggcgtgcccaagaagctgcccgacggcactgaaataaggggggacattcacatccttcttgtgggcgatccgggcgttgccaaatcgcagcttttgaagtacgtccacagaatagctccgcggagcgtttacacaaccggaaaggggacaacaactgcaggcctcactgccaccgcagtcagagatgaggtggatggcaggtggactcttgaagccggagccctcgttcttgcggataagggcattgcgttggttgatgagattgacaaaatgcgtaaggaagacacctcggcattgcacgaagcacttgagcagcaaaccatcagcgttgccaaagcgggaataaacgccatcttaaaggccagatgcgcgttgctcggtgcggcaaatccgaagtacggcagattcgagaaattcactcccgttcctgagcaaattgagatgtcccccaccctcctttcaaggttcgacctgattttcgttctgaaggacgagccggatgaggagaaggacaagaggctcgttgaacacattctctactctcaccagcttggagagatgacggaaaaggccaagaacgttgccgcagagtacgacgaggagttcataaggcagaggtcggagaggatagttccggaaattgaccccgacctcctaaggaagtacatagcatatgcaagaaaaaccgtctatcccgttttgacagatgaggctaaggaaaaaatcaaggagttctacttgtcactcaggtcgagagttaaggagaactcccccgttcccataaccgcaagacagcttgaaagcatcgtcaggcttgcagaagcctctgcgagagtcaggctcagcgacagggtggagccggaggacgtggacagggttatcgaaatcatgatgaggagtctcagggagattgcggttgaccccgaaacgggggagatggacatagacctggcctactcgggcacctcgaaaacgcagagggacagaatcatgatactgaagaaaatcatcgagcagcttgaggaggagcacgaaaggggtgttccggaggagctaattctggaggaggcagagaaggagggaatcgataggacgaaggccaaagagattctttccaagctcaaactgcacggagaggtttacactccaaaacacgggcattacaaattggtaagcaaactttag

SEQ ID NO: 5442 - protein, 586 aa, Archaeoglobus fulgidus DSM 4304
MAIEGIVRKVTEVRPRIVEAAFACLNCGSITMVPQEDSQLRQPFECSKCSTKKMIFLPDSSISVDSQRVKIQEYPENLRGGEQPQTIDVILEGDLAGSVNPGDRVIINGIVRAKPRGLGQRKMTHMDLYIEGNSVEVLQQEYEEFEITEKDRELIMQLAASDDIYEKIVKSIAPSIYGHEDVKLAIALQLFGGVPKKLPDGTEIRGDIHILLVGDPGVAKSQLLKYVHRIAPRSVYTTGKGTTTAGLTATAVRDEVDGRWTLEAGALVLADKGIALVDEIDKMRKEDTSALHEALEQQTISVAKAGINAILKARCALLGAANPKYGRFEKFTPVPEQIEMSPTLLSRFDLIFVLKDEPDEEKDKRLVEHILYSHQLGEMTEKAKNVAAEYDEEFIRQRSERIVPEIDPDLLRKYIAYARKTVYPVLTDEAKEKIKEFYLSLRSRVKENSPVPITARQLESIVRLAEASARVRLSDRVEPEDVDRVIEIMMRSLREIAVDPETGEMDIDLAYSGTSKTQRDRIMILKKIIEQLEEEHERGVPEELILEEAEKEGIDRTKAKEILSKLKLHGEVYTPKHGHYKLVSKL

SEQ ID NO: 5443 - DNA, 2100 bp, Aeropyrum pernix K1
  CDS (1)..(2100): transl_table=11
gtgaacgtggccgaggagatgcttagtggagaggaaaccctggctgtgggcgagaggttcaagacattcttagagaacttcagaacagaggaggggaagctaaagtacgtagaagcgatccgcaggatgataaactatgaagagactagcctcgaagtcgagtttaaggacctctaccgctacgaccccctcctcagcgaaatccttctagagaagccgagggagtttctgaaggaggcgtccgaagcccttaaagagattgtcgcgcaggagagccccgagtatgcgcaggggagggtgtttaccccccggtttacagggctcttcgacacggagaggattagagatataggtagcgatcacgtggggaagctagtacagataaacggtatcgtgaccaggatgcacccccgcgccactaggatggtgcgagctaggttcaggcacgacaggtgtggagccgagttctggtggcccgccaacgaggacgaggttctgggggaaaggattgagaggcctagcatatgccccgtgtgtggggagggcggggggaagtttaccctagtcagggacaagagcctgtacatagactggcagaagattatggttcaggagaggccggaggacgtgcccggcggccagatacctagaagtatagaagtccacctgagcagagacctggttgagaaggttagaccgggggatagggttaagatagttggtgttgtagggctccagtcgttctcctcctcaagcacgctatacagcctctacatggaggcgaacagcatactcctggaggagaagatcctggaggaggtgagcataacaagagaggatgaggagaagatactccagctctcccgcgacccatggattaaggagaagataatagcgagcatagcccccacgatatacggccactgggacctcaaggaggccatagcactcctcctcttcggcggcgtgccgaagcagaggcccgacggcaccaggactaggggtgatatacacgttctcttcgtgggagaccccggcgtggccaagagccagctgctccagagcacagcacaggtggcgcctagggtagtctacacgacggggaagggtagcacggcagccggcctcacagcagcggtgctcagggacccgaggacgggcgagtacttcctggaggcgggcgccctagtacttgccgacgggggtatagccgttatcgacgagttcgacaagatgtctaaggaggacaggggcgtcatacacgaggctatggagcagcagaccgtgagcatagcgaaggctgggataaaggctaccctcagcgcgagggccagcctacttgctgcgggcaaccccaagttcggctactacgacccgtcccgcagcttcgtcgacaacgtagacctcccggcacccataatctcgaggttcgacctgatattcgtggtccgggatgtgatagagaggagtagggacgagatgctagccagctacgtcctggagacccacactaatgtcgagctgttcaagcctgagatagatccggatctgctgaggaagtacatagccttcgcgaggaaacacgtcaagccaaggctaacgccccaggctaagaagctgctgaaagacttctacgttgagatgaggagcagcgccctccaccactcgagccaagagggcgcgaagccagtgcccataactacgaggcagcttgaagccctcatacgactgacagaggcgcacgccaggatgtccctgaagcaggaggctaccgaggaggacgccatagccgccatacgcataatgaccagcgtgctgcagagtataggcctagacctggagaccggtgagatcgacattgggataataatgacgggggcaagctttaggtcgagaaagataatgtccgaggttctagatcttataaaaagcatagtggaggaggagaggggcggtcaaggctgcgtcagggcttcggagattgtgaggaggctgggtgagaagaacataccagaggagaaggtgagggacgctatagacaagctgtacaggcaggggctgataatagagattaggaccgagtgctacaaggcggtctag

SEQ ID NO: 5444 - protein, 699 aa, Aeropyrum pernix K1
MNVAEEMLSGEETLAVGERFKTFLENFRTEEGKLKYVEAIRRMINYEETSLEVEFKDLYRYDPLLSEILLEKPREFLKEASEALKEIVAQESPEYAQGRVFTPRFTGLFDTERIRDIGSDHVGKLVQINGIVTRMHPRATRMVRARFRHDRCGAEFWWPANEDEVLGERIERPSICPVCGEGGGKFTLVRDKSLYIDWQKIMVQERPEDVPGGQIPRSIEVHLSRDLVEKVRPGDRVKIVGVVGLQSFSSSSTLYSLYMEANSILLEEKILEEVSITREDEEKILQLSRDPWIKEKIIASIAPTIYGHWDLKEAIALLLFGGVPKQRPDGTRTRGDIHVLFVGDPGVAKSQLLQSTAQVAPRVVYTTGKGSTAAGLTAAVLRDPRTGEYFLEAGALVLADGGIAVIDEFDKMSKEDRGVIHEAMEQQTVSIAKAGIKATLSARASLLAAGNPKFGYYDPSRSFVDNVDLPAPIISRFDLIFVVRDVIERSRDEMLASYVLETHTNVELFKPEIDPDLLRKYIAFARKHVKPRLTPQAKKLLKDFYVEMRSSALHHSSQEGAKPVPITTRQLEALIRLTEAHARMSLKQEATEEDAIAAIRIMTSVLQSIGLDLETGEIDIGIIMTGASFRSRKIMSEVLDLIKSIVEEERGGQGCVRASEIVRRLGEKNIPEEKVRDAIDKLYRQGLIIEIRTECYKAV

SEQ ID NO: 5445 - DNA, 2787 bp, Arabidopsis thaliana
  CDS (1)..(2787)
atggcgggagaaaattccgataacgagccgtcttcaccagcttcaccttcttccgctggattcaacacagatcagttaccaatcagtacaagccaaaactccgaaaatttctccgatgaagaagaagcagctgtagatacccaagtcattagagatgagcctgacgaagcggaggatgaagaagaagaagaaggagaagatctcttcaatgatacttttatgaacgattatcggaagatggatgagaatgatcagtatgagtctaatggaatagatgattccgtcgatgatgaaagagatttaggtcaggctatgcttgaccgtcgtgctgctgacgctgatcttgatgctcgtgaaaatcgacttgcgaatcgcaagcttcctcatcttcttcacgataacgattcagatgattggaactatagaccttcgaagaggtctcgaactacggttccaccgagaggtaatggtggtgatcctgatgggaatcctccaagttcgccaggagtgtcacagccagatatctctatgactgatcaaactgatgattatcaagatgaggatgataatgatgatgaagcagagtttgagatgtataggattcaaggaactctgagggaatgggttatgagagatgaagtgagacggtttattgctaagaagtttaaagactttttgcttacgtatgttaaaccaaagaatgagaatggagatattgaatatgttcctaataagtgcagtctggaaattgattacaaagaattcatacacgtccacccgaatattgcaatctggcttgcggatgctccacaacctgtgcttgaagtaatggaggaagtttctgaaaaggtcatctttgatctgcatccaaactacaagaatattcacacgaagatatatgttcgtgttaccaacctaccagttaatgatcagattcggaacatcaggcagattcatcttaacacgatgatccgtatcggtggagttgtcactaggcgttctggggtctttcctcagctgcagcaagtgaaatatgattgtaacaagtgtggagcagttttggggcctttcttccaaaactcttattcagaagtcaaggtcggttcttgttctgaatgccagtcaaaaggaccgtttactgttaatgtcgaacagacaatatacaggaactatcagaagcttacaatccaagagagtccaggaacagtgcctgctggacgacttccaagacacaaagaagttatcctgctgaatgaccttattgattgcgctcgtcctggggaagaaattgaggttactggcatatataccaacaactttgacctatctttgaacacaaagaatgggtttccagtctttgccactgtggtggaagctaactatgttacaaagaaacaagacctcttctctgcgtacaagctaacccaagaagacaagacacaaatcgaagagctatccaaggatccacgaatagttgaacgtatcattaagtcaattgctccgtcaatatatggccacgaagatatcaaaacagctcttgctcttgctatgtttggtggccaagagaaaaatatcaaagggaaacacagattgcgtggagatattaatgtacttttactaggtgatccaggaacagcaaaatcacaatttctgaagtatgttgaaaaaactggtcaaagagctgtctacacgactggaaagggagcttctgctgttggtctaaccgcagcagtacacaaagatccagttacaagggagtggacgcttgaaggaggggctcttgtacttgctgaccgaggaatttgtcttatcgatgagtttgacaagatgaacgaccaggacagggtgagtatccatgaagccatggaacaacagagtattagtatatcgaaggcaggaatagttacttctcttcaagctcgttgctctgttattgctgcagctaatccagttggtggaaggtatgattcatcgaaatcatttgcacaaaatgtcgagttgacagatccgatcctttctcgttttgatatcttgtgtgttgtcaaggatgtggttgacccagttacagatgaaatgctagctgaatttgttgtcaatagccacttcaagtcacaacccaaaggtggtaagatggaagatagcgatcccgaagatggcattcagggatctagcgggtcaactgatccggaggtccttcctcagaacctgctgaagaaatacttaacatactcgaagttgtatgtattcccaaaactgggtgaactagatgccaagaagttagagactgtttatgctaatctaagacgagaatcaatgaacggacaaggagtttctatagcgacaaggcaccttgagtccatgatccgaatgtctgaagcacatgctaggatgcaccttaggcaatatgtcacagaagaggatgttaatatggccattcgagtcctacttgactctttcatatcaacccagaaatttggtgtccagagaactctaagagagagtttcaaacggtacattacatacaaaaaggacttcaactcattgctgctcgttcttctcaaagagctcgtaaagaacgccttgaagtttgaagaaatcatttcaggatcgaactcaggactacctacaatcgaggttaagatagaggaactgcagacaaaggccaaggaatacgacattgcagatctacgacccttcttttcaagcacagatttttccaaagctcacttcgagttggatcatggccgaggaatgatcaagtgtccaaaaaggctgatcacttggtaa

SEQ ID NO: 5446 - protein, 928 aa, Arabidopsis thaliana
MAGENSDNEPSSPASPSSAGFNTDQLPISTSQNSENFSDEEEAAVDTQVIRDEPDEAEDEEEEEGEDLFNDTFMNDYRKMDENDQYESNGIDDSVDDERDLGQAMLDRRAADADLDARENRLANRKLPHLLHDNDSDDWNYRPSKRSRTTVPPRGNGGDPDGNPPSSPGVSQPDISMTDQTDDYQDEDDNDDEAEFEMYRIQGTLREWVMRDEVRRFIAKKFKDFLLTYVKPKNENGDIEYVPNKCSLEIDYKEFIHVHPNIAIWLADAPQPVLEVMEEVSEKVIFDLHPNYKNIHTKIYVRVTNLPVNDQIRNIRQIHLNTMIRIGGVVTRRSGVFPQLQQVKYDCNKCGAVLGPFFQNSYSEVKVGSCSECQSKGPFTVNVEQTIYRNYQKLTIQESPGTVPAGRLPRHKEVILLNDLIDCARPGEEIEVTGIYTNNFDLSLNTKNGFPVFATVVEANYVTKKQDLFSAYKLTQEDKTQIEELSKDPRIVERIIKSIAPSIYGHEDIKTALALAMFGGQEKNIKGKHRLRGDINVLLLGDPGTAKSQFLKYVEKTGQRAVYTTGKGASAVGLTAAVHKDPVTREWTLEGGALVLADRGICLIDEFDKMNDQDRVSIHEAMEQQSISISKAGIVTSLQARCSVIAAANPVGGRYDSSKSFAQNVELTDPILSRFDILCVVKDVVDPVTDEMLAEFVVNSHFKSQPKGGKMEDSDPEDGIQGSSGSTDPEVLPQNLLKKYLTYSKLYVFPKLGELDAKKLETVYANLRRESMNGQGVSIATRHLESMIRMSEAHARMHLRQYVTEEDVNMAIRVLLDSFISTQKFGVQRTLRESFKRYITYKKDFNSLLLVLLKELVKNALKFEEIISGSNSGLPTIEVKIEELQTKAKEYDIADLRPFFSSTDFSKAHFELDHGRGMIKCPKRLITW

SEQ ID NO: 5447 - DNA, 2184 bp, Arabidopsis thaliana
  CDS (1)..(2184)
atgtcaggatgggacgaaggagcagtttactacagcgaccagccgcagttcccggaggccggagacgccgcaaccatcagtccccacgccgtcttaaccaaatttaaggaattcattcgaaacttcgagatcgaacagaattgtttcccctacagagaagctctcctcgataaccctaagcgacttgttgtccacctcgaagatctcctctcctttgattccgatctcccctccttaatccgatctgctcctgccgattatctccctgtgtttgagaaagcagctggtgaagtgttgactggattgaaaatgagggaggctaatgagggaggggtaatggaggaacctctgactagagatgtgcagattttgctcacttcaagagaggatccagtatcaatgagattacttggggcacagtacatctcaaagttggtgaaaatctctgggattagtattgcagcttcgagagtgaaagcaaaggcgacttatgtgtttttggtatgtaagaattgtaaaaagacaagggaagttccatgtcgtccgggtcttggtggggcaattgttcctcgatcatgtgataatattccacagcctggagaggagccttgccctcttgatccttggatggtggttcctgataggagccagtatgttgatcaacagaccttaaagctacaggagaatccggaggatgttcctactggagagcttccaagaaatatgcttctctcagttgatcggcatcttgtacaaacaattgtacctggaaccagactgacagtaatgggtatctacagcattttccaagcttcgtcatcatctaactcgcataaaggagcagttgcaattcgccagccttatatccgagttgttggactggaagacacaaatgaggccagttcccgtggccctgccaacttcactcctgacgaagaggaagaattcaaaaagtttgctgatagtcaagatgtatacaagaacatttgcaccaagatcgctccttctatatttggccatgaggatgtgaagagagcagctgcgtgtcttctctttggaggatccaggaagagcctgcccgatggagtgaaactaagaggtgatattaatgttttgcttttgggagacccatcaactgcaaaatcacagtttcttaagtttgtggagaagacggctccaattgctgtttatacatctggaaagggttcatcggctgctgggctcacagcttcggtgattcgagatagcagcactcgagagttctatcttgaaggtggtgctatggttttggctgatggaggtgttgtgtgtattgatgaatttgacaagatgagaccggaagatagggttgctattcatgaggcaatggagcagcagacaatctccattgcaaaagctgggataacaactgtccttaattctagaacctcggtgcttgctgctgctaacccgccatctggtcgatatgatgaccttaagactgctcaggacaatatcgatctgcagacaacaattctttctagatttgatcttatcttcattgtcaaggacatcaggaagtattcccaagacaaggaaatagccagccatattataagggttcatgcatctgcaaacaaattttcggatgaaaacacagattctaaagaagataattggctcaaaaggtatatacaatactgtcgagcaaggtgtcatccccgtctctcaaaagacgctgctgagaacctgcagcggaaatatgtcacaatcagaatggatatgaagagacgtgcacatgaaacaggagaggctgctccgatacctatcacagtgagacaactcgaagctattgtcagactgagtgagtcacttgcaaaaatgagactgtcacacgaggccacaccagatgatgtagacaaagcttttaaactttttgatacctcgacaatggatgcagcaagatcagggataaatcaacagataaacataacaggcgagatggccaatgaaatcaagcaagcggaaacacagataaagagaagaatggggatcggagctcgattatcagagagaagactgatagaggatctggctagaatgggaatgaacgattcaatggtgaggagagctttgttgataatgcaccagagaggtgaagttgagtaccagcgagagagacgttctattgtccgcaaagcttga

SEQ ID NO: 5448 - protein, 727 aa, Arabidopsis thaliana
MSGWDEGAVYYSDQPQFPEAGDAATISPHAVLTKFKEFIRNFEIEQNCFPYREALLDNPKRLVVHLEDLLSFDSDLPSLIRSAPADYLPVFEKAAGEVLTGLKMREANEGGVMEEPLTRDVQILLTSREDPVSMRLLGAQYISKLVKISGISIAASRVKAKATYVFLVCKNCKKTREVPCRPGLGGAIVPRSCDNIPQPGEEPCPLDPWMVVPDRSQYVDQQTLKLQENPEDVPTGELPRNMLLSVDRHLVQTIVPGTRLTVMGIYSIFQASSSSNSHKGAVAIRQPYIRVVGLEDTNEASSRGPANFTPDEEEEFKKFADSQDVYKNICTKIAPSIFGHEDVKRAAACLLFGGSRKSLPDGVKLRGDINVLLLGDPSTAKSQFLKFVEKTAPIAVYTSGKGSSAAGLTASVIRDSSTREFYLEGGAMVLADGGVVCIDEFDKMRPEDRVAIHEAMEQQTISIAKAGITTVLNSRTSVLAAANPPSGRYDDLKTAQDNIDLQTTILSRFDLIFIVKDIRKYSQDKEIASHIIRVHASANKFSDENTDSKEDNWLKRYIQYCRARCHPRLSKDAAENLQRKYVTIRMDMKRRAHETGEAAPIPITVRQLEAIVRLSESLAKMRLSHEATPDDVDKAFKLFDTSTMDAARSGINQQINITGEMANEIKQAETQIKRRMGIGARLSERRLIEDLARMGMNDSMVRRALLIMHQRGEVEYQRERRSIVRKA

SEQ ID NO: 5449 - DNA, 2544 bp, Arabidopsis thaliana
  CDS (1)..(2544)
atggcttctgattcttctctcggcaacaccaacgacggtcctccttctcccggagaaaacgtttcaagccctatcgaaaacacatactcttcccccgccgcacttcaccgtcgccggcgaggaagatcctctactcccacgcaattcgcaactcctccaccaccgccttcacgtctcgcatcatccaattccactcctccaacatctcgtccttccgccgccagatctaaaggaagaaatggacacggaggtggcggtggtggcggtggtggcggagacccagggacgccaatgtccactgacgagccactgccttcttccgatgacggtgaagaagacggaggcgacgatactactccgactttcgtttggggaactaacatcagtgtgcaagatgttaaatctgcgattgaaatgtttgttaagcatttcagagaagctagagagaatagtgatgatttgtttagagaagggaagtatatggtttcgataaggaaggtgattgagattgaaggagaatggattgatgttgatgcgtttgatgtgtttgattatgatcctgatttgtataacaagatggttcgttatcctttggaagttctcgctatcttcgatattgtgctgatggatattgtttccacgattaatcgtttgttcgagaaacatgttcaagttaggatttttaacctcaggacatctacttccatgagaaatctcaatccatctgatatcgagaagatgatctctttgaaaggtatgataattcggagtagctctatcattcctgaaataagggaagctgtgtttagatgccttgtttgtggttacttctctgaccccatcatcgttgatagagggaaaataagtgagcctcctacttgcttgaaacaagagtgcatgaccaagaactccatgacactagtgcacaaccgatgcaggtttgctgataagcagattgtgaggcttcaggaaacacctgatgagattccagaaggaggaacacctcacacagttagcttgttgctgcatgataagctagttgataatgggaagcctggtgatagaattgaggtcaccggaatttacagagcaatgactgtccgagtgggacctgctcacaggactgtgaaatctgtgtttaagacctatatcgattgccttcacataaagaaagcaagtaagttaagaatgtctgctgaggatcctatggatgttgacaatagtctgcgtagagttgatgaagatgtcgagttagatgaggagaagctgaggaagtttcaggaactctctaaacaaccagatatatatgagaggcttagtagatcactagcaccaaacatctgggagttggatgatgttaaaaagggtcttctatgccagctttttggagggaatgctttgaacttagcatctggtgctaattttcgtggtgacatcaacatcttacttgttggtgaccctggtacgagcaagtcccagctgctccagtacattcataagctttcaccccgtggcatttacacaagtgggcgagggagctcagctgttggtttaacagcttatgtagctaaagatcctgagacaggagaaactgttttggagagtggagctcttgttcttagtgaccgaggtatctgctgtattgatgaatttgacaaaatgtctgacagtgcgaggagcatgctacacgaggtgatggaacagcagactgtttcaatagcaaaggctggtattattgcatctctaaatgccagaacctctgtgttggcttgtgcaaatcctagtggctcacgttataatccccggctttctgttattgagaatattcaccttcctccaaccttgctatctagattcgatttgatctacttgattcttgacaagcccgatgagcagactgaccgaaggcttgcaaagcatattgtggcccttcactttgagaacgctgagagtgctcaggaggaagctatagatattactacactgacaacttatgttagctatgcccgcaagaacattcatcctaaactgtcagatgaagctgcagaggagttgacccgaggatatgttgagctgagaaaagcagggaagtttgctggcagtagcaaaaaggtcataacagcaactcctaggcagattgaaagtttgatcagacttagtgaggccttggctcggatgcgcttctccgaatgggttgaaaagcatgacgtggacgaggcatttcgacttctcagagttgcaatgcagcaatcagcaacggatcacgccacagggaccattgacatggacctgataaatactggagtgtcagcaagtgaacgaatgaggcgggatacctttgcgtcgtcaattagagacatagctctggagaagatgcaaattggaggatcatcaatgcgcttatccgagttacttgaagaactgaagaagcatggaggcaacataaacaccgaaattcatcttcatgatgttagaaaagcagtcgcgacgctagcgagtgaaggatttctggtagctgaaggtgatagaatcaagagagtataa

SEQ ID NO: 5450 - protein, 847 aa, Arabidopsis thaliana
MASDSSLGNTNDGPPSPGENVSSPIENTYSSPAALHRRRRGRSSTPTQFATPPPPPSRLASSNSTPPTSRPSAARSKGRNGHGGGGGGGGGGDPGTPMSTDEPLPSSDDGEEDGGDDTTPTFVWGTNISVQDVKSAIEMFVKHFREARENSDDLFREGKYMVSIRKVIEIEGEWIDVDAFDVFDYDPDLYNKMVRYPLEVLAIFDIVLMDIVSTINRLFEKHVQVRIFNLRTSTSMRNLNPSDIEKMISLKGMIIRSSSIIPEIREAVFRCLVCGYFSDPIIVDRGKISEPPTCLKQECMTKNSMTLVHNRCRFADKQIVRLQETPDEIPEGGTPHTVSLLLHDKLVDNGKPGDRIEVTGIYRAMTVRVGPAHRTVKSVFKTYIDCLHIKKASKLRMSAEDPMDVDNSLRRVDEDVELDEEKLRKFQELSKQPDIYERLSRSLAPNIWELDDVKKGLLCQLFGGNALNLASGANFRGDINILLVGDPGTSKSQLLQYIHKLSPRGIYTSGRGSSAVGLTAYVAKDPETGETVLESGALVLSDRGICCIDEFDKMSDSARSMLHEVMEQQTVSIAKAGIIASLNARTSVLACANPSGSRYNPRLSVIENIHLPPTLLSRFDLIYLILDKPDEQTDRRLAKHIVALHFENAESAQEEAIDITTLTTYVSYARKNIHPKLSDEAAEELTRGYVELRKAGKFAGSSKKVITATPRQIESLIRLSEALARMRFSEWVEKHDVDEAFRLLRVAMQQSATDHATGTIDMDLINTGVSASERMRRDTFASSIRDIALEKMQIGGSSMRLSELLEELKKHGGNINTEIHLHDVRKAVATLASEGFLVAEGDRIKRV

SEQ ID NO: 5451 - DNA, 2001 bp, Methanothermobacter thermautotrophicus str. Delta H
  CDS (1)..(2001)
atgatgaaaaccgtggataagagcaagacacttacaaaatttgaggaattcttttcactgcaggactacaaggacagggtatttgaggcaatagagaaatatccaaacgtcagatcaattgaagttgattatcttgaccttgaaatgtttgaccctgaccttgcagacctcctcatcgaaaaacccgatgatgtgataagggcggcccagcaggccataaggaacatcgaccgcctccgaaagaatgtggacctcaacataaggttcagcgggatcagcaacgtaatacccctcagggagctccggagtaaattcataggtaagttcgtggcagttgatggcatcgtcaggaagaccgatgagataaggccaaggatagttaaggccgtctttgagtgccgtgggtgtatgcggcaccatgcggtaacacagtcaaccaacatgatcacagagccatcactctgctcagagtgtggtgggagatccttcaggctccttcaggacgaatccgagttcctggacacccagacactgaaactccaggagcccctggagaacctttccggtggggaacagccccggcagataacagttgtcctggaggacgacctggttgacaccctcacacccggggatattgtgagggtgaccggcaccctcaggacggtgcgggacgagagaacaaaacgtttcaagaacttcatctacgggaactacaccgaattccttgaacaggaatttgaggagctccagataagtgaagaggatgaggaaaagataaaggagcttgcaggggaccccaacatctatgagaagatcataaggtccaccgcaccatccatacacggctaccgtgaggttaaggaggccatagccctccagctctttggaggaaccgggaaggaactggatgataagaccaggctccgtggggatatccacatactcatagtgggggacccgggtatcggtaagtcacagatgctcaagtacgtctcaaagctggcccccagggggatatacaccagcggtaagggtacctcaggggtcggtctcacagcggcagccgtgagggacgaattcggtggctggtcacttgaggcaggggccctggtcctcggggataagggtaacgtctgtgtggacgaacttgacaagatgcgtgaggaggaccgctcagccatacacgaggccctggagcagcagaccatcagcatagctaaggcagggataatggcaaccctgaattcccggtgttcggtcctggcagctgcaaaccccaagttcggaagattcgatagttacaagtcaattgcagagcagatagatcttccatcaacaatactatcacgtttcgacctcatattcgtggttgaggacaaaccggatgaggagaaggacagggagcttgcaaggcacatcctcaagacacacaaggaggaccacatgcccttcgagattgaccctgaactcctgaggaagtacatagcctatgcaaggaagaacgtcaggccggtcctcacagatgaggccatgcaggtcctggaggacttctatgtctccatgagggccagcgccgcagatgaggactcaccggtccccataaccgcgaggcagctggaggcccttgtgcgtctatcagaggccagtgccaagataaaacttaaggaacatgttgaggcagaggatgcaaggaaggcaataaaactgtcacaggcctgcctcaaacaggtcggctatgaccccgagacaggcaagatagatatagacaaggttgaggggaggacaccaaaatcagagagggataagttcagacttctccttgaactcataaaggaatatgaggatgactacggtggcagggcacccaccaatattcttataactgagatgatggatagatataatgtaagtgaggaaaaggttgaagaactaataaggatcctcaaggacaagggagccatatttgaacccgcaaggggataccttaagatagtctga

SEQ ID NO: 5452 - protein, 666 aa, Methanothermobacter thermautotrophicus str. Delta H
MMKTVDKSKTLTKFEEFFSLQDYKDRVFEAIEKYPNVRSIEVDYLDLEMFDPDLADLLIEKPDDVIRAAQQAIRNIDRLRKNVDLNIRFSGISNVIPLRELRSKFIGKFVAVDGIVRKTDEIRPRIVKAVFECRGCMRHHAVTQSTNMITEPSLCSECGGRSFRLLQDESEFLDTQTLKLQEPLENLSGGEQPRQITVVLEDDLVDTLTPGDIVRVTGTLRTVRDERTKRFKNFIYGNYTEFLEQEFEELQISEEDEEKIKELAGDPNIYEKIIRSTAPSIHGYREVKEAIALQLFGGTGKELDDKTRLRGDIHILIVGDPGIGKSQMLKYVSKLAPRGIYTSGKGTSGVGLTAAAVRDEFGGWSLEAGALVLGDKGNVCVDELDKMREEDRSAIHEALEQQTISIAKAGIMATLNSRCSVLAAANPKFGRFDSYKSIAEQIDLPSTILSRFDLIFVVEDKPDEEKDRELARHILKTHKEDHMPFEIDPELLRKYIAYARKNVRPVLTDEAMQVLEDFYVSMRASAADEDSPVPITARQLEALVRLSEASAKIKLKEHVEAEDARKAIKLSQACLKQVGYDPETGKIDIDKVEGRTPKSERDKFRLLLELIKEYEDDYGGRAPTNILITEMMDRYNVSEEKVEELIRILKDKGAIFEPARGYLKIV

SEQ ID NO: 5453 - DNA, 1647 bp, Sulfolobus tokodaii str. 7
  CDS (1)..(1647): transl_table=11
gtgtttaaacacattaatccagattgtatgcaagattttgtatggccaccagaaggagaatttgatgaaattattgaactacctacaacatgtccggtgtgtggaaaagctggacaatttaaacttattgaggacagatcagaattcatagattggcaaaaagcagtcattcaagagaggccagaagaaattccacctggacagttacctagacaacttgaagtagtctttgaagacgatttagttgattctgcccgtcctggagatagagtgaagatagttggaattttagagataaagaaagattctcaaataaaaagagggagcaaagctatctttgatttttatttgaaagttaatagtatagaaatttcacaaaaagtattggatgaagtaaagatctcagaagaagatgagaaaaaaattagagaattatctagagatccttggataagagagaagataattagttcaatagcgccatcaatatacggacattgggagataaaggaagcaatagcattagccctatttgggggagtaccaaagataatggaagatggtaccagagtaagaggagatatacatgtactaattattggtgatccaggtacagcgaaatctcaaattttacagtttgctgcaagagttgctcctagagctgtatatacaactggaaaaggttctactgctgctggattaacagctacggtaactagagataaaaatactggagattattatttagaagctggtgcattagtattagcagatggaggagtcgcagtaatagatgaaattgataaaatgagagaagaagatagagtagcaatacatgaagcaatggaacagcaaacagtctctatagcaaaagctggaattgttgctaagctaaatgcaagagctacagtagtagctgcaggaaatcctaagttaggaagatatatagctgaaagaggaatagctgaaaatattaatttaccacctactatactttcaagatttgatttgatatttatactaatagataaacctggtgtagaagatcaattattagcttcacatatattaaatgttcatgctggtaaaacaaagagtacagaaattatagatgtagatttacttaagaagtacatagcatatgcaaggaagaatgtatttccaaaactgagtgatgaagcaaagagtttattgcaagatttcttcgtagagatgagaaagaagagttctgaatcaccagattctccaataattataaccccaagacaacttgaagccttaataagaatatctgaagcttatgcaagaatggcactaaaaaatgaagttacgagagaagatgctgaaagagcaataaatataatgagaatattcctcgagaatgtaggattagatgtagaatctggcaaaatagatattgatacgattatgactggaaagccaaagagtgcaagagaaaaaatggccagaatactagaaatcatcgataccttagctggcacaaacgagtgtgcaaaagtaaaagagattgtaaaagaagctgagggaataggaattgataaagcaagtgtagaaaaattattaaccgatatgagaaaacaaggcttaatttacgaatctagaccagattgttatagaaaagtctaa

SEQ ID NO: 5454 - protein, 548 aa, Sulfolobus tokodaii str. 7
MFKHINPDCMQDFVWPPEGEFDEIIELPTTCPVCGKAGQFKLIEDRSEFIDWQKAVIQERPEEIPPGQLPRQLEVVFEDDLVDSARPGDRVKIVGILEIKKDSQIKRGSKAIFDFYLKVNSIEISQKVLDEVKISEEDEKKIRELSRDPWIREKIISSIAPSIYGHWEIKEAIALALFGGVPKIMEDGTRVRGDIHVLIIGDPGTAKSQILQFAARVAPRAVYTTGKGSTAAGLTATVTRDKNTGDYYLEAGALVLADGGVAVIDEIDKMREEDRVAIHEAMEQQTVSIAKAGIVAKLNARATVVAAGNPKLGRYIAERGIAENINLPPTILSRFDLIFILIDKPGVEDQLLASHILNVHAGKTKSTEIIDVDLLKKYIAYARKNVFPKLSDEAKSLLQDFFVEMRKKSSESPDSPIIITPRQLEALIRISEAYARMALKNEVTREDAERAINIMRIFLENVGLDVESGKIDIDTIMTGKPKSAREKMARILEIIDTLAGTNECAKVKEIVKEAEGIGIDKASVEKLLTDMRKQGLIYESRPDCYRKV

SEQ ID NO: 5455 - DNA, 2472 bp, Caenorhabditis elegans
  CDS (1)..(2472)
atgccacgctctaacgatccagccgagccacaatccgagtcagccgatttgttcgctgaaccttcgtctcaacattccagcatgcgatcgggttcggagcaggttgcgggaaatatgtcgccaagatccacctcctcagcgtccgctctgcaatatggctctgaaatgggctccgtgtcgcaaatgtcgtcggcttcaacactccgacgtggcggaccacgtggagatctcggcatcgccgccgtcgatcatcgtaccgtccagattcggggaatggaggacgagatggctggtgacgacgggcagccacgtctctacgtctggggaactcgaatctgtgtggctgatgttcaacgatcattccgcgactttttgacaactttcaagatcagccagctcgccgaggatgaaaatatgatgactggacacgatgaggcgcttcacgaaattgatgtcaatcatccatattatatggagcgacttctcgagtgtaacgatgcggaggtcactcatattaacttgaatttgaagcatttgaacgcgttttcggaggctctttatcgcaaagtcatcgcgtatccagcggatgtcatcccatatctcgacattgtcgtcaacgaagtcttcgccgaacgcttcaatcgcacactcgcccaatctatcgaactccggccattcaacgcgcaaaaaacccgtaatatgcgcggtctgaacccgaacgacgtggaccagctcatcacaatttccggaatggtgactcgaacgtcgtcgttgattcccgaaatgcgaagtggctacttccaatgcgcggtctgcgcgttcggaatcgaaagcgaagtcgacaagggacgtatcgaggagccggtggtctgcacgaattgctcgaacacacactgcttccagctcgtccacaatcgatcggtgttccttgacaagcaggttgtgaagcttcaagagtcgccagatgacatgccatctggagagactccgcacactgtttcagtctatgctcatggctcactcgtcgaatcagttcaaccgggagatcgtatcactgtgacaggaatcttccgggcgactggaatgaaggttaacccgaaacagcgggctcttgcctcagtctacagaacttcaattgatgcgttgcacttccgtaagatggacacgtcgcgtttgcatcaggacaatggagagacgatcaccgaggagcgcattcagcagatcattgaactctccaagcgtcctgatatcatggatgctcttgctcaatccattgctccatcgatctacgagcatgatgatgtgaagaggggattgctgtgcttattgttcggaggaactcgaaaggatgatgagactactaacaagaccaagttaagatccgaaatcaacattctcttgtgcggagatcctggaacatcgaaatcgcagatgcttcaatacgtctatcgtctgttgccacgtagtcagtacacctctggaaaaggatcctcggcagtcggactcactgcttcggtgagccgtgacgctgacaccaagcagcttgttcttcaaactggagccctagttctggctgacaatggtgtttgctgtatcgacgagtttgacaagatgaacgaaagtgctcgtagtgtgctgcacgaggttatggagcagcagactctctcaatcgccaaggccggaatcatttgccagctgaatgctcgtgcgtcggtgctggccgccgccaacccggtcgactcgaaatggaatcgaaataagacgattgtggagaatattacgcttccgcacacgcttctctctcgttttgatctgatctttttgattgtcgacgcgcaggatgagatgcaggatagaagactcggaaatcatctcgtctcgctctactttgagaatgacggtaatcaggagaagacggagcatgtggacatgaacttgctcagagattatatcgcctacgcaaaagcgaatatccatccgaaactcagcgaagaggcatcacaatttatcattgaaaagtatctattcatgagaaaagctggcgcgcagcacggacaaatcaccgcctacccgagacagttggagtcgttgattcgtctttcagaggctcacgccaagattcgtctttcacaagaggtgtctgtggatgatgtggagaaggctttcacattgtggcgtgaggctctcaaacaatcggccgtcgatccatccacgggacgtgtcgacgtggcaattctggcatctggaatgagtgcttctggaagaaaggcggtcgaggcgatgtgtgaggccgttctgaagcagctcaagactgccaagggatttgtgacctctaaggctctgttccatactctcaaatctgctgataagacgtgccagagagaagttttcgatgaggcgatcaacgagttatcgaaaaaggaatcaattgctcgatccggtgacagaatcagattccaaaccgaagcctag

SEQ ID NO: 5456 - protein, 823 aa, Caenorhabditis elegans
MPRSNDPAEPQSESADLFAEPSSQHSSMRSGSEQVAGNMSPRSTSSASALQYGSEMGSVSQMSSASTLRRGGPRGDLGIAAVDHRTVQIRGMEDEMAGDDGQPRLYVWGTRICVADVQRSFRDFLTTFKISQLAEDENMMTGHDEALHEIDVNHPYYMERLLECNDAEVTHINLNLKHLNAFSEALYRKVIAYPADVIPYLDIVVNEVFAERFNRTLAQSIELRPFNAQKTRNMRGLNPNDVDQLITISGMVTRTSSLIPEMRSGYFQCAVCAFGIESEVDKGRIEEPVVCTNCSNTHCFQLVHNRSVFLDKQVVKLQESPDDMPSGETPHTVSVYAHGSLVESVQPGDRITVTGIFRATGMKVNPKQRALASVYRTSIDALHFRKMDTSRLHQDNGETITEERIQQIIELSKRPDIMDALAQSIAPSIYEHDDVKRGLLCLLFGGTRKDDETTNKTKLRSEINILLCGDPGTSKSQMLQYVYRLLPRSQYTSGKGSSAVGLTASVSRDADTKQLVLQTGALVLADNGVCCIDEFDKMNESARSVLHEVMEQQTLSIAKAGIICQLNARASVLAAANPVDSKWNRNKTIVENITLPHTLLSRFDLIFLIVDAQDEMQDRRLGNHLVSLYFENDGNQEKTEHVDMNLLRDYIAYAKANIHPKLSEEASQFIIEKYLFMRKAGAQHGQITAYPRQLESLIRLSEAHAKIRLSQEVSVDDVEKAFTLWREALKQSAVDPSTGRVDVAILASGMSASGRKAVEAMCEAVLKQLKTAKGFVTSKALFHTLKSADKTCQREVFDEAINELSKKESIARSGDRIRFQTEA

SEQ ID NO: 5457 - DNA, 2193 bp, Caenorhabditis elegans
  CDS (1)..(2193)
atgaaaaccaccacttacaacacagactgggctgccgagaagacgaaaattcgcagtttcttcgacgaatactatgtggacaatgaggacggatctggaaaggcattcccatatcgtgatcaagtctttgaaattgctcgccgcgacaagcaggcaatcgttgtgaatgttgaccatattaaggaatctgatattccagatgctcttgaactctcagaagccattacttccaatacaaagagatacgaagtcctgttcaaggacacaatttcggatatgatccaggactatctcggagacaagcaagcgccagtaatcgatgctcttgatgcctacatgttccagcgtcttcatatggataggaacgagggagccgccaacgaggaagtttctcttcaggacaaacgcaagaaatacccaccacagctccttcaacgcttcgaggtctacttcacaacggacgatgccgcccatgaaacgtgtgtccgaaacatcaaagccaccgagatcgggcacttggtctccatgaagggagttgttatccgtgcgaccgaggtgaaaccttgtgttgaagtcatgacctacacttgcgatacttgtgccgccgaagtctatcagcctgtgaagggaatgcaattcaccccaccggtcaactgtcccaacaaggaatgcgttgaggcaaaagccaacggaagacttcacatgcagcttcgtggatcgaaattcgtcaagttccaagagctcaaaattcaagagctcagcgagcaagtcccagtaggatcgattcctcgcacaatgactgttcacgtttacggggagatgacgagaaagtgcaatactggaaatgtcgtgcatgtttctggagtattcttgccaattatgcagtctggcttccgaccaactggaggactcgttgccgatacctatttggaagctcactacatcaacaatcttgacgacaacccaactttcaatggagttcaatccgccgaactggaagttctccgtcgcaaaggagacaactacgaaactcttgccgcctccatcgctccggaaattttcggccacgttgatgttaaaaagtgccttttgatggctctcgttggaggaaatgacaacagctcgaacggaatgaaaattcgtggatgcatcaacgttctgatgatgggagatccaggagttgctaaatctcaacttctcggctacgtgaaccggttggctccacgatctcagtacactactggtcgtggttcttctggagttggtctcacggccgctgtgatgaaggatcccgtcactggagagatgtctctcgagggtggtgccttggtgttggccgacggaggaatttgctgcattgacgagttcgataagatgatggatcacgatagaactgcgatccatgaagttatggagcagcagaccatctcgattgccaaagctggaatcatgacgacactcaacgctcgtacggctatcatcgccgctgccaatccagcctacggaagatataacccaaatcgttccattgagcagaacgttgatcttccagctgcacttctctcccgtttcgatttgattcttctcatgcaggacaaggctgatcgtgagaacgacaagattctcgctgagcacatcacatatgttcatcagcacggttgccatccaaatcgtgagaagaaggatctcatctcgcttgagacacttcgcgagtacatttctctttgcaagacgtatactccaactgtcgatccagctcttcgagaacgtattgtcgaggcatacgttgagatgcgcagagatgctagatattcgtccgatccaacatttgtgtcgccaagaatgattctaggaatcgtcagaatggcgacagctcgtgctaagcttcgtctatccacgattgtcgacgaaagtgacgttgaagaagctctccgtttgatgcaattcgctaaggactcgctcagaccagaacagaacaaaattgagaagcgcatggctccagtcgatgctgcattcgccgttcttcgtgagctctaccatgccgacaacgccccgatcgccatctcaaacgccattcaaagatgcgctcgcaagggaatcagcgaggttgctctcaagaaatgcctggatcaatacactgctaacggtctcttggtcatggatcgccagaacattgtgttcgctatgaattaa

SEQ ID NO: 5458 - protein, 730 aa, Caenorhabditis elegans
MKTTTYNTDWAAEKTKIRSFFDEYYVDNEDGSGKAFPYRDQVFEIARRDKQAIVVNVDHIKESDIPDALELSEAITSNTKRYEVLFKDTISDMIQDYLGDKQAPVIDALDAYMFQRLHMDRNEGAANEEVSLQDKRKKYPPQLLQRFEVYFTTDDAAHETCVRNIKATEIGHLVSMKGVVIRATEVKPCVEVMTYTCDTCAAEVYQPVKGMQFTPPVNCPNKECVEAKANGRLHMQLRGSKFVKFQELKIQELSEQVPVGSIPRTMTVHVYGEMTRKCNTGNVVHVSGVFLPIMQSGFRPTGGLVADTYLEAHYINNLDDNPTFNGVQSAELEVLRRKGDNYETLAASIAPEIFGHVDVKKCLLMALVGGNDNSSNGMKIRGCINVLMMGDPGVAKSQLLGYVNRLAPRSQYTTGRGSSGVGLTAAVMKDPVTGEMSLEGGALVLADGGICCIDEFDKMMDHDRTAIHEVMEQQTISIAKAGIMTTLNARTAIIAAANPAYGRYNPNRSIEQNVDLPAALLSRFDLILLMQDKADRENDKILAEHITYVHQHGCHPNREKKDLISLETLREYISLCKTYTPTVDPALRERIVEAYVEMRRDARYSSDPTFVSPRMILGIVRMATARAKLRLSTIVDESDVEEALRLMQFAKDSLRPEQNKIEKRMAPVDAAFAVLRELYHADNAPIAISNAIQRCARKGISEVALKKCLDQYTANGLLVMDRQNIVFAMN

SEQ ID NO: 5459 - DNA, 2439 bp, Caenorhabditis elegans
  CDS (1)..(2439)
atggacggacaagctgatggaatgttcattgatcgtgccgaggatgctcgaaaacaagaaatcacggagcagtatctcaactttttggacaatcaagccgacacttttcactatcgtcagaaaattgtgaaaatgatgaatgatggagaaagtcgtttggtgatgaatctcgatgaaatcagggaaattctaccagaaagagctgaagggctattgacccaaagcgttcttgagatgaattgcttacaatctgcacttcaaatggctattaatcgtagtgatgttcaagctgttgtcaaaactggattccacgtcggctttgaaggaactttcggagagcgccacgtcaatccacgtactctcaaatcatcatatcttggaaaccttgtctgctgtgagggaatcgtcacaaagtgttcaactgttcgtcaaaaacttctcacttctgtccactattgtccagcaacaaataaagtgctcgagaagaaatttgccgatttcactatgctcgacactgcagtcaccaataacaactatccaacagaagatgaaaataagaatcctcttgaaacagaattcggacattcagtttacaaggatcatcaaacgttcacaattcaagagcttccagaatccgcaccagccggtcaacttcctcgggccgtcgattgtgttgctgatcttgatttggcagatcgcgtcaagcctggagatcgtgtccgcatcattggagtcttccgtgttctgccgaataagcagaatggagtttcgtctggatccttccgttcgatcatcatcattaatcatattcaaatgctttcaaaggaggttattccaaactttgagccacaagatgttaaagatgttcgtaaaatttcaaagtcaagaaacccatttgagctgctcgctcggtcacttgctccatcaatttgcggccacgaagagacaaagaaagcgttgctctgtttgttgctaggtggaatggaaaagattctgaacaatggttctcgtttgaggggagatatcaatgttcttctcatcggagatccatctgttgccaagtctcaactgcttcgatatgttcttcgtatggccccaagagctatcaccacaactggacgtggatcttcgggtgttggacttactgctgctgttactactgatcctgattcgggagaacgtcgtcttgaagctggagcaatggttctcgccgatcgtggtgtcgtttgtattgatgaatttgacaagatgtctgatattgatagaactgcaatccacgaagttatggaacagggacgtgtcacaatttcgaaggctggaatccacgcgaagctgaatgctcgttgctcggttctggctgcagcaaatccggtgtacggacgatacaatccattcaaatctccaatggaaaacatcggaatgcaagattcactcctctcgcgtttcgatttgatctttgtacttcttgatgagcatgatgcggacaaggacgctaatgtcgctgaacatgtgctcaagcttcacacttacagaacccaaggtgaagccgatggaactgttcttccgatgggtggaggtgttgagacgatcagtacaatcaatatggagactaagaaggcgagcagctcgatctatgaggaaaatacccaatgggctggtattcaagacacgaaaatcctgacaatggacttcatgagaaagtacatccatttggcaagatcagttcaaccaaaactcaccgatgaagctactgagtacatttctgaagtatatgccgatattcgttcatttgatatcaccaaaactgatcaagaacgaacaatgcctgtcaccgctcgtcaactcgaaacattgattcgtttgtcaactgctatcgcgaaggcaagattctcgaaaaaagtcgaacgagaggatactgagaaagcttacaatctgctccactttgcctgtttcaaggagaagccaaaggctcgtcaagagtatgagaagaagaagcgagctccacgaattgatggtgacgatgatgaggatcagagcgataacgaggacatggcaacatcggaagagcctcaatctagctccgttccgactgcagccaccccgcgtcgtggagtcagaaggcgtgctgaagatgatgatagccaggattctatgatggatactaccattggagaaagtcagccaactgctaagaaagcacgtactggaccggctgccatcggagttgatcgttataaggagcttcggaagtacgtcagaaaggcgttcgacgacattggaagcaccgacgatatggttgaacttcaaattatcacagacagtgttcaaactcaagccggatcacacaagttcactgaggatgagctgaaggctggatacgaacaattggaaaacgataacgctgcaatgattgccgaagataagatcactctcatctaa

SEQ ID NO: 5460 - protein, 812 aa, Caenorhabditis elegans
MDGQADGMFIDRAEDARKQEITEQYLNFLDNQADTFHYRQKIVKMMNDGESRLVMNLDEIREILPERAEGLLTQSVLEMNCLQSALQMAINRSDVQAVVKTGFHVGFEGTFGERHVNPRTLKSSYLGNLVCCEGIVTKCSTVRQKLLTSVHYCPATNKVLEKKFADFTMLDTAVTNNNYPTEDENKNPLETEFGHSVYKDHQTFTIQELPESAPAGQLPRAVDCVADLDLADRVKPGDRVRIIGVFRVLPNKQNGVSSGSFRSIIIINHIQMLSKEVIPNFEPQDVKDVRKISKSRNPFELLARSLAPSICGHEETKKALLCLLLGGMEKILNNGSRLRGDINVLLIGDPSVAKSQLLRYVLRMAPRAITTTGRGSSGVGLTAAVTTDPDSGERRLEAGAMVLADRGVVCIDEFDKMSDIDRTAIHEVMEQGRVTISKAGIHAKLNARCSVLAAANPVYGRYNPFKSPMENIGMQDSLLSRFDLIFVLLDEHDADKDANVAEHVLKLHTYRTQGEADGTVLPMGGGVETISTINMETKKASSSIYEENTQWAGIQDTKILTMDFMRKYIHLARSVQPKLTDEATEYISEVYADIRSFDITKTDQERTMPVTARQLETLIRLSTAIAKARFSKKVEREDTEKAYNLLHFACFKEKPKARQEYEKKKRAPRIDGDDDEDQSDNEDMATSEEPQSSSVPTAATPRRGVRRRAEDDDSQDSMMDTTIGESQPTAKKARTGPAAIGVDRYKELRKYVRKAFDDIGSTDDMVELQIITDSVQTQAGSHKFTEDELKAGYEQLENDNAAMIAEDKITLI

SEQ ID NO: 5461 - DNA, 2460 bp, Drosophila melanogaster
  CDS (1)..(2460)
atggcccacgagggggagcagttcatcaaggacatacaacgcgagtatgtggactttctggacgacgaggaggatcagggcatctatgcgggccacgtcaaggatatgatcgcggagaagagcaagcgcctgatcgtgaatgtcaacgatctaaaacgcaagaatccgcaacgtgcattggggctactgagcaacgcggcggatgagcagctggcctttggcagggcgctcaaggagtatgcgtccacggttgatccgggctatgccaaaatgcatgaggatctgtttgtcggcttcgagggctgctttggcaatcggcatgtgacgccgcgctccctcacctccatctatctgggcaacatggtgtgcgtggagggcattgttaccaaggtatcgctgattcgtcccaaggtggtgcgcagcgttcactattgccccaatacgcgtaaggtaatggagcgcaaatacaccgatctcacatcgttcgaggctgtgccatctggcgctgcctatcccacaaaggacgaggatggcaatctgctggagaccgaatacggtttgtccgtttacaaggatcaccagacgctgaccattcaagagatgcccgagaaggcgccggctggccaattgccgcgttcggtggatattgtgtgcgacgacgatctcgtggatcgctgcaagcccggcgatcgtgtacagattgtgggcagctatcgctgtttgccgggcaaacgcggtggctacacctcgggcacgttccgcaccgtgctgctggccaacaatatatcgctgctcagcaaggagagcaatttggacatatcgcgcgaagacatcatgctgtgcaagaagctagcgaagaataacgacatcttcgagctgctcagcaagagtttggcgccctcgattcatggacatgcctatgtgaagcaggccattctttgcctgctgctcggcggcgttgagaagatcctgccgaatggcacacgcctgcgtggcgatattaatgtcttgcttatcggcgatccttcggtggccaagtcgcagctactgcgctacgtcttgaatacggcaccaagggccataccgacaacgggtcgcggatccagcggcgtcggtctgacggcggcggttaccacggatcaggagaccggtgagcggcgattggaggcgggcgccatggtcctggccgatcgcggtgtcgtctgcattgatgagtttgacaagatgagcgacatcgatcgcacagccattcacgaggtgatggaacagggtcgtgttaccatttccaaagcgggcatccatgcctcgctcaatgctcgctgctccgttttggcagccgctaatccggtgtacggaaggtatgatcaatataagacgccgatggaaaatattggactgcaggattcgctgctttcgcgtttcgatttgctcttcgttatgctggacgtgattgacagcgatgtggatcaaatgatttcggaccatgtggtgcgcatgcatcgctatcgcaatcccaaggaggccgacggcgagcccttgtccatgggcagctcctatgcggactccttgtcctttgtttccagcagcgaggagaagaaggacaccgaggtgtacgaaaagtacgatgccctgctgcatggcaagtcgcgtcagcgtcacgagaagatcctatccgtggagttcatgcgcaagtacatacacattgccaagtgtatgaagcccaaattgggcgagcaggcctgcgaggcgattgccaatgagtattcgcgcctgcgctcccaggaggcggtcgaaacggatgtggcacgcacgcagccaataacggcccgtaccctggagaccctcatccgtttgtccacggcccatgcccgggcacgcatgtccaaatcggtgaccatcgacgatgcccatgcggccatcgaactggtacagtttgcctactttaagaaggtgctggataaggatcgccccagcaagcgtcgtcgcaacagcggctccgatgcggaggatgacaacggtgaggcatctagccagcgctcaccatcgcgacgctccaaacgcacacgcacagcgaccgtcggtgccgatagcgatgaggaggatattgagccaccacagccggatgctggcgatttgacgcgtcgcgaaacgcgtcgttctctgcccgctcgctcggtcgccatgctgatggccagcccctccagtgaggagcagtcggtggccacatcgaccacggagccggccatcattagcgatgcccgcctgggcgagttcaagaacaatttgcagcgactgtttcgcgaggcacgcgaacagagcttggcgctggccaggatcaccacggccatcaacgttggcagccaggagccgttcaccgctggcgaaatcgaggccgccgtgcatcgcatgaccgaggacaatcagatcatggtcgccgacgatatagtctttctcatctga

SEQ ID NO: 5462 - protein, 819 aa, Drosophila melanogaster
MAHEGEQFIKDIQREYVDFLDDEEDQGIYAGHVKDMIAEKSKRLIVNVNDLKRKNPQRALGLLSNAADEQLAFGRALKEYASTVDPGYAKMHEDLFVGFEGCFGNRHVTPRSLTSIYLGNMVCVEGIVTKVSLIRPKVVRSVHYCPNTRKVMERKYTDLTSFEAVPSGAAYPTKDEDGNLLETEYGLSVYKDHQTLTIQEMPEKAPAGQLPRSVDIVCDDDLVDRCKPGDRVQIVGSYRCLPGKRGGYTSGTFRTVLLANNISLLSKESNLDISREDIMLCKKLAKNNDIFELLSKSLAPSIHGHAYVKQAILCLLLGGVEKILPNGTRLRGDINVLLIGDPSVAKSQLLRYVLNTAPRAIPTTGRGSSGVGLTAAVTTDQETGERRLEAGAMVLADRGVVCIDEFDKMSDIDRTAIHEVMEQGRVTISKAGIHASLNARCSVLAAANPVYGRYDQYKTPMENIGLQDSLLSRFDLLFVMLDVIDSDVDQMISDHVVRMHRYRNPKEADGEPLSMGSSYADSLSFVSSSEEKKDTEVYEKYDALLHGKSRQRHEKILSVEFMRKYIHIAKCMKPKLGEQACEAIANEYSRLRSQEAVETDVARTQPITARTLETLIRLSTAHARARMSKSVTIDDAHAAIELVQFAYFKKVLDKDRPSKRRRNSGSDAEDDNGEASSQRSPSRRSKRTRTATVGADSDEEDIEPPQPDAGDLTRRETRRSLPARSVAMLMASPSSEEQSVATSTTEPAIISDARLGEFKNNLQRLFREAREQSLALARITTAINVGSQEPFTAGEIEAAVHRMTEDNQIMVADDIVFLI

SEQ ID NO: 5463 - DNA, 2454 bp, Drosophila melanogaster
  CDS (1)..(2454)
atggatgtggcagatgctcaggttggccagctgcgcgtaaaagacgaggtgggcattcgggcccagaagttgtttcaggatttcctcgaggaattcaaggaggatggcgagatcaagtacacgcgcccagccgccagcttggaatccccggatcgctgcaccctggaggtcagcttcgaggatgtggagaaatacgatcagaatctggccaccgccattatcgaggagtactaccacatctatccgttcctttgccaatccgtttcgaactacgttaaggaccggattggactgaagacccagaaggattgctatgtggccttcacggaggtgccgacgcgtcacaaggttcgcgatctgaccacctccaaaatcggcaccctcatccgcatctccggccaggtggtgcgcacccatcccgtacatccggagcttgtttccggcgtcttcatgtgcctcgattgccagacggaaattcggaacgtagagcagcagttcaagttcaccaatcccaccatttgccgcaatcccgtgtgctccaatcgcaagcgtttcatgctggatgtggagaagagtctgttcttggactttcaaaagattcgcatccaggagacgcaagccgagctgccgcgtggctgtattccccgcgcggtggagattatcctgcgctcggagctggtggagaccgttcaggctggcgatcgctatgatttcacgggcactctgattgtggtgcccgatgtgagtgtcctggccggagtgggcacacgggcggagaacagttcacgccacaagcccggcgagggcatggatggcgtcactggcctaaaggcactgggcatgcgagagctcaactatcggatggccttccttgcctgcagtgttcaggcaacgacagcacgttttggcggcaccgatctgcccatgtcggaggtgacagccgaggatatgaagaagcagatgacagatgccgagtggcacaagatctatgagatgtccaaggatcgcaatctctaccagaatctaattagcagcctctttccctcgatctacggcaacgatgaggtcaagcggggcattcttctgcagcaattcggtggcgttgcgaagaccaccaccgaaaagacatcgcttcgtggcgacatcaatgtgtgcatcgttggcgatcccagcacggccaagtcacagttcctcaagcaggtatccgacttctcgccgcgtgcgatctacacctcgggcaaggcatcctcggcagcgggcttaaccgctgcggttgtgcgcgacgaggagtcctttgactttgtcatcgaggcgggcgccctcatgttggccgacaatggcatttgctgcattgacgagttcgataagatggatcagcgcgatcaggtggccattcacgaggccatggaacagcagaccatatcgattgcacgcgccggcgtacgagccacactcaatgcgcgcacttcgattctggccgccgccaatcccattaatggtcgctacgatcgctccaagagtttgcaacaaaatattcagctatcggcaccgattatgtcgcgattcgatctgttcttcattctcgtggacgaatgcaatgaggtggtggactatgccattgctcgcaagatcgttgatctgcactcgaacatcgaggagtccgtggagcgggcatatacgcgcgaagaggtccttcgctatgtgacatttgcgcggcaatttaagccggttattagccaggaggccggacacatgctggtcgagaactatggccatttgaggcagcgcgatacgggcacgtcgggcaggagcacctggaggataacggtgcgtcagctggagtccatgattcgactgagcgaggccatggccaagctggagtgctcgaatcgcgtgctggagcgacacgtcaaggaggccttccgtttgctcaacaagtccatcattcgcgtggagcaaccggatattcatttagatgacgacgagggtctggacatggacgatggcattcagcacgacatcgacatggagaacaatggagcagcggccaatgtggatgagaacaatggtatggacacatccgccagcggcgccgtgcagaagaagaagttcacgctttcgttcgaggattacaagaatctgtccaccatgctggtgttgcatatgcgcgccgaggaggcgcgctgcgaggtggagggcaacgatacgggcatcaagcgcagcaatgtggtcacctggtatctggagcaggtggcggaccaaatcgaatccgaggatgagttaatttctcgcaaaaatctcatcgagaagcttatcgatcgcctcatctatcacgatcaggtcattattccgctcaagacatccacgctgaagccgagaattcaggtacaaaaggatttcgtggaggaggacgatcccctgctggtggtgcatcccaactacgttgtggagtga

SEQ ID NO: 5464 - protein, 817 aa, Drosophila melanogaster
MDVADAQVGQLRVKDEVGIRAQKLFQDFLEEFKEDGEIKYTRPAASLESPDRCTLEVSFEDVEKYDQNLATAIIEEYYHIYPFLCQSVSNYVKDRIGLKTQKDCYVAFTEVPTRHKVRDLTTSKIGTLIRISGQVVRTHPVHPELVSGVFMCLDCQTEIRNVEQQFKFTNPTICRNPVCSNRKRFMLDVEKSLFLDFQKIRIQETQAELPRGCIPRAVEIILRSELVETVQAGDRYDFTGTLIVVPDVSVLAGVGTRAENSSRHKPGEGMDGVTGLKALGMRELNYRMAFLACSVQATTARFGGTDLPMSEVTAEDMKKQMTDAEWHKIYEMSKDRNLYQNLISSLFPSIYGNDEVKRGILLQQFGGVAKTTTEKTSLRGDINVCIVGDPSTAKSQFLKQVSDFSPRAIYTSGKASSAAGLTAAVVRDEESFDFVIEAGALMLADNGICCIDEFDKMDQRDQVAIHEAMEQQTISIARAGVRATLNARTSILAAANPINGRYDRSKSLQQNIQLSAPIMSRFDLFFILVDECNEVVDYAIARKIVDLHSNIEESVERAYTREEVLRYVTFARQFKPVISQEAGHMLVENYGHLRQRDTGTSGRSTWRITVRQLESMIRLSEAMAKLECSNRVLERHVKEAFRLLNKSIIRVEQPDIHLDDDEGLDMDDGIQHDIDMENNGAAANVDENNGMDTSASGAVQKKKFTLSFEDYKNLSTMLVLHMRAEEARCEVEGNDTGIKRSNVVTWYLEQVADQIESEDELISRKNLIEKLIDRLIYHDQVIIPLKTSTLKPRIQVQKDFVEEDDPLLVVHPNYVVE

SEQ ID NO: 5465 - DNA, 2163 bp, Drosophila melanogaster
  CDS (1)..(2163)
atggctcgacgagattatgcccaagaccgagaatctatcaagaccttcctttcggaattctgcaagtgcgacgatgatggcaaaaaggagttcgtctacggatctcagctggtgaagttggcccatcgagagcaagttctgatcaccatcgatctggatgatctggcggaattcaatgaaagtctcgcggaggcggtggtcgacaattgtcggcgatacacgtccatattcagcgatgtaattgctgaactcctgcccagctacaaacagcaggaggtacacgccaaggatgctctggatgtgtacattgagcaccgcctgatgatggagtcccgcaccaggaatcccatggaacagcgcgatgagcggaactctttcccctcggagctgatgaagcgattcgaggtgggcttcaaaccactgtccacagagaaggcgcactctattcgcgaggttaaggcccagcacattggtaaactggtcaccgttcgcggcattgttacacgctgcacggaggttaagcccatgatggtggttgccacctacacatgcgatcgctgtggctcggagacgtatcagccagttaactcgctatccttcacgcccgtgcacgattgcccgtcggatgattgccgagtgaacaaagcgggaggtcgtctgtatctgcagacccgcggctccaagttcgtcaagttccaggaggtcaaaatgcaggagcacagcgaccaggtgcccgtgggccacattccgcgcagcatgaccatcatgtgcaggggtgaggtcactcgaatggcccagcctggggatcacattgtggtctctggagtgttcttgccactaatgcgcacaggtttcgctcagatgattcagggtttgctctcggagacattccttcaagctcaccgcatcatctgtatcaacaagaacgacgagatttcggacaaggatgccgagctgactccagaagagctggaggaattggcccaggatgacttctacgagcgcttggccaccagcttggcacccgaaatctatggccatttggatgttaagaaagcgctgctcttgctgttggtcggaggagttgacaagcggcccgatggcatgaagattcgtggcaacattaacatctgcctgatgggagatcccggtgtggccaagtcgcagctgctgggctacattagccgattggccgtgcgatcgcagtacaccacagggcgaggttcttcgggggtgggtcttaccgctgcggtcatgaaggaccctctcacaggcgagatgacattggaaggaggagctcttgtgctggctgatcagggagtctgctgcattgatgagttcgacaagatggcggatcaggatcgtacagccattcacgaggtgatggaacagcagaccatttcgatagccaaagcaggcatcatgacgaccctaaacgctcgcgtttccatcctggccgctgctaatcccgcttttggacgctacaatcctcgtcgtaccgtggagcagaacattcagcttcccgcagccctgctctcacgtttcgatctgctgtggctcatccaggataaaccggatcgcgataatgatttgcgcttggccaagcacataacctatgtgcatagccacagcaaacagccacccactcgagtaaaggctctggacatgaatcttatgcggcgctacattaacctgtgcaagcgcaagaatccaactattccggatgagctcaccgactacattgtgggagcttatgtggagttgcgtcgggaggcgcgcaaccagaaggacatgaccttcacctcggcacgtaacttgttgggaatcctgcggttgtccaccgctttggctaggttgcgtctttccgatagcgtggagaaagatgatgtggctgaagcactgcgtctgctggagatgtctaaggactcgctcaaccaaatccacgagcaccagaagggacacgtacccaacacttcggatcgaatctttgccatcgttcgtgaactggctggctctggaaaggcagtcaaaatctccgacatcatggaccgctgcacaaccaaaggattcaagcccgaccaggtggacaaatgcatcgatgattacgaggagctcaatgtctggcaggtcaacatgggacgcacgaagatcacattcatgtag

SEQ ID NO: 5466 - protein, 720 aa, Drosophila melanogaster
MARRDYAQDRESIKTFLSEFCKCDDDGKKEFVYGSQLVKLAHREQVLITIDLDDLAEFNESLAEAVVDNCRRYTSIFSDVIAELLPSYKQQEVHAKDALDVYIEHRLMMESRTRNPMEQRDERNSFPSELMKRFEVGFKPLSTEKAHSIREVKAQHIGKLVTVRGIVTRCTEVKPMMVVATYTCDRCGSETYQPVNSLSFTPVHDCPSDDCRVNKAGGRLYLQTRGSKFVKFQEVKMQEHSDQVPVGHIPRSMTIMCRGEVTRMAQPGDHIVVSGVFLPLMRTGFAQMIQGLLSETFLQAHRIICINKNDEISDKDAELTPEELEELAQDDFYERLATSLAPEIYGHLDVKKALLLLLVGGVDKRPDGMKIRGNINICLMGDPGVAKSQLLGYISRLAVRSQYTTGRGSSGVGLTAAVMKDPLTGEMTLEGGALVLADQGVCCIDEFDKMADQDRTAIHEVMEQQTISIAKAGIMTTLNARVSILAAANPAFGRYNPRRTVEQNIQLPAALLSRFDLLWLIQDKPDRDNDLRLAKHITYVHSHSKQPPTRVKALDMNLMRRYINLCKRKNPTIPDELTDYIVGAYVELRREARNQKDMTFTSARNLLGILRLSTALARLRLSDSVEKDDVAEALRLLEMSKDSLNQIHEHQKGHVPNTSDRIFAIVRELAGSGKAVKISDIMDRCTTKGFKPDQVDKCIDDYEELNVWQVNMGRTKITFM

SEQ ID NO: 5467 - DNA, 2202 bp, Drosophila melanogaster
  CDS (1)..(2202)
atggaaggcttcgacgatgcgggtgtgttcttttcggacaatttcggcggagataaccagcaggatgcgcaaatcaacttgcaggcggtaaagaagaagtacaaggagttcatccggacatttaacgaggagaactttttctacaaataccgtgacaccctgaagaggaactatcttaatggtcgctacttcttggagattgagatggaggatttggtgggcttcgatgagaccttggctgacaagctgaacaagcagccgacggagcatttggaaatcttcgaggaggctgcccgggaggtagccgacgagatcacagctccccggccggagcacgaggaacatatgcacgacatccagattcttctgagctccaatgcgaatcccaccaacatacgacagttgaagtcggactgcgtatccaagctggttaagatcgccggaatcattgtcgcagcctcaggaataagtgccaaggctacgcggatgtctatccaatgcctgtcctgcagcacggtcataccgaatctcaaagtgaatccaggtttggagggctacgccctacccaggaagtgcaacacggagcaggcgggcagacccaagtgcccgctggaccccttcttcatcatgccggacaagtgcaagtgcgtcgatttccagacccttaagttgcaagagctccccgactttgtgccacagggtgagattccccgccacttgcagctcttctgcgatcgctcgctctgtgaacgcgtggtgcccggcaatcgcgtgcttatccagggcatatactccattcgcaaggtgggcaaaccctcgcgtcgggatggtcgcgagaaagccgtcgttggagtccgtgctccttacatgagggtggtgggcatcaccgtcgactcagagggtgcgggtgccatctcccgatacagcaacatcacatccgatgaggaggagcacttccggcgaatggccgcctctggggacatctacgaacgtctctcacagtcactggcgcccagcatcttcggctctcgggatatcaagaaagctataacttgtatgctttttggcgggtctcgtaagcgtttaccggatggtctgtgccgtcgaggcgacattaacgtcttactgctgggagatcctggtactgccaagtcacagttgttaaagtttgtggagaaggtggcacccatagcagtctacacttcgggcaaaggctccagtgcggctggtctcacggcttcggttatgaaggatcctcaaacgcgtaactttgtcatggagggtggagccatggtgctggccgatggaggcgtggtttgtattgatgagttcgacaaaatgcgagaggatgatcgtgtggccattcacgaggccatggaacagcagacaatatccattgccaaagccggcatcacgaccaccttgaactcacgctgttcggtcttggcagctgccaactccattttcggtcgatgggacgacaccaagggcgaggagaacattgactttatgcccacaattctctcccgtttcgacatgattttcattgtaaaggatattcacgatgagtcgcgggacattacgctggccaagcacatcatcaacgtgcatctgagctctaacaagtcagcgccttcagagccggctgagggtgagatatcgctgtcgacgttcaagaagtatattcactactgccgaactcattgcggtccgcgcctgagcgaagctgccggcgagaagctaaagagccgctacgtgcttatgcgcagtggagccggccagcaggagaaggcatctgacaagcggctaagcattcccatcactgtgcgtcagttggaggctgtcatccgcatttcggagtcgctggcaaagattcgtttgcaaccgttcgccacagatgagcacgtgaacgaagcacttcgacttttccaagtgtctacccttgatgctgcgatgactggcagcttggctggagccgaaggattcacgaccgaggaggaccaggaaacactcaaccgcatcgaaaagcaattgaaacgtcgctttgcaattggatctcaagtatcggagcagaatatcttacaggactttttgcgtcagaaatacgaagaacgcacggtaatgaaggtaattcataccatgatccgacgtggagagctgcagcaccggatgcaacggaagatgctctatcgaatttgctaa

SEQ ID NO: 5468 - protein, 733 aa, Drosophila melanogaster
MEGFDDAGVFFSDNFGGDNQQDAQINLQAVKKKYKEFIRTFNEENFFYKYRDTLKRNYLNGRYFLEIEMEDLVGFDETLADKLNKQPTEHLEIFEEAAREVADEITAPRPEHEEHMHDIQILLSSNANPTNIRQLKSDCVSKLVKIAGIIVAASGISAKATRMSIQCLSCSTVIPNLKVNPGLEGYALPRKCNTEQAGRPKCPLDPFFIMPDKCKCVDFQTLKLQELPDFVPQGEIPRHLQLFCDRSLCERVVPGNRVLIQGIYSIRKVGKPSRRDGREKAVVGVRAPYMRVVGITVDSEGAGAISRYSNITSDEEEHFRRMAASGDIYERLSQSLAPSIFGSRDIKKAITCMLFGGSRKRLPDGLCRRGDINVLLLGDPGTAKSQLLKFVEKVAPIAVYTSGKGSSAAGLTASVMKDPQTRNFVMEGGAMVLADGGVVCIDEFDKMREDDRVAIHEAMEQQTISIAKAGITTTLNSRCSVLAAANSIFGRWDDTKGEENIDFMPTILSRFDMIFIVKDIHDESRDITLAKHIINVHLSSNKSAPSEPAEGEISLSTFKKYIHYCRTHCGPRLSEAAGEKLKSRYVLMRSGAGQQEKASDKRLSIPITVRQLEAVIRISESLAKIRLQPFATDEHVNEALRLFQVSTLDAAMTGSLAGAEGFTTEEDQETLNRIEKQLKRRFAIGSQVSEQNILQDFLRQKYEERTVMKVIHTMIRRGELQHRMQRKMLYRIC

SEQ ID NO: 5469 - DNA, 2043 bp, Pyrobaculum aerophilum str. IM2
  CDS (1)..(2043): transl_table=11
gtgtctcttgaaattgagttggatctcctccgcgacaagttcagagagctggtgactagcaacgagaagatatcagacgaggtgattaacattatcatacagaggaagagatcccttgaagtggacttccacgacattttaatgttcgacaagtcgctggcagacttagtcgtagagaggcctaagctagtgctaccagaggcggacaaggtagttagagagatagtggaagagaaagaccccgagacggcaaaggcgcttaaacgcttttacttcagagtgaggggctcccccctgtctgtctccctgaggaaactgaggtctgagtatatagggaggttgataaaaatagaggggattgtcactagacagacgccgcctaaacacttcctctacaaggctctgtatagatgtacacaatgcggctacgagatagagctgttgcaagaattagagcgccacgtagagccgccggccaagtgccccagatgcggcgcatctaaaagcttcacgctggtcacagagctctctcaatacatcgactggcagaaagtcatcgtccaggagaggcccgaggatcttcccccaggccagttgcctagaagcgtggaggtggtcttactagacgacttagtggacacggtgaagcccggcgacataatctcactaactggagtcgtggatttgactctaagcgagttgaaaaaaggcaggccccctattgtcacctcttacatacagggcgtgcacgttgatacaatgaataaagagctcgtcgaggagataactaaagaggacgagcagaaaattctagaaatttcgaggaggcccgacgtgagggagttaataataagatccatagccccctctatatacggctacgaggaggtgaaagaggcagtggcctgcctcctctttggcggaaatgaaatagtataccccgacggggtgagggtgaggggggatataaacatactcctaatcggcgaccccggcactgccaagtcgcagttgttaaaattcgtggcgaaaatcgcgccgcgcgctgtctacacaactgggaagggctcctcagccgccggcctcacagccgccgtggtgagggataagctcactggggagttctacttagaggccggcgccctagtcctcgcagataaaggcgttgcggtaatagacgaaatagacaaaatggacgccaaggacagagtggccctccacgaggccatggaacaaaacaccgtctcaatcagcaaggcgggtatagtcgccactctcaacgccagggctgcagtgctggcggcggcaaacccagccttcggcagatacctccccaacagaacagtggcggagaacatagacctccccgtctctctcctcagccgcttcgaccttatatttgtaattagagacgagcccagggaggagttcgactcggcggtcgccggccacatattagatctccactcagggaaaaccccagaggccttccgagacgtcttgaggcccgacttccttaggaaatacatcatgtacgccaggaggtacgtgaggccgatcctaagcgaagaggccaaggagaggataaaggccttctacctagagatgagaaaaaggtaccagggcccgggcacagccatcgccataacagccagacagctagaggcgttaatacgcctcacaaccgcagaggcaaaaatgaggctgtccccaatagccgcagccgaagacgcggagagggccataaggctttacctcgccttccttaagtccgtgggaatagacatagaatcgggcgcgatagacatagacgcaataataaccggcgtgcccgcgtcgaggagagaggcctatataaaagtagttgagctcttgaaaaaactagaagaggcggaaagaggcccggtcaaaatagaccgcctaaaagcagaggccgaaaagctgggaatcccgccagcggaggtgcagagaatagtagagctgttaatacgcaacggcgaggcctacacgccgcgcccgggctatatcaagcgggtgggataa

SEQ ID NO: 5470 - protein, 680 aa, Pyrobaculum aerophilum str. IM2
MSLEIELDLLRDKFRELVTSNEKISDEVINIIIQRKRSLEVDFHDILMFDKSLADLVVERPKLVLPEADKVVREIVEEKDPETAKALKRFYFRVRGSPLSVSLRKLRSEYIGRLIKIEGIVTRQTPPKHFLYKALYRCTQCGYEIELLQELERHVEPPAKCPRCGASKSFTLVTELSQYIDWQKVIVQERPEDLPPGQLPRSVEVVLLDDLVDTVKPGDIISLTGVVDLTLSELKKGRPPIVTSYIQGVHVDTMNKELVEEITKEDEQKILEISRRPDVRELIIRSIAPSIYGYEEVKEAVACLLFGGNEIVYPDGVRVRGDINILLIGDPGTAKSQLLKFVAKIAPRAVYTTGKGSSAAGLTAAVVRDKLTGEFYLEAGALVLADKGVAVIDEIDKMDAKDRVALHEAMEQNTVSISKAGIVATLNARAAVLAAANPAFGRYLPNRTVAENIDLPVSLLSRFDLIFVIRDEPREEFDSAVAGHILDLHSGKTPEAFRDVLRPDFLRKYIMYARRYVRPILSEEAKERIKAFYLEMRKRYQGPGTAIAITARQLEALIRLTTAEAKMRLSPIAAAEDAERAIRLYLAFLKSVGIDIESGAIDIDAIITGVPASRREAYIKVVELLKKLEEAERGPVKIDRLKAEAEKLGIPPAEVQRIVELLIRNGEAYTPRPGYIKRVG

SEQ ID NO: 5471 - DNA, 2127 bp, Encephalitozoon cuniculi GB-M1
  CDS (1)..(2127)
atggattctgatgcacaatcgtctgcattttcgttctacgatgccagccaggacatccagctgaatctcacgccttctcagggggatctcagctcgacatttacgccgatagtggaaacagaaagagtcaaggtgatatgggggaccacgataaatatccaggaaacggcagaacggttcaaggaatttgtcaggagaaacagggattaccacaccatccttgaacaaatggatcttacccaggagtttgtattcgatctccattgtgacgaccttgacgccgatctcaagagccagcttgcaatgtatccgcaggaggtgcttccgatcttccagggctccttgcaagaaatatacatggaaaacttcccaagctttggcgggctgatcagaatcaggccgtttggaataggaaggcccctatcgataagaaacatagatccaaacgacatcgacaaaattgtgcaaataagcgggatggtgatcagatcctcttctgtgattccagaaattgtaagggccttcttccgatgctctaggtgtgggcatgaatgccttgtggagagtgtgaggaacgtgatcgatgagcccaacaagtgtgagtgcggagggaagtatacacaacagttggtccacaatgcaagcgagtttgaggacaagcaggtggtgaggattcaggagctgcccgaggggattcccaatggaacaacaccgatggcgatgacaatagtgtgcaggaacgagttcgttgacggccttgttcccggagacagggttaagctgacgggggttttgaaggcaacgcctgtgcggctcaatcctgttatgaggaagattaagagcacgtttaggatttatcttgacctcctcagctaccaggtaataaacagaaagatcgagagtagcgatccgattgacaagattgacgagctgaggaaaaggcctgatgtatatgaaatactggcaaattctgtggcaccttctgtatgcgggatggaggacacaaaaaaggccttggttcttcaactctttggaggagtccgcaaggagctgggaagctcgagactcagaggagacataaacatactcctggcaggagaccctggaatatcaaaatcgcagctactgagcttcatacacaggacgtctgagagggggatgtacaccagcggaagagggtccagtgcagttggactgactgcaagcgtagctaaagacccggatacaggacagtttattctagaatccggtgctcttgtgctgtctgacaatgggatatgctgcattgacgagttcgacaagatgagtgacagtacaaggagcgtgcttcacgaggtgatggagcagcagactgtctctgttgcgaaggccggaatcataaccacgctgaatgcaaggtgttcgattcttgcaagttgcaacccgattgaaagcaagtacaatccccggaagagtatagtagagaacattaatctccctccaactctgctgagcagatttgatgttgtctgcctgatgatcgataggtgcgacgagttctatgacagaacgataggagaccacatagtgtccctatactccgaggagacgcagaggaaggaatacattgacgcagaccttctcaaggcatatgtgagagaggcaagaagaatagtgccgagactaactcccgagagtatgaagatgctgacgcaatcatatgtggatcttagacagatggataatggcaagaccataacagcaacaacaaggcagttggagagcttaattcggctaagtgaagcacatgccagaatgaggttttcgaatgctgttgaggccaaggatgtcagggaagcagttcgaataataagggaaagcctccttatgtatgcgatcgatccatccaccggaaaggttgatatggacatgataattacgggtagaagtacatttaaaaacaggatgttggaaaacctaaaggatgcaattctccttatggtcaaaggcaaggccgaggtttctgatgtggttaaaaacactggtgcagaggaaaagatggtgctggaggccctggaagagcttgtgcttgagggcaaaatgattgcttctgtacaggggtcctgctatgaaagaataagcgattag

SEQ ID NO: 5472 - protein, 708 aa, Encephalitozoon cuniculi GB-M1
MDSDAQSSAFSFYDASQDIQLNLTPSQGDLSSTFTPIVETERVKVIWGTTINIQETAERFKEFVRRNRDYHTILEQMDLTQEFVFDLHCDDLDADLKSQLAMYPQEVLPIFQGSLQEIYMENFPSFGGLIRIRPFGIGRPLSIRNIDPNDIDKIVQISGMVIRSSSVIPEIVRAFFRCSRCGHECLVESVRNVIDEPNKCECGGKYTQQLVHNASEFEDKQVVRIQELPEGIPNGTTPMAMTIVCRNEFVDGLVPGDRVKLTGVLKATPVRLNPVMRKIKSTFRIYLDLLSYQVINRKIESSDPIDKIDELRKRPDVYEILANSVAPSVCGMEDTKKALVLQLFGGVRKELGSSRLRGDINILLAGDPGISKSQLLSFIHRTSERGMYTSGRGSSAVGLTASVAKDPDTGQFILESGALVLSDNGICCIDEFDKMSDSTRSVLHEVMEQQTVSVAKAGIITTLNARCSILASCNPIESKYNPRKSIVENINLPPTLLSRFDVVCLMIDRCDEFYDRTIGDHIVSLYSEETQRKEYIDADLLKAYVREARRIVPRLTPESMKMLTQSYVDLRQMDNGKTITATTRQLESLIRLSEAHARMRFSNAVEAKDVREAVRIIRESLLMYAIDPSTGKVDMDMIITGRSTFKNRMLENLKDAILLMVKGKAEVSDVVKNTGAEEKMVLEALEELVLEGKMIASVQGSCYERISD

SEQ ID NO: 5473 - DNA, 2091 bp, Encephalitozoon cuniculi GB-M1
  CDS (1)..(2091)
atgacatgggatgagcatagggttacgagcatcgacctggtgactaacgaccccgtcgtgaaccgggagactgtcaagaacgagtttatccgattcatcgagctgttcaaaacaacgcataaggagtattcccatgttctctcgtcaaacatcaaccaggacaacttttctctgacagtcaagctggagcacatctaccagtactcggaccttctctcccgggagctgtctagaaggcctgaaagggcaatcgaatggtttgaggaggcagtagcggacagatacaacgtaaagggagtgcaggggtttcagctctgcctggtctccgatggcaggtgcatacccattagagagataaatgcatcgaaaacaaacaaaatagtgaagatccagggaatagttgtttctgcatcctctgttatcacaaaaccaaggacgcttttccttgtctgtagaaattgcctcagcagcaaggaggtaatggacatgattccaaggatgtgtgataagactgaatgtccacctgatccctacatcgtcatacccgagaaaagccaggtgatagatgtgcagtatgtgaagatccaggagttttttgaagacatccccgtcggagaaactcccaggcacttcagcctggttctggagaagaagatggtcaatagactgattcctgggtccaaggttgttattactgggatttactgcatgagaatgatcagagacagctctctcccgattgtgaaggtggtgggccttgaggataggagcctcaagacttcaaagatgtttactgaagaagaggaggaaagcttcaaaaaactcagcaaggcagatatttatgagaggatctctaggtctattgcaccttctgtgtatgggcacgaggatgtgaagagggctcttgcctgcatgctgttcggaggaaccaggagagtgcttgaagacaaggtcaccttaaggggagatatcaatgttcttcttctgggagatccaggaatggccaagtcccagcttctgaagttcatggagctagtgtctcccgtgggtgtctataccagcggaaagggaagttccgcagcagggctgacggcaagcgttataagagatagtggtggagagttttatcttgagggcggcgcactggtgcttgcagacaacgggatatgttgcatcgatgagttcgacaagatggacgagcatgacagagttgccatccacgaggccatggagcagcagacaatatcaatagcaaaggctgggataacaaccatgctgaacaccaggacgagcatactcgcagcagcaaaccctgtttttggaaggtatgatgactacaagacgcctgacgaaaacatcgagtttggagccaccatcctgtcgaggtttgattgcatatttatactgaaagacaagcatggacctaacgacattattcttgcaaagcatgtgctttctgtccaccaaaacaaggccagagaagataatgaatgccagaatggactgcacgatgaccaagaagagcaaatctccggaagcgacagatccccagacatcattccaatccacacgatcaaaagatatgtccagtatgccaggagcaaggtgtttccaacactttctgaagcagcatcgaagcagctgtcaagatactatgtcaacaccaggaaagaggtcagacagctcgagcaaagcaccctgaagcggaatgcaatcccaataacggtgaggcagctggaagcaataatacggataggcgagtcacttgcaaagatggagctgagtcaaattgtcaccgaaaagcacgtggaagaggcgataaggctctttaaagtaagtacaatgaacgcagtctctcaggggcatatgcttgaaggaatggttcgccccgatgtgatcaaccacatcgaggagatatgcagcagaataagactgcttgtgccaataggggggtcgataaggtacagcgaccttatcaggaagcttggcggaaaggacgagtgggtgtgtaagaaagctatcgactacatgtgcaagcaagaaaagctggtggctagagacatggggagggtgttgataaggcagccttaa

SEQ ID NO: 5474 - protein, 696 aa, Encephalitozoon cuniculi GB-M1
MTWDEHRVTSIDLVTNDPVVNRETVKNEFIRFIELFKTTHKEYSHVLSSNINQDNFSLTVKLEHIYQYSDLLSRELSRRPERAIEWFEEAVADRYNVKGVQGFQLCLVSDGRCIPIREINASKTNKIVKIQGIVVSASSVITKPRTLFLVCRNCLSSKEVMDMIPRMCDKTECPPDPYIVIPEKSQVIDVQYVKIQEFFEDIPVGETPRHFSLVLEKKMVNRLIPGSKVVITGIYCMRMIRDSSLPIVKVVGLEDRSLKTSKMFTEEEEESFKKLSKADIYERISRSIAPSVYGHEDVKRALACMLFGGTRRVLEDKVTLRGDINVLLLGDPGMAKSQLLKFMELVSPVGVYTSGKGSSAAGLTASVIRDSGGEFYLEGGALVLADNGICCIDEFDKMDEHDRVAIHEAMEQQTISIAKAGITTMLNTRTSILAAANPVFGRYDDYKTPDENIEFGATILSRFDCIFILKDKHGPNDIILAKHVLSVHQNKAREDNECQNGLHDDQEEQISGSDRSPDIIPIHTIKRYVQYARSKVFPTLSEAASKQLSRYYVNTRKEVRQLEQSTLKRNAIPITVRQLEAIIRIGESLAKMELSQIVTEKHVEEAIRLFKVSTMNAVSQGHMLEGMVRPDVINHIEEICSRIRLLVPIGGSIRYSDLIRKLGGKDEWVCKKAIDYMCKQEKLVARDMGRVLIRQP

SEQ ID NO: 5475 - DNA, 2736 bp, Schizosaccharomyces pombe 972h-
  CDS (1)..(2736)
atgtcctctagtcagcaaagtggcagagccaatgagttgaggactcctggaagagctaacagctcttcaagagaagcagtggattcttctccgttattttttcctgcttcgtctcctggttctacacgccttacaacaccgaggactacagcgcgtacacctctcgcttcctctcctttactgtttgaatctagttcaccaggtccaaacattcctcagagttcacgttctcatcttttatctcagcgtaatgacttgttccttgacagtagttcgcagagaacaccgcgctcgacaagacgtggagacatccattctagcgtgcaaatgtctaccccatctcgtcgaagagaagttgaccctcaacgtcccggggtaagcactcctagtagcttgttgttttctgggtcagatgcactcacgtttagtcaggcgcacccaagcagtgaagtagctgatgacactgtccgtgtcatttggggaacaaatgtatctattcaagaaagtatcgcttcctttcgtggatttctacgtgggtttaagaaaaagtatcgacctgaatacagaaatgaacttatgccacctcctgatgccgaacaactagtgtatattgaagcgctacgaaacatgcgtattatgggtttggaaatattaaatcttgatgttcaggatttaaagcattatcccccaaccaagaagctatatcaccagctttactcataccctcaagaaatcattcctatcatggatcaaaccattaaagacgttatgctagacttgttaggaactaatcctcccgaagatgttcttaatgacattgagcttaaaatttacaaaattcgtccttttaatcttgaaaaatgcattaatatgcgtgatcttaatcctggtgacattgacaaattgatctctattaaaggtctggtacttaggtgtacacctgtaatacccgacatgaagcaagcattttttcgatgttcagtttgtggtcattgtgttaccgtggaaatcgatagagggcgaattgctgagcccataaaatgccctagagaagtctgtggtgctacaaatgcaatgcagctaattcataatcgttctgaattcgccgataagcaagttattaaactccaagagacacctgacgtggtaccggatggccaaaccccacactctgtaagtctgtgcgtatatgatgaactggttgactctgctagagcaggagatcgtatagaagtcactgggatttttcgctgtgtaccagttcgtttgaaccctcgcatgcgtactgtaaaatcattatttaaaacttatgtcgacgttgttcacataaaaaagcaggacaaacgtcgtttgggtacggatccttctacgttggaaagcgatattgctgaagatgctgctttacaaattgatgaagtacggaaaatatcagacgaagaagtggaaaaaattcaacaagtttcaaagcgggacgatatatacgatattctttcccggtctctggcacctagcatttacgaaatggatgatgttaaaaaggggcttttgctacagctatttggtggaacgaacaagtcttttcataaaggcgcaagtccgagatatcgtggagacataaatatcttgatgtgtggtgatccatctacgtctaagtctcaaattttgaagtatgtccataagatagcacccagaggtgtttacactagtggcaagggttcatctgctgttggtttaactgcctatattactcgtgaccaagacacgaagcaactagtcttggaaagtggtgctttggtactgtcagatgggggcatttgctgcattgatgagtttgacaaaatgtccgatgctacacgttctattcttcatgaagttatggagcagcaaaccgttacagttgccaaggctggcattattactactttgaacgctaggacttctattttagctagtgcaaatccaattggaagcaaatacaatccagacttgcctgtcaccaaaaatattgatcttccgcctactctcttatctagatttgatttggtgtatttaatattagaccgcgtggatgaaacgctggataggaagctcgcaaatcatattgtttctatgtacatggaagatactcctgaacatgctacagatatggaggtctttagtgtggaatttttgacaagctatatcacatatgctagaaataatattaatcctgtcattagtgaagaggcagcaaaggaactagtgaatgcttatgttggtatgcgaaagcttggggaggatgtgcgagcatctgagaaaagaattactgctacaacaagacaactggaatcaatgattcgtctatctgaggcccatgcgaaaatgcatcttcgcaacgttgttgaggtaggagatgttcttgaagctgctcgcttgattaagaccgctattaaggattatgcaactgatcctgcaacaggaaagatttctcttgacctaatttatgttaatgaaagagagactttggtacctgaagatatggtcaaagaactggcgaatttaatttcaaatttaactgtgggtggaaaaactatgttggtcagtcaattgttaactcggtttcgtgagcagagttctactcgcttagatgcttctgatttcgaagcttgtctgggtgctttggaaaggcgaggacgtattaaggttattaccagtgctggacatcgcattgtacgttcaattgcacagactgattaa

SEQ ID NO: 5476 - protein, 911 aa, Schizosaccharomyces pombe 972h-
MSSSQQSGRANELRTPGRANSSSREAVDSSPLFFPASSPGSTRLTTPRTTARTPLASSPLLFESSSPGPNIPQSSRSHLLSQRNDLFLDSSSQRTPRSTRRGDIHSSVQMSTPSRRREVDPQRPGVSTPSSLLFSGSDALTFSQAHPSSEVADDTVRVIWGTNVSIQESIASFRGFLRGFKKKYRPEYRNELMPPPDAEQLVYIEALRNMRIMGLEILNLDVQDLKHYPPTKKLYHQLYSYPQEIIPIMDQTIKDVMLDLLGTNPPEDVLNDIELKIYKIRPFNLEKCINMRDLNPGDIDKLISIKGLVLRCTPVIPDMKQAFFRCSVCGHCVTVEIDRGRIAEPIKCPREVCGATNAMQLIHNRSEFADKQVIKLQETPDVVPDGQTPHSVSLCVYDELVDSARAGDRIEVTGIFRCVPVRLNPRMRTVKSLFKTYVDVVHIKKQDKRRLGTDPSTLESDIAEDAALQIDEVRKISDEEVEKIQQVSKRDDIYDILSRSLAPSIYEMDDVKKGLLLQLFGGTNKSFHKGASPRYRGDINILMCGDPSTSKSQILKYVHKIAPRGVYTSGKGSSAVGLTAYITRDQDTKQLVLESGALVLSDGGICCIDEFDKMSDATRSILHEVMEQQTVTVAKAGIITTLNARTSILASANPIGSKYNPDLPVTKNIDLPPTLLSRFDLVYLILDRVDETLDRKLANHIVSMYMEDTPEHATDMEVFSVEFLTSYITYARNNINPVISEEAAKELVNAYVGMRKLGEDVRASEKRITATTRQLESMIRLSEAHAKMHLRNVVEVGDVLEAARLIKTAIKDYATDPATGKISLDLIYVNERETLVPEDMVKELANLISNLTVGGKTMLVSQLLTRFREQSSTRLDASDFEACLGALERRGRIKVITSAGHRIVRSIAQTD

SEQ ID NO: 5477 - DNA, 831 bp, Schizosaccharomyces pombe 972h-
  CDS (1)..(831)
atggctgcagcaacaggttgggaacggagtgctgtatattataccccagttctcccaggagagcaagaattagattccaatgttagtcatgagaagaatttcatacagtttattgaagaatttgtgattgacaatgactttatctatcgtactcaactaagagacaatctcgtggtaaaacaatacatgttgaacatagatcttaggcacctgatcagttataacgaagatctagctcatttgcttctgagtcagccgacagatattctacctctgtttgagtctgctgtcactacagttgctaaacgcctactttatagaagtcaagaaaatgcttctacgaatatccgcaaatgtgcacctaatcttgatgcagaggcagctgaaaagctatctagtcaatttgtcgcaattcgaaaacgtgttcatcagtcagagcaggacagtaactcgcgttctaccattccaatcactgttcgtcaattagaggcaatcatacgaattactgaatcccttgcaaaaatgtcattatcacctattgcttctgaagctcacgctactgaagcgattcgactgtttttgaccagtacacttgctgctgctacacaaagttcgcctgaagttactgaggaagtaaaaaaaattgaagccagcttaagaaaaaggttacctatagggtttcaggcgagttaccgtatgcttatacgagaatacgtaaatgggcatggatattcacaacacgcgttagaaatggctttacaaattctttcgtcgaaggaaacaattcaactcagaaatggcggacaaacggtgtatcgatcaggagtatga

SEQ ID NO: 5478 - protein, 276 aa, Schizosaccharomyces pombe 972h-
MAAATGWERSAVYYTPVLPGEQELDSNVSHEKNFIQFIEEFVIDNDFIYRTQLRDNLVVKQYMLNIDLRHLISYNEDLAHLLLSQPTDILPLFESAVTTVAKRLLYRSQENASTNIRKCAPNLDAEAAEKLSSQFVAIRKRVHQSEQDSNSRSTIPITVRQLEAIIRITESLAKMSLSPIASEAHATEAIRLFLTSTLAAATQSSPEVTEEVKKIEASLRKRLPIGFQASYRMLIREYVNGHGYSQHALEMALQILSSKETIQLRNGGQTVYRSGV

SEQ ID NO: 5479 - DNA, 2181 bp, Encephalitozoon cuniculi GB-M1
  CDS (1)..(2181)
atgtggggatggtgctccaccaggaatacttggatgagagaaaatttttatcctcaaatgacagaggaggttcatgacaagttcttggagttcctttacaatacaccgaaggtccgggcggcggcggagcaggcgatatacaggaacgaaggagtgctactggttgacctccgggatgttagtgcctattctgcagagctgcacgcagatctactcctgaacttttcgcggaacgttgagaggatcgacagaagcacggctgtgtatacgatgagggagttttctactgcgcttgagcacacgtcgttctgcaacagccatgtgatttataagatcagggagttgaaaagcaacaggcttggacagcttctgagcttcagcggcacggtcacaagaaccacgcaggtcaggccggagcttgtcagcgggacgtttgtatgcaagatctgcggctctgttatcgacaacgttttccaagagttcaagtacaccgagcccttgacgtgtccaaaccacctgtgcacgaacaggaggctgtggaagctggacattgacaaaagcaagtttctgaactggcaaagaatacatgttcaggaaaacacggaggagattcctcctgggtctcttccaagaagcatggatgtgattgtcagaaacgacttggttgaaaagataagggccggagacaaggttgtgatgacagggtatttgatagttgttcccgatgtggtgcagctgatgatgcctcagagcaagagtgttcctatgcagagtggggagtctgatgagattaggaagaagaggaacataaatatcaaggacctgaaccataagctcagctttatgtgcattcatgcaggatgcagtgttgaggaggatgaggagtttacaaacgaagagcttgccacgataagtgagatgaggtcgacgcctgacctttattacaagctgagccagagcatgtttccgtcgattcacgggcactactcgatcaaaaacgcgattttacttctgcttgtcgggggagtcgggaagagggcggagggaggaacaagactccgaggagacataaatatgctgcttgttggggatcccgggacggcaaagtcgcagttcctgaagcaggcaagcgcatttcttccgagaagtgtatatacatctgggaagagcagcagcgcagcagggcttacagcaagtgtggtgaaggatggtgagaccggagagtttaccattgaggcgggtgcgctgatgctcagcgacacaggggtgtgctgcatcgacgagttcgacaagatgaatgtcaaggaccaggtgagcattcatgaggccatggagcagcagactataacgatatcgaaggcggggataaatgcaactctcaatgcccgaagtagcatcctggcagcagcaaacccaataaagggaaggtacgacaagaaaaagactctgagacagaatataaacctcagcgcacctgtaatgtcaaggttcgacctatactttgttcttatcgacgatgcagatccggagaacgatagaaacgttgcaacccatgttctcaacagccatgcatcggtcactgattcgggagtccttgcaagttacttcaccagggagcaggtgaagctgtacctgcgatatgccaggaagaagacccccaggatgactgcagaggcaaaggaaatgctcatcaaaaggtacgttggcataagacaagacagtcttatccatagcaacaactacatgatgactgtccggcatctggagagtctgattcgacttagcgaggcgcttgcaaaagtccatgacaacgatcttgtgacaaaagagtatgtagaggaggcgcatagactggtgaagagcagtgttgtcgaggtcaagggagaggatatagagataatcccgaagactgcagacgagccaggattcatggtaagcagcaaggactatgtgagaataaccaactccttcatatatctcataaagacgcgggagcctatggagagacgcgagctggtcgaggcgcttctgtctgaaagcgagtcatcgatagagagtgagagagccctggttgatgagcagaacaaggcagagaatgtgctgtcctttcttatagggagggagggtgtcctgttcattagcgacggaaagatccacatccatcccagctatgatgtatga

SEQ ID NO: 5480 - protein, 726 aa, Encephalitozoon cuniculi GB-M1
MWGWCSTRNTWMRENFYPQMTEEVHDKFLEFLYNTPKVRAAAEQAIYRNEGVLLVDLRDVSAYSAELHADLLLNFSRNVERIDRSTAVYTMREFSTALEHTSFCNSHVIYKIRELKSNRLGQLLSFSGTVTRTTQVRPELVSGTFVCKICGSVIDNVFQEFKYTEPLTCPNHLCTNRRLWKLDIDKSKFLNWQRIHVQENTEEIPPGSLPRSMDVIVRNDLVEKIRAGDKVVMTGYLIVVPDVVQLMMPQSKSVPMQSGESDEIRKKRNINIKDLNHKLSFMCIHAGCSVEEDEEFTNEELATISEMRSTPDLYYKLSQSMFPSIHGHYSIKNAILLLLVGGVGKRAEGGTRLRGDINMLLVGDPGTAKSQFLKQASAFLPRSVYTSGKSSSAAGLTASVVKDGETGEFTIEAGALMLSDTGVCCIDEFDKMNVKDQVSIHEAMEQQTITISKAGINATLNARSSILAAANPIKGRYDKKKTLRQNINLSAPVMSRFDLYFVLIDDADPENDRNVATHVLNSHASVTDSGVLASYFTREQVKLYLRYARKKTPRMTAEAKEMLIKRYVGIRQDSLIHSNNYMMTVRHLESLIRLSEALAKVHDNDLVTKEYVEEAHRLVKSSVVEVKGEDIEIIPKTADEPGFMVSSKDYVRITNSFIYLIKTREPMERRELVEALLSESESSIESERALVDEQNKAENVLSFLIGREGVLFISDGKIHIHPSYDV

SEQ ID NO: 5481 - DNA, 2106 bp, Methanosarcina acetivorans C2A
  CDS (1)..(2106): transl_table=11
atgaccgaaacagaaagcaagtggggcgagaagctaaaaaagttctttaaagactactactggaatgaaatcctccagcttgcaaacgaatatcctgaccagcgaagccttgaggtggatttcaccgatatggaaaagtttgacagggagctttcgaaagagttgcttgagcaccccggagaactcatatttgcagccgaagccgccctgaaagaaattgacctgcctgtagaaaagagccttgagcaggcgcatgtaagagtcattaaaatccctaacaggatccctataagggaactgagaagcaaacacctctcccgctttgttgcaatcgaaggcatgatcaggaaagctacggaggtcaggccaaggattacagaagccgctttccaatgcttaaggtgcggacaccttacccttgtcgagcagaacagcttcaaattcgaagagccctatgcaggctgtgaaggagacaattgcggaaaaaaagggccttttaaggtttcaatcgaagattccacctttatagatgctcagaaactccagattcaggagtccccggaaaacctgaaaggagggtcgcagccgcagagtctggaagtggataccgaagacgatctcacaggaaatatcactcccggagaccgcgtcatcattaacgggatcctgaagtcaaggcagcgagcccttaaagacggaaaatccaccttttacgacctggtgctggaagcaaattccatcgaacgcctggacaaagattttgacgaacttgaaataactcccgaagacgaggaacagatccttgagctttcccgcgacccggcaatctatgaaaaaattatagggtccattgccccctcgatctacggatacgaagatattaaagaagcccttgccctccagctcttttcaggggttgtgaaaaaccttcctgacggagcgagaatcagaggcgatatccatatgatgcttgtaggcgaccccggtattgcaaaaagtcagctgctgcgttatgtggttaagctttccccaagaggggtctttgcttcagggcgaagtgcatctgcaagtggtttgaccgcggctgccgttaaggacgacatgaatgatggcaggtggactatagaaggcggggcccttgtgatggctgacatggggattgctgcagttgacgaaatggacaagatgaaaaccgaggacaagagtgccctgcacgaagcaatggaacagcagacaataagcgtagccaaagccgggatcattgcaaccctgaagtctcgctgtgccctcctgggagctgcaaaccccaagtatggccgttttgataggtatgaaggacttgcagagcagatcagcatgcctccggcactgctttcccgtttcgaccttatcttcgttttgctcgataccccgaaccatgccctggacagcaggattgcaaaccatatcctgcagtcgcattatgcgggagaactctccgaacagcgactgaagcttccgggctccaaggtcacggaagattttgttgatgcggaattggaagtaatcgagcctgtaatccaggcagaaattatgcggaagtatgttgcatatgcacggaaaaatgtgtaccctgtaatggaagaagatgcaaggcagcaccttatcgatttctatacgggcctcaggaaaagcggagaaggcaagaatacgcccgtacccgtgactgcaaggcagcttgaggcgcttgttcgcctctcggaagccagtgcaagaatacgcctgagcaatgttgtcactctggaagatgcaaaacggactataagaattaccatgaactgccttaaaaacgtgggtgttgatccggaaaccggagccctcgatgcagacatccttgcttcgggcacaagcatgagccagagaaataaaataaagctccttaaggacataataaaaaaggtttgtgagcgacatacaggcgccaaagcccctctcgaagaagtttacgcagaggcggaaaacgagcacgggatcgatagaggacatgccgaggagtatataaagaaaatgaagcagagaggagacattctttctccagaccagaaccatatcaggctcattaattga

SEQ ID NO: 5482 - protein, 701 aa, Methanosarcina acetivorans C2A
MTETESKWGEKLKKFFKDYYWNEILQLANEYPDQRSLEVDFTDMEKFDRELSKELLEHPGELIFAAEAALKEIDLPVEKSLEQAHVRVIKIPNRIPIRELRSKHLSRFVAIEGMIRKATEVRPRITEAAFQCLRCGHLTLVEQNSFKFEEPYAGCEGDNCGKKGPFKVSIEDSTFIDAQKLQIQESPENLKGGSQPQSLEVDTEDDLTGNITPGDRVIINGILKSRQRALKDGKSTFYDLVLEANSIERLDKDFDELEITPEDEEQILELSRDPAIYEKIIGSIAPSIYGYEDIKEALALQLFSGVVKNLPDGARIRGDIHMMLVGDPGIAKSQLLRYVVKLSPRGVFASGRSASASGLTAAAVKDDMNDGRWTIEGGALVMADMGIAAVDEMDKMKTEDKSALHEAMEQQTISVAKAGIIATLKSRCALLGAANPKYGRFDRYEGLAEQISMPPALLSRFDLIFVLLDTPNHALDSRIANHILQSHYAGELSEQRLKLPGSKVTEDFVDAELEVIEPVIQAEIMRKYVAYARKNVYPVMEEDARQHLIDFYTGLRKSGEGKNTPVPVTARQLEALVRLSEASARIRLSNVVTLEDAKRTIRITMNCLKNVGVDPETGALDADILASGTSMSQRNKIKLLKDIIKKVCERHTGAKAPLEEVYAEAENEHGIDRGHAEEYIKKMKQRGDILSPDQNHIRLIN

SEQ ID NO: 5483 - DNA, 2106 bp, Methanosarcina mazei Go1
  CDS (1)..(2106): transl_table=11
atgactgaaacagaaagcaaatgggacgagaaattaaagagattctttaaagattattactggaatgaaatccttcagctggcaaacgaatacccggaccagcgtagccttgcagttgatttcacggatatagaaaaatttgacagggatctttcaagggaatttcttgagcatcccggagaacttatatccgcagctgaagccgctctgaaagaaattgacctgcctgtagaaaagaaccttgagcaggcccatgtaagggtcataaaaattcctaacaggattcctatcagggaactgagaagcaaacacctcacacgttttgttgctatcgagggcatgataagaaaggcaacagaggtcaggccaaggatcacaaaagctgccttccagtgtttaagatgtgggcacctgaccatagtggagcagaacagtttcaagttcgaagagccttttgcaggatgtgaagaggagacctgcgggaagaaagggccattcaaggtttcaattgaagattcaacttttatcgatgcccagaaactacagatccaggagtccccggaaaacctgaaaggagggtcgcaaccccagagcctggaagtggactctgaagatgaccttacggggaatgttactccgggggaccgtgttataatcaacggagtcctgaagtcaaggcagcgcaccctcaaggacgggaaatccactttctacgaccttatactggaagcgaattccatcgagcgcctggacaaagattatgatgagcttgaaatatctgccgaagaagaggaacagatccttgagctttcccgtgacccggcaatttatgaaaaaatcataagctccattgcgccctctatttacggatacgaggatatcaaagaagcccttgcactccagttattttcaggggttgtgaagaaccttcctgacggctcgaggacgaggggcgatatccacatgatgcttgtaggtgaccccggaattgcaaaaagccagcttctccgttatgttgtcaaactatctccaagaggcgtctttgcttcagggaggagcgcgtctgcgagcggtttgactgcggctgccgtaaaagacgacatgaacgacggcaggtggacgatagaaggcggagcacttgtcatggctgatatgggagttgctgcagttgacgaaatggacaagatgaggacagaggacaagagtgccctccacgaggcaatggaacagcagaccataagcatagccaaagcagggattattgcaactttaaagtccaggtgtgcccttcttggagctgcaaatccgaaatacggccgctttgaccggtatgaagggcttgcagatcaaataaatatgcctccggctctgctttctcgtttcgacctgatcttcgttttgctcgataccccaaaccattccctggacagcaggatagcaaaccacattctgcagtcgcattatgcgggagaactctccgagcaaaggcaaaaacttccagggtctacaatttctgaagaatttgttgatgctgaaatggaaataattgagcctgttattgcaccggaatttatgcggaagtatatcgcatttgcacgaaaaaatgtttatccggtaatggaagaagatacaagacatcaccttattaacttttatacggacctcaggagaagcggagaaggcaagaatacgcccgtgcccgtaacagccaggcagctcgaagcgctggttcgcctctccgaagccagtgcacgtgtccgcctcagtaatatagtcacccttgaggacgcaaaacggaccatcagaatagtaatgaactgccttaaaaacgtaggagtcgatccagaaacaggagctcttgacgcagacatacttgcttcgggtacaagcatgagccagaggaataaaataaaactcctcaaagacataataaaaaaagtcagtgatagacacccgggttccaaagctcctcttgaagaggtctatgcagaggctgaaagcgagcacggcatagatagaggacatgcagaggaatacataaagaagatgaaacagagaggcgacattctttctccggaccagacccatatcaggctcattaattaa

SEQ ID NO: 5484 - protein, 701 aa, Methanosarcina mazei Go1
MTETESKWDEKLKRFFKDYYWNEILQLANEYPDQRSLAVDFTDIEKFDRDLSREFLEHPGELISAAEAALKEIDLPVEKNLEQAHVRVIKIPNRIPIRELRSKHLTRFVAIEGMIRKATEVRPRITKAAFQCLRCGHLTIVEQNSFKFEEPFAGCEEETCGKKGPFKVSIEDSTFIDAQKLQIQESPENLKGGSQPQSLEVDSEDDLTGNVTPGDRVIINGVLKSRQRTLKDGKSTFYDLILEANSIERLDKDYDELEISAEEEEQILELSRDPAIYEKIISSIAPSIYGYEDIKEALALQLFSGVVKNLPDGSRTRGDIHMMLVGDPGIAKSQLLRYVVKLSPRGVFASGRSASASGLTAAAVKDDMNDGRWTIEGGALVMADMGVAAVDEMDKMRTEDKSALHEAMEQQTISIAKAGIIATLKSRCALLGAANPKYGRFDRYEGLADQINMPPALLSRFDLIFVLLDTPNHSLDSRIANHILQSHYAGELSEQRQKLPGSTISEEFVDAEMEIIEPVIAPEFMRKYIAFARKNVYPVMEEDTRHHLINFYTDLRRSGEGKNTPVPVTARQLEALVRLSEASARVRLSNIVTLEDAKRTIRIVMNCLKNVGVDPETGALDADILASGTSMSQRNKIKLLKDIIKKVSDRHPGSKAPLEEVYAEAESEHGIDRGHAEEYIKKMKQRGDILSPDQTHIRLIN

SEQ ID NO: 5485 - DNA, 2496 bp, Arabidopsis thaliana
  CDS (1)..(2496)
atggaagcttttggtggatttgtaatggatgaacaagcgattcaagtcgagaatgtcttcctcgaattcctgaaaagttttcgattagatgcgaacaagccggagttgtattacgaagcagagattgaagcgattcgaggtggtgaatcaacaatgatgtacattgatttctcacatgtaatgggttttaatgacgctcttcagaaagcaatagctgatgaatatttgaggtttgagccgtatttgaggaatgcgtgtaagagatttgtgattgaaatgaatccttctttcatttctgatgatactccaaataaagatatcaatgtttctttctacaatcttcctttcactaaaaggttgagggagttaacgacggcagaaattggaaagttagtgtcggtgacaggtgtggttactcgaacaagtgaagtgagacctgagcttctatatgggactttcaagtgtttagattgtggtagtgttataaagaatgttgaacaacagtttaagtatacacagcctacgatctgtgtgagcccgacttgtttgaacagagcaagatgggcgttgcttagacaagaaagtaagtttgcggattggcaaagggttagaatgcaggagacttcaaaagagatacctgcaggttccttgccacggtctttggatgtcattttgcgtcatgagattgtggaacaggccagagcgggtgacacggttatttttacgggaacagtagttgttatacctgacatatcagcactggcagcacctggagagagagcagaatgtcgtcgagactcatcacagcagaaaagctctactgctggacatgaaggtgttcaaggtctcaaggctctaggagttagagatctttcgtatcggcttgcctttatcgctaattcagtgcagattgctgatggtagtaggaacactgacatgaggaaccgccaaaatgattctaacgaagatgatcaacagcagttcacggcagaagagttagatgaaattcagcagatgagaaatactcctgattacttcaataagttagttggaagcatggccccaaccgtttttggtcatcaagacatcaaacgtgcagttctacttatgcttctaggcggtgtgcacaagacaactcatgaaggcatcaaccttagaggagacatcaatgtttgtatagttggggatcccagctgtgctaaatcccaattcctcaagtataccgcaggtattgtaccacgatctgtgtatacatctgggaagtcctcttctgcagctgggttgactgcaactgtggcaaaagaaccggaaactggtgaattctgcattgaggctggtgctttaatgcttgctgacaatggaatatgttgcattgacgagtttgacaagatggatatcaaagatcaggttgctattcatgaagcaatggagcagcagacgataagcattacaaaagctggtatacaagcaaccttgaatgctaggacatcaattcttgcagcagctaatcctgttggtgggcgatatgataaatctaaaccacttaagtataacgttaatcttccacctgccattctttcgaggtttgatcttgtgtacgttatgattgatgaccctgatgaggtaacggattaccacattgcccatcatattgtgcgagttcaccagaagcatgaagcagcgctatctcctgaattcactaccgtacaactcaagcgctacattgcatatgccaaaacgttaaagccaaagctaagcccagaagcaagaaagttacttgtcgagtcttatgttgctcttcgtagaggtgatacaactccaggtacaagagtcgcatatcgaatgacagttaggcagctagaggcactgatcaggctctcagaagccattgctaggagtcatttggaaattctggttaaaccaagtcatgttcttttagctgtcagactgctaaagacttcagtcatcagtgttgagtcaggcgatatcgatctttctgagtaccaagatgctaatggtgacaacatggacgacacagatgacattgaaaaccctgttgatggagaggaagatcaacagaatggtgcagctgagccagcttctgcaactgcagataatggagcagcagctcaaaagctggtgattagcgaggaagaatatgatagaatcacacaggctttagtcattcgccttagacaacatgaagaaactgtaaacaaagacagttctgaattgcctggaattagacaaaaggaactgattcgatggttcatcgatcaacagaatgagaaaaagaaatatagttcgcaagagcaagtaaaactcgatatcaagaaactcagagccatcattgagagtttggtatgtaaagaaggtcatcttatagtgttagctaatgagcaagaagaagccgcagaagcagaggaaacgaagaaaaaatcttcacaaagagacgagaggatcttagctgttgctccaaactatgttattgagtga

SEQ ID NO: 5486 - protein, 831 aa, Arabidopsis thaliana
MEAFGGFVMDEQAIQVENVFLEFLKSFRLDANKPELYYEAEIEAIRGGESTMMYIDFSHVMGFNDALQKAIADEYLRFEPYLRNACKRFVIEMNPSFISDDTPNKDINVSFYNLPFTKRLRELTTAEIGKLVSVTGVVTRTSEVRPELLYGTFKCLDCGSVIKNVEQQFKYTQPTICVSPTCLNRARWALLRQESKFADWQRVRMQETSKEIPAGSLPRSLDVILRHEIVEQARAGDTVIFTGTVVVIPDISALAAPGERAECRRDSSQQKSSTAGHEGVQGLKALGVRDLSYRLAFIANSVQIADGSRNTDMRNRQNDSNEDDQQQFTAEELDEIQQMRNTPDYFNKLVGSMAPTVFGHQDIKRAVLLMLLGGVHKTTHEGINLRGDINVCIVGDPSCAKSQFLKYTAGIVPRSVYTSGKSSSAAGLTATVAKEPETGEFCIEAGALMLADNGICCIDEFDKMDIKDQVAIHEAMEQQTISITKAGIQATLNARTSILAAANPVGGRYDKSKPLKYNVNLPPAILSRFDLVYVMIDDPDEVTDYHIAHHIVRVHQKHEAALSPEFTTVQLKRYIAYAKTLKPKLSPEARKLLVESYVALRRGDTTPGTRVAYRMTVRQLEALIRLSEAIARSHLEILVKPSHVLLAVRLLKTSVISVESGDIDLSEYQDANGDNMDDTDDIENPVDGEEDQQNGAAEPASATADNGAAAQKLVISEEEYDRITQALVIRLRQHEETVNKDSSELPGIRQKELIRWFIDQQNEKKKYSSQEQVKLDIKKLRAIIESLVCKEGHLIVLANEQEEAAEAEETKKKSSQRDERILAVAPNYVIE

SEQ ID NO: 5487 - DNA, 2277 bp, Plasmodium falciparum 3D7
  CDS (1)..(2277)
atgataggaatacaagaaggtagagcattttttaatcctacgagaaatcctaataatagaccagagaataatattagaatagaagagaatttaccaagtcttaatgaagtatataattattttcaagattttttatcgagatattcttcaaatacattaaaagaaggaaatttgaaaagaaccttatttgagaatgttaagaataataattttacattagatttaaaattagatgatatatataaacaacaaacagtttttgaaaataatgaaataagtgcaacacctcgatcagaaaggaaaatgaagaaaccagaaaattattcagcaatattagctagggcattatctgaaagaccccttacatatttacctactattgaaagagtttgttatgaagtttgtgaaacagctaatattttaaacgatgaagatgaacatttgaattatatacaaatcaatttattaaatacatttattagaccaacccctataagaggacttttagcagctacacaagaaagatttgtggttgttcctggaataattgttcaagctagtaaaccacaacataaaatgagaaaaatcactttacaatgtcgttattgtgatcataaaatgtctattgatgtacctttatggagagataaaccacaactacctccttattgtagatattcttctaccatgaaatcttctatgggattaggtaatgctatggatagtcaattaggatgtaatggtgttttagaaccatatgttatactaccaaatgaatgtacttttgttgatattcaatctttaaaaatgcaagaattacctgaagctgtaccaactggagatatgcctagacacctacaattgaatgttacgagatatttatgtgaaaaaatgataccaggagatcgagtttatgttcatggtgttttgacgtcttataaccctaaccctagacctaccagagcagatggaactaatttttcttatttacacgttttaggatttcaaaaatatgatgatatgtcaggaaacgatttaaattttgatgtagaagaaagaaatgaattaacattattagctgctgaacataatatacatgaaaaaatatttaaatccattgcccccgaattatatggaatggatgaagtaaaaaaggcttgtgcatgtttattatttggtggtactagaaaaagaattggtgaggaaacgaaaattagaggagatattaatatgttaatgttaggtgatccatctgttgctaaatcacaaatattaaaatttgtaaatagatgcgcacctgtttcggtttatacttctggtaaaggtagtagtgccgcaggattaacagcagctgttatgagagatagtcaaggagtcttttctttagaaggtggagctatggttttagcagatggtggcgttgtatgcattgatgaatttgataaaatgagagatgatgatgtagtcgctattcatgaagctatggaacaacaaaccatttctatttctaaagcaggtataacgactatgttaaatacaagatgttcagttattgctgctgctaatccatcatttggttcgtatgatgattctcaagatactacttatcaacacgattttaaaacaaccatattatcaagatttgatatcattttcttattaagaaataaacaagatgtagaaaaagatactttgttatgtaaccacatcgtagccttacatgcatcaaaacataaatcacaagaaggagaaatcccattatccaaacttacaagatatattcaatatgctaaaagagaaattgcacccttattatcaaaggaagcaagggattcattaagaaacttttacgtacaaacaagagctgaatatagaggagatagaagatcagtaactaaaaaaatacctatcactttaagacaattggaatcgttaattcgattagcagaaagttttgctaaaatggaattgtctcagtttgctacagataaacatgttcaaatgtccattgatttattttctgcttcaactgctgaaacagcaaagcaatgtttgatttttgaaacaatgtctccattagaacaaaaagctgtcaagcaagcggaagatgcaatattaggtagacttggaaaaggacaaagagcttcaagagttaatttatttagggaactacaattaagaggttttgacagatcagcattatcaaaagctttggccatattaattaaaaagggtgaactccaagaaagaggagatcgttcagtcagacgtacataa

SEQ ID NO: 5488 - protein, 758 aa, Plasmodium falciparum 3D7
MIGIQEGRAFFNPTRNPNNRPENNIRIEENLPSLNEVYNYFQDFLSRYSSNTLKEGNLKRTLFENVKNNNFTLDLKLDDIYKQQTVFENNEISATPRSERKMKKPENYSAILARALSERPLTYLPTIERVCYEVCETANILNDEDEHLNYIQINLLNTFIRPTPIRGLLAATQERFVVVPGIIVQASKPQHKMRKITLQCRYCDHKMSIDVPLWRDKPQLPPYCRYSSTMKSSMGLGNAMDSQLGCNGVLEPYVILPNECTFVDIQSLKMQELPEAVPTGDMPRHLQLNVTRYLCEKMIPGDRVYVHGVLTSYNPNPRPTRADGTNFSYLHVLGFQKYDDMSGNDLNFDVEERNELTLLAAEHNIHEKIFKSIAPELYGMDEVKKACACLLFGGTRKRIGEETKIRGDINMLMLGDPSVAKSQILKFVNRCAPVSVYTSGKGSSAAGLTAAVMRDSQGVFSLEGGAMVLADGGVVCIDEFDKMRDDDVVAIHEAMEQQTISISKAGITTMLNTRCSVIAAANPSFGSYDDSQDTTYQHDFKTTILSRFDIIFLLRNKQDVEKDTLLCNHIVALHASKHKSQEGEIPLSKLTRYIQYAKREIAPLLSKEARDSLRNFYVQTRAEYRGDRRSVTKKIPITLRQLESLIRLAESFAKMELSQFATDKHVQMSIDLFSASTAETAKQCLIFETMSPLEQKAVKQAEDAILGRLGKGQRASRVNLFRELQLRGFDRSALSKALAILIKKGELQERGDRSVRRT

SEQ ID NO: 5489 - DNA, 2916 bp, Plasmodium falciparum 3D7
  CDS (1)..(2916)
atggaggataagaaaaaattagaagaagatttagaatctaacaagtatgatattgatgaagaagatttactagaagatgaaggaaggttaaatgaagaagaaagacaagccgagctagaaggagaaagtttatttgaagaagatgaaggatttatttttggagctgatgatgaaaaaaaagaaatgcaaaagttacgaaatttaggattagataatgatgattatgatgatgattttattgatgatgaattagattatgaggataatttaaaagcaagaagagcagcagaaagacatatgcagatgcaaagaaaacaagagggtaaatatgaaaaaaataaattttggaaaacattagaagatcaattagaaggtgatgatgaagaagaagatatttttgataaggttgctgaaaaggtagcaaagagaagagagaatttacacttaacagctgaagaaacagatattccagatttatcaaatttagaaagtgcaaaaatttgtttatctgtgaatcctaaagatgtagtatttgatgaaagatatcaacaagctgcagatacatgttttcgatatttcttacataaattttctttaaaagattctatgggtttaaatattgatgaatctaatacagaattacatgaagaggaacatatgaatagttctcatcaatattatatagataagatagaaaaaatgattttaaatgataaacataccttaattgtatcagccaaacatttgattcaatttcattgtgaaaatttagttcaatggattgaatttaaacctgaacaaattttagaagtattacatgaatgtttaatggtagaagcatatagaatatctcctaaattatataaaggaagaatatgtaaagttgtgttacgtgattggccatattctacacaattaagaaatttaagatgtactgaattaaatacattaataaaagttacaggagtatgtattaaaagaggctatgtgttaccaaaattaagagttatgtatttaaaatgtaattcatgtgatactaccttatcagaagtacctatatattttgctgatggaaaaaaaccagtattaccaagaagatgtcctcattgtcaatcagctacgttttctgttgataggataaaaacagcttataccgattatcaaaaaattactttacaagaatctccatgttctgtacctgcaggtagagcaccgagacaaagagaagttgtagtgacaggagatttagtggataaagtgaaaccaggtgaagaagtagaagtgttaggtatatataaaaccaaatatgatataggtttaaatataaaatatggatttccaatattacaaacagaaattgaagctaataacattgaaaggaaggaagatatacaattaagcgaattaacagaagatgatataaaggatatattaaaattatcaaaagatccaaatataagagaacgcattattacttcaatagctcctgcaatttggggacataaagatattaaaacatctattgcttatgctttatttggtggagtacaaaagggtggagataaaagtttttcaaaaaataatgaaactaacaattttggtgtacaaaatagagatatattaaataattttaaaggaggtcatactataagaggagatattaatgtattactattaggagatccaggtttaggaaaatcacaagttttacaatatgtacataaaacaaatttaagaactgtatatactactggtaaaggagcatcagctgttggtttgactgctggtgttagaaaagatcatacaactaacgaatggacattagaaggaggtgctttggttttagctgatgaaggtatttgtattattgatgaatttgataaaatgactgataaagatcgagtaagtattcatgaagcaatggaacaacaatcaatttctatttcaaaggctggtatagttacaactttgagagcaagatgtgcagttatagcagctgctaatcctatatatggtcgttatgatccttcattaacttttaaagaaaatgtggatttatcagatcctattttaagtagattcgatttaattactgttttgagagatatacctaatgtagatgaagatttttatttagctgaatatgtcgtaacaaatcatcaattaagtcatccgaaattagaaaatacacaaaattatcaaaaaagaattgaaaatttaaaaaatgttattgtttcttcatcagcatatgaacctattcctcaagatttgttacagaaatatattatctatgctagaactaattgtaaaccaagtttatcagatgttccatatgctgaaattagtgcaaaattatctaatttttatagtagagtaagacaaaaagcaagcgcctcaggtggatatccattaacactaagacatattgaaagtattatcagaattgcagaagcaaatgcaaaaatgagattatcgcatcaaatttattcaaaagatgttgattatgctatagctacattattagaatcatatgtatcatgtcaaagatttgcagtagctaaacaattaagtaaagaatttgcaagatatagagctttatttagaggtggttatgaagtcttacgtgaattattaagaagaactgtacaacaaatgatacaaagacaaaacttaaaaaatgcctctgcaaaagattttcaaaatgattcagaatcaggaactgaaagtgaagcagaaattttaaatcctaataatgtgttcttgccattacatatatttatgaagacagctatgcaaaataaattctcagaatatcaagtagtcaattggatgaaatctaaagtctttaacgaacactatgcagtaataaaaagagatggagtcgaaggaataataagtaaaaagtttaaggtgtaa

SEQ ID NO: 5490 - protein, 971 aa, Plasmodium falciparum 3D7
MEDKKKLEEDLESNKYDIDEEDLLEDEGRLNEEERQAELEGESLFEEDEGFIFGADDEKKEMQKLRNLGLDNDDYDDDFIDDELDYEDNLKARRAAERHMQMQRKQEGKYEKNKFWKTLEDQLEGDDEEEDIFDKVAEKVAKRRENLHLTAEETDIPDLSNLESAKICLSVNPKDVVFDERYQQAADTCFRYFLHKFSLKDSMGLNIDESNTELHEEEHMNSSHQYYIDKIEKMILNDKHTLIVSAKHLIQFHCENLVQWIEFKPEQILEVLHECLMVEAYRISPKLYKGRICKVVLRDWPYSTQLRNLRCTELNTLIKVTGVCIKRGYVLPKLRVMYLKCNSCDTTLSEVPIYFADGKKPVLPRRCPHCQSATFSVDRIKTAYTDYQKITLQESPCSVPAGRAPRQREVVVTGDLVDKVKPGEEVEVLGIYKTKYDIGLNIKYGFPILQTEIEANNIERKEDIQLSELTEDDIKDILKLSKDPNIRERIITSIAPAIWGHKDIKTSIAYALFGGVQKGGDKSFSKNNETNNFGVQNRDILNNFKGGHTIRGDINVLLLGDPGLGKSQVLQYVHKTNLRTVYTTGKGASAVGLTAGVRKDHTTNEWTLEGGALVLADEGICIIDEFDKMTDKDRVSIHEAMEQQSISISKAGIVTTLRARCAVIAAANPIYGRYDPSLTFKENVDLSDPILSRFDLITVLRDIPNVDEDFYLAEYVVTNHQLSHPKLENTQNYQKRIENLKNVIVSSSAYEPIPQDLLQKYIIYARTNCKPSLSDVPYAEISAKLSNFYSRVRQKASASGGYPLTLRHIESIIRIAEANAKMRLSHQIYSKDVDYAIATLLESYVSCQRFAVAKQLSKEFARYRALFRGGYEVLRELLRRTVQQMIQRQNLKNASAKDFQNDSESGTESEAEILNPNNVFLPLHIFMKTAMQNKFSEYQVVNWMKSKVFNEHYAVIKRDGVEGIISKKFKV

SEQ ID NO: 5491 - DNA, 2790 bp, Plasmodium falciparum 3D7
  CDS (1)..(2790)
atgtcagctatatttaatgaaagtgaattatccggactagatgcccatagtgcctttggtaataatgaaacttccagttttcaaaagaagaaaaggcgaatcgacgaaaattctcaaatgagtgtaaatgatttagttgatgatggggaagaggaagaagatgatgatgatgatgaagaagaaccatcatatgttcaagatcaaaatatggctaaagtatttgagaaatttttaaaaacattttctgaaaaaaaaagtgaagaagatgatgatgatggtgatagtatttggaaagatagtttaaattttgattttccaagtaatttagaaatagcaaaagattctcattatgtactattattattttctattcttcaaaactcttattcaagaaataaggttttgattgttgatatgaaacatgtattaatgtgggaaccaactgacaagaatagatttgatataggtagtcaattatatatgtatataaaaagacactttttaagaatattagatatttttgaaaaaaaagtacagttattagcagaaagtattaatcctataaaaacgaaagaagttggaaaaatatgcttaaggttttataataagaagaatcctatacattctttacgaagtttaagatgtgaaatgcttggagaaatgattagtgtcagaggacaagttacaagaacatctgatgtaagacctgaattaacattagcagcttttaaatgtaatgaatgcggtaatattataaacggtgtgaagcaacaatttagatatacacaaccaagtaaatgtccttcagctagctgtagtaatatgtctgattggtctctcgttttggaacaatcctattttgttgattggcaaaaaatcagattacaagaaattgctcaagaaagtccacctggttctatgcctagaaatatggatgtaatattaagaaatgatattgtagatagtgtacatgcaggagatcgtattatagttacaggatgtttaattgtggttccagatattccaacattaatgaaaccaggagatgtacctagaagtgtagccagacaacttttaaagaaaaatgaaaactcattagtatcacaaggtttaactgggataaaaggtgttggtgtacaagatttaaatcataagttatgtatatatgcatgtcaaatagaaaaattaaatagttctaagaaagataataattttgatgaacaaacgcaagtagatataaattgtgaagaaattcttaattgtgatgacttgaaatggttaagagatattgcaatgcatccaaatactatagatatattagcagaatgtatagcaccaaaaatttggggtaatcttgaaattaaaaaaggagcattattaatgatgactggtggtgtacaaaagattacatcaaattgtaaattaagaggagatattaatatgtgtattgtaggagatcctggtacagccaaaagtgagatattaaaatatgttgaaagttttgctcctcgagcaatttttacatcaggaaaaggatcaactgctgctggtttaactgcagctgttcatagagatcctgatcaaggagatactgttttagaagctggagcattaatgtatgctgatcaaggtatttgttgtatagatgaatttgataagatggatgaaaaagatagggtagctattcatgaagctatggaacagcaaaccatttcaatcacaaaagctggtatacaagctaccttaaatgcaagagcttctgttcttgctgcttgcaaccctaaatatggaagatatgatacattaaaaacatttgctcaaaatgtaaatattccagcaccattattatctcgttttgatttattttatactatgcttgattgtattgatattgataaagatactagtatagctaaccatttggtttctatgcattgtggagaagaagctgaaaaacatttaagagcaaatgcaggaaaattggattctgttaaattagaaatatatttagaattaagtaaaagagtcaagccattattaactgatgaagcaaaatataaattaatacagtattatgtttcctttagaaatattgaatattctccaggtgcacaaagatctatgagaatgactgtgcgtcagttagaatcgcttattagattaagtgaagctgtagccaaattaaaattttctcatttcgtagatgtaaaacatgtagaaattgcatgttccattttcaaagcatctatgaagaaaatatcaaacgaaaaagaaatcaacttggatgaagaatttgataaagttaataattctttaatgggtaacaaggttaataaattggatcaagaaactgaaaatactgaacaaaacaaaaaaattacaacaattaaagctagcgaatatcaatatatatctgctataatctttgaaattattaaagaatacgaatttaataataataatgaaagcattacacaagatcaattaattgaaacatatcttcaagtatatgcaaaagcggaatctagtgaacaagttgatgaatggatttataaattaaaaaaaattattaacagattaataaatcaagatataaaactgttatcagaaactaatgaagatgatcctgagaaggttattataagaatccatccaaattatgcaggtccaatagttgagggtgtttcaaataaaaatacatatggatataacacattcaaaaattatcaaacccaagaaaaggccccagaagatgatgtggactttcaagaagaaattgacaatttttaa

SEQ ID NO: 5492 - protein, 929 aa, Plasmodium falciparum 3D7
MSAIFNESELSGLDAHSAFGNNETSSFQKKKRRIDENSQMSVNDLVDDGEEEEDDDDDEEEPSYVQDQNMAKVFEKFLKTFSEKKSEEDDDDGDSIWKDSLNFDFPSNLEIAKDSHYVLLLFSILQNSYSRNKVLIVDMKHVLMWEPTDKNRFDIGSQLYMYIKRHFLRILDIFEKKVQLLAESINPIKTKEVGKICLRFYNKKNPIHSLRSLRCEMLGEMISVRGQVTRTSDVRPELTLAAFKCNECGNIINGVKQQFRYTQPSKCPSASCSNMSDWSLVLEQSYFVDWQKIRLQEIAQESPPGSMPRNMDVILRNDIVDSVHAGDRIIVTGCLIVVPDIPTLMKPGDVPRSVARQLLKKNENSLVSQGLTGIKGVGVQDLNHKLCIYACQIEKLNSSKKDNNFDEQTQVDINCEEILNCDDLKWLRDIAMHPNTIDILAECIAPKIWGNLEIKKGALLMMTGGVQKITSNCKLRGDINMCIVGDPGTAKSEILKYVESFAPRAIFTSGKGSTAAGLTAAVHRDPDQGDTVLEAGALMYADQGICCIDEFDKMDEKDRVAIHEAMEQQTISITKAGIQATLNARASVLAACNPKYGRYDTLKTFAQNVNIPAPLLSRFDLFYTMLDCIDIDKDTSIANHLVSMHCGEEAEKHLRANAGKLDSVKLEIYLELSKRVKPLLTDEAKYKLIQYYVSFRNIEYSPGAQRSMRMTVRQLESLIRLSEAVAKLKFSHFVDVKHVEIACSIFKASMKKISNEKEINLDEEFDKVNNSLMGNKVNKLDQETENTEQNKKITTIKASEYQYISAIIFEIIKEYEFNNNNESITQDQLIETYLQVYAKAESSEQVDEWIYKLKKIINRLINQDIKLLSETNEDDPEKVIIRIHPNYAGPIVEGVSNKNTYGYNTFKNYQTQEKAPEDDVDFQEEIDNF

SEQ ID NO: 5493 - DNA, 2211 bp, Danio rerio
  CDS (1)..(2211)
atgtcgggatttgatgatccaggagtttattacagtgacagctttggtggaggagaaagcgtcggcgacgagggagtcgtgaaacggagccagatcaagaagaagttccgtgagtttctgaggcagttcagagtcggaaccgatcgcactggattcacctacaaatacagagatgagctcaagagacactatactttgggagagtattggatcgaggtggaaatggaggatttggccagttttgatgaagatctgtcagactgtctgtacaaacttccttctgagaacctgcctttgttggaggaggctgcgcaggaagtggctgatgaggtcacacgtcctcggccagtaggagaagagactgttcaagacatacaggtcatgctgaagagcgacgctcatccagcctccatccgcagtctgaagtcagagcaggtttcgcgtctggtgaagattcccgggatcatcatctcctctactgctgtgagggccaaagccaccagagtgtgtcttcagtgccgcggatgcagagcggtgatcagcaacatccctctgccaccggggctgcagggttacgctctgcctcgcaagtgcaacactgagcaggcagggcgtgtcaagtgccctgtggatccatatttcatcattccagaccggtgtgtgtgtgtggatttccagactcagcgtctgcaggaagctcctgatgccgttcctcatggagagatgccgagacacatgcagctctactgcgacagatacttgtgtgatcgtgtagtaccaggcaacagagtgacagtcatgggcatctactccatcaagaaggtggcgcagaccaaagccaaaggccgtgataagggaactggtgttggcattcgctcggcatatctgcgtgttgtcggcatcgatgtggacactgaaggagcaggccgtggtgccactggttcagtttctccccaagaagaagaggagttaagatctctggccgcttctccctctgtttatgactctctggctcgctctctcgccccgtccatctatggcagtgatgacctgaaaaaagctattgcctgcctgctgttcggcggctccaggaagaggttgcctgatggtctgacacgaagaggggatattaacctgctgatgctgggagatccaggcacagccaagtctcaactgctgaagtttgttgagagatgctctccaattggggtctacacctctggaaagggcagcagtgcagctggtttgaccgcctctgttcttcgggaccccaccactcgtggttttgtcatggagggaggcgctatggtgttagctgatggtggagttgtctgcatcgatgagtttgacaagatgagagaggatgatagagtcgcaatccatgaggccatggagcagcagaccatctctattgcaaaggctgggatcaccaccactctgaactcgcgctgctctgtattagctgccgccaactctgtgttcggtcgctgggatgatacaaagggagaggacaacattgacttcatgcccaccattctgtctcgattcgacatgatcttcatcatcaaagatcatcacgaccaacagcgagacatgactttggctcgacacgtgatgaatgttcacctgagcgctcaaacgcagacggagggggtcgagggagagattcctctggccacgttgaagaaatacatcgcctattctagagtaaaatgtggacctcgactgtctgcggcagctgcagagaagctgaagaacagatacgtgttgatgagaagcggagcgaaggagcatgagagagagactgacagacgagtgtccatccccatcactgtcaggcagctagaggccgtggtgcgcattgcagagtcacttgctaagatgaagctgcagcccattgctggagaagaagaggtggacgaggctctgagactcttccaggtgtccacgctggatgctgctctgtctggcagcctctccggtgttgaagggtttaccactcaggaggatcaggagatgatctcccgcatcgaaaaacagctgaagagacgcttcgccatcggctcgcaggtgtctgaacacagcatcatacaggacttcgccaaacagaaatatccagagcacgctattcaaaaggtcctttacctgatgttgaggagaggtgaactgcagcaccgcatgcagaggaaggtgctttacagggtcaaatag

SEQ ID NO: 5494 - protein, 736 aa, Danio rerio
MSGFDDPGVYYSDSFGGGESVGDEGVVKRSQIKKKFREFLRQFRVGTDRTGFTYKYRDELKRHYTLGEYWIEVEMEDLASFDEDLSDCLYKLPSENLPLLEEAAQEVADEVTRPRPVGEETVQDIQVMLKSDAHPASIRSLKSEQVSRLVKIPGIIISSTAVRAKATRVCLQCRGCRAVISNIPLPPGLQGYALPRKCNTEQAGRVKCPVDPYFIIPDRCVCVDFQTQRLQEAPDAVPHGEMPRHMQLYCDRYLCDRVVPGNRVTVMGIYSIKKVAQTKAKGRDKGTGVGIRSAYLRVVGIDVDTEGAGRGATGSVSPQEEEELRSLAASPSVYDSLARSLAPSIYGSDDLKKAIACLLFGGSRKRLPDGLTRRGDINLLMLGDPGTAKSQLLKFVERCSPIGVYTSGKGSSAAGLTASVLRDPTTRGFVMEGGAMVLADGGVVCIDEFDKMREDDRVAIHEAMEQQTISIAKAGITTTLNSRCSVLAAANSVFGRWDDTKGEDNIDFMPTILSRFDMIFIIKDHHDQQRDMTLARHVMNVHLSAQTQTEGVEGEIPLATLKKYIAYSRVKCGPRLSAAAAEKLKNRYVLMRSGAKEHERETDRRVSIPITVRQLEAVVRIAESLAKMKLQPIAGEEEVDEALRLFQVSTLDAALSGSLSGVEGFTTQEDQEMISRIEKQLKRRFAIGSQVSEHSIIQDFAKQKYPEHAIQKVLYLMLRRGELQHRMQRKVLYRVK

SEQ ID NO: 5495 - DNA, 2550 bp, Oryza sativa (japonica cultivar-group)
  CDS (1)..(2550)
atggcgtctcgcggcggtggcggcggcggcgacggcaattcccctcctccctccgtgtcgtcgccggatgtgcgaccgtcgagccctctcccggcgaccaactcctccccgcctcagtcggggcggcgcggcggggggcggcgccggcgtggttccgccagcccgtacccgtcgtccccgtccctcggcgggttcgagacgccgccgcacccgggccgccgcacgccctccggcggcgcggcggcgcggcagcagcggcagaactggacgggggggcggttcccgccgaccccgtccacccccatgtccaccgacgacgtcccgctctcctcggaggccggggacgaggacacccccgagaccgacggcggcggcggcggcggcgcgggcgccgacgccacgccggtgttcgtctggggcaccaacatcagcgtgcaggacgtcaacgccgccatcctccggttcctccgccacttccgcgacccgcgcgacgccggccgcgtcgacccggtcatggacgagggcaagtacatgcgcgccatccaccgcatcctcgagctcgagggcggggagtcgctcgacgtcaacgcccacgacgtgttcgaccacgacccggacctctacggcaagatggtcaggtacccgctcgaggtgctcgccatctttgacatcgtgctcatggacctcgtcgcgcgcatcgagcccctcttcgagaagcacatccagaccaggatctacaacctcaagtcctcggtttgcttgaggaatctcaacccttctgatatcgagaagatggtgtccatcaagggtatgataattcggtgcagctcggtgattccagagctcaaggaggctgtgttccgctgcttggtttgcgggttctactctgagcctgtaatggttgatcgagggagggttactgagccgcacatctgtcagaaagaacaatgtaaagctacaaactctatgactcttgtgcataaccgatgcaggtttgcagataagcagatcataaagttgcaggaaacaccagatgagataccagaaggtggcactccacatactgttagtgtcttgatgcacgataagcttgtagatgctggaaagcctggagacagggttgagataactgggatatacagagccatgagtattagagttggcccaactcagaggacagtgaagtcgattttcaagacgtacattgattgccttcacataaagaagacagacaagtctagacttcatgttgaggactccatggaaactgataaccccaatgctaacaagacaactgaagatgattttctcagagataaggttgagaaattaaaagagttgtcaaagttgccagatatatatgacagattaactaggtcattggctccaaacatatgggagctggacgacgttaaaaggggcctcctttgccagctttttggtggaaatgctttgaggcttccttctggagctagtttccgaggcgacatcaatattttgcttgttggtgatcctggaacaagtaaatcccagcttctccaatacatgcacaaactgtctcctcgtggcatttatacaagtggcagaggaagttcagctgttggccttactgcatacgttaccaaggatcctgaaactggtgaaactgttcttgagagtggagcgcttgttttgagtgacaaaggtgtttgttgtattgatgaatttgataagatgtctgataatgctcgaagcatgttacatgaggtgatggaacaacagactgtctccattgccaaggctggaataattgcatctttaaatgccagaacatcagttctagcatgtgcaaatcctactgaatcacgttataatccaaggctctctgtgattgacaatatccatcttcctccaacactgctttctaggtttgacctcatttatctgatattggacaaggcagatgagcaaactgatagacgcctggctaagcatattgtttcgttgcattttgagaatccaaacatagaggagctcgaggtcttggatttgccaacacttgtagcctacataagttatgcaaggaagcatatacaaccacagttatctgatgaagctgcagaagaattgactcgcggctatgttgagatgaggaaaagaggaaacagccctggtagcagaaagaaggtcataactgcgacagctcgacaaattgagagcttgattcggctcagtgaagcactggcccgaatgcgattctctgaaatggttgaagtacaagatgttgtagaggccttcaggcttctcgaagttgccatgcagcaatcggcaactgatcatgccactggtacaatcgatatggatcttatcatgactggaatatctgcgagcgaaaggcagaggcgggacaatctcgttgcagcaacccgcaaccttgtgatggagaaaatgcagcttggagggccctcagtgcgaatgattgagttgctggaagaaattaggaagcagagctctatggaagttcatctgcatgatgtaagttggagatctagtctgcattgcttgcattga

SEQ ID NO: 5496 - protein, 849 aa, Oryza sativa (japonica cultivar-group)
MASRGGGGGGDGNSPPPSVSSPDVRPSSPLPATNSSPPQSGRRGGGRRRRGSASPYPSSPSLGGFETPPHPGRRTPSGGAAARQQRQNWTGGRFPPTPSTPMSTDDVPLSSEAGDEDTPETDGGGGGGAGADATPVFVWGTNISVQDVNAAILRFLRHFRDPRDAGRVDPVMDEGKYMRAIHRILELEGGESLDVNAHDVFDHDPDLYGKMVRYPLEVLAIFDIVLMDLVARIEPLFEKHIQTRIYNLKSSVCLRNLNPSDIEKMVSIKGMIIRCSSVIPELKEAVFRCLVCGFYSEPVMVDRGRVTEPHICQKEQCKATNSMTLVHNRCRFADKQIIKLQETPDEIPEGGTPHTVSVLMHDKLVDAGKPGDRVEITGIYRAMSIRVGPTQRTVKSIFKTYIDCLHIKKTDKSRLHVEDSMETDNPNANKTTEDDFLRDKVEKLKELSKLPDIYDRLTRSLAPNIWELDDVKRGLLCQLFGGNALRLPSGASFRGDINILLVGDPGTSKSQLLQYMHKLSPRGIYTSGRGSSAVGLTAYVTKDPETGETVLESGALVLSDKGVCCIDEFDKMSDNARSMLHEVMEQQTVSIAKAGIIASLNARTSVLACANPTESRYNPRLSVIDNIHLPPTLLSRFDLIYLILDKADEQTDRRLAKHIVSLHFENPNIEELEVLDLPTLVAYISYARKHIQPQLSDEAAEELTRGYVEMRKRGNSPGSRKKVITATARQIESLIRLSEALARMRFSEMVEVQDVVEAFRLLEVAMQQSATDHATGTIDMDLIMTGISASERQRRDNLVAATRNLVMEKMQLGGPSVRMIELLEEIRKQSSMEVHLHDVSWRSSLHCLH

SEQ ID NO: 5497 - DNA, 2253 bp, Danio rerio
  CDS (1)..(2253)
atgtcttcaccatcatcccagagccgtaagagagaccctccgaccccggcgagcgaggatcctctgtctcctccatcccagcgctccagagctcatgatacctccactgagctgcagccaatgcccacctctccggctcaggatgcatcgctgttctccagccccatggccccgcgctccgtcttgcagagtgagattgatgccagttctcctctgatgtacgggacgcccagctccagggtggaaggaacgccccgcagcggcatccgcgggacaccggcgcgccagcgggctgacctgggatctgtgcggaaagccccgcaggtcgacatgcactctgagccggcctctggagacgcagcagtggccggagatcagggtgcaggacagaggctcgtgatctgggggactgatgtcaatgtgggaacctgcaaggagaagtttcagcgtttccttcagcagttcacagaccccgactcgagagaagaggagaacgctggtctggatctcaatgaaccgctttatatgcagaaactggatgagatcagtgttgttggagagccggtgttgaatgtgaactgcactcatattcagacatttgatgctgatctgtaccgccagctcatctgttatccacaggaagtcatccccactttcgacatgtctgtcaatgagctcttcttcgatcgttttccagactctgtgttggagcatcagattcaagtgcgaccctacagcgctattaaaaccagaaacatgcgcaacctcaatcctgaagacattgaccagctcatcactatcagcgggatggtgatccgtacatctcagctgatcccggagatgcaggaggcttttttccgctgtcaggtttgtgcgtttaacacgcgtgtggaggtggatcgcggacgcatcgctgaacccgccgtctgccgaaactgcaacaccacacacagcatggcactggtgcacaaccgctccgtcttctccgacaaacaaatgataaagctgcaggagtctccggaggacatgcctgcgggtcaaactcctcacaccacagtcgtctacgctcacaacgacctggtggacaaagtgcagcccggagaccgagtcaacatcaccggcatctacagagctgccccgatgcgtctgaacccacggcagagccaggtgaagtctgtttacaagacccacattgacgccattcacttccgcaagactgacgagaagcgtctgcatggactggacgaggacggagagcagaaactcttcactaaagaacgagtcgctctgctaaaagagctagccgctaaacctgacgtctatgagcgcctgtcctctgctctggctcccagcatctacgaacacgaggacatcaagaagggcatcctgttgcagttatttggcgggacgcgtaaggacttcactcagacgggccgaggaaacttccgtgctgaagtcaacatcctgctgtgtggtgatccgggcaccagtaaatcccagctgctgcagtacgtgtacaacctggttcctcgcggtcagtacacgtccgggaaaggatccagcgccgttggtctcacagcctacgtgatgaaggatcctgaaacccgacagctggtcctgcagaccggagcgctcgtgctcagcgataatggcatctgctgcatcgacgagttcgacaagatgagcgacaacaccagatctgtgctgcacgaggtcatggagcagcagacgctctctattgctaaggctgggattatttgtcagcttaatgctcggacctccatcctcgcagcagccaatccggtggagtctcagtggaaccccaaaaagacaacgatagagaacattcagctgcctcacacactgctgtccaggtttgatttgatcttcctaatgctggaccctcaggacgaggcgtatgacaggcgtctggcgcaccaccttgtctctctgtattatcagagtgaagagcagattgaagaggagcatctggacatggctgtactgaaagactacatcgccttcgctcgcacaactgtacatcccagactgagtgaagaagccagtcaggcccttattgaggcctatgtggacatgcgcaagatcggcagcggtcgagggatggtgtctgcgtatccccgtcagctggagtcactcatcaggctagctgaagctcatgctaaagtacgcttctctggaaaagtggagaccatcgattggaggaagccaagagactccatcgagaagccctga

SEQ ID NO: 5498 - protein, 750 aa, Danio rerio
MSSPSSQSRKRDPPTPASEDPLSPPSQRSRAHDTSTELQPMPTSPAQDASLFSSPMAPRSVLQSEIDASSPLMYGTPSSRVEGTPRSGIRGTPARQRADLGSVRKAPQVDMHSEPASGDAAVAGDQGAGQRLVIWGTDVNVGTCKEKFQRFLQQFTDPDSREEENAGLDLNEPLYMQKLDEISVVGEPVLNVNCTHIQTFDADLYRQLICYPQEVIPTFDMSVNELFFDRFPDSVLEHQIQVRPYSAIKTRNMRNLNPEDIDQLITISGMVIRTSQLIPEMQEAFFRCQVCAFNTRVEVDRGRIAEPAVCRNCNTTHSMALVHNRSVFSDKQMIKLQESPEDMPAGQTPHTTVVYAHNDLVDKVQPGDRVNITGIYRAAPMRLNPRQSQVKSVYKTHIDAIHFRKTDEKRLHGLDEDGEQKLFTKERVALLKELAAKPDVYERLSSALAPSIYEHEDIKKGILLQLFGGTRKDFTQTGRGNFRAEVNILLCGDPGTSKSQLLQYVYNLVPRGQYTSGKGSSAVGLTAYVMKDPETRQLVLQTGALVLSDNGICCIDEFDKMSDNTRSVLHEVMEQQTLSIAKAGIICQLNARTSILAAANPVESQWNPKKTTIENIQLPHTLLSRFDLIFLMLDPQDEAYDRRLAHHLVSLYYQSEEQIEEEHLDMAVLKDYIAFARTTVHPRLSEEASQALIEAYVDMRKIGSGRGMVSAYPRQLESLIRLAEAHAKVRFSGKVETIDWRKPRDSIEKP

SEQ ID NO: 5499 - DNA, 2667 bp, Eremothecium gossypii
  CDS (1)..(2667)
atgacttcttcgccttctcgtccacaggaggctagctctcctgcgctattttataacccgtcttcgtcttctcagccggacacctatgagcgaggtcagcagaacgccggcaacatgatcggatcctctcctttccactatccatcctcttcacagtcgcagcagaatacgcggtcaaatcggggcggggccttttcttctcagggcgttcccaggtctgagcgttcttacgcgggctcatcactgccaggcacggcgaggactcggctgcagcactacgggcgcagtgatattcatgcgtcagacctttcttcgccaagacgcatggtcaactttaattctccatcgacgttatcctcgtctgatccgccatccgagaatgacgagcccatgagaattatctggggtacgaatgtgtcaatacaggaggtggcatgcaccttcaagaactttctgatgaccttcaagtacaagtatcggaagatcaaagacgagcaagagctgttcataaacgagacaacagatgaggaattgtactatgtcaaccagctgcaccagatgaggcaactcggaacctgcaatctaaaccttgacgttagaaacttgatttcatttccgggcacggagaagctctatcatcagctgctaaactatccacaagaagtgatctccattatggaccaagctgtgaaggactgcatggtccagctcgcagttgatatcgacggcgcagagggtaatgaaaacctaattgaggttgagtcgaaaatatacaagatcaggccgtacaatttggattcagagaggggcatgagagagctcaacccgaacgacatcgataaactagtaagcataaagggtcttgttcttcgttccactcctgtcattccagatatgaaattggcatttttcaaatgtagcgtatgtgaccataccacggcggtagaaattgatcgtggtattatccaggagccgttgcggtgcccgcgtgttgcatgtaatcagagaaactccatgtcgttaatccacaatagatgctcctttgcagataagcaagttataaagttacaagaaaccccggatcttgtcccagatggccagactccccactccgtgtcattgtgtatatatgatgagttggttgacagctgcagggcgggtgacaggattgaagtgacagggatcttcaggtctatccccataagagcaaatcagcggcagcgtgcccttaaatccctgtacaagacctacttggatgttgttcacgttcgaaaagtcagcgcacggcgcctcgatattgatacctccactgttgaacagcaaatcctccaaaaccagatggacaatgtggaggaactacggaaagtaactgatgaagatatcgccaagatcaatgctgttgcagcacgcccggatgtttacgaagtcttggccagatccattgcgccaagtatctacgaacttgatgacataaagaaaggaattctcctgcagctattcggcgggacaaataaaacatttacaaagggtggcaggtataggggtgatataaatatacttttgtgcggtgatccatctacttcgaagtcccaaatcctgcagtacgtccacaagattgctcctcgtggtgtttacacatctggtaaaggttcctctgccgttggtctaacagcctatattacaagagatgccgacaccaagcaatcggtgctggagagtggcgcactagtcctatctgacggcggcgtgtgctgcatcgatgaattcgacaagatgagcgactcgacccgttctgttttgcacgaagtgatgaagcagcaaccaatatccgtggccaaggcgggtatcatcaccactctaaatgccagaacgtccatattggcaagtgcgaaccccataggttcacgatacaacaccaatctccccgtgactgagaacattgacctgccccctccattgctgtctagattcgacttggtatacctggtgttggacaaggtctccgagtccaccgatcgagaattagccaagcacctgaccagcctctacctagaggacaagcccgcccatgtgtccgagtcggacatccttccggtgcactttctcacaatgtatatcaactatgccaagcagcatattcacccggtgatcacagaaggggccaagaccgagctggtgcgcgcctatgtgaacatgcgcagcatgggcgacgactcgcgcgcagatgagaagagaatcaccgccactactcggcagctggaaagcatgatcagactgtccgaagcgcacgctaaggtgcgcctttcgcagcaggttgaggtcagcgacgtccaggaagcagtgagactgatcaagtctgccatcaaggactacgcaatagaccccaagacaggcaagatcgacatgaaccttatccaaaccggcaagtccgtgatccagcgcaagctccaggaggaccttgcccgtgaaattgtccgcctgctaaccgaacgctctgccgatgtcatcacctacaatgagctagccagattgctgaacgagaactctcaggaccgcctggacaacatgacgatttcagacgctctgaatcgcctgcagcaggaagacaagatagtggtcctcggcgacggcgtccggagatcgatacgcctgaacggccgtgtctag

SEQ ID NO: 5500 - protein, 888 aa, Eremothecium gossypii
MTSSPSRPQEASSPALFYNPSSSSQPDTYERGQQNAGNMIGSSPFHYPSSSQSQQNTRSNRGGAFSSQGVPRSERSYAGSSLPGTARTRLQHYGRSDIHASDLSSPRRMVNFNSPSTLSSSDPPSENDEPMRIIWGTNVSIQEVACTFKNFLMTFKYKYRKIKDEQELFINETTDEELYYVNQLHQMRQLGTCNLNLDVRNLISFPGTEKLYHQLLNYPQEVISIMDQAVKDCMVQLAVDIDGAEGNENLIEVESKIYKIRPYNLDSERGMRELNPNDIDKLVSIKGLVLRSTPVIPDMKLAFFKCSVCDHTTAVEIDRGIIQEPLRCPRVACNQRNSMSLIHNRCSFADKQVIKLQETPDLVPDGQTPHSVSLCIYDELVDSCRAGDRIEVTGIFRSIPIRANQRQRALKSLYKTYLDVVHVRKVSARRLDIDTSTVEQQILQNQMDNVEELRKVTDEDIAKINAVAARPDVYEVLARSIAPSIYELDDIKKGILLQLFGGTNKTFTKGGRYRGDINILLCGDPSTSKSQILQYVHKIAPRGVYTSGKGSSAVGLTAYITRDADTKQSVLESGALVLSDGGVCCIDEFDKMSDSTRSVLHEVMKQQPISVAKAGIITTLNARTSILASANPIGSRYNTNLPVTENIDLPPPLLSRFDLVYLVLDKVSESTDRELAKHLTSLYLEDKPAHVSESDILPVHFLTMYINYAKQHIHPVITEGAKTELVRAYVNMRSMGDDSRADEKRITATTRQLESMIRLSEAHAKVRLSQQVEVSDVQEAVRLIKSAIKDYAIDPKTGKIDMNLIQTGKSVIQRKLQEDLAREIVRLLTERSADVITYNELARLLNENSQDRLDNMTISDALNRLQQEDKIVVLGDGVRRSIRLNGRV

SEQ ID NO: 5501 - DNA, 2442 bp, Eremothecium gossypii
  CDS (1)..(2442)
atgaacgcagcattgccgagcatacagcttggtatagactatggcagaatcaaggaggaaatagaggattttttggtgcactttaagggctcgtctagcacggaggatgctggggagattgagatggaggaggatatggtcggcgcgggtccgaagtacctagatttgctgcagcaagtcgcgaatcgggagctgacgacgctgtatgtagagctggatgacgtcgcagcataccagacgatgcggggcgaggctgtagaccgtatgccggggccgcagctctgcgagctgatattggaaaacgcgcttcgatacaccgagctgttttccgaggtcgtggacaagctgttgccgccgccgaccaaggagtttgaccaccatgacgacgtgcttgatgttattgtgcaccagcgccaactgcggaaccagcgacagatcacggaacgtcgagaggagctggaacagatggatgaggatgccggcgaggaacagctaaacgaacttgcgcggcagcaggacgagggccaggaggatttgttccctccgatgcttatgcggcgctacaacctgtatttcacgcccctgaccaaattccagggcgtcggaaagcatgtgaggtcgcactatggtccattcagcgcacgagaggtcaagggctctcatctggggaaactcatcacggtgagcggaattgtgactaggatatctgacgttaagccggctgtgctcgttactgcatacacctgtgaccaatgtggcgcggaggtcttccaagaggtgaataagcggaccttcacgccctttttagagtgtacctcacgacagtgccagcagaatcagaataaaggccagctgttcatgtcgactcgtgcgtcgaagttcagcgctttccaggagtgcaagatccaggagatgtcacatcaagttcccattggccatattccacggaccctcaccattcatgtcaatgggccgcttgttaggtccatggtgcccggtgacattgtagatgtcaccgggatatacttacccgctccttatacgggatttaaggcactgaaagctggtctacttactgagacgtatttggaggcgcagtatgtgcggcagcacaagaagaagttctcatccttcgaaatcacatccgatgttgaaaagcgtgtgatgagcattgtacagcaaggcgatgtctacacgaggttggcaaagtctatcgcaccagaaatctatggtaacctcgacgtcaagaaggcgttattactgttgatggtaggcggtgtccataaaacagtgggagatggtatgaaaattcgtggtgatatcaacatatgtttgatgggtgatcctggtgtggccaagtctcaacttttgaaaagtatctgtaagatcactcctcgtggcgtgtacacaactggtaaaggttcttctggcgttggcttgacggccgcggttatgaaagaccctgttaccgatgagatggttctcgaaggcggagctttggtccttgcagataacggaatatgttgcattgatgaatttgacaaaatggatgaaagtgacaggaccgctatacacgaagttatggagcagcagacaatttcgatttccaaggctggtattaacactactttgaacgcaagaacttcgatcctcgcggcggctaaccccgtgtatggtagatacaaccctagattgtccccattggagaatatcaatctacctgcagcgcttttgtcgagattcgatatcatgttcctcctgctggatatgccccaccgtgaaaatgacgagaaattggcggagcatgtggcatacgttcatatgcacaacaggcaaccggaattagatttcgaaccaatcgaacctgcggcaatgcgggagttcatagcgttcgccaagacaaagaggccaattatgacgcaggaggtaaacgagctcgtggtgcaatcctacattcgtatgagacaggattctaaaaatgtgactgaccccaagcagcaattcggacaagcaactccgagaacgctgctagctgtcattagaatctcgcaggccttggcaaaactgcggttcagcgaccaggtcgatgttgaggacgtggaagaagccttacggcttatccaggtgtccaaggactctctctacaacgatacacaaaccagagcggatgatgaaacgccgacgaccaagatatttaccatcattaaaaaaatggcgatggagactgctcgcttgaacaagaatttaccaatggacacaataaccaagatcgttcgctccaggggtttcacgcagcagcagttggacgcctgtgtggaagaatatacctatctgaatgtctggcacaagctagaggaagaaaacgcgctgaagtttgttggtggcagcgagtatgatgtggagatgactccgagtcaagacactgaaatggtagatgcttaa

SEQ ID NO: 5502 - protein, 813 aa, Eremothecium gossypii
MNAALPSIQLGIDYGRIKEEIEDFLVHFKGSSSTEDAGEIEMEEDMVGAGPKYLDLLQQVANRELTTLYVELDDVAAYQTMRGEAVDRMPGPQLCELILENALRYTELFSEVVDKLLPPPTKEFDHHDDVLDVIVHQRQLRNQRQITERREELEQMDEDAGEEQLNELARQQDEGQEDLFPPMLMRRYNLYFTPLTKFQGVGKHVRSHYGPFSAREVKGSHLGKLITVSGIVTRISDVKPAVLVTAYTCDQCGAEVFQEVNKRTFTPFLECTSRQCQQNQNKGQLFMSTRASKFSAFQECKIQEMSHQVPIGHIPRTLTIHVNGPLVRSMVPGDIVDVTGIYLPAPYTGFKALKAGLLTETYLEAQYVRQHKKKFSSFEITSDVEKRVMSIVQQGDVYTRLAKSIAPEIYGNLDVKKALLLLMVGGVHKTVGDGMKIRGDINICLMGDPGVAKSQLLKSICKITPRGVYTTGKGSSGVGLTAAVMKDPVTDEMVLEGGALVLADNGICCIDEFDKMDESDRTAIHEVMEQQTISISKAGINTTLNARTSILAAANPVYGRYNPRLSPLENINLPAALLSRFDIMFLLLDMPHRENDEKLAEHVAYVHMHNRQPELDFEPIEPAAMREFIAFAKTKRPIMTQEVNELVVQSYIRMRQDSKNVTDPKQQFGQATPRTLLAVIRISQALAKLRFSDQVDVEDVEEALRLIQVSKDSLYNDTQTRADDETPTTKIFTIIKKMAMETARLNKNLPMDTITKIVRSRGFTQQQLDACVEEYTYLNVWHKLEEENALKFVGGSEYDVEMTPSQDTEMVDA

SEQ ID NO: 5503 - DNA, 2658 bp, Eremothecium gossypii
  CDS (1)..(2658)
atggcttcgcataacggaatggagggttcacacgggcgcagaagggctagagatgaaaacgatacagagcagcggagtagtgacagcaggtcacagagctacgagcacccaccatcgtcgccacaagttgggagcgggcgcggctcgcgtatggggaataattcgccgctggggtcgccggacgagatcgacttcgagaaccccgataacgacggcgacgagcgcatcgagtttgcagacgacctggatgacgcagaagagcgcatagacgaggtcgacctggtgggcgacgacatgtacgcggactataccgccaatcgcaacaaggacttctatgaaaatgagggcgtggacgacgcggagcacgaggagctgtcgttggcggaccggcgacggatcgacgcgcagctcaatgcgcgggacaggatgctccacgatagccaggtgtttctggacgacgagatggacgcggatgacaagatgcaggtggacgcgatgggtatgccggtgcagcgccggcgcagaaggaaccaatacgacgaggcggactatgacgatcttctctctgatatggatgtagacccgctgatggaggagctcactctcgagtctctgagcgatgtgaagtcatccagctattcggagtggatcacgcaaccgaacgtggcgcggacgatcgcacgggagctgaaatcatttctccttgagtataccgacgaatacggcaagtctgtgtacggtgcgcgcattagaacgcttggtgagctgaattccgagtcgctggaggtcaactaccgtcacttagctgagtcgaaggctattttggcgctttttttagcgaggtgcccggaagagatgttaaagatattcgatacagttgccatggaagcaacgcagctgcattacccagaatatacgcgcatacactcagagatccatgtgcgcatatctgactttcccaccatacacaatctgcgagagctgcgtgaggcaaatctaaactcgttggtgcgtgtcaccggtgtcgttaccaggagaacaggtgtgtttccgcaactcaagtatgtgaaattcaactgtttaaagtgtggctccattctcggcccctactaccaggactctaacgaagagattaagatatccttctgtaccaattgtcgttcgaaaggcccattcagaactaatatggaaaagacgttgtatcgcaactaccagcggctcacactacaagagtctcccgggactgtccctgctggcaggcttccgcgccatagggaagttattcttctttgggacttggttgatgttgccaaaccgggcgaggaagtggaggttactggaatttacaagaacacttatgacggcaatctgaacgccaggaatggcttccccgtctttgcaactgtcctggaggctaactctatcaaacgtagggaaggtggacttcactcaggcgacgatgctggagatgaaggtttagatgtttttggctggactgaggaagaggagcgcgagttccgtaagatgtcacgggaccgtggtattattgacaaaatcatttcatctatcgcaccatctatatatggccatcgtgacattaaaactgcggttgcttgctcactctttggcggtgtaccgaagaacgtaaatgggaagcattcgatacgtggtgatatcaacgtcttactcttaggtgacccaggtactgccaaatctcaaatcttaaaatatgtggaaaagacggcacatagggctgtctttgctactggccaaggtgcatctgcagtaggtttaactgcctcggttaggaaggatcctatcaccaaggaatggactcttgaaggtggtgcgttggttttggccgataaaggggtgtgtttaattgacgagtttgacaagatgaatgaccaggatcggacgtccattcatgaagcaatggagcaacagagtatatccatctctaaggctggtattgtaaccactttgcaagctaggtgttcgattattgcggctgctaacccaaacgggggtcgttacaactcaacattaccattgagccaaaacgttgatttaaccgagccgatattgtcgagattcgatatcctgtgcgttgtgcgagatcttgtcgacgaagaaagtgatgaaaggctagcaacgtttgttgtcgactcccatatcagatcgcaccctgaatctgacatccaccaggaaccagctgatgaggacatggaggaggccgatgctggaacagctgccctgtccaacagacaaaagaaactcaagcgtcatagagacaaagagggggaaatatctcctattcctcaagaagtattgatgaaatacatacactacgcgcgaaccaaggttaatcctaaattacaccaaatggacatggggaaagttagtaaagtgtatgcggatctcagaagagaaagtattacaacgggttccttccctattacagttagacacttggaatctatccttagaattgctgaatcgtttgcaaagatgagactctctgagtttgtttcttcttgggatcttgatcgggcgatcaaagtaactgtggatagtttcgttggcgcacagaagatcagtgtccggcgacaactacaaagatcgttcgcaatttatacaatgtcgcgcggcgattaa

SEQ ID NO: 5504 - protein, 885 aa, Eremothecium gossypii
MASHNGMEGSHGRRRARDENDTEQRSSDSRSQSYEHPPSSPQVGSGRGSRMGNNSPLGSPDEIDFENPDNDGDERIEFADDLDDAEERIDEVDLVGDDMYADYTANRNKDFYENEGVDDAEHEELSLADRRRIDAQLNARDRMLHDSQVFLDDEMDADDKMQVDAMGMPVQRRRRRNQYDEADYDDLLSDMDVDPLMEELTLESLSDVKSSSYSEWITQPNVARTIARELKSFLLEYTDEYGKSVYGARIRTLGELNSESLEVNYRHLAESKAILALFLARCPEEMLKIFDTVAMEATQLHYPEYTRIHSEIHVRISDFPTIHNLRELREANLNSLVRVTGVVTRRTGVFPQLKYVKFNCLKCGSILGPYYQDSNEEIKISFCTNCRSKGPFRTNMEKTLYRNYQRLTLQESPGTVPAGRLPRHREVILLWDLVDVAKPGEEVEVTGIYKNTYDGNLNARNGFPVFATVLEANSIKRREGGLHSGDDAGDEGLDVFGWTEEEEREFRKMSRDRGIIDKIISSIAPSIYGHRDIKTAVACSLFGGVPKNVNGKHSIRGDINVLLLGDPGTAKSQILKYVEKTAHRAVFATGQGASAVGLTASVRKDPITKEWTLEGGALVLADKGVCLIDEFDKMNDQDRTSIHEAMEQQSISISKAGIVTTLQARCSIIAAANPNGGRYNSTLPLSQNVDLTEPILSRFDILCVVRDLVDEESDERLATFVVDSHIRSHPESDIHQEPADEDMEEADAGTAALSNRQKKLKRHRDKEGEISPIPQEVLMKYIHYARTKVNPKLHQMDMGKVSKVYADLRRESITTGSFPITVRHLESILRIAESFAKMRLSEFVSSWDLDRAIKVTVDSFVGAQKISVRRQLQRSFAIYTMSRGD

SEQ ID NO: 5505 - DNA, 2832 bp, Eremothecium gossypii
  CDS (1)..(2832)
atggagctcccgctgaatgaggcgcacgatgcgctattcagcgaccgggtgcggcgcttccaggagtttctggactcgcacgacgcctatgcagacgagatccgggcgatcctggtgcacaacggcctgaatgccgagcgcggggacggcgcgtgggacaagaagagcgggccggcgggcgcgagcctgccgcggcgcctgactgtatcgcttgacgacatccgcgagttcgatagggcctattggaccggcctgctggtgcagcctgcgtacttcttgcctgcggccgagcgcgcggtgacggacctggcagcggtactggaagacacgcgcgttgcgcgggctgcaggcccatcaagcgaatggcggctctcgttccgcggtgcgttcggcgcccatgcgctgtcgccgcggacgctgatggcgacgcacctgaaccaactggtatcgatagagggcatcgtaacgcgcacgtcgatagtgcgtccgaagttgttgcgctcggtgcatctgtcgaaaaacacgggtgcgcactactaccgtgattaccgtgatgcgaccacgacgctggtcactgaggttccgacgccggccatctacccagaggcagaccccgagggcaatccgctgaacactgaatatggctactccacgtacatggaccaccaacgggtgacggtgcaggagatgcccgagaaggccccgccgggacagcttccgcggtcggtcgatgtcattttggatgacgatctggtggataagacgaagccaggcgatagggttaacatcgtgggggtcttcaagtccatcggtgcgggtggcatgtcaggaggctcatcttcagaccacggtaacaatgggctggcaggattcaagacgctgatcattggcaacaccgtttatcctttgcacgcgcgctccaccggagtggcagcaagcgagcgtctttcagacaccgacatcagaaacatcaacaagctggcaaaatcggcagatgtatttgacctgcttgcgcaatcgctggcgccctctatctacgggcacgaacatatcaagaaggcggtgctactaatgttgatggggggtgttgagaagaatttggagaacggctctcacctgaggggtgacataaacattttgatggttggtgacccttctactgcaaagtcacagatgctgcgctttgtgctcaataccgccgcacttgcgattgcgactactgggcgaggctcttctggtgtcggtttgactgccgctgttaccatggacagggaaacaggcgaaagacgtctggaagcgggtgcaatggtgctcgcagaccgcggcatagtgtgtattgacgaattcgacaagatgtccgatgtggaccgggttgctatccacgaagtgatggaacagcaaacagtgacgattgccaaggcgggtatccacacgacactgaacgcacgttgttcagtgatagcagcagccaatcctgtatttggtcagtacgatgttaacaaagatccacacaagaatattgctctacctgattcgttgctttctcgtttcgatctactgttcgtggtgaccgatgatattaatgatgttcgtgatcgtgcaattagtgaacatgtgctacggacccaccggtatcttcctccagggtacatggagggagaacctattagggaagcgattaatctgtctctctcagttggtactgatggtgtttctattgaccctgacgctgatgatgacaccaccgataaggtgtttgagaaatacgatccactgttgcatgcaggtgctaaactagctaaaaaccgtggtgaccaccgtggcgccgaactgccaaaggttgtatcgattcccttcattcgtaagtacgttcagtacgcgaaggagcgaatcgtcccagtgttgacgcaggacgcagtcaacataatcgtgaaaacctactgtgacctgagaaatgaccagaataccaagaagtcgccgattactgctagaacgctggaaaccttaattcgtctgtccaacgcacacgctaaggtgcgcctttctaagctcgtagaggcccgcgacgctaatgtggcggcgcagctgctacgttttgccctgcttggagaagatctatcaagcacggcttccgatagcgcactacagcattctcctaggaagagacaacggacacgcatgtacactgaagaggaaccagcccctgcacttcagcaaagccattccggagcagacgccgacgcaactagtagctccatcgttgctacccctattcgcgcacggaatttgccgcgagatattgatccagatgcatccgatgcagaagacgacggtgacgccgtgtacttaccagattccattacctcgctcacacctatgacccgactcccgcatgatgaggaactagatcttcaacgtcgtatggagcggggcctgcgcgtgtcgccgcggcttgcctcccggcgtatcctttccgactcggaaaacctgcctgctcatcctccaacttctgccgcttccatgcgccagcatctgcaacaggctgcccactcgccatctcgtgcgccagatgaatcagctactgttgaacacatagaacccggttctatatctccaggaaggctttctattatatccggtattattgcccgtttgatgcagacagatctgtttgaggatgagcattaccctataatcgcgctcctggagaaggtcaacgaggagctgccggaggaggataaattctcgatggaagaataccttgcaggtctgaacataatgagtgacaggaacaacttgatgatagcagaagataaggtatggcgagtttag

SEQ ID NO: 5506 - protein, 943 aa, Eremothecium gossypii
MELPLNEAHDALFSDRVRRFQEFLDSHDAYADEIRAILVHNGLNAERGDGAWDKKSGPAGASLPRRLTVSLDDIREFDRAYWTGLLVQPAYFLPAAERAVTDLAAVLEDTRVARAAGPSSEWRLSFRGAFGAHALSPRTLMATHLNQLVSIEGIVTRTSIVRPKLLRSVHLSKNTGAHYYRDYRDATTTLVTEVPTPAIYPEADPEGNPLNTEYGYSTYMDHQRVTVQEMPEKAPPGQLPRSVDVILDDDLVDKTKPGDRVNIVGVFKSIGAGGMSGGSSSDHGNNGLAGFKTLIIGNTVYPLHARSTGVAASERLSDTDIRNINKLAKSADVFDLLAQSLAPSIYGHEHIKKAVLLMLMGGVEKNLENGSHLRGDINILMVGDPSTAKSQMLRFVLNTAALAIATTGRGSSGVGLTAAVTMDRETGERRLEAGAMVLADRGIVCIDEFDKMSDVDRVAIHEVMEQQTVTIAKAGIHTTLNARCSVIAAANPVFGQYDVNKDPHKNIALPDSLLSRFDLLFVVTDDINDVRDRAISEHVLRTHRYLPPGYMEGEPIREAINLSLSVGTDGVSIDPDADDDTTDKVFEKYDPLLHAGAKLAKNRGDHRGAELPKVVSIPFIRKYVQYAKERIVPVLTQDAVNIIVKTYCDLRNDQNTKKSPITARTLETLIRLSNAHAKVRLSKLVEARDANVAAQLLRFALLGEDLSSTASDSALQHSPRKRQRTRMYTEEEPAPALQQSHSGADADATSSSIVATPIRARNLPRDIDPDASDAEDDGDAVYLPDSITSLTPMTRLPHDEELDLQRRMERGLRVSPRLASRRILSDSENLPAHPPTSAASMRQHLQQAAHSPSRAPDESATVEHIEPGSISPGRLSIISGIIARLMQTDLFEDEHYPIIALLEKVNEELPEEDKFSMEEYLAGLNIMSDRNNLMIAEDKVWRV

SEQ ID NO: 5507 - DNA, 2205 bp, Eremothecium gossypii
  CDS (1)..(2205)
atgtcgttcgataccacacgcgtgtacactaccagcgtgctgcccggagaggaggcgggcgcgcacgagcgctcggaggtggtgcgctcgttccgcgactttgtgctggagtttcggttggacgcgcggttcgtatatcgcgagcagctgcgcaacaacctgctggtgcggcggtacgcgctgcgcgtcaacacggagcatctgattgggtacaacgaggcgctgtacaaactggtgcgcgacgagcctgtggagacggtgcccctctttgagcaggcggtgacggaaatagcgcggcggatggcgcggctccgggcggaggacgcgggcgcgctgccggcggtgcaggtggagctgcagagcgcggcggctgagacggcgctgcggcagctggactcacagagcgtttcgcggctggtgcggctgagcgggatcgtggtgtcaacgtcggtgctgacgtcacgtgcgactcacgttgcgctgatgtgccgcaactgccggcacacgacggcgctggacctcaacaacttccagtcgcttgcggggagcaacgtggcgctaccgcgggcgtgcctggcagaccactcgaatgacgatggcagcgcggcggggaacccttgcggccaggacccgtacatgatcgttcacgagagctcgcgcttcgtagaccagcagttcctgaagctccaggaggtgccggagtccgtaccgatcggcgagatgccgcgcaacctgctgctgacgtgcgaccggtacctcacgaaccgggtggtgccgggcacgcgggtgacggtggtggggatctacgcgatataccagtccaagggcgggcagggcggggcgcgggctgtggcgatccggaacccgtacgtgaaggtgctggggatcgaggcgcaggcgggcagccctgcgggcgtgctgtcgatgttcagcgaggaggaggaggaggagttcctgcggctggcgcggacgccgaacctgtaccagctgtttgcagagtcgattgcgcccagtatctatggaaacgaggatatcaagaaggcgatagtgtgcctgctgatgggtggctcgaagaagctgctgccggacggcatgcgcctgcggggggacatcaacgtgctactgttgggagacccggggacggcgaagtcgcagctgctgaagttcgtggagaaggtgtctccgatcgcggtgtatacgtcgggcaagggttcttcggcggcgggtctgacagcgtcagtgcagcgcgacccgaacacgcgtgagttctacctcgagggcggtgcgatggtgctggccgacggcggcgtggtgtgcatcgacgagttcgacaagatgcgcgatgaagaccgcgtggcgatccacgaggcaatggaacagcagaccatctcgatcgcgaaggcgggcatcaccacggtgctgaactcgcggactagtgttctggcggccgccaaccccatatacgggcgctacgatgagctcaagtccccgggcgagaacatcgatttccagacgaccattctgtcgcggttcgatatgatcttcatagtcaaggacgagcacaacgagcagcgggatatgtccatagcgcagcacgtcatgaacatccacaccgggcgcactgccgtgccggacgcaggcgctgccggcgcagaccgcgaaatacccattgacaaaatgcgccgctacatcacatactgtcgctcgaagtgcgcccccaggctctcaactcatgcggctgagaagctgtcctcgcacttcgtgaccattcgcaaacagctgctgatcaatgagctggagtcgaaggagaaatcctccattccgatcactgtgagacagctggaggccatcatacgtatttcggagtcgctggcgaaattggagctcagctccgtcgccgaggagcgccacgtcgacgaagccattcgcttgttccaggcttccacaatggatgcggcgtctcaggatcctatcgggggcatgcaaaattcaaacgtagtgtccgaggtacgcaacctcgaagcggaactaaaacggcgtttgccaataggctggtcgaccagctaccagaccctcaaacgggagtttgtccagtctggtcgttactctctacaggcactcgacagagctctatatgtcctcgagaggcatgagacaatacaactgcgctatcagggccagaatatttatcgcagcggcgtgtaa

SEQ ID NO: 5508 - protein, 734 aa, Eremothecium gossypii
MSFDTTRVYTTSVLPGEEAGAHERSEVVRSFRDFVLEFRLDARFVYREQLRNNLLVRRYALRVNTEHLIGYNEALYKLVRDEPVETVPLFEQAVTEIARRMARLRAEDAGALPAVQVELQSAAAETALRQLDSQSVSRLVRLSGIVVSTSVLTSRATHVALMCRNCRHTTALDLNNFQSLAGSNVALPRACLADHSNDDGSAAGNPCGQDPYMIVHESSRFVDQQFLKLQEVPESVPIGEMPRNLLLTCDRYLTNRVVPGTRVTVVGIYAIYQSKGGQGGARAVAIRNPYVKVLGIEAQAGSPAGVLSMFSEEEEEEFLRLARTPNLYQLFAESIAPSIYGNEDIKKAIVCLLMGGSKKLLPDGMRLRGDINVLLLGDPGTAKSQLLKFVEKVSPIAVYTSGKGSSAAGLTASVQRDPNTREFYLEGGAMVLADGGVVCIDEFDKMRDEDRVAIHEAMEQQTISIAKAGITTVLNSRTSVLAAANPIYGRYDELKSPGENIDFQTTILSRFDMIFIVKDEHNEQRDMSIAQHVMNIHTGRTAVPDAGAAGADREIPIDKMRRYITYCRSKCAPRLSTHAAEKLSSHFVTIRKQLLINELESKEKSSIPITVRQLEAIIRISESLAKLELSSVAEERHVDEAIRLFQASTMDAASQDPIGGMQNSNVVSEVRNLEAELKRRLPIGWSTSYQTLKREFVQSGRYSLQALDRALYVLERHETIQLRYQGQNIYRSGV

SEQ ID NO: 5509 - DNA, 2472 bp, Xenopus tropicalis
  CDS (1)..(2472)
atggacctggtagatccttcccagagcgccgccgcggcagccggaacccaaacggttaaggatgaggtgtctgagaagtgccagaagctgttccaggacttcctggaggaattccggggtagcgacggggagctgaagtaccagagtgacgcagaggaactcatcaggccggagaggaacacgctgctcgtcagcttcatcgacttggagcagtttaaccagcagctcgctacaaccatccaggaggagttctacagggtgtatccgtacctctgtcgagcagtgaaagcctttgcccgcgatcatggaaacgttccacagaacaaggaattctacgttgccttccaggatctgcccactcgacataaaatccgagagctgacgacccctcgcatcggatctctgctgcggatcagcggtcaagtggttcggactcacccagtccacccggaactggtcagtgggaccttcctttgcttggactgccagaccttggtgagggatgtggagcagcagtttaagtacacacagccgagcatctgcaggaacccggtgtgcgccaacaggaggaggttcatgttggatacaaacaaatccagatttgttgatttccagaaggttcgtattcaggaaacgcaggcagagctcccgcgaggcagcatcccgcggagtgtcgaagtgatcctacgagcagaagctgttgagtcgtgtcaggccggtgataggtgcgactttaccggatctctgattgttgtgccggatatttcccagctggcaactccaggtgtccgtgcagagaccagcgccagggtgggcggaacagaagggtaccaggctgaaggtgtccaaggtctccgagcccttggtgttcgagatctctcctataaattggttttccttgcgtgctacgtctgcccaaccaacccaaggtttggtgggaaggatctacatgaggaggacatgactgcagagagcatcaaaaaccagatgtctgtgaaggaatgggagaaggtgtttgagatgagtcaagacaaaaacctgtaccataacctctgtaccagcctcttcccaactgtacacggtaacgatgaagtaaagaggggtatcttactgatgctgtttgggggtgtccctaagacaacaatggagggcacatctttacgtggagacattaatgtttgtattgttggagatccgagtacagccaagagccagttcctcaagcacgttgaggagttcagtccccgtgcagtttacactagtgggaaagcctccagtgccgccggtctgacagcagccgtcgtgaaagatgaagaatcacatgagtttgtgattgaggctggagccctgatgctcgctgacaatggagtttgctgcatcgatgagtttgacaagatggacacaaaggaccaagtggctatccatgaggcaatggaacagcaaaccatttcaattaccaaagctggtgttaaggctacgctcaatgctcgcacttccatcctcgctgcagcaaaccctgtagggggccgctatgatagggccaagtcacttaagcagaatatcaacttgtctgctcccatcatgtccagatttgatctcttcttcattcttgtggatgagtgtaatgaggtgacagattacgccattgcccgacgtatagtcgacctccattctcggattgaggaatctatcgacagagtgtacacactggatgaagtcaggagataccttctctttgccaggcagttcaaacccaagatctctaaggagtcagaggacttcatagtggagcagtacaaacggctgaggcagcgagacggcacgggggtcaccaaatctgcttggaggatcaccgtacggcagctggaaagcatgatccgattgtcggaaggcatggcaaggatgcactgcagtgatgaggtgcagccaaaacatgtgaaggaggcattccggttattgaacaaatccatcatcagggtggagactccggacgtcaacctggatcaagaggatgaacatgaggcggaggaagaacctcaagaggttataaatggcgatgcttcggttcccagtggtgtgaatgggcacgtgaatggaatgaatgggcacgctgaggagccgaatgccgctaccccgaagccgtccttgcgtcttaattttgctgaatacaagcggatctcaaacttgctggtcctgcagctgagaaagatggaggacgaggatgagacttcccagaggaagagtgaactcatcaattggtatctaaaggagatcgagtctgaaattgactctgaagaggagctcgttactaggaagcaaatcatcgataaagttgttcacagactcgtgcactatgaccaaattttgattgagctgacacagaccggattaaaaggcacaggggacgaggaggtaccaaaagaggaggatccttacctcgtggtgaaccccaactacatactggaagattaa

SEQ ID NO: 5510 - protein, 823 aa, Xenopus tropicalis
MDLVDPSQSAAAAAGTQTVKDEVSEKCQKLFQDFLEEFRGSDGELKYQSDAEELIRPERNTLLVSFIDLEQFNQQLATTIQEEFYRVYPYLCRAVKAFARDHGNVPQNKEFYVAFQDLPTRHKIRELTTPRIGSLLRISGQVVRTHPVHPELVSGTFLCLDCQTLVRDVEQQFKYTQPSICRNPVCANRRRFMLDTNKSRFVDFQKVRIQETQAELPRGSIPRSVEVILRAEAVESCQAGDRCDFTGSLIVVPDISQLATPGVRAETSARVGGTEGYQAEGVQGLRALGVRDLSYKLVFLACYVCPTNPRFGGKDLHEEDMTAESIKNQMSVKEWEKVFEMSQDKNLYHNLCTSLFPTVHGNDEVKRGILLMLFGGVPKTTMEGTSLRGDINVCIVGDPSTAKSQFLKHVEEFSPRAVYTSGKASSAAGLTAAVVKDEESHEFVIEAGALMLADNGVCCIDEFDKMDTKDQVAIHEAMEQQTISITKAGVKATLNARTSILAAANPVGGRYDRAKSLKQNINLSAPIMSRFDLFFILVDECNEVTDYAIARRIVDLHSRIEESIDRVYTLDEVRRYLLFARQFKPKISKESEDFIVEQYKRLRQRDGTGVTKSAWRITVRQLESMIRLSEGMARMHCSDEVQPKHVKEAFRLLNKSIIRVETPDVNLDQEDEHEAEEEPQEVINGDASVPSGVNGHVNGMNGHAEEPNAATPKPSLRLNFAEYKRISNLLVLQLRKMEDEDETSQRKSELINWYLKEIESEIDSEEELVTRKQIIDKVVHRLVHYDQILIELTQTGLKGTGDEEVPKEEDPYLVVNPNYILED

SEQ ID NO: 5511 - DNA, 2424 bp, Danio rerio
  CDS (1)..(2424)
atggctgctgaagttgtggacgatcaggaaatgagggaggctcagagggattacttggattttcttgacgacgatcaagaccagggcatctaccagagcaaagtacggcagatgatcagcgaaaacaaatccaggctcattgtaaacctcaacgacctgcgacgacgaaatgaaaagcgagcagcaaagctgttgaataacgcttttgaagagctcctggcattccagcgagccctgaaagatctggtggcttcaatagatgccacttacgccaagcaatgtgaggagttcttcattggtttggagggcagctttgggagcaaacatgtctcccctcgaaccctgacctctcgcctgctgggcagcatggtgtgtttggagggcatcgtcactaaatgctctttggtgcgtcccaaagtagtacgcagtgtgcactactgtccagccactaaaaagaccatggagcgcaaatacaccgatctgacttctctggatgccttcccttcaagtgctatttaccccaccaaggatgaagagaacaatccattggagacagagtttggtctgtccgtctataaggaccaccaaaccatcactatacaggagatgccggagaaggcccctgctggtcagctgccccgctctgtggacatcatcctggacaatgacctggtggacgccgtgaagcctggagaccgaacacaggtgatcggcacctaccgctgcctgccgggcaagaagggtggcttcacctcgggcaccttcaggaccatcatgattgcctgccatgtcaaacagatgagcaaagaaatttcccactacttctctgcggatgatgtggccaaaatcaagagcttctgcaggtctcgctctaagaatgtgtttgatcagttggctcgctctctggcccccagtattcacggtcatgagtacataaagaaggccatcctgtgcatgcttctaggaggagtggagaaggtgctggagaacggttcgcgtattcgaggagacattaacgtgcttctcataggtgacccatcagtggccaagtctcagttgctccggtacgttcttcacactgctcctcgggccattcccacaacaggccgtggttcatcaggtgtgggtctgaccgcagccgtcaccactgaccaggagacaggcgagcggcgtctggaagctggggccatggttttgggggatcgaggcgttgtctgcattgacgagttcgacaaaatgtcagatatggaccgcactgctatacatgaagtcatggagcagggccgagtcaccatcgctaaagctggcatccacgctagacttaatgcccgctgcagcgtcctggcagctgccaaccccgtctacggcagatatgatcagtataagacacccatggagaacatcggtctgcaggactctctgctgtctcgttttgatctgctcttcattatgctggatcagatggaccctgagcaggaccgcgaaatctcggaccacgtgctgcgtatgcaccgctacagagatccacatgagcaggacgggacagctcttgctcttggtggtacaatcgatgctttggccacagaagaccctgatgctacgcaggaggaggaagaggagctccaggtgtacgagaaacacaatccactcctccacggcagcaaaaaaaacaaggatcgagtagtgagcaaagccttcatgaggaagtacatccacgtcgccaaagccatttctccagttttgacccaagatgcagccaatcacatcgcagaggaatattcacgactgcgcaaccaggagcagctgggctctgacatcgcacggacgtcaccggtcactgcccgaaccctggagactttgatccgtctgtccacggctcacgctaaagcccgcatgagtaaagctgtggagctggtggacactgaagtcgccgtggagctcgtgcagttcgcttatttcaaaaaggttttggagaaggaacgtaaacgctctagaaatggacagcaggacgctgcttcagaagatgaagaagaagaggaagatgaagctcaagacacaccacgaccacccagaaaaaggcgcaggggatctcagggaagcgagtcttatgacccctatgactttgacactgagactgatattccacagattcagtctccggctcctgcgaggcagggtgatgaagagcctgatcagaatggccacacagagttgtctgaggacaggtttaaggagtttaaagcggctctgcataaggttttccgctcttctcacgctcagtcggtgggtttgattgctctgatggagagcatcaacaagtcttgcccatcagcgtttaatgaaacagacttccgggctgctctcgcgcgcatgcaggacgacaaccaggtcatgctggctgatgacatcatcttcctgatttaa

SEQ ID NO: 5512 - protein, 807 aa, Danio rerio
MAAEVVDDQEMREAQRDYLDFLDDDQDQGIYQSKVRQMISENKSRLIVNLNDLRRRNEKRAAKLLNNAFEELLAFQRALKDLVASIDATYAKQCEEFFIGLEGSFGSKHVSPRTLTSRLLGSMVCLEGIVTKCSLVRPKVVRSVHYCPATKKTMERKYTDLTSLDAFPSSAIYPTKDEENNPLETEFGLSVYKDHQTITIQEMPEKAPAGQLPRSVDIILDNDLVDAVKPGDRTQVIGTYRCLPGKKGGFTSGTFRTIMIACHVKQMSKEISHYFSADDVAKIKSFCRSRSKNVFDQLARSLAPSIHGHEYIKKAILCMLLGGVEKVLENGSRIRGDINVLLIGDPSVAKSQLLRYVLHTAPRAIPTTGRGSSGVGLTAAVTTDQETGERRLEAGAMVLGDRGVVCIDEFDKMSDMDRTAIHEVMEQGRVTIAKAGIHARLNARCSVLAAANPVYGRYDQYKTPMENIGLQDSLLSRFDLLFIMLDQMDPEQDREISDHVLRMHRYRDPHEQDGTALALGGTIDALATEDPDATQEEEEELQVYEKHNPLLHGSKKNKDRVVSKAFMRKYIHVAKAISPVLTQDAANHIAEEYSRLRNQEQLGSDIARTSPVTARTLETLIRLSTAHAKARMSKAVELVDTEVAVELVQFAYFKKVLEKERKRSRNGQQDAASEDEEEEEDEAQDTPRPPRKRRRGSQGSESYDPYDFDTETDIPQIQSPAPARQGDEEPDQNGHTELSEDRFKEFKAALHKVFRSSHAQSVGLIALMESINKSCPSAFNETDFRAALARMQDDNQVMLADDIIFLI

SEQ ID NO: 5513 - DNA, 2166 bp, Danio rerio
  CDS (1)..(2166)
atggccccgaaggattatacggcggagaaagagaaatgtaagcggttcctgcaggagttctacactgaggatgactccgggaagaagatcttcaagtatggtgctcagctggtatctctggcacatcgggagcaggtggcgctgctggtggatctggacgacgtggcggaagaagacccggatctggtggagagtgtgtgtgagaacgccaaacgatacacagcgctgtttgcagacgccattcatgagctgctgccggagtacagggagcgggaggcggtggtgaaggacgcgctggacgtctacatcgagcaccggctgatgatggaggtcagaggtcgcgacccagcagacacacgtgaccacaggaagcagtacccgcccgagctgatgcgcagatttgaggtgtatttccgtcctccggcgacgctgaagccgcgggttgtgcgtgatgtgaaggcggacagcatcgggcagctggtgacggtccggggaatcgtgacgcgagcgactgaagtcaagcccatgatggccgtcgctacgtacacctgcgaccagtgcggcgccgagacctaccagccgatcgcctcgcccagcttcacgccgctcatcatgtgccccagtcaggagtgcgtcaccaacaaatccggcggccggctctacctgcagacacgcgggtcaaagttcatcaagttccaggagctgcgcatccaggagcacagtgatcaggtgccggtggggaacatccctcgcagtatgaccatatatgcccgtggggagaacacgcgtgtggctcagcccggggatcatgtggccgtgtctggagtgtttctgccactgctgcgctccggcttcaggcaggcggtgcagggtctgctctcggagacatatctggagtgtcacagcatcactctgatgaacaagactgaggatgatgagctgggcaccgaggagctgagcgatgaagagctgcgccaaatcaccgaggaggatttctatgagaagctggcggggtcgatcgctccggagatttacggccatgaggatgtgaagaaagccctgctgctgctgctggtgggcggagtggagcaggcgccgcgcggcatgaagatcagagggaacatcaacatctgtctgatgggtgaccccggcgtggccaagtctcagctgctgtcctacatcgaccggctcgctccacgcagtcagtacaccacgggccgcggctcctccggcgtgggcctgacggcagcagtgatgcgtgaccccgtcaccggggagatgactctggagggcggagctctggtgttggccgatttgggcgtgtgctgcattgacgagttcgacaagatggccgacgccgaccgcaccgcaatccacgaggtgatggagcagcagaccatctccatcgctaaggcgggcatcatgacgtctctgaacgctcgctgctccatcctagcagctgctaacccggcgtacggccgctacaacccgcgcaagagcattgagcagaacatccagctgccggcggcgctgctgtcccgcttcgacctgctgtggctgatccaggaccggccggacgcagagagcgacttgcggctggcgcagcacattacatacgtgcaccagcactgccggcagccgcccacacacttcacccccatcgacatgaagctcatgagacgctacatcagcaagtgtaagcagaagcagccggtggtgccggagtctctgtcggactacatcactgcggcgtatgtggagatgcgaaaggaggcgcgggtcagtaaagacaccaccttcacctccgccagaacactgctgtccatcctgcggctgtccactgcactggctcgtctgcgtatggtgtcggtggtggagaaggaggatgtgaacgaggcgatgcgtctgatggagatgagcaaagactctctgcaggcggaccggagcagcagcagcagagctcagcggccggctgacgtgatcttctctctgctgcgggagctgtgtggagagtccgcgggccgcagcgtgcgcgtgtctgcagcggagcagaggtgtgtgtcgcgcgggttcaccccggcgcagttccaggcggcgctgcaggagtacgaggagctgaacgtgtggcagatcaaccaggcccgcacacgcatcacattcgtctaa

SEQ ID NO: 5514 - protein, 721 aa, Danio rerio
MAPKDYTAEKEKCKRFLQEFYTEDDSGKKIFKYGAQLVSLAHREQVALLVDLDDVAEEDPDLVESVCENAKRYTALFADAIHELLPEYREREAVVKDALDVYIEHRLMMEVRGRDPADTRDHRKQYPPELMRRFEVYFRPPATLKPRVVRDVKADSIGQLVTVRGIVTRATEVKPMMAVATYTCDQCGAETYQPIASPSFTPLIMCPSQECVTNKSGGRLYLQTRGSKFIKFQELRIQEHSDQVPVGNIPRSMTIYARGENTRVAQPGDHVAVSGVFLPLLRSGFRQAVQGLLSETYLECHSITLMNKTEDDELGTEELSDEELRQITEEDFYEKLAGSIAPEIYGHEDVKKALLLLLVGGVEQAPRGMKIRGNINICLMGDPGVAKSQLLSYIDRLAPRSQYTTGRGSSGVGLTAAVMRDPVTGEMTLEGGALVLADLGVCCIDEFDKMADADRTAIHEVMEQQTISIAKAGIMTSLNARCSILAAANPAYGRYNPRKSIEQNIQLPAALLSRFDLLWLIQDRPDAESDLRLAQHITYVHQHCRQPPTHFTPIDMKLMRRYISKCKQKQPVVPESLSDYITAAYVEMRKEARVSKDTTFTSARTLLSILRLSTALARLRMVSVVEKEDVNEAMRLMEMSKDSLQADRSSSSRAQRPADVIFSLLRELCGESAGRSVRVSAAEQRCVSRGFTPAQFQAALQEYEELNVWQINQARTRITFV

SEQ ID NO: 5515 - DNA, 2163 bp, Xenopus tropicalis
  CDS (1)..(2163)
atgcccagggattaccaagccgagaaagagaagtgcaagacctttctgcaggagttttacaaagatgacgagcttgggaagaagaacttcaagtatggagtccagctggctaatattgctcacagagagcaggttgcgctgtacatcgatctggatgacctggccgaggaggaccccgagttagtggatgcaatctgtgaaaacacaaggaggtacacaaacctgtttgctgatgccgttcaggagctgctgccccagtataaagagcgagaggtggtacataaagatgctttggatgtgtatattgagcaccgcttaatgatggagcagagaggccgagaccccagtgagacccgtgatcctcacaaccagtaccccccagagcttatgcgcagattcgaactgtacttcaaagctccgagcagctcaaaagcccgcgtggtgcgagatgtcaaagccgattccatcggcaagttggttacagttcggggcatagtcacgagggtcacagaagtcaagcctatgatggtggtggcaacatacacatgtgaccagtgtggtgccgagacctaccaaccgattcaatctccaacttttatgccgcttataatgtgtcccagcagggagtgtcagacaaaccgctctgggggcaggctctacttgcagacccggggctctaaatttattaagttccaagagctgaagattcaagaacatagtgatcaagttccagttgggaacatccctcgctgtatgtctgtgtatgtacgtggggagaacacgcggctcgctcagcccggggaccatgtcagtatcactggagtcttcctgccgatgctaagaactggcttccgtcaggtggtacaggggctcctttcagagacgtacctcgaatctcaccgtttggtgaaaatgaacaagaccgaggatgatgaactcggaacagaagagctgagtgaagaggagctgcgacagattactgaggaagatttctatgagaagctggcagcctccattgcgcctgagatttatgggcacgaggatgtgaagaaggctctacttctgctcttagtgggaggagttgacaattctccccgtggcatgaagataagagggaacattaacatctgcctgatgggtgacccaggagttgcaaaatcacagctgctttcttatattgatcgtctagcacctcggagtcagtacacaacaggtcgcggctcctccggggtgggtctcaccgcagcggtaatgaaagacccagtgactggcgagatgacactggaaggcggagctttggtactggcggatcagggggtttgctgcattgatgagtttgataagatgatggacacggacagaacagccattcatgaagtcatggagcagcagactatctccatagccaaggctggcataatgaccactctaaatgctcgctgctctattcttgctgctgctaaccctgcctacgggaggtacaacccaaagaagacagtggagcagaatatccagctccctgctgccttactgtcccgattcgacctactctggctgatccaagacaagccggacagggacaacgatctcagactggcgcagcacattacatacgtccatcagcacagcaagcagccgccatcacagtttcagcctctggatatgaaacttatgcgacgttacattactatgtgcaagcgcaagcagcctgcaatcccagaatcccttgcagactatctgacggctgcctacgtggaaatgagaaaagaagcccgaaccaacaaagacatgactttcacttctgcccgaaccctgctgtctattctgagattgtctacagccttggctcgtctgcgtctggaagatgtcgtggagaaagaggatgtaaacgaggccatgaggttgactgaaatgtctaaggactcgttgcttggcgacaaggggcaaacgtcaaggacgcaacgcccggccgacgtgatcttctccactatccgagagatggtcccggagaaaggcgcccgcagcgtcaaatactcggaggcggagcagcgcgccgtgtctaaaggcttcacccccgcccagttcgaggcggctctggaggagtacgaggagctgaacgtctggctggttaatcaggcccgcaccaagatcacatttgtgtaa

SEQ ID NO: 5516 - protein, 720 aa, Xenopus tropicalis
MPRDYQAEKEKCKTFLQEFYKDDELGKKNFKYGVQLANIAHREQVALYIDLDDLAEEDPELVDAICENTRRYTNLFADAVQELLPQYKEREVVHKDALDVYIEHRLMMEQRGRDPSETRDPHNQYPPELMRRFELYFKAPSSSKARVVRDVKADSIGKLVTVRGIVTRVTEVKPMMVVATYTCDQCGAETYQPIQSPTFMPLIMCPSRECQTNRSGGRLYLQTRGSKFIKFQELKIQEHSDQVPVGNIPRCMSVYVRGENTRLAQPGDHVSITGVFLPMLRTGFRQVVQGLLSETYLESHRLVKMNKTEDDELGTEELSEEELRQITEEDFYEKLAASIAPEIYGHEDVKKALLLLLVGGVDNSPRGMKIRGNINICLMGDPGVAKSQLLSYIDRLAPRSQYTTGRGSSGVGLTAAVMKDPVTGEMTLEGGALVLADQGVCCIDEFDKMMDTDRTAIHEVMEQQTISIAKAGIMTTLNARCSILAAANPAYGRYNPKKTVEQNIQLPAALLSRFDLLWLIQDKPDRDNDLRLAQHITYVHQHSKQPPSQFQPLDMKLMRRYITMCKRKQPAIPESLADYLTAAYVEMRKEARTNKDMTFTSARTLLSILRLSTALARLRLEDVVEKEDVNEAMRLTEMSKDSLLGDKGQTSRTQRPADVIFSTIREMVPEKGARSVKYSEAEQRAVSKGFTPAQFEAALEEYEELNVWLVNQARTKITFV

SEQ ID NO: 5517 - DNA, 2175 bp, Neurospora crassa
  CDS (1)..(2175)
atggattatcagtccgtcttctcagcccggacctacgccggcgctgcttcttcatatgtaccagaggaggacagcaaccagcacattcgcgcccagctcgaggctttcattctcgacttccgactagataacagctttatctacagagaccaactacgagaaaatgcccttctaaagaaatactactgcgatgtcaacattggcgacttgatcaaattcaatgaagaaattgcccatagactagtcaccgaacccgccgagattatccctctgttcgaggccgctctgaagcgctgcacacaccgaatcgtcttcccaaacgaacccaagatagacctgcccgaccaccaactgcttctacactccaacgccgaagatgtttctatccgtaacctcgactcccttacaatctcccggctggtccgggtacctggtatcgtcattggtgcctcggtaatgtcgtccaaggcgactgagctccacgtccagtgccgcaactgcggccacgtccaacacgttcacgtatccggcggcttcagtggcgctacccttcccaggacatgtggcagaatcagggcacctggggaccctggcgagaagtgcccaatggatccctactttgtacaacatgaaaagtccagattcgtcgatcagcaaattatcaagcttcaggaagctccagaccaagttcccgtcggtgaactgccccgccatgtcctgatttccgccgaccgctacctcacgaaccgcgtggtgcccggctcaaggtgtaccgtcatgggtattttttctatataccaaagtggaggcaacaagaagtccacaagcggcgccgtcgccattcgcacaccctatctccgcgcagtcggtatccagacagacattgaccaaacagccaagggtctggctgtcttttccgaggaggaagagcaggagttccttgagcttagccgtcgtccagatctctacaatgtcatggccgaatgcatcgcgccgtccatctatggaaataaggatatcaaaaaggctatcctctgtttactcatgggtggctccaagaagatccttccagatggcatgaggcttcgtggtgatatcaacgtcctcatgcttggtgatcccggtacggccaagtcacaactgctcaagttcgtcgaaaaagtcgctcctatcgccatctacacctccggcaagggttcctccgccgccggtttgacggcttccgtccagcgtgacgcttccacgcgcgagttctacctcgaaggcggtgccatggttctcgctgacggcggtgtcgtctgtatcgatgagttcgacaagatgcgcgatgaggacagagtggcaatacacgaagctatggagcaacaaaccatttccatcgccaaggccggcatcaccacgatcctcaatgctcgaacttcggtcttggccgccgctaaccccatctttggccgctacgacgacatgaagaccccgggcgagaacatcgactttcagaccaccatcttgtcgcgtttcgacatgatcttcatcgtcaaggatgagcacgagcgcggccgtgatgagcgcatcgccaagcacgttatgggtatccatatgggtggtcgtggtgtcgaggagcggattgaggcagagatcccggtcgagaagatgaggcggtacatcagctattgccgatcccgctgcgccccgcgcctctctccggaagccgccgagaagctctcctcgcacttcgtcgccatccgcaagcaagtgcacgcctcagagcttgaagccaacgcgcgctcctcgattcccatcacggtccgccagctcgaagccattgtgcgcatcaccgagtcgctcgccaagctgacgctctcgcccgtcgcgacggagaagcacgtggacgaggccatccggctattcctgtgctcgaccatggacgccgtcaaccaaggtggcagcacgggcagcaatcgggagttgaacgaggagacgtcccgcgtcgaggccgagctgaagcgccgcttgcccatcggctggagcaccagcttggcgaccctgcgcagggaaatggtggagggtaaagggtttagcgaggtggcgctgaatagggcgctgatgatgttgcagaggcgggataccattatgtttaggaaccagggcgcgcaggtttataggaatggcgcgtag

SEQ ID NO: 5518 - protein, 724 aa, Neurospora crassa
MDYQSVFSARTYAGAASSYVPEEDSNQHIRAQLEAFILDFRLDNSFIYRDQLRENALLKKYYCDVNIGDLIKFNEEIAHRLVTEPAEIIPLFEAALKRCTHRIVFPNEPKIDLPDHQLLLHSNAEDVSIRNLDSLTISRLVRVPGIVIGASVMSSKATELHVQCRNCGHVQHVHVSGGFSGATLPRTCGRIRAPGDPGEKCPMDPYFVQHEKSRFVDQQIIKLQEAPDQVPVGELPRHVLISADRYLTNRVVPGSRCTVMGIFSIYQSGGNKKSTSGAVAIRTPYLRAVGIQTDIDQTAKGLAVFSEEEEQEFLELSRRPDLYNVMAECIAPSIYGNKDIKKAILCLLMGGSKKILPDGMRLRGDINVLMLGDPGTAKSQLLKFVEKVAPIAIYTSGKGSSAAGLTASVQRDASTREFYLEGGAMVLADGGVVCIDEFDKMRDEDRVAIHEAMEQQTISIAKAGITTILNARTSVLAAANPIFGRYDDMKTPGENIDFQTTILSRFDMIFIVKDEHERGRDERIAKHVMGIHMGGRGVEERIEAEIPVEKMRRYISYCRSRCAPRLSPEAAEKLSSHFVAIRKQVHASELEANARSSIPITVRQLEAIVRITESLAKLTLSPVATEKHVDEAIRLFLCSTMDAVNQGGSTGSNRELNEETSRVEAELKRRLPIGWSTSLATLRREMVEGKGFSEVALNRALMMLQRRDTIMFRNQGAQVYRNGA

SEQ ID NO: 5519 - DNA, 2166 bp, Gibberella zeae PH-1
  CDS (1)..(2166)
atggatcgcggatcagtttactcggctcacgtctacgaaccgagtttcggtgagaatggagatactcggctgcagcttcagacacagctcgaaaccttcatcctcgactttcgcctcgacaacaatttcgtctacagagatcaacttcgagagaatgcgctgctcaagaggtacttctgcgacgtcaacatcaacgacttgattagcttcaacgaggagctggcacaccgactggcttctgaacctgccgagatcatccctctattcgaaaatgccctaaagaaatgcacgcatcgcattgtcttcccccacgaacccaagattgagatccccgaacatcaacttctccttcactcaaacgccgacgatgtctcgatccgccatctcgactccgagaccatctcacggctggtacgtgtcccgggtattgttattggtgcctctgtcatgtcatcaaaggcaacagagcttcatatacaatgccgcaactgcggacacacacagaacattcctgtcttgggaggtttcacgggtgttactcttccccgacaatgctctcgaagtcgagtccccaatgaccctacaccaaagtgtcccatggacccttacttcgtggcccatgagaaatctcgttttgtcgaccaacaaattatcaagcttcaagaagcgcccgatcaagttcctgtgggagagctgcccaggcacgtcctcatctcagccgatagatacttgacaaacagagttgttccaggttcaagatgtactgtcatgggcatcttctcaatttaccaaaacaaagcctccaagaactcctctactggtggcgctgtggctatccgtaccccttatttgagagcggtcggaatccagtcagatatagaccaagcagccaagggtaatgcaactttctcagaagaagaggagcaagagttcttggaaatgagcagacggccagacatttacgatgttatgactgactgcatcgccccctctatttatggaaaccgtgacatcaagaggtcaatcctttgcttgttattaggtggttcaaagaagatccttcccgatggaatgagactgagaggagacatcaatgtgttacttcttggtgaccctggtacagccaaatctcagcttcttaagtttgtcgaaaaggcagctccgatctctatctacacatccggaaagggttcatcagctgcaggtctaacagcgtctgtgcaacgtgatcagtccacgcgcgaattctacctcgaaggtggtgcgatggtcttggctgacggtggagtggtgtgtatcgacgagtttgacaagatgagagatgaggaccgagtggcgatccacgaagctatggaacagcaaactatttccatcgccaaagctggtatcaccaccattctcaatgcacgaacctcggttctggccgccgccaaccccattttcggtcgatacgatgatatgaagactcccggagagaacatcgatttccagactaccattctttcgcgtttcgatatgatttacattgtcaaggatgaacatagccgtgaaaaggacgagacgatggccaagcacgttctcggtatccagatgaacggccgaggcactgaggacatgacagaatctgaaatccccattgacaagatgcgaagatatatcacctactgcaagactcgatgtgcccctcgacttagtcctgaagctgccgagaagctctcttctcactttgtttccatccgtcgtcaggtccacgctgctgagatcgaggccaacagtcgttcttccatccctattaccgtccgtcagcttgaagctatcgttcgtattactgagtctcttgccaagcttaccctctcccctattgctaccgaagtgcatgtggacgaggccattcgtttgttcttgtgctctaccatggacgctgtcaaccagggcagcaaccagggcagtcgcgagttgaacgatgaagtcaaccgactcgaggcagagctgaagcgacgactacctatcgggtggagcaccagtctctccacactcaaaaaggagatggttgagggtaaggggtacagcgagcaggcactcaaccgagcccttatggttctgcaacggagagacacaattatgttcagaaaccagggagctcaagtatacaggaacggagcttaa

SEQ ID NO: 5520 - protein, 721 aa, Gibberella zeae PH-1
MDRGSVYSAHVYEPSFGENGDTRLQLQTQLETFILDFRLDNNFVYRDQLRENALLKRYFCDVNINDLISFNEELAHRLASEPAEIIPLFENALKKCTHRIVFPHEPKIEIPEHQLLLHSNADDVSIRHLDSETISRLVRVPGIVIGASVMSSKATELHIQCRNCGHTQNIPVLGGFTGVTLPRQCSRSRVPNDPTPKCPMDPYFVAHEKSRFVDQQIIKLQEAPDQVPVGELPRHVLISADRYLTNRVVPGSRCTVMGIFSIYQNKASKNSSTGGAVAIRTPYLRAVGIQSDIDQAAKGNATFSEEEEQEFLEMSRRPDIYDVMTDCIAPSIYGNRDIKRSILCLLLGGSKKILPDGMRLRGDINVLLLGDPGTAKSQLLKFVEKAAPISIYTSGKGSSAAGLTASVQRDQSTREFYLEGGAMVLADGGVVCIDEFDKMRDEDRVAIHEAMEQQTISIAKAGITTILNARTSVLAAANPIFGRYDDMKTPGENIDFQTTILSRFDMIYIVKDEHSREKDETMAKHVLGIQMNGRGTEDMTESEIPIDKMRRYITYCKTRCAPRLSPEAAEKLSSHFVSIRRQVHAAEIEANSRSSIPITVRQLEAIVRITESLAKLTLSPIATEVHVDEAIRLFLCSTMDAVNQGSNQGSRELNDEVNRLEAELKRRLPIGWSTSLSTLKKEMVEGKGYSEQALNRALMVLQRRDTIMFRNQGAQVYRNGA

SEQ ID NO: 5521 - DNA, 2187 bp, Candida albicans SC5314
  CDS (1)..(2187): transl_table=12
atgtcttttgaacgtccggaagtgttttctgcacatgtgttacctggtgaagaaccagctgaaaattcctacaatgagattacaaaagctttccgttcatttattttagaatatagaattgattctcaatttatttacagagatcaattaagagaaaatttgctcattaagaattatttcttaaaggttgaagctgaccatctcattgcattcaatgaagagttgaataaaaaattaagtgatgaccctgctgaaatgattccactttttgaaaatgccattactgatattgctaaaagaattgcttatttgtctaatgacgaaattcctcaagatttcccaacttgtcagttaattttatattctaaagccaatgagacctcaataagacacttggattccgatcatatagcaaaaattgtcagagtaagtggtattattatttctgcttcggttttaagttctagagccacacaagtgcaattgatatgtcgtgcttgtaaacacaccatgaaaattactgtcaaacatgggtttggccagatccaattaccacctagatgtctagcaccacataactctgatccaaattccacagaagagaaatgtcccaacgattcttatgttatcgttcacgataaatcgacatttgttgatcaacaggttttgaaattgcaagaagcaccagatatggttccagttggtgaaatgccaagacacattcttttacaggcggatagatatttgactaatcaagttgttcctggtactagagtcaccattgtcggtatttatgctatttaccaatccaaacaaagtgcaagaaataactcaacctcaaatgttgcgattcgtaacccatatttgcgtgtattaggataccaaactgatattgataatggtgcaaatggtcaaggtataatctttagtgaagaagaggaagaagaatttttaagaatgtcaagaatgccaaacttgtacgaaacatttgtcaattcaattgctccgtcaatttacggtaatgaagacattaaaaaggcaatcacttgtttattgatgggtggttctaagaagattttgcctgatggaatgagattaagaggtgatattaatgtattattgttgggagatcctggtaccgccaaatcccagttgcttaaatttgttgagaaaatcgctcctatttcagtgtatacatctggtaaagggtcatctgcagctggtttgacagcttcagttcagagagacccacagactagagacttttatttagaaggtggtgctatggtcctagcagatggtggtgtcgtttgtattgatgaatttgacaagatgagagacgaagatagagttgcaattcacgaagctatggaacaacaaactatttctattgccaaagctggtattacgaccgttttgaactcgagaacttctgtattagcagcagcgaatccagtgtttggtaaatacgatgaatttaaaagcccaggagaaaatattgattttcaaagtactatcttgtccagatttgacatgatttttattgtcaaagatgagcacaatgaaggtagggacatatcaattgctcaacacgttatgaatgttcatactggtggaagagcacaagatttgttacaagaaggggaaattccaatagagaaaatgaaaaggtacattcagtatgtcaaattgagatgtgccccacgtcttaccgcagaagcatcagaaagattgtcatcccattttgtgtctattagaagaagattgcaactcaatgaagcagagatgaatgaaagatcttccattccaattaccgttagacaattggaagctatcattcgtataacagaatcattagcaaagttgcgtctttcacctgttgctactgaggaacacgtcgaggaagcaatcagattattcactgcctccacgatggatgctgtcgaccaaggacttggaagctcgaatgatgttaccttgaatgctgaaatcaagaaagttgaacaagagttgagaagaagattaccaattggatggtctactgcttataagacattgcgtaaagagtttgttgattcaggtaaggctagtgcttctgcattagagaaagctctatatataatggaaagacacgaagtgatcaaattcagacaccagagacagaacgttttgagagttggtgtttaa

SEQ ID NO: 5522 - protein, 728 aa, Candida albicans SC5314
MSFERPEVFSAHVLPGEEPAENSYNEITKAFRSFILEYRIDSQFIYRDQLRENLLIKNYFLKVEADHLIAFNEELNKKLSDDPAEMIPLFENAITDIAKRIAYLSNDEIPQDFPTCQLILYSKANETSIRHLDSDHIAKIVRVSGIIISASVLSSRATQVQLICRACKHTMKITVKHGFGQIQLPPRCLAPHNSDPNSTEEKCPNDSYVIVHDKSTFVDQQVLKLQEAPDMVPVGEMPRHILLQADRYLTNQVVPGTRVTIVGIYAIYQSKQSARNNSTSNVAIRNPYLRVLGYQTDIDNGANGQGIIFSEEEEEEFLRMSRMPNLYETFVNSIAPSIYGNEDIKKAITCLLMGGSKKILPDGMRLRGDINVLLLGDPGTAKSQLLKFVEKIAPISVYTSGKGSSAAGLTASVQRDPQTRDFYLEGGAMVLADGGVVCIDEFDKMRDEDRVAIHEAMEQQTISIAKAGITTVLNSRTSVLAAANPVFGKYDEFKSPGENIDFQSTILSRFDMIFIVKDEHNEGRDISIAQHVMNVHTGGRAQDLLQEGEIPIEKMKRYIQYVKLRCAPRLTAEASERLSSHFVSIRRRLQLNEAEMNERSSIPITVRQLEAIIRITESLAKLRLSPVATEEHVEEAIRLFTASTMDAVDQGLGSSNDVTLNAEIKKVEQELRRRLPIGWSTAYKTLRKEFVDSGKASASALEKALYIMERHEVIKFRHQRQNVLRVGV

SEQ ID NO: 5523 - DNA, 2157 bp, Aspergillus fumigatus Af293
  CDS (1)..(2157)
atggacagacgtactccctatactctgagtgttcttgctcccagcacagatggcgcagaggagtcgcgcacacaaatccaagcaagattgcgcgagtttgtattggagttccaacttgacaacgcatttatttaccgtgatcaactgcggcagaatgttctcgtgaagcaatacttctgtgacattgatattgcccatttaatatcgtacaacgaggagcttgctcacaagctcacaactgaacctgccgatattatcccccttttcgaggcagctctccaacaatgcactcagcgaattgtctatccctcccagagagatatcgtccttccatcccaccagctcttacttcactcatctgcatcacacatctccatccgggacctgaatgctacaaacatctcccaccttgttcgtattcctgggattgtgattggcgcgtctacaatatcatccaaggccaccgttgtccacattcggtgcaagggctgcgaccatagcgaaaacatccgcgtagaaggcggtttctccggtttaacgcttccccgacgatgcggtcgtcaaaagctaccgggcgaagagcccggcgagcaatgccccctcgacccttacgtgatcgcccacgagaaatgccagttcgttgatcagcaagttctcaaacttcaggaagcgcccgaccaggtgccggtgggtgagcttcccaggcacgttcttatctcggccgatcgataccttgccaaccgagttgtgcctgggtctcgatgcacagtgatgggtattttttctatttattccaagggaggcaagaaagatggagctgtggctattcgcaacccatatctgcgggcggttggcatcagtaccgatctggatcatacggcaaaaggcaacgccatcttcaccgaagaagaggaacaggagtttctggagcttagtcgccgggaggatctgtatgaagctctcgccaggagtattgccccctctatttggggtaatctggacatcaaaaaggcaatcgtgtgccttctgatgggcggttccaagaagatcctacccgacgggatgaagcttcgtggagacatcaacgtgttgctccttggtgacccgggtactgccaagtcgcaattgctgaagtttactgaaaaagtatcccctatcgctatctacacatccggcaaaggttcgtcagcggctggtttgaccgcatcagtacagagagacccgcagacgcgcgaattctatctggaaggtggtgctatggtgcttgctgacggaggggttgtctgtatcgatgagttcgataagatgcgggacgaagaccgagttgccatccacgaagctatggagcagcaaacaatctcgattgcaaaagccggtattacgaccattcttaattcgcgaacatcggtgttggccgctgccaaccctatctttggtcggtacgatgacctgaagactcctggagagaacattgactttcaaacaactattctgtcacgttttgatatgatcttcatcgttcgcgacgaccatgaccgcaatcgtgacgagaacattgcccgccacgtgatgggtgttcatatgggtggtaggggcattgaggaacaagtcgaggccgagattcccttggagaagatgaagcgctacatcagctactgccgaagccggtgtgccccgcgtctttcacctgaagctgccgagaagctttcctcgcactttgtatccatccggaagcaagtccatcgagcagagatggatgccaacacccgttcctccattcccatcaccgtgcgtcagttggaagccattgttcgtatcaccgagtccttggccaagttaagcttgtcaccgattgccaccgaggcgcatgttgacgaagccatccgcctcttcttggcttccacaatggatgcaatcacacagggtgaaggccagggcagtaaagagctaatggaggaggtcagcaagatcgaggatgagctgaagcgccgtctccccattggctggagtacgagtttggccactctgagacgagaatttgtcgatggcagaggctacacagagcaagctctcaacagagcattggtgattctccagagacgcgatacgatccaaatccgctctggtggatcacaggtctatcggcatggtgtttaa

SEQ ID NO: 5524 - protein, 718 aa, Aspergillus fumigatus Af293
MDRRTPYTLSVLAPSTDGAEESRTQIQARLREFVLEFQLDNAFIYRDQLRQNVLVKQYFCDIDIAHLISYNEELAHKLTTEPADIIPLFEAALQQCTQRIVYPSQRDIVLPSHQLLLHSSASHISIRDLNATNISHLVRIPGIVIGASTISSKATVVHIRCKGCDHSENIRVEGGFSGLTLPRRCGRQKLPGEEPGEQCPLDPYVIAHEKCQFVDQQVLKLQEAPDQVPVGELPRHVLISADRYLANRVVPGSRCTVMGIFSIYSKGGKKDGAVAIRNPYLRAVGISTDLDHTAKGNAIFTEEEEQEFLELSRREDLYEALARSIAPSIWGNLDIKKAIVCLLMGGSKKILPDGMKLRGDINVLLLGDPGTAKSQLLKFTEKVSPIAIYTSGKGSSAAGLTASVQRDPQTREFYLEGGAMVLADGGVVCIDEFDKMRDEDRVAIHEAMEQQTISIAKAGITTILNSRTSVLAAANPIFGRYDDLKTPGENIDFQTTILSRFDMIFIVRDDHDRNRDENIARHVMGVHMGGRGIEEQVEAEIPLEKMKRYISYCRSRCAPRLSPEAAEKLSSHFVSIRKQVHRAEMDANTRSSIPITVRQLEAIVRITESLAKLSLSPIATEAHVDEAIRLFLASTMDAITQGEGQGSKELMEEVSKIEDELKRRLPIGWSTSLATLRREFVDGRGYTEQALNRALVILQRRDTIQIRSGGSQVYRHGV

SEQ ID NO: 5525 - DNA, 2103 bp, Methanosarcina barkeri str. fusaro
  CDS (1)..(2103): transl_table=11
atgactgaaatagaaagcaagtgggatgaaaagctaaagaggttttttaaagattactactggaatgaaatcctccagcttgcaaacgagtatccggaccagcgaagccttagcgttgattttacggatatagagaagtttgacagagagctttcaaaagagtttcttgaccatccagaagaacttataaaggctgccgcagctgccctgaaagaaattgaccttcctgtagaaaaaagcctggaagaggctcacgtaagggtagtaagaatcccaaacagagtacctataagagaattaagaagcaagcacctctcgcgctttattgcaatcgagggtatgataaggaaagcaactgaagtgagaccaagaattactaaagctgcttttgagtgcctcaggtgcggatatctgacttttgtagaccaaaatagtttcaaattcgaggagccctttgcaggttgtgaaggcgagaattgcggaaagaaagggccctttaagataaggatagaagattccacttttatcgatgcgcagaaactgcagatccaggaatcacctgaaaacctgaaaggaggttcccagccccagagtcttgaggtggactccgaagatgacctgacaggaagtgttacccccggagatagggttataattaacggaatcctgaaatctagacagcgcactctgaaagatgggaaatctaccttttatgaccttgttttagaagcaaattccatagagcacctggataaggattatgacgaactcgaaataactgctgaagatgaagaagagatccttgaactttcccgtgatcctgaaatttacggcaaaattgttagttctgttgcgccttctatctatggatacgaggacataaaagaagctcttgtccttcaacttttttctggagttgtgaaaaaccttcctgatggttccagaataaggggcgatatacatattatgcttgtaggagaccctggaattgcaaaatcccagctcctgcgctatgttgtcaaactctccccgagaggcgtttttacttcagggagaagtgcgtcagcaagcggtttgactgcagctgctgtaaaagacgaactcaacgacggtagatggacaatcgaaggcggtgcccttgtcatggctgatatggggattgctgcggttgacgaaatggacaaaatgaaaaccgaggataaaagtgccctgcacgaggcaatggagcagcagacgataagtattgccaaagcgggaattattgctacgcttaaatcccgctgtgcccttctgggagctgcaaatccgaaatacgggcgttttgaccgttatgaaggccttgcagagcagataagtatgccgcccgcactgctttcccgttttgaccttatctttgttttgcttgatactcctgaccataacttggacactaaaattgcaaaccatattctgcagtctcattatgcaggagaactctttgagcagaaggaaaaacttcctggatcacagattaaggaagattttgtcgaagccgaaatggaagttatcgagcctgtcattcagcctgaaatcatgcgaaaatacgttgcatatgcccggaaaaacgtgtttcccgtaatggaggaggatgcaagagctcatctcataaatttctacacagatctccgaaaaactggagagagcaaaaacacccctgtgcccgtaactgcgaggcagcttgaagcacttgtccgtctctcggaagcaagtgcaagagtccgcctgagcaatacggtcacgcttgaagatgcaaaaagaactatcaaaataatgatgaattgcctgaaaaacgtaggtgttgaccccgaaaccggagcccttgatgcagatatacttgcatcgggcacaagcatgagccagagaaataaaataaaaatcctgagagatataataaagaaggtaagtgagaagcatccgggagctaaagctcctctcgaagaggtttatgctatagctgaaaacgaacacggaatagataaaattcatgctgaagagaacattaagaaaatgaagcaaagaggagaccttctttctccagatcagaaccatataaggcttgtttaa

SEQ ID NO: 5526 - protein, 700 aa, Methanosarcina barkeri str. fusaro
MTEIESKWDEKLKRFFKDYYWNEILQLANEYPDQRSLSVDFTDIEKFDRELSKEFLDHPEELIKAAAAALKEIDLPVEKSLEEAHVRVVRIPNRVPIRELRSKHLSRFIAIEGMIRKATEVRPRITKAAFECLRCGYLTFVDQNSFKFEEPFAGCEGENCGKKGPFKIRIEDSTFIDAQKLQIQESPENLKGGSQPQSLEVDSEDDLTGSVTPGDRVIINGILKSRQRTLKDGKSTFYDLVLEANSIEHLDKDYDELEITAEDEEEILELSRDPEIYGKIVSSVAPSIYGYEDIKEALVLQLFSGVVKNLPDGSRIRGDIHIMLVGDPGIAKSQLLRYVVKLSPRGVFTSGRSASASGLTAAAVKDELNDGRWTIEGGALVMADMGIAAVDEMDKMKTEDKSALHEAMEQQTISIAKAGIIATLKSRCALLGAANPKYGRFDRYEGLAEQISMPPALLSRFDLIFVLLDTPDHNLDTKIANHILQSHYAGELFEQKEKLPGSQIKEDFVEAEMEVIEPVIQPEIMRKYVAYARKNVFPVMEEDARAHLINFYTDLRKTGESKNTPVPVTARQLEALVRLSEASARVRLSNTVTLEDAKRTIKIMMNCLKNVGVDPETGALDADILASGTSMSQRNKIKILRDIIKKVSEKHPGAKAPLEEVYAIAENEHGIDKIHAEENIKKMKQRGDLLSPDQNHIRLV

SEQ ID NO: 5527 - DNA, 2577 bp, Xenopus laevis
  CDS (1)..(2577)
atgtcatctccaacatccacaccaagccgtagaagagtaaacgtgggcgaggcagtaaccctccaactcctcgtggagaggaagtgcagtctcctccgtcacagaaaagacggacagaagattccacatcaattggtgagcttctgcccatgccaacctcaccttcaggagacattcagagtcccttgttttctagcccttgcaccatcaaggcattcagcccatcaaagtgagcttgatctaagctctcctctgacttatggcacccctagctcaagggttgagggtaccccaagaagtggtatcagagggactcctgctcgtcagagagctgacctgggatcagcacgcaaagttaagcaggtggatttacattcagaccagcctgctgcagaggagctagttacgagtgagcaatctttgggacagaagttggtgatctggggaactgatgtcaatgttgccatatgcaaagaaaagtttcagcgttttgttcagcgattcattgatcctttggccaaagaagaggaaaatgtagggctggatctgaatgagcctatatatatgcaacgacttgaagagataaatgtggtaggcgagccatttctaaacattgactgtgaccatctcagaagctttgaccaggatctttacagacaactagtgtgctacccacaggaagttataccaacatttgatatggctgctaatgagatcttctttgagaggtaccctgactccattttggagcaccagattcaagttcgaccctataatgcattgaaaacaagaaatatgagaagcctaaatcctgaagatattgatcaacttatcacaattagtggcatggttatcagaacttctcaaatcatccctgagatgcaggaatcattttttaaatgtcaagtgtgtgccttcactactcgggtggagattgatcgtgggcgcattgcagagccatctgtctgcaaacactgcaacaccacacacagcatggctcttattcacaatcgctctatgttttcagacaagcaaatgattaaactgcaagagtctccaggagatatgcctgctggtcagacacctcatacaaccattctctatgctcataatgacttggtagataaggtacagcctggtgatagagtgaatgtcacaggtatttatagagctgtcccaattcgagttaaccctagagttcgaaatgtaaagtcggtttacaaaactcacattgatgtaattcattaccgaaaaacggattcaaagcggttgcatggtattgatgaggacactgaacagaagatgttcactgaagaaagggttgcagtgttaaaggaactggcagcaaagccagacatctacgagaggcttgctgcagctcttgcaccaagtatatatgagcatgaagatataaaaaagggaattttacttcagttgtttggtgggacacggaaggacttcagccatactggaagaggcaaattccgtgctgaagtaaacatacttttgtgtggtgatccaggaaccagtaaatctcagcttctccaatacgtatataatctggtacctagaggccagtacacctctggaaagggatccagcgcagttggattaaccgcatatgtgatgaaggacccagaaacgaggcagttagtactgcagactggcgccttggttcttagtgacaatggcatttgctgcattgatgaatttgacaaaatgaacgagagcactagatctgtcctacatgaagtaatggaacagcaaaccctctccattgcaaaggctggaataatctgtcaactaaatgcacgtacctccgttttggctgctgcaaacccagtggagtcacaatggaaccccaagaaaaccactatagaaaatatacagcttccacatacactcttatcaaggtttgatctaatatttttgatgctggatccacaagatgaaacatatgaccgccgcttagcccaccaccttgtggttttgtactaccagagtgaggagcaattgaaagaagagcacttagacatggcagtattaaaggattatattgcatatgctcgcacctacgtgaatccaagacttggtgaagaagcaagccaggctctaatagaggcctatgtagacatgaggaaaatcggcagtggtcgtggaatggtttctgcctatcccagacaactcgagtctctaatacgcttatcagaagcgcatgcaaaagtacgcttttctagcaaggtggaaacaattgatgttgaagaggcaaaacgtcttcatcgtgaggctttgaaacagtctgccactgatcccagaactggcattgttgatatatctattctcacaacaggaatgagtgcaactgctcgaaaacgcaaagaagaattggcccaggttttaaagaagcttatccagtccaagggcaaaactccagctttcaaataccagcagctttttgaggatctacgtgggcagtctgatgcagccattacaaaagacatgtttgatgaagctttgcatgcacttgcagatgaagactacttaacagtgactggaaagactgtaaggttgctgtaa

SEQ ID NO: 5528 - protein, 858 aa, Xenopus laevis
MSSPTSTPSRRRVNVGEAVTLQLLVERKCSLLRHRKDGQKIPHQLVSFCPCQPHLQETFRVPCFLALAPSRHSAHQSELDLSSPLTYGTPSSRVEGTPRSGIRGTPARQRADLGSARKVKQVDLHSDQPAAEELVTSEQSLGQKLVIWGTDVNVAICKEKFQRFVQRFIDPLAKEEENVGLDLNEPIYMQRLEEINVVGEPFLNIDCDHLRSFDQDLYRQLVCYPQEVIPTFDMAANEIFFERYPDSILEHQIQVRPYNALKTRNMRSLNPEDIDQLITISGMVIRTSQIIPEMQESFFKCQVCAFTTRVEIDRGRIAEPSVCKHCNTTHSMALIHNRSMFSDKQMIKLQESPGDMPAGQTPHTTILYAHNDLVDKVQPGDRVNVTGIYRAVPIRVNPRVRNVKSVYKTHIDVIHYRKTDSKRLHGIDEDTEQKMFTEERVAVLKELAAKPDIYERLAAALAPSIYEHEDIKKGILLQLFGGTRKDFSHTGRGKFRAEVNILLCGDPGTSKSQLLQYVYNLVPRGQYTSGKGSSAVGLTAYVMKDPETRQLVLQTGALVLSDNGICCIDEFDKMNESTRSVLHEVMEQQTLSIAKAGIICQLNARTSVLAAANPVESQWNPKKTTIENIQLPHTLLSRFDLIFLMLDPQDETYDRRLAHHLVVLYYQSEEQLKEEHLDMAVLKDYIAYARTYVNPRLGEEASQALIEAYVDMRKIGSGRGMVSAYPRQLESLIRLSEAHAKVRFSSKVETIDVEEAKRLHREALKQSATDPRTGIVDISILTTGMSATARKRKEELAQVLKKLIQSKGKTPAFKYQQLFEDLRGQSDAAITKDMFDEALHALADEDYLTVTGKTVRLL

SEQ ID NO: 5529 - DNA, 2391 bp, Xenopus laevis
  CDS (1)..(2391)
atggaattgggaggccctgcagcagctggagacactgatatagctggacaacaactgtttaaagatgaactgtctgacaaatgtcaaaagcttttcctggagtttttcgaagagtgcaaaggtaaagatggaagtaacctttatgtctctgcagcagaagaacttattagaccagaaaggaacactttggctgtcaattttacagatattgaatactacaatcaacaactagcaacaactatacaagaagagtattacagggtctaccctcatctttgccgagctgtgcgaagttttgcaagacagatgggaaacattccggcaaataaggaattctatatagcgttttcagattttcctgcaagacaaaagattcgcgagctcagctctgccaaaattggtactttactaagaattagtggtcaagttgtcagaactcatcctgttcacccagaactggtcagtggtacatttctgtgcatggactgccaatcgattgtaaaagatgtggaacagcaatttagatatactcaaccgactatctgcaaaaatccagtctgtgccaatcgccgccgattcacattggatacaaataagtctcgctttgttgattttcagaaggtaagaattcaagagacacaggcagagttaccccgtggtgctattccacgtagtgtggaaataattctacgtgcagaagctgtggaatctgcgatggctggtgatcgttgtgatttcactgggacactcattgttgtacctgatgtctctgcttttgcagcaggagatgcccgtatggaaactggagccaaagtaacaggcggagaaggttttaactctgaaggagttcaaggcctaaaagcattgggagtaagagatctgtcctatcggttggcatttctagcctgttatgtgggtgctacaaatccacggtttggcggtaaagatttaagagaggaagaccaaacagctgaaagtataaaaaatcaaatgactgtacaagaatgggaaaaagtatttgaaatgagtcaagacaaaaatctctaccacaatttatgtacaagccttttcccaacaatacatggtaatgatgaaattaaaagaggagtcttactgatgctgtttggtggggttccaaagaccactatggaaggtacttctctgagaggagatatcaatgtgtgcattgttggagaccccagcacatctaagagccagtttttaaagcatgtagaagaattcagtcccagagcagtatatactagtgggaaagctagcagtgctgccggtttaactgctgctgttgtgaaagatgaggagtcccatgagtttgtgattgaagctggagctttaatgttggcagataatggagtttgctgcattgatgaattcgataagatggacctgaaagatcaagtggccattcatgaagctatggagcaacagaccatttccatcaccaaagcaggagtgaaggctacattaaatgcccgtacatctatcctggctgcagcaaatcctgtcggaggaagatacgaaagatccaaatcattaaagcataatgtcaatctatcagcgcccattatgtcacgatttgatctattttttattttagttgatgagtgcaatgaggtaacagattatgcaatagcacgaaggatagtagatttgcatgcaagaaatgaagaatcaatagaaagggtttattcaattgaagacattcagaggtatttgctgttcgctcgtcaattccagccaaaaataacaaaggaagctgaggaattcattgttgagcagtatcgtcgacttagacagcgtgatggcagcggagtagcaaaatcatcttggaggattacagtcagacaacttgagagtttgatacgattatctgaaagtatggctcgaatgcactgctctgatgaagttcagccaaaacatgtaaaagaagcttttagattgctaagtaaatccatcatacgtgtggacacaccagatgtcagctttgatcaaggcgaggatgaaaagaacattgaaggagagaataatggcaatttgaacaatggagaggaagcaatggaaacaaatcaggatgaaccaataaatgaaaagccatcctcaaatgctggattaaaaatgtcttttgcagagtataagcaaatctccaacttgttggttttgtacatgcagaagatggaagaaactgaagaagagtgccatctgacaacaactgacttggttaactggtatcttaaagaaatggaagctgaaatagagactgaaacagaactaatccttaaaaagcgtttaattgaaaaggtgattcacagattaatttattatgatcatattctgattagaactgaacaaatcggaattaaaaacaatggatga

SEQ ID NO: 5530 - protein, 796 aa, Xenopus laevis
MELGGPAAAGDTDIAGQQLFKDELSDKCQKLFLEFFEECKGKDGSNLYVSAAEELIRPERNTLAVNFTDIEYYNQQLATTIQEEYYRVYPHLCRAVRSFARQMGNIPANKEFYIAFSDFPARQKIRELSSAKIGTLLRISGQVVRTHPVHPELVSGTFLCMDCQSIVKDVEQQFRYTQPTICKNPVCANRRRFTLDTNKSRFVDFQKVRIQETQAELPRGAIPRSVEIILRAEAVESAMAGDRCDFTGTLIVVPDVSAFAAGDARMETGAKVTGGEGFNSEGVQGLKALGVRDLSYRLAFLACYVGATNPRFGGKDLREEDQTAESIKNQMTVQEWEKVFEMSQDKNLYHNLCTSLFPTIHGNDEIKRGVLLMLFGGVPKTTMEGTSLRGDINVCIVGDPSTSKSQFLKHVEEFSPRAVYTSGKASSAAGLTAAVVKDEESHEFVIEAGALMLADNGVCCIDEFDKMDLKDQVAIHEAMEQQTISITKAGVKATLNARTSILAAANPVGGRYERSKSLKHNVNLSAPIMSRFDLFFILVDECNEVTDYAIARRIVDLHARNEESIERVYSIEDIQRYLLFARQFQPKITKEAEEFIVEQYRRLRQRDGSGVAKSSWRITVRQLESLIRLSESMARMHCSDEVQPKHVKEAFRLLSKSIIRVDTPDVSFDQGEDEKNIEGENNGNLNNGEEAMETNQDEPINEKPSSNAGLKMSFAEYKQISNLLVLYMQKMEETEEECHLTTTDLVNWYLKEMEAEIETETELILKKRLIEKVIHRLIYYDHILIRTEQIGIKNNG

SEQ ID NO: 5531 - DNA, 2163 bp, Xenopus laevis
  CDS (1)..(2163)
atgcccagggactaccagaccgagaaagaaaaatgcaagacctttctgcaggagttttataaggatgatgaaattggaaagaaacacttcaagtatggcgtccaactggctaatattgctcacagagagcaggttgcattatacattgacctggatgacctggctgaggaggacccagagttagtggatgccatctgtgaaaatactaggaggtacaccaacctgtttgctgatgctgttcaggagctgctgcctcagtacaaagagcgagaggtagtgcataaagatgctttggatgtgtatatcgagcaccggttaatgatggagcagagaggcagagatcccaatgagatgcgggattctcaaaaccagtatccaccagagcttatgcgcagatttgaactatacttcaaagctccaagcagctcgaaagcccgtgtagtgcgagacgtcaaagcagattcaattggcaagttggtcaacattcgaggcatagtcacgagggtcacagaagtcaagcctatgatggtagtggccacttacacatgcgatcagtgtggagcagagacctaccaaccaattcaatctccaactttcatgccacttataatgtgcccaagcagagagtgtcagacaaaccgctctggtggcaggctttacttacaaacccgtggctctaagtttattaaattccaggaactgaagattcaagaacatagcgatcaggttccagtttggaacatccctcgctgtatgagtgtatatgtgcgtggggaaaacactcggcttgctcagcctggagaccatgttggtattaccggagtcttcctgccaatgctcagaactggcttccgtcagttggtacagggtctcctttcagagacataccttgaatgtcatcgtttggtgaaaatgaacaagtcggaggatgatgaacttgggacagaagagctgagtgaagaggagctgcgacagatcactgaggaagatttctatgagaagctagcagcctccattgcgcctgagatttatgggcatgaggatgtgaagaaggcccttctgctgctcttagtgggaggtgttgataattctcctcgtggaatgaagatcagagggaatattaacatctgcctcatgggtgacccaggagtagcaaaatcacagctgctttcttacattgatcgtctagcaccccgtagtcagtatacaacaggtcgaggctcttctggagttggtctcactgcagcggtaatgaaagacccagtgactggggagatgactctggaaggtggagcgttggtactggcggatcagggtgtttgctgcattgatgagtttgataagatgatggacactgacagaacagccatccacgaagtcatggagcagcagactatctccatagccaaggctggtataatgactacgttgaatgctcgttgctccattcttgctgctgctaacccagcatatgggagatacaacccaaagaagactgtggagcaaaatattcagctacctgctgctttactgtctcgatttgatgtactctggctaatccaagacaagcctgaccgggacaatgatctcagacttgctcagcatattacgtatgtccatcagcacagcaaacaaccaccatcacaattccagcctctggatatgaaactcatgcgacgttacatcactatgtgcaagcgcaagcagcctgcaataccagaagcgcttgcagattatttgacggctgcctatgtggagatgaggaaagaagccagaaccaacaaagacatgaccttcacttctgcccgaaccctgttgtctgttctgagactgtctacagccttggctcggctacgtctggaagatgtcgtggagaaagaggatgtaaatgaagccatgaggttgatggaaatgtccaaggactccttgcttggcgacaagggccacacttcaaggactcaacgcccggctgatgtgatcttttccactatccgtgagatggtcccagaaaaaggtgcccgcagtgtaaaatactcggaggctgagcaacgctgtgtctctaaaggcttcactcctgcacagtttgaggctgctttggaagagtatgaggagctcaatgtttggctggttaatcaggcccgcactaagatcacatttgtgtga

SEQ ID NO: 5532 - protein, 720 aa, Xenopus laevis
MPRDYQTEKEKCKTFLQEFYKDDEIGKKHFKYGVQLANIAHREQVALYIDLDDLAEEDPELVDAICENTRRYTNLFADAVQELLPQYKEREVVHKDALDVYIEHRLMMEQRGRDPNEMRDSQNQYPPELMRRFELYFKAPSSSKARVVRDVKADSIGKLVNIRGIVTRVTEVKPMMVVATYTCDQCGAETYQPIQSPTFMPLIMCPSRECQTNRSGGRLYLQTRGSKFIKFQELKIQEHSDQVPVWNIPRCMSVYVRGENTRLAQPGDHVGITGVFLPMLRTGFRQLVQGLLSETYLECHRLVKMNKSEDDELGTEELSEEELRQITEEDFYEKLAASIAPEIYGHEDVKKALLLLLVGGVDNSPRGMKIRGNINICLMGDPGVAKSQLLSYIDRLAPRSQYTTGRGSSGVGLTAAVMKDPVTGEMTLEGGALVLADQGVCCIDEFDKMMDTDRTAIHEVMEQQTISIAKAGIMTTLNARCSILAAANPAYGRYNPKKTVEQNIQLPAALLSRFDVLWLIQDKPDRDNDLRLAQHITYVHQHSKQPPSQFQPLDMKLMRRYITMCKRKQPAIPEALADYLTAAYVEMRKEARTNKDMTFTSARTLLSVLRLSTALARLRLEDVVEKEDVNEAMRLMEMSKDSLLGDKGHTSRTQRPADVIFSTIREMVPEKGARSVKYSEAEQRCVSKGFTPAQFEAALEEYEELNVWLVNQARTKITFV

SEQ ID NO: 5533 - DNA, 2163 bp, Xenopus laevis
  CDS (1)..(2163)
atgcccagggactaccaggccgagaaagagaaatgcaagacctttcttcaggagttttataaggatgatgaatttggaaagaaaaacttcaagtatggcgtccagctggctaatattgctcacagagagcaggttacactgtgcattgacctggatgacttggctgaggaggacccacagttggtggatgccatctgtgaaaatactcgcaggtacacaaacctctttgctgatgctgttcaggagctgctgcctcagtataaagagcgagaggtagtgcataaagatgctttggatgtgtatattgaacaccgcttaatgatggagcagaggggcagagatcccaatgagatgcgagatcctcacaaccagtatccaccagagcttatgcgcagatttgaactatacttcaaagctccaagtagctcaaaggcccgtgtagtacgagacgtcaaagcggattcgattggcaagttggttacagttcgaggcatcgtcacgagggtcacagaagtcaagcctatgatggtcgtggccacttacacttgtgaccagtgcggtgcagagacctaccaaccgattcaatctccgactttcatgccgcttataatgtgcccgagcagagagtgtcagacaaaccgttccggtggcaggctttacttgcaaacccggggctccaagtttattaagttccaggagctgaagattcaagaacatagtgatcaggttccagttgggaacatcccgcgctgtatgagtgtgtatgtgcgtggggaaaacacccgcctcgctcagcctggagaccatgttggtattactggagtcttcctgccaatgctcagaactggcttccggcaggtggtacagggtctcctttcagagacatacctcgaatctcatcgtttagtgaaaatgaacaagaccgacgatgatgaacttggcacacaagagctgagtgaagaggagctgcgacagattactgacgaagatttctatgagaagctagcagcctccattgctcctgagatttatggccatgaggatgtgaagaaagcccttcttttgctattggtgggaggtgttgaccattctcctcgtggcatgaagatcagagggaatattaacgtttgcctcatgggtgacccaggagtagcaaaatcacagctactttcttacattgatcgtcttgcacctcgaagtcagtacacaacaggtcgtggctcttctggggttggtctcactgcagcagtaatgaaagacccagtgactggggagatgactctggaaggtggagctttggtactggcagatcagggggtttgctgcattgatgaatttgataagatgatggactctgacagaacagccattcacgaagtcatggagcagcagactatctccatagcaaaggctggtataatgaccacgttgaatgctcgttgctccattcttgctgctgctaacccagcctatgggagatacaacccaaagaagactgtggagcaaaatatccagctgcctgctgccctactgtctcgatttgaccttctctggctaatacaagacaagcctgaccgggacaatgatctcagactggctcagcacattacatatgtccatcagcacagcaaacaaccgccatcacaattccagcctatggatatgaaactcatgcggcgttacatcactatgtgcaagagcaagcagcctgccattccagaatcccttgccgattatttgacagctgcctatgtggagatgagaaaagaagccagaaccaacaaagatatgaccttcacttctgccagaaccctattgtctatcctgagattgtctacagccttggctcggctgcgtctggaagatgtagtggacaaagaggatgtaaatgaggccatgaggttgactgaaatgtcaaaggactcgttgcaaggagacaagggccacgcttcaaggactcaacggccggctgatgtgatcttttcaactatccgcgagatggtcccacaaaaaggtgctcgcagtgttaaatactcggaggctgagcagcgctgtgtgtctaaaggcttcacccctgcccagtttgaggcagccttggaggagtatgaggagcttaatgtttggctggttaatcaggcccgcaccaagatcacatttgtctaa

SEQ ID NO: 5534 - protein, 720 aa, Xenopus laevis
MPRDYQAEKEKCKTFLQEFYKDDEFGKKNFKYGVQLANIAHREQVTLCIDLDDLAEEDPQLVDAICENTRRYTNLFADAVQELLPQYKEREVVHKDALDVYIEHRLMMEQRGRDPNEMRDPHNQYPPELMRRFELYFKAPSSSKARVVRDVKADSIGKLVTVRGIVTRVTEVKPMMVVATYTCDQCGAETYQPIQSPTFMPLIMCPSRECQTNRSGGRLYLQTRGSKFIKFQELKIQEHSDQVPVGNIPRCMSVYVRGENTRLAQPGDHVGITGVFLPMLRTGFRQVVQGLLSETYLESHRLVKMNKTDDDELGTQELSEEELRQITDEDFYEKLAASIAPEIYGHEDVKKALLLLLVGGVDHSPRGMKIRGNINVCLMGDPGVAKSQLLSYIDRLAPRSQYTTGRGSSGVGLTAAVMKDPVTGEMTLEGGALVLADQGVCCIDEFDKMMDSDRTAIHEVMEQQTISIAKAGIMTTLNARCSILAAANPAYGRYNPKKTVEQNIQLPAALLSRFDLLWLIQDKPDRDNDLRLAQHITYVHQHSKQPPSQFQPMDMKLMRRYITMCKSKQPAIPESLADYLTAAYVEMRKEARTNKDMTFTSARTLLSILRLSTALARLRLEDVVDKEDVNEAMRLTEMSKDSLQGDKGHASRTQRPADVIFSTIREMVPQKGARSVKYSEAEQRCVSKGFTPAQFEAALEEYEELNVWLVNQARTKITFV

SEQ ID NO: 5535 - DNA, 2670 bp, Emericella nidulans
  CDS (1)..(2670)
atgagttcaccgctccgtcagagcacatcggctgcaaaccgcggtttgggaaatctgaatcggcgaaagcgatccagagagcctgatgacgatgcttcgtccgtggttcccccttcaagcccgcccccttcttcccctcctatgttgcccttcgacgaagacgaggacgagccagatgaggaagcagaacttgacattgatgacattgaggagatggcagaggatgaggatggcattgaccttttcggagatacattcgagcgcgactatcggggcggaaaagatgaccgctaccggcacgatacattgacgacgatgagcaagaagaaatcgacattggtgcccgacgagagttggaggctcgcctggatcgaagagatcgagaacttgctcggccgccgaatgcccgcagccttcttgcaagatgacgaggacggtgatatcgatttgactgcacagccacgccgtcgcaggcacgcctacgacgaggaccgcgatgacatcgaaatggctgacgacggcctcgaagagctttccctggaggagctagtcgatatcaaatcatctaatatcacggactgggtgacacagcctcaagtgctgcgctctatttaccgagagttcaaggcctttttgacggagttcactgaccccactggtagctctgtctacggaaacaagatcaagactcttggtgaggttaactctgcctcgctcgaggtttcatatacacacttgagcagcaccaaggctgttcttgggtacttccttgccaacgagcccacagaagttctcaaggtttttgaccaggttgctctggacgttaccttgttccactaccctcaataccatgatatccacaatgaaattcacgtccggatcactgatcttcccattgtttacaccctccgccaattgcgccagtcccacctgaactgtcttgttcgtgtcagtggagtcgtcacccgccggacgggtgtcttcccacagcttaaatatgtgatgttcatctgccaaaagtgtaacatgacgttgggcccttaccagcaggagagcagctctgaagtgaaggtcacaatgtgtcagaactgtcaatctagaggcccattcactgtcagctcagagaagacagtgtaccgcaattaccagaaattaactctgcaagagtcccccggttcggtccccgccggtcgacttcccagacagcgagaagtgatcctccttgcagacctcatcgactcagccaagcctggagacgagatcgagatcaccggtatttaccgcaacagctacgacgcgcagcttaataacaagaacgggttcccagtcttcgcaacgatcatcgaggccaaccacgttatcaagtcccacgaccagcaggctggtttccaactaacagaagaagatgagcgtgaaatccgcgccttgtctcgggacccggacattgttgagaagatcatccgttcaatcgcccctagtatctacggccaccaagacgtcaagacagccgttgctctctctctcttcggtggcgtccgcaaagaaacacaaggaaaaatgtcaatccgtggagacatcaacgtcctcctcctcggtgacccaggtaccgccaaatcccagatccttaagtatgtcgaaaagactgcccatcgtgctgtcttcgcaacaggtcaaggagccagtgcggtaggtttgacagctagtgtccgtcgcgatcccttgaccagtgaatggacacttgaaggaggcgccctcgtccttgctgaccgcggcacttgcctaatcgacgaattcgacaagatgaacgatcaagaccgcacatcgattcacgaagccatggaacagcaaaccatctccatttccaaggccggtattgttacaacactccaagcccgctgcgccgtcgtcgctgccgcaaaccccatcggcggccgctacaacagcagcgccccattctctgagaacgttcaactcacagaacccatcctttcgcgtttcgacatcctctgcgtcgtgcgcgaccttgtcgacccctctgaagacgagcgccttgccagcttcgtcatcgagtctcaccaccgcgcgaacccctccaagccgctgcgtgatgaacatgggaacctcattaacgccgacggagagcggatagacgaggaaggataccgcattgatgacgacggaattcgtctcccgctccgcccagacgagatagaagcccgtaacgcggctagggacaacgacgacgagaaggaaggcgagattccccaggaacttctccggaagtacatcctctacgcgagggaacactgccgccctaagctctaccagatcgatcaggacaaggtcgcgcgtctcttcgcggacatgcgtcgcgagtctcttgctaccggcgcctacccgataacagtccgccacctcgaagccataatgcgtatcgcagaagcattctgcaagatgcgtctctcggagtactgttccgctcaggacatcgaccgcgcgatcgctgtgaccgtggactccttcatcggcagccagaaggtcagcgcgaagcgcgctctttcaagagctttcgccaaatacaccctttcccgcccaaaaccacagtcaaagcgacgagctggcatcccggcgcctgtttccttcgagaggagacctcaggcagccaggtaa

SEQ ID NO: 5536 - protein, 889 aa, Emericella nidulans
MSSPLRQSTSAANRGLGNLNRRKRSREPDDDASSVVPPSSPPPSSPPMLPFDEDEDEPDEEAELDIDDIEEMAEDEDGIDLFGDTFERDYRGGKDDRYRHDTLTTMSKKKSTLVPDESWRLAWIEEIENLLGRRMPAAFLQDDEDGDIDLTAQPRRRRHAYDEDRDDIEMADDGLEELSLEELVDIKSSNITDWVTQPQVLRSIYREFKAFLTEFTDPTGSSVYGNKIKTLGEVNSASLEVSYTHLSSTKAVLGYFLANEPTEVLKVFDQVALDVTLFHYPQYHDIHNEIHVRITDLPIVYTLRQLRQSHLNCLVRVSGVVTRRTGVFPQLKYVMFICQKCNMTLGPYQQESSSEVKVTMCQNCQSRGPFTVSSEKTVYRNYQKLTLQESPGSVPAGRLPRQREVILLADLIDSAKPGDEIEITGIYRNSYDAQLNNKNGFPVFATIIEANHVIKSHDQQAGFQLTEEDEREIRALSRDPDIVEKIIRSIAPSIYGHQDVKTAVALSLFGGVRKETQGKMSIRGDINVLLLGDPGTAKSQILKYVEKTAHRAVFATGQGASAVGLTASVRRDPLTSEWTLEGGALVLADRGTCLIDEFDKMNDQDRTSIHEAMEQQTISISKAGIVTTLQARCAVVAAANPIGGRYNSSAPFSENVQLTEPILSRFDILCVVRDLVDPSEDERLASFVIESHHRANPSKPLRDEHGNLINADGERIDEEGYRIDDDGIRLPLRPDEIEARNAARDNDDEKEGEIPQELLRKYILYAREHCRPKLYQIDQDKVARLFADMRRESLATGAYPITVRHLEAIMRIAEAFCKMRLSEYCSAQDIDRAIAVTVDSFIGSQKVSAKRALSRAFAKYTLSRPKPQSKRRAGIPAPVSFERRPQAAR

SEQ ID NO: 5537 - DNA, 2475 bp, Xenopus laevis
  CDS (1)..(2475)
atggacctggtagatccttcccagagcgccgccgcggcagccggaacacaactagtcaaggatgaagtggccgagaagtgtcagaagttgttccaggatttcctggaggagtttcggggtagcgatggggagttgaagtaccagagtgatgcagaggaactgatcaggccggagagaaatacgctgcttgtcagctttgttgatttggaacagtttaatcagcaactcgctaccaccatccaggaagagttctatagggtgtatccgtacctctgtcgagcagttaaagcctttgcccgagatcatggcaacattccacagaacaaagaattctatgtcgccttccaggagcttcctaccagacataaaattcgagagttgactacccctcgcattggttcactgctgcggatcagcggtcaggtggttcggactcacccagtccacccagaactggtcagcggaacctttctttgcttggattgccagaccttggtgagggatgtagagcagcagtttaaatacacacagccaagcatctgcaggaatccagtgtgcgcgaacagaaagaggttcatgttggatacaaacaagtccagatttgttgatttccagaaggtccgtattcaggaaacgcaggcagagcttccaagaggcagcattccacgaagtgttgaagtgatcctgcgagctgaagctgtggaatcgtgtcaggccggggataggtgtgacttcactggatctctgattgttgtgcctgatatttctcagctctcaaccccaggtgttcgtgcagagaccagctccagggtgggtggaagagaagggtatgaggcagaaggtgtacaaggtcttcgtgcccttggtgttcgagatctctcatataaactggtcttcctcgcatgctatgtctgtccaaccaacccaagatttggtgggaaggatctacatgaagaggacatgactgcagagagcatcaaaaaccagatgtccgtgaaggagtgggagaaggtgtttgaaatgagtcaagacaaaaacctttaccataacctatgcaccagcctcttcccaactgtgcatggtaatgatgaagtgaagaggggcatcttattgatgctgtttgggggtgtccctaaatcaactatggagggcacatctttacgtggagacattaatgtttgtgttgttggagatccaagtactgccaagagccagttcctcaagcacgttgaggagttcagtccccgtgcggtttacactagtgggaaagcctccactgctgccggtctgacagcagccgttgtgagagatgaagaatcccatgagtttgtgattgaagctggagcactgatgcttgctgacaatggagtttgttgtattgatgagtttgacaagatggatacaaaggaccaagtggctattcatgaggcaatggaacagcaaactatttcaattaccaaagctggtgttaaggctacactaaatgctcggacttccatccttgctgctgcgaaccctgtagggggccgctatgatagagcaaagtcacttaagcagaatgtgaacttgtctgctcccatcatgtccagatttgatctatttttcattcttgtggatgagtgcaatgaggtgacagattacgccattacccgacgtatagtggacctccattccaggattgaggaatcaattgatagagtatatacactggatgaagtcaggagatatcttctttttgccaagcaattcaaacctaagatctctaaggagtcagaagacttcatagtggagcagtacaagcgactgaggcagcgagatggctcaggagttactaaatctgcttggaggattactgtacggcagctggaaagcatgatcagattgtctgaaggcatggcaaggatgcactgcagtgatgaggtgcagccaaaacatgtaaaggaagcatttcggttattgaacaaatccatcatcagggtggaaactccggatgtcaacctcgatcaagaggatgaacatgaggtagaggaacctcaggagggcattaatggagatgctgatgttcccaatggtgttaatggccacataaatggaattaatgggcatgctgaggagacgaatgctgctcccccaaagccatctttgcgtcttaattttgctgaatacaaaaggatctccaacttgctggtcctgcagttgaggaagattgaagatgaagatgatgaaaatgaaacttctcagagaaagagtgaactcattaactggtacctgaaggagattgagtcagaaattgactcggaagaggagctcgttaataggaagcaaatcattgacaaagttattcacagacttgtgcactatgaccaaattttgattgcgctcatacaaactggattaaaaggcactgaagacgagaacgtagcaaaagaggatccttaccttgtggttaatcccaactacatactggaagattaa

SEQ ID NO: 5538 - protein, 824 aa, Xenopus laevis
MDLVDPSQSAAAAAGTQLVKDEVAEKCQKLFQDFLEEFRGSDGELKYQSDAEELIRPERNTLLVSFVDLEQFNQQLATTIQEEFYRVYPYLCRAVKAFARDHGNIPQNKEFYVAFQELPTRHKIRELTTPRIGSLLRISGQVVRTHPVHPELVSGTFLCLDCQTLVRDVEQQFKYTQPSICRNPVCANRKRFMLDTNKSRFVDFQKVRIQETQAELPRGSIPRSVEVILRAEAVESCQAGDRCDFTGSLIVVPDISQLSTPGVRAETSSRVGGREGYEAEGVQGLRALGVRDLSYKLVFLACYVCPTNPRFGGKDLHEEDMTAESIKNQMSVKEWEKVFEMSQDKNLYHNLCTSLFPTVHGNDEVKRGILLMLFGGVPKSTMEGTSLRGDINVCVVGDPSTAKSQFLKHVEEFSPRAVYTSGKASTAAGLTAAVVRDEESHEFVIEAGALMLADNGVCCIDEFDKMDTKDQVAIHEAMEQQTISITKAGVKATLNARTSILAAANPVGGRYDRAKSLKQNVNLSAPIMSRFDLFFILVDECNEVTDYAITRRIVDLHSRIEESIDRVYTLDEVRRYLLFAKQFKPKISKESEDFIVEQYKRLRQRDGSGVTKSAWRITVRQLESMIRLSEGMARMHCSDEVQPKHVKEAFRLLNKSIIRVETPDVNLDQEDEHEVEEPQEGINGDADVPNGVNGHINGINGHAEETNAAPPKPSLRLNFAEYKRISNLLVLQLRKIEDEDDENETSQRKSELINWYLKEIESEIDSEEELVNRKQIIDKVIHRLVHYDQILIALIQTGLKGTEDENVAKEDPYLVVNPNYILED

SEQ ID NO: 5539 - DNA, 2454 bp, Drosophila melanogaster
  CDS (1)..(2454)
atggatgtggcagatgctcaggttggccacgtgcgcgtaaaggacgaggtgggcattcgggcccagaagttgtttcaggatttcctcgaggaattcaaggaggatggcgagatcaagtacacgcgcccagccgccagcttagaatccccggatcgctgcaccctggaggtcagcttcgaggatgtggagaaatacgatcagaatctggccaccgccattatcgaggagtactaccacatctatccgttcctctgccaatccgtttcgaactacgtgaaggaccggattggactgaagacccagaaggattgctatgtggccttcacggaggtgccgacgcgtcacaaggttcgcgatctgaccacctccaaaatcggcaccctcatccgcatctccggccaggtggtgcgcacccatcccgtacatccggagctcgtttccggcgtcttcatgtgcctcgattgccagacggagattcggaacgtagagcagcagttcaagttcaccaatcccaccatttgccgcaatcccgtgtgctccaatcgcaagcgtttcatgctggatgtggagaagagtctgttcttggactttcaaaagattcgcatccaggagacgcaagccgagctgccgcgtggctgtattccccgcgcggtggagattatcctgcgctcggagctggtggagaccgttcaggctggcgatcgctatgatttcacgggcactctgattgtggtgcccgatgtgagtgtcctggccggagtgggcacacgggcggagaacagttcgcgccacaagcccggcgagggcatggatggcgtcactggcctgaaggcactgggcatgcgagagctcaactatcggatggccttcctcgcctgcagtgttcaggcaacgacagcacgttttggcggcaccgatctgcccatgtcggaggtgacagccgaggatatgaagaagcagatgacagatgccgagtggcacaagatctatgagatgtccaaggatcgcaatctctaccagaatctaattagcagcctctttccctcgatctacggcaacgatgaggtcaagcgtggcattcttctgcagcaattcggtggcgttgcgaagaccaccaccgaaaagacatcgcttcgtggcgacatcaatgtgtgcatcgttggcgatcccagcacggccaagtcacagttcctcaagcaggtatccgacttctcgccgcgtgcgatctacacctcgggcaaggcatcctcggcagctggcttaaccgctgcggttgttcgcgacgaggagtcctttgactttgtcatcgaggcgggcgccctcatgttggccgacaatggcatttgctgcattgacgagttcgataagatggatcagcgcgatcaggtggccattcacgaggccatggaacagcagaccatatcgattgcacgcgccggcgtacgagccacactcaatgcgcgcacttcgattctggccgccgccaatcccattaatggtcgctacgatcgctccaagagtttgcagcaaaatattcagctatcggcaccgattatgtcgcgattcgatctgttcttcattctcgtggacgaatgcaatgaggtggtggactatgcaattgctcgcaagatcgttgatctgcactcgaagatcgaggagtccgtggagcgggcatatacgcgcgaagaggtccttcgctatgtgacatttgcgcggcaatttaagccggttattagccaggaggccggacacatgctggtcgagaactatggccatttgaggcagcgcgatacgggcacgtcgggcaggagcacctggaggataacggtgcgtcagctggagtccatgattcgactgagcgaggccatggccaagctggagtgctcgaatcgcgtgctggagcgacacgtcaaggaggccttccgtttgctcaacaagtccatcattcgcgtggagcaaccggatattcatttggatgacgacgagggtttggacatggacgatggcattcagcacgacatcgacatggagaacaatggagcagcggccaatgtggatgagaacaatggtatggacacctcgggcagcggcgccgtgcagaagaagaagttcacgctttcgttcgaggactacaagaatctgtccaccatgctggtgctgcacatgcgcgccgaggaggcgcgctgcgaggtggagggcaacgatacgggcatcaagcgcagcaatgtggtcacctggtatctggagcaggtggcggaccaaatcgaatccgaggatgagttaatttctcgcaaaaatctcatcgagaagctgatcgatcgcctcatctatcacgatcaggtcattattccgctcaagacatccacgctgaagccgagaattcaggtacaaaaggatttcgtggaggaggacgatcccctgctggtggtgcatcccaactacgttgtggagtga

SEQ ID NO: 5540 - protein, 817 aa, Drosophila melanogaster
MDVADAQVGHVRVKDEVGIRAQKLFQDFLEEFKEDGEIKYTRPAASLESPDRCTLEVSFEDVEKYDQNLATAIIEEYYHIYPFLCQSVSNYVKDRIGLKTQKDCYVAFTEVPTRHKVRDLTTSKIGTLIRISGQVVRTHPVHPELVSGVFMCLDCQTEIRNVEQQFKFTNPTICRNPVCSNRKRFMLDVEKSLFLDFQKIRIQETQAELPRGCIPRAVEIILRSELVETVQAGDRYDFTGTLIVVPDVSVLAGVGTRAENSSRHKPGEGMDGVTGLKALGMRELNYRMAFLACSVQATTARFGGTDLPMSEVTAEDMKKQMTDAEWHKIYEMSKDRNLYQNLISSLFPSIYGNDEVKRGILLQQFGGVAKTTTEKTSLRGDINVCIVGDPSTAKSQFLKQVSDFSPRAIYTSGKASSAAGLTAAVVRDEESFDFVIEAGALMLADNGICCIDEFDKMDQRDQVAIHEAMEQQTISIARAGVRATLNARTSILAAANPINGRYDRSKSLQQNIQLSAPIMSRFDLFFILVDECNEVVDYAIARKIVDLHSKIEESVERAYTREEVLRYVTFARQFKPVISQEAGHMLVENYGHLRQRDTGTSGRSTWRITVRQLESMIRLSEAMAKLECSNRVLERHVKEAFRLLNKSIIRVEQPDIHLDDDEGLDMDDGIQHDIDMENNGAAANVDENNGMDTSGSGAVQKKKFTLSFEDYKNLSTMLVLHMRAEEARCEVEGNDTGIKRSNVVTWYLEQVADQIESEDELISRKNLIEKLIDRLIYHDQVIIPLKTSTLKPRIQVQKDFVEEDDPLLVVHPNYVVE

SEQ ID NO: 5541 - DNA, 2154 bp, Drosophila melanogaster
  CDS (1)..(2154)
atggctcgacgagattatgcccaagaccgagaatctatcaagaccttcctttcggaattctgcaagtgcgacgatgatggcaaaaaggagtttgtctacggatctcagctggtgaagctagcccatcgagagcaagttctgatcaccatcgatctggatgatctggcggaattcaatgaaagtctcgcggaggcggtggtcgacaattgtcggcgatacacgtccatattcagcgatgtaattgctgaactcctgcccagctacaaacagcaggaggtacacgccaaggatgctctggatgtgtacattgagcaccgcctgatgatggagtcccgcaccaggaatcccatggaacagcgcgatgagcggaactctttcccctcggagctgatgaagcgattcgaggtgggcttcaaaccactgtccacagagaaggcgcactctattcgcgaggttaaggcccagcacattggtaaactggtcaccgttcgcggcattgttacacgctgcacggaggttaagcccatgatggtggttgccacctacacatgcgatcgctgtggctcggagacgtatcagccagttaactcgctatccttcacgcccgtgcacgattgcccgtcggatgattgccgagtgaacaaagcgggaggtcgtctgtatctgcagacccgcggctccaagttcgtcaagttccaggaggtcaaaatgcaggagcacagcgaccaggtgcccgtgggccacattccgatgaccatcatgtgcaggggtgaggtcactcgaatggcccagcctggggatcacattgtggtctctggagtgttcttgccactaatgcgcacaggtttcgctcagatgattcagggtttgctctcggagacattccttcaagctcaccgcatcatctgtatcaacaagaacgacgagatttcggacaaggatgccgagctgactccagaagagctggaggaattggcccaggatgacttctacgagcgcttggccaccagcttggcacccgaaatctatggccatttggatgttaagaaagcgctgctcttgctgttggtcggaggagttgacaagcggcccgatggcatgaagattcgtggcaacattaacatctgcctgatgggagatcccggtgtggccaagtcgcagctgctgggctacattagccgattggccgtgcgatcgcagtacaccacagggcgaggttcttcgggggtgggtcttaccgctgcggtcatgaaggaccctctcacaggcgagatgacattggaaggaggagctcttgtgctggctgatcagggagtctgctgcattgatgagttcgacaagatggcggatcaggatcgtacagccattcacgaggtgatggaacagcagaccatttcgatagccaaagcaggcatcatgacgaccctaaacgctcgcgtttccatcctggccgctgctaatcccgcttttggacgctacaatcctcgtcgtaccgtggagcagaacattgagcttcccgcagccctgctctcacgtttcgatctgctgtggctcatccaggataaaccggatcgcgataatgatttgcgcttggccaagcacataacctatgtgcatagccacagcaaacagccacccactcgagtaaaggctctggacatgaatcttatgcggcgctacattaacctgtgcaagcgcaagaatccaactattccggatgagctcaccgactacattgtgggagcttatgtggagttgcgtcgggaggcgcgcaaccagaaggacatgaccttcacctcggcacgtaacttgttgggaatcctgcgattgtccaccgccttggcatggttgcgtctttccgataccgtggagaaagatgatgtggctgaagcactacgtttgctggagatgtctaaggactcactcaaccaaatccacgagcaccagaagggacacgtacccaacacaacggatcgaatctttgccatcgttcgtgaactggctggctctggaaaggcagtcaaaatctcccacatcatcgaccgctcgacaaccaaaggattcaaacccgaccaggtggacaaatgcatcgatgattacgaggagctcaatgtctggcaggtcacatggacgcacgagatcacattcatgtag

SEQ ID NO: 5542 - protein, 717 aa, Drosophila melanogaster
MARRDYAQDRESIKTFLSEFCKCDDDGKKEFVYGSQLVKLAHREQVLITIDLDDLAEFNESLAEAVVDNCRRYTSIFSDVIAELLPSYKQQEVHAKDALDVYIEHRLMMESRTRNPMEQRDERNSFPSELMKRFEVGFKPLSTEKAHSIREVKAQHIGKLVTVRGIVTRCTEVKPMMVVATYTCDRCGSETYQPVNSLSFTPVHDCPSDDCRVNKAGGRLYLQTRGSKFVKFQEVKMQEHSDQVPVGHIPMTIMCRGEVTRMAQPGDHIVVSGVFLPLMRTGFAQMIQGLLSETFLQAHRIICINKNDEISDKDAELTPEELEELAQDDFYERLATSLAPEIYGHLDVKKALLLLLVGGVDKRPDGMKIRGNINICLMGDPGVAKSQLLGYISRLAVRSQYTTGRGSSGVGLTAAVMKDPLTGEMTLEGGALVLADQGVCCIDEFDKMADQDRTAIHEVMEQQTISIAKAGIMTTLNARVSILAAANPAFGRYNPRRTVEQNIELPAALLSRFDLLWLIQDKPDRDNDLRLAKHITYVHSHSKQPPTRVKALDMNLMRRYINLCKRKNPTIPDELTDYIVGAYVELRREARNQKDMTFTSARNLLGILRLSTALAWLRLSDTVEKDDVAEALRLLEMSKDSLNQIHEHQKGHVPNTTDRIFAIVRELAGSGKAVKISHIIDRSTTKGFKPDQVDKCIDDYEELNVWQVTWTHEITFM

SEQ ID NO: 5543 - DNA, 2460 bp, Drosophila melanogaster
  CDS (1)..(2460)
atggcccacgagggggagcagttcatcaaggacatacaacgcgagtatgtggatttcctggacgacgaggaggatcagggcatctatgcgggccacgtcaaggacatgatcgcggagaaaagcaagcgcctgatcgtgaatgtcaacgatctaaaacgcaagaatccgcaacgtgcattggggctactgagcaacgcggcggatgagcagctggcctttggcagggcgctcaaggagtatgcgtccacggttgatccgggctatgccaaaatgcatgaggatctgtttgtcggcttcgagggctgctttggcaatcggcatgtgacgccgcgctccctcacctccatctatctgggcaacatggtgtgcgtggagggcattgttaccaaggtatcgctgattcgtcccaaggtggtgcgctgcgttcactattgccccaatacgcgtaaggtaatggagcgcaaatacaccgatctcacatcgttcgaggctgtgccatctggcgctgcctatcccacaaaggacgaggatggcaatctgctggagaccgaatacggtttgtccgtttacaaggatgaccagacgctgaccattcaagagatgcccgagaaggcgccggctggccaattgccgcgttcggtggatattgtgtgcgacgacgatctcgtggatcgctgcaagcccggcgatcgtgtacagattgtgggcagctatcgctgtttgccgggcaaacgcggtggctacacctcgggcacgttccgcaccgtgctgctggccaacaatatatcgcagctcagcaaggagagcaatttggacatatcgcgcgaagacatcatgctgtgcaagaagctagcgaagaataacgacatcttcgagctgctcagcaagagtttggcgccctcgattcatggacatgcctatgtgaagcaggccattctttgcctgctgctcggcggcgttgagaagatcctgccgaatggcacacgcctgcgtggcgatattaatgtcttgcttatcggcgatccttcggtggccaagtcgcagctactgcgctacgtcttgaatacggcaccaagggccataccgacaacgggtcgcggatccagcggcgtcggtctgacggcggcggttaccacggatcaggagaccggtgagcggcgattggaggcgggcgccatggtcctggcggatcgcggtgtcgtctgcatcgatgagtttgacaagatgagcgacatcgatcgcacagccattcacgaggtgatggaacagggtcgtgttaccatttccaaagcgggcatccatgcctcgctcaatgctcgctgctccgttttggcagccgctaatccggtgtacggaaggtatgatcaatataagacgccgatggaaaatattggactgcaggattcgctgctttcgcgtttcgatttgctcttcgttatgctggacgtgattgacagcgatgtggatcaaatgatttcggaccatgtggtgcgcatgcatcgctatcgcaatcccaaggaggccgacggcgagcccttgtccatgggcagctcctatgcggactccttgtcctttgtttccagcagcgaggagaaaaaggacaccgaggtgtacgaaaagtacgatgccctgctgcatggcaagtcgcgtctgcgtcacgagaagatcctatccgtggagttcatgcgcaagtacatacacattgccaagtgcatgaagcccaaattgggcgagcaggcctgcgaggcgattgccaatgagtattcgcgcctgcgctcccaggaggcggacgaaacggatgtggcacgcacgcagccaataacggcccgtaccctggagaccctcatccgtttgtccacggcccatgcccgggcacgcatgtccaaatcggtgaccatcgacgatgcccatgcggccatcgagctggtacagtttgcctactttaagaaggtgctggataaggatcgccccagcaagcgtcgtcgcaacagcggctccgatgcggaggatgacaacggtgaggcatctagccagcgctcaccatcgcgacgctccaaacgcacacgcacagcgaccgtcggtgccgatagcgatgaggaggatattgagccaccacagccggatgctggcgatttgacgcgtcgcgaaacgcgtcgtctgctgcccgctcgctcggtcgccatgctgatggccagcccctccagtgaggagcagtcggtggccacatcgaccacggagccggccatcattagcgatgcccgcctgggcgagttcaagaacaatttgcagcgactgtttcgcgaggcacgcgaacagagcttggcgctggccaggatcaccacggccatcaacgttggcagccaggagccgttcaccgctggcgccctcgaggccgccgtgcatcgcatgaccgaggacaatcagatcatggtcgccgacgatatagtctttctcatctga

SEQ ID NO: 5544 - protein, 819 aa, Drosophila melanogaster
MAHEGEQFIKDIQREYVDFLDDEEDQGIYAGHVKDMIAEKSKRLIVNVNDLKRKNPQRALGLLSNAADEQLAFGRALKEYASTVDPGYAKMHEDLFVGFEGCFGNRHVTPRSLTSIYLGNMVCVEGIVTKVSLIRPKVVRCVHYCPNTRKVMERKYTDLTSFEAVPSGAAYPTKDEDGNLLETEYGLSVYKDDQTLTIQEMPEKAPAGQLPRSVDIVCDDDLVDRCKPGDRVQIVGSYRCLPGKRGGYTSGTFRTVLLANNISQLSKESNLDISREDIMLCKKLAKNNDIFELLSKSLAPSIHGHAYVKQAILCLLLGGVEKILPNGTRLRGDINVLLIGDPSVAKSQLLRYVLNTAPRAIPTTGRGSSGVGLTAAVTTDQETGERRLEAGAMVLADRGVVCIDEFDKMSDIDRTAIHEVMEQGRVTISKAGIHASLNARCSVLAAANPVYGRYDQYKTPMENIGLQDSLLSRFDLLFVMLDVIDSDVDQMISDHVVRMHRYRNPKEADGEPLSMGSSYADSLSFVSSSEEKKDTEVYEKYDALLHGKSRLRHEKILSVEFMRKYIHIAKCMKPKLGEQACEAIANEYSRLRSQEADETDVARTQPITARTLETLIRLSTAHARARMSKSVTIDDAHAAIELVQFAYFKKVLDKDRPSKRRRNSGSDAEDDNGEASSQRSPSRRSKRTRTATVGADSDEEDIEPPQPDAGDLTRRETRRLLPARSVAMLMASPSSEEQSVATSTTEPAIISDARLGEFKNNLQRLFREAREQSLALARITTAINVGSQEPFTAGALEAAVHRMTEDNQIMVADDIVFLI

SEQ ID NO: 5545 - DNA, 2199 bp, Drosophila melanogaster
  CDS (1)..(2199)
atggaaggcttcgacgatgcgggtgtgttcttttcggacaatttcggcggagataaccagcaggatgcgcaaatcaacttgcaggcggtaaagaagaagtacaaggagttcatccggacatttaacgaggagaactttttctacaaataccgtgacaccctgaagaggaactatcttaatggtcgctacttcttggagattgagatggaggatttggtgggcttcgatgagaccttggctgacactgacaagcagccgaccgagcatttggaaatcttcgaggaggctgcccgggaggtagccgacgagatcacagctccccggccggagcacgaggaacatatgcacgacatccagattcttctgagctccaatgcgaatcccaccaacatacgacagttgaagtcggactgcgtatccaagctggttaagatcgccggaatcattgtcgcagcctcaggaatcagtgccaaggctacgcggatgtctatccaatgcctgtcctgcagcacggtcataccgaatctcaaagtgaatccaggtttggagggctacgccctacccaggaagtgcaacacggagcaggcgggcagacccaagtgcccgctggaccccttcttcatcatgccggacaagtgcaagtgcgtcgatttccagacccttaagttgcaagagctccccgactttgtgccacagggtgagattcctcgccacttgcagctcttctgcgatcgctcgctctgtgaacgcgtggtgcccggcaatcgcgtgcttatccagggcatatactccattcgcaaggtgggcaaaccctcgcgtcgggatggtcgcgagaaagccgtcgttggagtccgtgctccttacatgagggtggtgggcatcaccgtcgactcagagggcgtgggtgccatctcccgatacagcaacatcacatccgatgaggaggagcacttgcggcgaatggccgcctctggggacatctacgaacgtctctcacagtcactggcgcccagcatcttcggctctcgggatatcaagaaagctataacttgtatgctttttggcgtgtctcgtaagcgtttaccggatggtctgtgccgtcgaggcgacattaacgtcttactgctgggagatcctggtactgccaagtcacagttgttaaagtttgtggagaaggtggcacccatagcagtctacacttcgggcaaaggctccagtgcggctggtctcacggcttcggttatgaaggatcctcaaacgcgtaactttgtcgtggagggtggagccatggtgctggccgatggaggcgtggtttgtattgatgagttcgacaaaatgcgagaggatgatcgtgtggccattcacgaggccatggaacagcagacaatatccattgcaaaagccggcatcacgaccaccttgaactcacgctgttcggtcttggcagctgccaactccattttcggtcgatgggacgacaccaagggcgaggagaacattgactttatgcccacaattctctcccgtttcgacatgattttcattgtaaaggatatccacgatgagtcgcgggacattacgctggccaagcacatcatcaacgtccatctgagctctaacaagtcagctccttcagagccggctgagggtgagatatcgctgtcgacgttcaagaagtatattcactactgccgaactcattgcggtccgcgcctgagcgaagctgccggcgagaagctaaagagccgctacgtgcttatgcgcagtggagccggccagcaggagaaggcatctgacaagcggctaagcattcccatcactgtgcgtcagttggaggctgtcatccgcatttcggagtcgctggcaaagattcgtctgcaaccgttcgccacagatgagcacgtgaacgaagcacttcgacttttccaagtgtctacccttgatgctgcgatgactggcagcttggctggagccgaaggattcacgaccgaggaggaccaggaaacactcaaccgcatcgaaaagcaattgaaacgtcgctttgcaattggatctcaagtatcggagcagaatatcttacaggactttttgcgtcagaaatacgaagaacgcacggtaatgaaggtaattcataccatgatccgacgtggagagctgcagcaccggatgcaacggaagatgctctatcgaatttgctaa

SEQ ID NO: 5546 - protein, 732 aa, Drosophila melanogaster
MEGFDDAGVFFSDNFGGDNQQDAQINLQAVKKKYKEFIRTFNEENFFYKYRDTLKRNYLNGRYFLEIEMEDLVGFDETLADTDKQPTEHLEIFEEAAREVADEITAPRPEHEEHMHDIQILLSSNANPTNIRQLKSDCVSKLVKIAGIIVAASGISAKATRMSIQCLSCSTVIPNLKVNPGLEGYALPRKCNTEQAGRPKCPLDPFFIMPDKCKCVDFQTLKLQELPDFVPQGEIPRHLQLFCDRSLCERVVPGNRVLIQGIYSIRKVGKPSRRDGREKAVVGVRAPYMRVVGITVDSEGVGAISRYSNITSDEEEHLRRMAASGDIYERLSQSLAPSIFGSRDIKKAITCMLFGVSRKRLPDGLCRRGDINVLLLGDPGTAKSQLLKFVEKVAPIAVYTSGKGSSAAGLTASVMKDPQTRNFVVEGGAMVLADGGVVCIDEFDKMREDDRVAIHEAMEQQTISIAKAGITTTLNSRCSVLAAANSIFGRWDDTKGEENIDFMPTILSRFDMIFIVKDIHDESRDITLAKHIINVHLSSNKSAPSEPAEGEISLSTFKKYIHYCRTHCGPRLSEAAGEKLKSRYVLMRSGAGQQEKASDKRLSIPITVRQLEAVIRISESLAKIRLQPFATDEHVNEALRLFQVSTLDAAMTGSLAGAEGFTTEEDQETLNRIEKQLKRRFAIGSQVSEQNILQDFLRQKYEERTVMKVIHTMIRRGELQHRMQRKMLYRIC

SEQ ID NO: 5547 - DNA, 3503 bp, Mus musculus
  CDS (135)..(2723)
gctcctgggtggcgcagaaccctgactcgccgttttgtgcgcgtttgcaactaacccggatccgaggtacgagaggtcccggagcgggacaactgagagccagatttcttttgtcgcgcagcaaccacagcaccatgtcgtccccggcatccaccccgagccgccgcagcagccgacgcggacgagtcaccccaacccagtcccttcgaagtgaggaaagcaggtcgtcacccaatcggagacgtagaggcgaagattcttccaccggagagctactgccaatgcccacctcaccaggagccgacctgcagagcccacctgcacagaatgccttgttttccagccctcctcagatgcattctttagctattcctttggactttgatgttagttcaccattgacatatggcactcccagctcgcgagtggaaggaaccccaagaagtggggtgagaggcacacctgtaaggcagaggccagatctgggctcagcacgaaagggtttgcaggtggatctgcagtctgatggcgcagcagcagaagacatcgtaccaagtgaacagtctctaggccaaaagcttgtgatttggggaacagatgtgaatgtggcaacatgtaaagagaattttcagagattccttcagtgttttactgatcctctggccaaagaagaagaaaatgttggcatagatattactcaacctttgtacatgcaacaacttggagagattaatattacaggagagccatttttaaatgtgaactgcgaacacataaaatcatttagcaaaaatctgtatagacagctcatctcctacccacaggaggttataccaacctttgacatggctgtcaatgagatcttctttgaccgttatcctgactccatcttagaacatcagattcaagtcagaccttttaatgcgttgaagacaaagagtatgagaaacttgaatccagaagacattgatcagctcatcaccatcagtggcatggtcatcagaacatcacagctgattccggagatgcaggaggcctttttccaatgccaagtctgtgcccacaccacccgggtggagatagatcgaggcagaattgctgagccctgcagttgtgtgcactgccacactacccacagcatggcactgatccacaaccgatcattcttctctgacaagcaaatgatcaaacttcaagagtctcctgaagacatgcctgctgggcagacacctcacactattgtcctttttgcccacaatgaccttgttgacaaggttcaaccaggggacagagtgaacgtcacaggcatatatcgagcagtaccaattcgagttaatccaagagtgagcaacgtgaagtctgtctataaaacccacattgatgtcattcattatcggaaaacggatgcaaaacgtctgcatggccttgatgaagaagcagaacagaaacttttttcagagaaacgtgtgaaattgcttaaggaactttccaggaagccagatatttatgagcggcttgcttcagccttggctcccagcatttatgaacatggagatatcaaaaagggaatcttacttcagctctttggtggaacaaggaaggatttcagtcacactgggaggggtaaattccgtgctgagatcaacatccttctgtgtggggaccctggcaccagcaagtcccagctgctacagtatgtgtacaacctggtccccagaggccagtacacgtctggaaaaggctccagtgcggtcggcctcaccgcctatgtgatgaaagaccctgagaccaggcagcttgtcctccagacaggtgccctcgtcctgagtgacaatgggatatgctgcatcgatgagtttgacaaaatgaatgaaagcacaaggtctgtgctgcatgaggtcatggaacagcagactctgtccattgcaaaggctgggatcatctgtcagctcaatgcgcgcacctctgtcctggcagcagcaaatcctattgagtctcagtggaatcctaaaaaaacaaccattgaaaatatccaactaccgcacacattgttgtcaaggtttgatctcattttcctcatgctagaccctcaggatgaggcatatgaccggcgtctagctcatcacctggtttcattgtactaccaaagtgaggagcaagtggaggaggagttcctggacatggccgtgctgaaagactacattgcatatgcccatagtaccatcatgccccgactgagtgaggaggccagccaggctctcattgaggcttatgtaaacatgaggaagattgggagtagccgggggatggtttctgcttaccctcgacagctagagtcattaattcgcttagcagaagcccatgctaaagtaagattttcaaacaaagttgaagcaattgatgtggaagaggcaaaacgcctccaccgggaggctctgaagcagtctgcaactgaccctcgtactggcattgtggatatttctattcttactacaggaatgagtgccacttctcgtaaacggaaagaagaattagctgaagcattgagaaaacttattttatctaagggtaaaacaccagccttaaagtaccaacagctgtttgaggatattcggggacagtctgacacagcaattaccaaggacatgtttgaagaagccctgcgagctttggctgatgatgatttcctaacagtgactgggaagactgtccgcctgctctgagctgcatggccctcggactagagtcactcactgttgttattgctgcaaaaggagtctgaaaggcagtattccactatataaacctcttctattcctggaatgtattttgttagtaaatgtatgttttcacctttttttaacattttaaattatcaacatatagtagagtttatattctcaatatgccatattttttaagcagcttgcttcttacctgtttgtacacagagagcctaagcccagttttggaggttttttttaatgtaggggctgtgcctttgttgtgttgcaatgctggggaggaaggtaagagtaccatgcatgctgtatgtagaggctatgtccttactgtgtggagcattgtgtgcttggtataactggcagccgtacatcctttactgtgatatgatgggctaatgatttttatagcacctggacttaactttctttacagagactttttcccataactattattagaacaaagatatgcttgaaaaattattaaatcatgttgccttctgttttttcctaatatgtaaaacattttcctaaataaatgatagaaaagtaatacttggtttaaaattatttctcattaagagcagaactttgctaaagactatattttttgaaatcataatagtgctggataggttataaaaaaatcaaggtatgaatttcattaatttttatagatccttagattattagtttcaaagccattgtagcattaaatcttgtgtaaatattacaataaatctctaaaccatttgaatt

SEQ ID NO: 5548 - protein, 862 aa, Mus musculus
MSSPASTPSRRSSRRGRVTPTQSLRSEESRSSPNRRRRGEDSSTGELLPMPTSPGADLQSPPAQNALFSSPPQMHSLAIPLDFDVSSPLTYGTPSSRVEGTPRSGVRGTPVRQRPDLGSARKGLQVDLQSDGAAAEDIVPSEQSLGQKLVIWGTDVNVATCKENFQRFLQCFTDPLAKEEENVGIDITQPLYMQQLGEINITGEPFLNVNCEHIKSFSKNLYRQLISYPQEVIPTFDMAVNEIFFDRYPDSILEHQIQVRPFNALKTKSMRNLNPEDIDQLITISGMVIRTSQLIPEMQEAFFQCQVCAHTTRVEIDRGRIAEPCSCVHCHTTHSMALIHNRSFFSDKQMIKLQESPEDMPAGQTPHTIVLFAHNDLVDKVQPGDRVNVTGIYRAVPIRVNPRVSNVKSVYKTHIDVIHYRKTDAKRLHGLDEEAEQKLFSEKRVKLLKELSRKPDIYERLASALAPSIYEHGDIKKGILLQLFGGTRKDFSHTGRGKFRAEINILLCGDPGTSKSQLLQYVYNLVPRGQYTSGKGSSAVGLTAYVMKDPETRQLVLQTGALVLSDNGICCIDEFDKMNESTRSVLHEVMEQQTLSIAKAGIICQLNARTSVLAAANPIESQWNPKKTTIENIQLPHTLLSRFDLIFLMLDPQDEAYDRRLAHHLVSLYYQSEEQVEEEFLDMAVLKDYIAYAHSTIMPRLSEEASQALIEAYVNMRKIGSSRGMVSAYPRQLESLIRLAEAHAKVRFSNKVEAIDVEEAKRLHREALKQSATDPRTGIVDISILTTGMSATSRKRKEELAEALRKLILSKGKTPALKYQQLFEDIRGQSDTAITKDMFEEALRALADDDFLTVTGKTVRLL

SEQ ID NO: 5549 - DNA, 3294 bp, Mus musculus
  CDS (55)..(2796)
gcttgttttcgcgcgaaaaccggtggcagctggtgcggtggagctagcgcagacatggcggagtcttctgagtctctctcagcatctagccctgcccgtcagcggcgccggatcagtgatcccctcacctccagcccaggccgcagctccagacgtgctgacgccctgacctccagccctggcagagacctccccccatttgaagatgagtctgaggggctgctgggcacagaggggcccatggaggaagaagaggatggagaggaactcattggtgatggcatggagagagactaccgtcccattccggagctcgatgtctacgaggccgagggattggccctggatgatgaagatgtggaggagctgacagccagtcagagagaggcagctgagcggaccatgaggcagcgggaccgtgaggctggcagaggcctgggacgcatgcgccgggggctgctctatgacagcagcgaggaagatgaggagcggcctgcccgtaagcgccgccacgtagaacgcgccacagaggatggcgaggaggatgaagagatgatcgagagtattgagaatctggaggacctcaagggccactcggtgcgcgagtgggtgagcatggcagggcccaggctggagatccaccaccgcttcaagaacttcctgcgcacccacgtggacagccatggccacaacgtcttcaaggagcgcatcagtgatatgtgcaaagagaaccgtgagagtttggtggtaaattatgaagacctggcagcccgggagcacgtgttggcatacttcctgccggaagcaccggctgagttgctgcagatctttgacgaggctgccctggaggtcgtgttggccatgtaccctaaatatgaccgtatcaccaaccacatccatgtgcgcatctcccacctgcctctggtggaggagctgcgttcactgaggcagttgcacctgaaccagctgatccgtaccagtggcgtggtgaccagctgcaccggagtcctgccccagctcagcatggtcaagtacaactgtagcaagtgcaactttgtactggggcctttctgccagtctcagaatcaggaggtgaagcctggctcctgccctgagtgccagtctgctgggccctttgagatcaacatggaggagaccatctatcagaactaccaacgtatccgcatccaggagagtcccggcaaggtggcggctggccgactgccccgttccaaggatgccattctcctcgctgatctggtggacagctgcaagccaggggacgagatagagctgaccggcatttaccataataactatgacggctcgcttaacaccgccaacggctttccagtctttgccactattatcttggccaaccatgttgccaagaaggacaacaaagtagctgtgggggagctcaccgatgaggacgtgaagatgatcaccggtctctccaaggatcagcaaattggagagaagatctttgccagcattgcaccctccatctatgggcatgaagacatcaagagaggcctggctctggccctgtttggaggggagcccaagaacccaggtggaaagcacaaggttcgaggtgacattaatgtgctcttgtgtggggaccctggcacagcaaagtcccaattcctcaaatacatcgagaaagtgtctagccgtgccatcttcaccactggccagggtgcgtcagcagtgggtctcaccgcgtacgttcagcggcatcccgtcagcagagagtggaccttagaggcgggagccctggttctggctgaccggggggtgtgtctcattgacgagtttgacaagatgaatgaccaggacaggaccagcatccacgaggccatggaacagcaaagcatctccatctccaaggctggcatcgttacctcgctgcaagcccgctgcactgtcatagctgctgccaaccccataggaggccgctacgacccttcactgaccttctcagagaatgtagacctcacagagcccatcatttcccgctttgatgtcctgtgtgtggtgagggacactgttgatccagttcaggatgagatgctggcccgctttgtggttggcagccacgtcagacaccaccccagtaacaagaaggatgaagggttgactaatggtggcaccttggagccagccatgcccaacacatatggcgtggagcccctgcctcaggaggtgctgaagaagtatatcatctatgccaaggagagggtccgcccaaagctcaaccagatggaccaggataaagtggccaggatgtacagtgacctgaggaaggagtccatggcaacgggcagcattcccatcacggtgcgccacatcgagtccatgatccgcatggccgaggcccatgcccgcatgcacctgcgggactacgtgatggaagacgatgtcaacatggccatccgagtgatgatggagagcttcattgacacccagaagttcagcgtcatgcggagtatgcgcaagacttttgcccggtatctctccttccggcgagataacaatgatctgctgctcttcatactgaagcagttggtggctgagcaggtgacatatcaacgcaaccgctttggggcccagcaggacaccattgaaatacctgagaaggatctgatggacaaggccaggcagatcaatattcacaacctctctgccttctacgacagcgacctcttcaaattcaacaagttcagccgtgacctgaaacgcaaactgatcctacagcagttctgtgaccagcacaggggcctctatgtctgaatgaggctcggtcaccacgctgagcctacgtcacttcccacttccactggggcttggtgccctgtaggggtgggaggatggcttaatgcagacctttacctgtgagcccctaggccaaggctgtagcattaaatgactatttattcttctgcccccctctagagcactcttcttggccagaccctctgtccaaggctcattagaaggctggggttgtgttcaggtgacagactttatcaaaactattgctgttttggcatgagttgtgtttctggactgttttgttttcccctttagacaaagagcaacttagaagtatttgcaaacttttccagaacattctcaaagcctgtgatggaggagcacaagaccctgtctgctgagggcccatgctcctctcatgggtttcttcccacctagccagtgccttcatttgcttgttgtacagtttcttgtagtttattttttaatagatttgaataaaacctaaatagcgcc

SEQ ID NO: 5550 - protein, 913 aa, Mus musculus
MAESSESLSASSPARQRRRISDPLTSSPGRSSRRADALTSSPGRDLPPFEDESEGLLGTEGPMEEEEDGEELIGDGMERDYRPIPELDVYEAEGLALDDEDVEELTASQREAAERTMRQRDREAGRGLGRMRRGLLYDSSEEDEERPARKRRHVERATEDGEEDEEMIESIENLEDLKGHSVREWVSMAGPRLEIHHRFKNFLRTHVDSHGHNVFKERISDMCKENRESLVVNYEDLAAREHVLAYFLPEAPAELLQIFDEAALEVVLAMYPKYDRITNHIHVRISHLPLVEELRSLRQLHLNQLIRTSGVVTSCTGVLPQLSMVKYNCSKCNFVLGPFCQSQNQEVKPGSCPECQSAGPFEINMEETIYQNYQRIRIQESPGKVAAGRLPRSKDAILLADLVDSCKPGDEIELTGIYHNNYDGSLNTANGFPVFATIILANHVAKKDNKVAVGELTDEDVKMITGLSKDQQIGEKIFASIAPSIYGHEDIKRGLALALFGGEPKNPGGKHKVRGDINVLLCGDPGTAKSQFLKYIEKVSSRAIFTTGQGASAVGLTAYVQRHPVSREWTLEAGALVLADRGVCLIDEFDKMNDQDRTSIHEAMEQQSISISKAGIVTSLQARCTVIAAANPIGGRYDPSLTFSENVDLTEPIISRFDVLCVVRDTVDPVQDEMLARFVVGSHVRHHPSNKKDEGLTNGGTLEPAMPNTYGVEPLPQEVLKKYIIYAKERVRPKLNQMDQDKVARMYSDLRKESMATGSIPITVRHIESMIRMAEAHARMHLRDYVMEDDVNMAIRVMMESFIDTQKFSVMRSMRKTFARYLSFRRDNNDLLLFILKQLVAEQVTYQRNRFGAQQDTIEIPEKDLMDKARQINIHNLSAFYDSDLFKFNKFSRDLKRKLILQQFCDQHRGLYV

SEQ ID NO: 5551 - DNA, 3285 bp, Mus musculus
  CDS (46)..(2760)
ggcgcgaaaaccggtggcagctggtgcggtggagctagcgcagacatggcggagtcttctgagtctctctcagcatctagccctgcccgtcagcggcgccggatcagtgatcccctcacctccagcccaggccgcagctccagacgtgctgacgccctgacctccagccctggcagagacctccccccatttgaagatgagtctgaggggctactgggcacagaggggcccatggaggaagaagaggatggagaggaactcattggtgatggcatggagagagactaccgtcccattccggagctcgatgtctacgaggccgagggattggccctggatgatgaagatgtggaggagctgacagccagtcagagagaggcagctgagcggaccatgaggcagcgggaccgtgaggctggcagaggcctgggacgcatgcgccgggggctgctctatgacagcagcgaggaagatgaggagcggcctgcccgtaagcgccgccacgtagaacgcgccacagaggatggcgaggaggatggagagatgatcgagagtattgagaatctggaggacctcaagggccactcggtgcgcgagtgggtgagcatggcagggcccaggctggagatccaccaccgcttcaagaacttcctgcgcacccacgtggacagccatggccacaacgtcttcaaggagcgcatcagtgatatgtgcaaagagaaccgtgagagtttggtggtaaattatgaagacctggcagcccgggagcacgtgttggcatacttcctgccggaagcaccggctgagttgctgcagatctttgacgaggctgccctggaggtcgtgttggccatgtaccctaaatatgaccgtatcaccaaccacatccatgtgcgcatctcccacctgcctctggtggaggagctgcgttcactgaggcagttgcacctgaaccagctgatccgtaccagtggcgtggtgaccagctgcaccggagtcctgccccagctcagcatggtcaagtacaactgtagcaagtgcaactttgtactggggcctttctgccagtctcagaatcaggaggtgaagcctggctcctgccctgagtgccagtctgctgggccctttgagatcaacatggaggagaccatctatcagaactaccaacgtatccgcatccaggagagtcccggcaaggtggcggctggccgactgccccgttccaaggatgccattctcctcgctgatctggtggacagctgcaagccaggggacgagatagagctgaccggcatttactataataactatgacggctcgcttaacaccgccaacggctttccagtctttgccactattatcttggccaaccatgttgccaagaaggacaacaaagtagctgtgggggagctcacagatgaggacgtgaagatgatcaccggtctctccaaggatcagcaaattggagagaagatctttgccagcattgcaccctccatctatgggcatgaagacatcaagagaggcctggctctggccctgtttggaggggagcccaagaacccaggtggaaagcacaaggttcgaggtgacattaatgtgctcttgtgtggggaccctggcacagcaaagtcccaattcctcaaatacatcgagaaagtgtctagccgtgccatcttcaccactggccagggtgcgtcagcagtgggtctcaccgcgtacgttcagcggcatcccgtcagcagagagtggaccttagaggcgggagccctggttctggctgaccggggggtgtgtctcattgacgagtttgacaagatgaatgaccaggacaggaccagcatacacgaggccatggaacagcaaagcatctccatctccaaggctggcatcgttacctcgctgcaagcccgctgcactgtcatagctgctgccaaccccataggaggccgctacgacccttcactgaccttctcagagaatgtagacctcacagagcccatcatttcccgctttgatgtcctgtgtgtggtgagggacactgttgatccagttcaggatgagatgctggcccgctttgtggttggcagccacgtcagacaccaccccagtaacaagaaggatgaagggttgactaatggtggcaccttggagccagccatgcccaacacatatggcgtggagcccctgcctcaggaggtgctgaagaagtatatcatctatgccaaggagagggtccgcccgaagctcaaccagatggaccaggataaagtggccaggatgtacagtgacctgaggaaggagtccatggcaacgggcagcattcccatcacggtgcgccacatcgagtccatgatccgcatggccgaggcccatgcccgcatgcacctgcgggactacgtgatggaagacgatgtcaacatggccatccgagtgatgatggagagcttcattgacacccagaagttcagcgtcatgcggagtatgcgcaagacttttgcccggtatctctccttccggcgagataacaatgatctgctgctcttcatactgaagcagttggtggctgagcaggtgacatatcaacgcaaccgctttggggcccagcaggacaccattgaaatacctgagaaggatctgatggacaaggccaggcagatcaatattcacaacctctctgccttctacgacagcgacctcttcaaattcaacaagttcagcggtgacctgaaacgcaaactgatcctacagcagttctgagaccagcacaggggcctctatgtctgaatgaggctcggtcaccacgctgagcctacgtcacttcccacttccactggggcttggtgccctgtaggggtgggaggatggcttaatgcagacctttacctgtgagcccctaggccaaggctgtagcattaaatgactatttattcttctgcccccctctagagcactcttcttggccagaccctctgtccaaggctcattagaaggctggggttgtgttcaggtgacagactttatcaaaactattgctgttttggcatgagttgtgtttctggactgttttgttttcccctttagacaaagagcaacttagaagtatttgcaaacttttccagaacattctcaaagcctgtgatggaggagcacaagaccctgtctgctgagggcccatgctcctctcatgggtttcttcccacctagccagtgccttcatttgcttgttgtacagtttcttgtagtttattttttaatagatttgaataaaacctaaatagcgct

SEQ ID NO: 5552 - protein, 904 aa, Mus musculus
MAESSESLSASSPARQRRRISDPLTSSPGRSSRRADALTSSPGRDLPPFEDESEGLLGTEGPMEEEEDGEELIGDGMERDYRPIPELDVYEAEGLALDDEDVEELTASQREAAERTMRQRDREAGRGLGRMRRGLLYDSSEEDEERPARKRRHVERATEDGEEDGEMIESIENLEDLKGHSVREWVSMAGPRLEIHHRFKNFLRTHVDSHGHNVFKERISDMCKENRESLVVNYEDLAAREHVLAYFLPEAPAELLQIFDEAALEVVLAMYPKYDRITNHIHVRISHLPLVEELRSLRQLHLNQLIRTSGVVTSCTGVLPQLSMVKYNCSKCNFVLGPFCQSQNQEVKPGSCPECQSAGPFEINMEETIYQNYQRIRIQESPGKVAAGRLPRSKDAILLADLVDSCKPGDEIELTGIYYNNYDGSLNTANGFPVFATIILANHVAKKDNKVAVGELTDEDVKMITGLSKDQQIGEKIFASIAPSIYGHEDIKRGLALALFGGEPKNPGGKHKVRGDINVLLCGDPGTAKSQFLKYIEKVSSRAIFTTGQGASAVGLTAYVQRHPVSREWTLEAGALVLADRGVCLIDEFDKMNDQDRTSIHEAMEQQSISISKAGIVTSLQARCTVIAAANPIGGRYDPSLTFSENVDLTEPIISRFDVLCVVRDTVDPVQDEMLARFVVGSHVRHHPSNKKDEGLTNGGTLEPAMPNTYGVEPLPQEVLKKYIIYAKERVRPKLNQMDQDKVARMYSDLRKESMATGSIPITVRHIESMIRMAEAHARMHLRDYVMEDDVNMAIRVMMESFIDTQKFSVMRSMRKTFARYLSFRRDNNDLLLFILKQLVAEQVTYQRNRFGAQQDTIEIPEKDLMDKARQINIHNLSAFYDSDLFKFNKFSGDLKRKLILQQF

SEQ ID NO: 5553 - DNA, 4356 bp, Mus musculus
  CDS (83)..(2467)
gaacctgcggccgggctatctgcagctgcggactctcctccgcggtggtcttccctcagcagcgcgtactctcggcgccgccatggacctcgcagcggccgcggagcccggcgccggaagccagcacccggaggtgcgcgacgaggtggccgagaaatgccagaagctgttcctagacttcctggaagagttccagggtagtgatggagaaattaaatacttgcagtttgcagaggagctaattcgtcctgagagaaacacgctggttgtgagttttgcagacctggaacaatttaaccaacaactttctaccaccattcaggaagagttctatagagtctacccttacctgtgtcgagccttgaagacctttgtcaaagaccgaaaggagatcccttttgctaaggatttttatgttgcattccaagacctacctactagacacaagattcgtgagctcacttcatccaggattgggctgctcacccgaatcagtggccaggtggtgcgcactcacccagttcaccctgagcttgtgagtggaactttcctgtgccttgactgtcaaacagtgattaaggacgtagagcagcagttcaaatacacacagccgaatatctgccgaaatccagtgtgtgccaacaggaagaggttccttctagacactaataaatcaagatttgttgattttcaaaaggttcgcattcaagagactcaagcggaacttccccggggaagtattccccggagtttagaggttatcctgagagctgaagctgtggagtcagcccaagctggtgacagatgtgatttcacaggggcactgattgttgtgcctgatgtctccaagcttagcacaccaggagcacgtgcagagactaactcccgagtcagtggagctgatgggtatgagacagaaggcattcgagggctccgggcccttggtgtcagagatctgtcatacaggctggtcttccttgcctgccatgttgcaccaaccaacccaaggtttggagggaaagaactcagagatgaggaacagaccgctgagagcattaagaaccaaatgacggtgaaggaatgggaaaaggtgtttgaaatgagtcaggacaaaaacctgtaccacaatctctgcacgagcctcttccctactatacatggcaatgatgaagtaaaacgcggtgtcttactgatgttgttcggtggtgttcctaagacaacaggggaaggaacctctcttcgtggggatataaatgtttgcattgttggtgatccaagtacagctaagagccaatttctcaagcacgtggacgagttcagtcccagagctgtctataccagtggcaaagcctccagcgctgccggcttaacagcagctgtggtgagagatgaagaatctcacgaatttgtcattgaggctggagcgttgatgctggctgataatggtgtctgttgtattgatgaatttgataagatggacatgcgggaccaagttgctattcacgaagctatggagcagcagaccatctctatcacgaaagcaggagtgaaggcaactctgaatgccaggacatccattttagctgcagcaaaccctgtcagcggacactatgacagatcaaaatctttgaaacagaacatcaatctgtcagcgcccatcatgtcccgctttgatctcttcttcattctggtggatgaatgcaatgaggtgacagattatgctattgccaggcgcatagtagacttgcattcaagaattgaagaatcgatcgatcgagtttattcccttgatgatataagaaggtaccttctctttgcccgacagtttaaacccaagatttccaaagagtcagaagacttcattgtggagcagtacaaacgtctccgccagagggatggctctggggtcaccaagtcctcgtggagaatcaccgtgcgacagcttgagagcatgatccgactctcagaatcaatggcccgcatgcactgctgtgacgaggttcagcctaaacatgtgaaggaagcttttcgattactgaataaatcaatcatccgtgtagagacgcctgatgtcaatctagatcaagaggaagagatccagatggagacggatgagggacaaggaggcgtcaatggtcatgccgacagccctgcccctgtgaataggttcaacggctccagtgaagatgccagccaggagactgtttccaagccctccctgaggctgggctttgctgaatactgccgaatctcgaacctcatcgtgctccacctcaggaaaatggaagaagaggaggacgagtcggcactaaagagaagcgagcttgtcaactggtacctgaaggaaatcgaatcagagatagactctgaagaagagctcataaataaaaagacgatcattgagaaggttgttcatcgtctcacacactacgtaagtgtccactgcctgggctccagggcactgtgagggagtgcctctatctgcaggctttctgatgaatcattggggagcggtcataattgtagttgaggaaaattaaccgaaagggaaggacttttcctaaaataagcagaatttaggtaaaagttgagcaggcagcatttgggtcttacttctgggtgggctttttgtggtgtctttatttagctatactggtattgagccctgagtttgtatgtgctgggcagacatgcctctgtgctgaattctaggctcctgtttgggtgctttctaactttctgttttcaccctgctcggcttcattcatacctggctatgtaattctcaaccggaccactagcagtacctgatcctcggccccactcccacccccagtccaatgatcaggttttttttaaaaattcttttctattttgtttggtaagagttgcttaggggctggaagagaagaggacagatggtgtgttctacatttatttttacttgttcagagaaaaaattcccagatgaattgtgtttagatattttgtgtttgtttatttagacattgtgtctcactgtgaagcccacactggcctagagttcaaggtctttgtgcctcagccgcctgggtgctggtattctaggatgtataccaccattgtgggcttggacctgttcccagttctgagagactgggtatgagcccttcgtaataaatgagtgaaagctgcagagagttcagtggttatgagcactcaaggtaaattctcagcacccacgtcagtggctaaaacctacctacaactcttcagagtaattaaaaagaagtagaagtaggacctagctgacatggtgacacgcacttaaatcctagtgctcaagtgagggcaggagagctacaagtttcaggctggtctaggtctagcagcatagactgcctcaaaaggtgggaggagggactcgtaaaaaggggccaataggcagtgattaaaaattgacagattttagatattagaaatttttacacaatcttaaagttcaagcacagctgttttgaagttatactgacaagcatttgataaaatgtgtaggatacctggggctgatcttccataggtcctgagttcagcagccacatgatggctcacaaccatcctgaatgggatcccatgccctcttttggatgtctcttcttcagacagtgtgctcatgtacatgaaataaaataagtctttttaaaaaaaaaaatcacaatacctgctaggtttcttcgtttttcaaggcagttatacctgaagggtagcatcctagtaagaggggttgagcagagcactgataatggttgaaggtaaggttctgtccagggccttatcgagaggaaacaggaaagtgtaagtatcggacatttggaagcgtccgtggttctggactgaggacaaactgtgctccacaggatcacgttctgattgagctcacccaggctgggctgaaaggctccagtgaaggaagcgagagctatgaggaagacccctacctggtagtcaaccctaactacttgcttgaagattgaggtattgaaggtaacttgatggccagggacctgtgctgtcctacccttagcccggaccctgcacggcactgagagacagtgtctggagcaatgcttgaggaggatttcagaagtgatggctgagttcatggctctgtgaatttcatactgggacaggcttgggcactctgtcaataggcttcttgtactattgaagttggaaccaaatcatgtagtttctataagacatttcttcatgtataggaaaagcctgctgcatttgtcatacatgtgtctgtggaaattgctttcttctgttcccagccactgcttttacccatgaaaataaaacaacttgttctgc

SEQ ID NO: 5554 - protein, 794 aa, Mus musculus
MDLAAAAEPGAGSQHPEVRDEVAEKCQKLFLDFLEEFQGSDGEIKYLQFAEELIRPERNTLVVSFADLEQFNQQLSTTIQEEFYRVYPYLCRALKTFVKDRKEIPFAKDFYVAFQDLPTRHKIRELTSSRIGLLTRISGQVVRTHPVHPELVSGTFLCLDCQTVIKDVEQQFKYTQPNICRNPVCANRKRFLLDTNKSRFVDFQKVRIQETQAELPRGSIPRSLEVILRAEAVESAQAGDRCDFTGALIVVPDVSKLSTPGARAETNSRVSGADGYETEGIRGLRALGVRDLSYRLVFLACHVAPTNPRFGGKELRDEEQTAESIKNQMTVKEWEKVFEMSQDKNLYHNLCTSLFPTIHGNDEVKRGVLLMLFGGVPKTTGEGTSLRGDINVCIVGDPSTAKSQFLKHVDEFSPRAVYTSGKASSAAGLTAAVVRDEESHEFVIEAGALMLADNGVCCIDEFDKMDMRDQVAIHEAMEQQTISITKAGVKATLNARTSILAAANPVSGHYDRSKSLKQNINLSAPIMSRFDLFFILVDECNEVTDYAIARRIVDLHSRIEESIDRVYSLDDIRRYLLFARQFKPKISKESEDFIVEQYKRLRQRDGSGVTKSSWRITVRQLESMIRLSESMARMHCCDEVQPKHVKEAFRLLNKSIIRVETPDVNLDQEEEIQMETDEGQGGVNGHADSPAPVNRFNGSSEDASQETVSKPSLRLGFAEYCRISNLIVLHLRKMEEEEDESALKRSELVNWYLKEIESEIDSEEELINKKTIIEKVVHRLTHYVSVHCLGSRAL

SEQ ID NO: 5555 - DNA, 2160 bp, Bos taurus
  CDS (1)..(2160)
atggcacttaaggactacgtgctcgagaaagacaaagtgaagaagttcctacaagagttctaccaggatgacgaatctggcaagaagcagttcaagtatgggaaccagttggttcaactggctcatcgggagcaagtggccatgtacgtagacctagacgacattgctgaggatgaccctgagctggtggactcaatttgtgagaacaccaagcgctatgccaggctctttgctgatgctgttcaagagctgctgcctcaatacaaggagagggaggtagtaaataaagacgtcctggacgtttacattgagcaccggctgatgatggagcagcggagccgcgacccgggggcagcccgaagccctcaaaaccagtaccctcccgagctcatgcgcagatttgagctgtattttcaaggccccagcagtaacaagcctcgtgtgatccgggaagtacgggctgactctgtggggaagctagtaacagtgcgtggaattgtcactcgcgtctctgaggtcaaaccaagaatggtggtggccacttacacctgcgaccagtgcggggcggagacctaccagccgatccaatctcctactttcatgcctctgattatgtgcccgagccaggagtgccagaccaaccgctcaggaggccgactgtacctccagactcgtggctccaaattcatcaaattccaggagatgaagatgcaggaacatagcgaccaagtgcccgtgggaaacatccctcgcagcatcacagtgctggtggaaggagagaacacaaggatcgcccagcctggggaccacgtcagtgttaccggcatcttcctgccaatcctgcgcactgggttccgacagatggtccagggtttactctcggaaacttatctggaagctcatcggattgtgaagatgagtaagagtgaggaggatgagtctggggccggagagctgaccagggaggagctgaggcaaatcacagaggaggatttctatgagaagctggcagcctccatcgccccagagatatatgggcacgaagacgtgaagaaggcgctgctgctcctgctggtgggaggggtagaccagtctcctcgaggcatgaaaatcaggggcaacatcaacatctgcctgatgggggaccctggtgtggctaagtctcagctcctgtcttacattgaccgcctggccccccgcagccagtacacgacgggccgcggctcctccggcgtgggcctcacggcagctgtgctgagagactctgtgagtggcgagctgaccttggagggcggggccctggtgctggccgaccagggagtgtgctgcattgacgagtttgacaagatggcggaggccgaccgcacggccatccacgaggtcatggagcagcaaaccatctccattgccaaggcaggcattctcacaacgctcaatgcccgctgctccatcctggctgccgccaaccctgcctatggacgctacaaccctcgccgcagcctggaacaaaatatacagcttcctgcggcattgctttcccgatttgacctcctctggctgatccaggaccggcccgaccgagacaatgacctgaggttggcccagcacatcacctacgtgcaccagcacagccggcagccccccgcccagtttgagcctttggacatgaaactgatgaggcggtacatagctatgtgccgggagaagcagcctgcggtgccagagtctctggccgactacatcacagcagcctacgtggagatgaggcgcgaggcttgggccagtaaggacgccacctacacttcggcccggactctgctggctatcctgcgactgtccactgctctggcacgtctacgaatggtggacaccgtggagaaggaagatgtgaatgaagccatacggctgatggagatgtccaaggactcactgctgggtgacaaggggcagacagctaggacccagagaccagcagatgtgatatttgcgaccgtccgtgagttggtctcagagggccaaagtgtccggttttccgaggcggagcagcgctgcatctcccgtggcttcacacctgctcagttccaggcggccctggacgagtatgaggagctcaacgtctggcaggtcaacactgcccggacacggatcacttttgtgtga

SEQ ID NO: 5556 - protein, 719 aa, Bos taurus
MALKDYVLEKDKVKKFLQEFYQDDESGKKQFKYGNQLVQLAHREQVAMYVDLDDIAEDDPELVDSICENTKRYARLFADAVQELLPQYKEREVVNKDVLDVYIEHRLMMEQRSRDPGAARSPQNQYPPELMRRFELYFQGPSSNKPRVIREVRADSVGKLVTVRGIVTRVSEVKPRMVVATYTCDQCGAETYQPIQSPTFMPLIMCPSQECQTNRSGGRLYLQTRGSKFIKFQEMKMQEHSDQVPVGNIPRSITVLVEGENTRIAQPGDHVSVTGIFLPILRTGFRQMVQGLLSETYLEAHRIVKMSKSEEDESGAGELTREELRQITEEDFYEKLAASIAPEIYGHEDVKKALLLLLVGGVDQSPRGMKIRGNINICLMGDPGVAKSQLLSYIDRLAPRSQYTTGRGSSGVGLTAAVLRDSVSGELTLEGGALVLADQGVCCIDEFDKMAEADRTAIHEVMEQQTISIAKAGILTTLNARCSILAAANPAYGRYNPRRSLEQNIQLPAALLSRFDLLWLIQDRPDRDNDLRLAQHITYVHQHSRQPPAQFEPLDMKLMRRYIAMCREKQPAVPESLADYITAAYVEMRREAWASKDATYTSARTLLAILRLSTALARLRMVDTVEKEDVNEAIRLMEMSKDSLLGDKGQTARTQRPADVIFATVRELVSEGQSVRFSEAEQRCISRGFTPAQFQAALDEYEELNVWQVNTARTRITFV

SEQ ID NO: 5557 - DNA, 2472 bp, Xenopus laevis
  CDS (1)..(2472)
atggacctggtagatccttcccagagcgccgccgcggcagccggaacacaactagtcaaggatgaagtggctgagaagtgtcagaagttgttccaggactttctggaggaatttcagggtagcgatggggagttgaagtaccagagtgatgctgaggaactgatcaggccagagagaaatacactgcttgtcagctttgttgatttggaacagtttaatcagcagctcgcaactaccatccaagaggaattctacagggtgtatccgtacctctgtcgagcagtgagagcttttgctcgagatcatggcaacattccacagaacaaagaattctatgtcgccttccaggatcttcccaccagacataaaattagagagctgaccactcctcgcattggatctctgttgcggatcagcgctcaggtggttcggactcacccagtccacccggaactggtcagtgggacctttctttgcttggattgccagaccttggtgagggatgtagagcagcagtttaaatacacccagccaagcatttgcaggaacccagtgtgcgccaacagaaggaggttcatgttggatacaaacaagtcaagatttgttgatttccaaaaggttcgaattcaggaaacgcaggcagagctcccaagaggcagcattccacgaagcgttgaagtgatcctgcgagcggaagcagtggaatcatgtcaggccggggataggtgcgacttcactggatctctgatagttgtgcctgatatttctcagctctcaaccccaggtgttcgtgcagagaccagctctagggtgggtggaagagaagggtatgaggctgaaggtgtccaaggtctccgagcccttggagttcgagatctctcctataagctggtcttccttgcatgctatgtctgtccaaccaacccaagatttggtgggaaggaattgcatgaggaggatatgactgcagagagcatcaaaaaccagatgtctgtgaaggagtgggagaaggtgtttgaaatgagtcaagacaaaaacctgtaccataacctatgcaccagcctcttcccaactgtgcacggtaacgatgaagtaaagagaggcatcttactgatgctgtttgggggtgtccctaagtcaactatggagggaacatctttacgtggagacattaatgtttgtgttgttggagatccaagtactgccaagagccagttccttaagcacgttgaggagttcagtccccgtgcggtttacactagtggaaaagcctccactgctgccggtctgacagcagccgttgtgaaagatgaagaatcacatgagtttgtgattgaagctggagcactgatgcttgctgacaatggagtttgttgcattgatgagtttgacaagatggatacaaaggaccaagtagctattcatgaggcaatggaacagcaaactatttcaatcaccaaagctggtgttaaggctacactaaatgctcggacttccattcttgctgcagcaaaccctgtagggggccgatatgatagagcaaagtcacttaagcagaatgtaaacttgtctgcccccatcatgtccagatttgatctcttcttcattcttgtggatgagtgcaatgaggtgacagattacgccattgcccgacgtattgtggacctccattccaggattgaggaatctattgatagagtttatactgtggatgaagtcaggagataccttctctttgccaggcagttcaaacctaagatctctaaggagtcagcagacttcatagtggagcagtacaagcgactaaggcagcgtgatggatcgggggtcactaaatctgcttggaggataactgtacggcagctggaaagcatgatcagattgtctgaaggcatggcaaggatgcactgcagtgatgaggtgcagccaaaacatgtaaaggaagcattccggttattgaacaaatccatcatcagggtggaaactccggatgtcaacctggatcaagacgatgaacatgagccagaggatgaaactcaggaggggacgaatggagatgctgaagttcccaatggtgtcaatggccatgtgaatggaattaatgggcattctcaggagtcaaatgctgctgccgcaaagccgtccttgcgtctaaattttgctgaatacaagcggatctctaacttgctggtccagcagctgaggaagatggaagatgaagatgaaacttcacagagaaggagtgaactcatgaattggtatctaaaggagattgagtcggaaattgactcagaagaggagcttattaataggaagcaaatcattgataaagttattcacagacttgtacactatgaccaaattttgattgaactcacacagactgaattaaaaggcacaggggatgaggttgtagcaaaagaggaggatccttaccttgtggtgaaccccaattacatactggaagattaa

SEQ ID NO: 5558 - protein, 823 aa, Xenopus laevis
MDLVDPSQSAAAAAGTQLVKDEVAEKCQKLFQDFLEEFQGSDGELKYQSDAEELIRPERNTLLVSFVDLEQFNQQLATTIQEEFYRVYPYLCRAVRAFARDHGNIPQNKEFYVAFQDLPTRHKIRELTTPRIGSLLRISAQVVRTHPVHPELVSGTFLCLDCQTLVRDVEQQFKYTQPSICRNPVCANRRRFMLDTNKSRFVDFQKVRIQETQAELPRGSIPRSVEVILRAEAVESCQAGDRCDFTGSLIVVPDISQLSTPGVRAETSSRVGGREGYEAEGVQGLRALGVRDLSYKLVFLACYVCPTNPRFGGKELHEEDMTAESIKNQMSVKEWEKVFEMSQDKNLYHNLCTSLFPTVHGNDEVKRGILLMLFGGVPKSTMEGTSLRGDINVCVVGDPSTAKSQFLKHVEEFSPRAVYTSGKASTAAGLTAAVVKDEESHEFVIEAGALMLADNGVCCIDEFDKMDTKDQVAIHEAMEQQTISITKAGVKATLNARTSILAAANPVGGRYDRAKSLKQNVNLSAPIMSRFDLFFILVDECNEVTDYAIARRIVDLHSRIEESIDRVYTVDEVRRYLLFARQFKPKISKESADFIVEQYKRLRQRDGSGVTKSAWRITVRQLESMIRLSEGMARMHCSDEVQPKHVKEAFRLLNKSIIRVETPDVNLDQDDEHEPEDETQEGTNGDAEVPNGVNGHVNGINGHSQESNAAAAKPSLRLNFAEYKRISNLLVQQLRKMEDEDETSQRRSELMNWYLKEIESEIDSEEELINRKQIIDKVIHRLVHYDQILIELTQTELKGTGDEVVAKEEDPYLVVNPNYILED

SEQ ID NO: 5559 - DNA, 2406 bp, Leishmania major
  CDS (1)..(2406)
atgcagtcagaccttggcaccgtgcacgtcacgaacttccacggcagcggcgcgctgtctggtgacggttacaatgccagtggcagcgtggatggcgacagcgaggcaggcacggacatccgcctcctcgccaaggagttcgtgactcagtttcgcatccatcacgagtttctatacatggacatgctgcggagcaacttgtcggctggactgcactacgtggagttccagatgctgcacctccagcagttcagcggcgtgctctttggagctgtgcagcataaccccacccgcgcactgccgctgatggagcacgcggtgtgggagctagcgcaggagcgcaagctgttccctgcctacagccgcgagacgacgattcaggtgcagctcttctggggcgtgccgccgatggcgctgcgcaacctcgcccaggccgccgtggcgcagctggtcagcgtgagcggcattgtcgtcaagtccagctccacacatgctcgctgtgtccgggcggctatccaatgcacgagctgtcgaagcaaagcctacatcaacggtgggcggtcgatcgatctgccgccgcagtgcatggaaaacagcggccgcggtggggtcggtggtggcggaggtacgtcctccggcaagtgccggccgaacccctacgtgcttctgccaatggagtgtgagtacgaggatcagcagatcatcaagctgcaggagctgcccgaggacgtgccgaccggcgaactgccgcgacacctgacggtggttgtggatcgctatttagttgatcgcatcagccctggctcccgcgtccagatcgtcggcgtcgtctcggtgcaggagaagcgtggtggcttcgacagcgcacgcggcggaggccgtggtcgcgcggcggccggcttgcgtgcgcagtacctgcgctgtgtcggcctcatgttccgcactacgcaggatgccaactgcgcggtggtgagcgtgaaccagaacttttcctctcgtgtacgatctcgctcaaccatgacgtggcagccggaggaggaggcgtccttcaaggccttcgccaagcaggggggcgtgttccagaagctctctgccagcatcgaccccgccatcttcggcctggaggatcagaagaaggcgatcgtgtgcctcctgttcggcggcacacgcaagcgcatcggcagcaacttcttgcgcggcgacatgaacgtcctcttcattggtgacccgtcgacggccaagtcgcagctgctgaagtttgtagagaaggtggccccgatcggtatctacacctctggcaagggcagcagtgccgccggtctcaccgcgtccgtcatctcgaacggcaacggcgactttgtgctcgaggcggggtcgatggtgctggctgacggcggcgtcgtgtgcattgacgagttcgacaagatgcgagagcaggatcaggtggccatccacgaggcaatggagcagcagaccatctccattgccaaggcgaatatgacgaccatgctaaacagtcgcacgtcagtgctggcggctgcgaacccgacgctcggtagctatgaccctctgcgctccaacgaggaccagatggacttccagagctccatcctgtcccgcttcgacctcatcttcaaggtaattgatccccgcaacccggagacggatcagcgtctggcccaccacgtcatctcgctccacaagagcgccaacggcagcggcgggcgacgcggcggtggtcgtgcgggtgcgtccgcctccgctggtagtggcgcggcgacttctgcggcgcagagtagccatggcgaagtggtcgagcgctgcttctttacgaaatacatctcctacgcccgcgccacctgccgcccggtcatctcagaggaggcgatgaaggtcttactcgacttctacgttcaggtgcgccgagacgcacatcagcaaaccctcgcgacgattggcggcacgagcggcggcaacggcagcgcggcgggcggtggtggctcgagcagcaacaagacgcctatcatccagatcacggcccggcagctggaaagcctcgtgcgcattacagagtcgatggcccggatgcggcttgacgtgctcgccagccgcagcgatgccgaagaggccattaagctctttaaaatcgccacggtcgacgccatcaagagcggcgtggcggaccaaatcctgacggaggcacagagtgagcttgtcctgcgcgtggaggaggcgctgcgccgccgcgttgcgctcggagccacggtcgagcaccaccgcctcctgtcggagctcgcacgcatgggttttgactccaaactcgtcgagcgtgccttgtacgcgatggtgaagcgggaggagctggagtggcgcaagcagcgcaccctgctgcaccgtgtgagatga

SEQ ID NO: 5560 - protein, 801 aa, Leishmania major
MQSDLGTVHVTNFHGSGALSGDGYNASGSVDGDSEAGTDIRLLAKEFVTQFRIHHEFLYMDMLRSNLSAGLHYVEFQMLHLQQFSGVLFGAVQHNPTRALPLMEHAVWELAQERKLFPAYSRETTIQVQLFWGVPPMALRNLAQAAVAQLVSVSGIVVKSSSTHARCVRAAIQCTSCRSKAYINGGRSIDLPPQCMENSGRGGVGGGGGTSSGKCRPNPYVLLPMECEYEDQQIIKLQELPEDVPTGELPRHLTVVVDRYLVDRISPGSRVQIVGVVSVQEKRGGFDSARGGGRGRAAAGLRAQYLRCVGLMFRTTQDANCAVVSVNQNFSSRVRSRSTMTWQPEEEASFKAFAKQGGVFQKLSASIDPAIFGLEDQKKAIVCLLFGGTRKRIGSNFLRGDMNVLFIGDPSTAKSQLLKFVEKVAPIGIYTSGKGSSAAGLTASVISNGNGDFVLEAGSMVLADGGVVCIDEFDKMREQDQVAIHEAMEQQTISIAKANMTTMLNSRTSVLAAANPTLGSYDPLRSNEDQMDFQSSILSRFDLIFKVIDPRNPETDQRLAHHVISLHKSANGSGGRRGGGRAGASASAGSGAATSAAQSSHGEVVERCFFTKYISYARATCRPVISEEAMKVLLDFYVQVRRDAHQQTLATIGGTSGGNGSAAGGGGSSSNKTPIIQITARQLESLVRITESMARMRLDVLASRSDAEEAIKLFKIATVDAIKSGVADQILTEAQSELVLRVEEALRRRVALGATVEHHRLLSELARMGFDSKLVERALYAMVKREELEWRKQRTLLHRVR

SEQ ID NO: 5561 - DNA, 2160 bp, Macaca fascicularis
  CDS (1)..(2160)
atggcactgaaggactacgcgctagagaaagaaaaggttaagaagttcttacaagagttctaccaggatgatgaacttgggaagaagcagttcaagtatgggaaccagttggttcggctggctcatcgggaacaagtggctctgtatgtggacctggacgacgtagccgaggatgaccccgagttggtggactcaatttgtgagaatgccaggcgctacgcaaagctctttgccgattctgtacaagagctgctgcctcagtacaaggagagggaagtggtaaataaagatgtcctggacgtttacattgagcatcggctgatgatggagcagcggagtcgggaccctggaacagcccgaagcccccagaaccagtaccctgctgaactcatgcgcagatttgagctgtattttcaaggcccaagtagcaacaagcctcgtgtgatccgggaagtgcgggctgactctgtggggaaattggtgactgtgcgtggaattgtcactcgtgtctctgaagtcaaacccaagatggtggtggccacttacacttgtgaccagtgtggggcagagacctaccagccgatccagtctccaactttcatgcctctgatcatgtgcccaagccaggagtgccaaaccaaccgctcaggagggcggctgtatctgcagacacggggctccaaattcatcaaattccaggagatgaagatgcaagaacatagtgatcaagtgcccgtgggaaacatccctcgtagtatcacggtgctggtagaaggagagaacacgagaattgcccagcctggagaccacgtcagcgtcactggtatcttcttgccaatcctgcgtactgggttccgacaggtggtacagggtttactctcagaaacctacctggaagcccatcggattgtgaagatgaacaagagtgaggatgatgagtctggggctggagagctcagcagggaggagctgaggcagattgcagaagaggatttctacgaaaagctggcagcttcaatcgccccagaaatatatgggcacgaagatgtgaagaaggcactgctgcttctgctagtggggggtgtggaccagtctcctcgaggcatgaagatccggggcaacatcaacatctgtctgatgggggatcctggtgtggccaagtctcaactcctgtcgtacattgatcggctggccccccgcagccagtacacaacaggccggggctcctcgggagtggggcttacggcagctgtgctgagagactccgtgagtggagaactgactttagagggtggggctctggtgctggctgaccagggcgtgtgctgcattgatgagttcgacaaaatggccgaggccgaccgcacagccatccacgaggtcatggagcagcagaccatctccattgccaaggccggcatccttactacactcaatgcccgctgctccatcctggctgccgccaaccctgcctatgggcgctacaacccccgccgcagcctggagcagaacatacagctgcctgctgcgctgctctcccggtttgacctcctctggctgattcaggaccggcctgaccgagacaatgacctacggttggcccagcacatcacctatgtgcaccagcacagccggcagcccccctcccagttcgaacctctggacatgaagctcatgaggcgttacatagccatgtgccgcgagaagcagcccacagtgccagagtctctggctgactacatcacggcagcgtatgtggagatgaggcgagaggcttgggctagtaaggatgccacctacacttccgctcggaccctgctggctatcctgcgcctttccactgctctggcgcgtctgcgaatggtggacgtggtggagaaggaagatgtgaatgaagccatcaggctaatggagatgtcaaaggactctcttctgggagacaaggggcagacagctagggctcagagaccagcagatgtggtatttgccaccatccgtgaactggtctcagggggccgaagcgtccggttctctgaggcagagcagcgctgcatatctcgcggctttacacctgcccagttccaggtggctctggatgaatacgaggagctcaatgtctggcaggtcaatgcttcccggacacggatcacttttgtctga

SEQ ID NO: 5562 - protein, 719 aa, Macaca fascicularis
MALKDYALEKEKVKKFLQEFYQDDELGKKQFKYGNQLVRLAHREQVALYVDLDDVAEDDPELVDSICENARRYAKLFADSVQELLPQYKEREVVNKDVLDVYIEHRLMMEQRSRDPGTARSPQNQYPAELMRRFELYFQGPSSNKPRVIREVRADSVGKLVTVRGIVTRVSEVKPKMVVATYTCDQCGAETYQPIQSPTFMPLIMCPSQECQTNRSGGRLYLQTRGSKFIKFQEMKMQEHSDQVPVGNIPRSITVLVEGENTRIAQPGDHVSVTGIFLPILRTGFRQVVQGLLSETYLEAHRIVKMNKSEDDESGAGELSREELRQIAEEDFYEKLAASIAPEIYGHEDVKKALLLLLVGGVDQSPRGMKIRGNINICLMGDPGVAKSQLLSYIDRLAPRSQYTTGRGSSGVGLTAAVLRDSVSGELTLEGGALVLADQGVCCIDEFDKMAEADRTAIHEVMEQQTISIAKAGILTTLNARCSILAAANPAYGRYNPRRSLEQNIQLPAALLSRFDLLWLIQDRPDRDNDLRLAQHITYVHQHSRQPPSQFEPLDMKLMRRYIAMCREKQPTVPESLADYITAAYVEMRREAWASKDATYTSARTLLAILRLSTALARLRMVDVVEKEDVNEAIRLMEMSKDSLLGDKGQTARAQRPADVVFATIRELVSGGRSVRFSEAEQRCISRGFTPAQFQVALDEYEELNVWQVNASRTRITFV

SEQ ID NO: 5563 - DNA, 2205 bp, Mus musculus
  CDS (1)..(2205)
atgtcgggcttcgacgacccgggcattttctacagcgacagcttcggtggcgaccccggtgcggaagagggccaggcccgcaagtcgcaactgcagaggcgattcaaggagttcctgagacagtaccgagtgggcaccgatcgcacgggcttcaccttcaagtacagagatgaactcaagcggcattacaacctgggtgaatactggatcgaggtggagatggaggacctggccagttttgacgaggaactggctgaccacttgcataaacagccggccgagcacttacagctgcttgaggaagctgccaaggaggtggcagatgaggtgacccggccccggccagctggagatgagctgctccaagacatccaggtcatgctcaagtcagatgccagcccgtcgagcattcggattctgaagtcagacatgatgtcacacctggtgaagatccctggcatcatcatttcagcctctgcagtccgtgccaaggctactcgtatctccattcagtgccgcagctgccacaataccctcaccaatatcgccatgcgcccaggcctagagggctatgcccttcccaggaagtgcaatatggatcaggctgggcgcccaaagtgcccactggatccatacttcatcatgcctgacaagtgcaagtgtgtggacttccagactctgaaactgcaggagctgcctgatgcagtccctcatggtgagatgcccaggcacatgcagctttattgtgacaggtacctgtgtgacaaggttgttcctgggaacagggtcaccatcatgggcatttattccatcaagaagtttggcttgaaccccagcaagggccgggacagggtaggtgtgggcatccggagctcgtacatccgagtgctgggcatccaggtggacacagatggctctggccgaagctttgctgggtctgtcagcccacaggaagaggaggaatttcgtcgcctggctgccctccccaacatatatgagctcatctccaagagcatttccccctccatctttgggggcatggatatgaagaaggccattgcctgcctgctttttgggggttcccggaagaggctcccagatggactcactcgccgaggtgatatcaacttgctgatgttgggagaccctggtacagccaagtctcagcttctgaagtttgtggagaagtgctctcccattggggtgtacacatctgggaaaggtagcagtgctgctggcttgactgcctcagtgatacgggacccctcatctcgaaacttcatcatggaaggtggagccatggttctggccgatggtggggttgtctgtattgatgagtttgacaagatgcgggaagatgaccgtgttgcaatccatgaggctatggagcagcagaccatctccattgctaaagctgggatcactaccaccttgaactctcgctgctctgttctggctgcagccaactcagtgtttggccgatgggatgagacaaaaggggaggacaatattgacttcatgcctaccatcttgtcccgatttgatatgatcttcatcgtcaaagatgagcacaatgaggagagggacatgatgctagccaaacatgtgatgactctgcatgtgagtgcactgacacagacacaggctgtggagggtgagatcgacctggccaagatgaagaagttcattgcctactgccgagcgaggtgtggacctcggctatcagcagaggcagcagagaagctgaaaaaccgctacatcatcatgcggagtggggctcgtcagcatgagagggacagtgaccggcgttccagcatccccatcactgtgcggcagctggaggctattgtgcgcattgctgaggccctcagtaagatgaaactgcagccctttgccactgaggctgatgtagaggaggcattgagactgttccaggtgtccacactggatgctgctttgtctggcaatctgtcgggggtggagggcttcactacccaggaggaccaggagatgctgagccgcattgagaagcaactcaagcgccgttttgccattggctctcaggtgtctgaacacagcattgtccaggacttcaccaaacagaaatatccagagcacgctatccgaaaggtgctgcagctcatgctacgcaggggtgagatccaacaccgtatgcagcgcaaggtgctctatcgcctcaagtga

SEQ ID NO: 5564 - protein, 734 aa, Mus musculus
MSGFDDPGIFYSDSFGGDPGAEEGQARKSQLQRRFKEFLRQYRVGTDRTGFTFKYRDELKRHYNLGEYWIEVEMEDLASFDEELADHLHKQPAEHLQLLEEAAKEVADEVTRPRPAGDELLQDIQVMLKSDASPSSIRILKSDMMSHLVKIPGIIISASAVRAKATRISIQCRSCHNTLTNIAMRPGLEGYALPRKCNMDQAGRPKCPLDPYFIMPDKCKCVDFQTLKLQELPDAVPHGEMPRHMQLYCDRYLCDKVVPGNRVTIMGIYSIKKFGLNPSKGRDRVGVGIRSSYIRVLGIQVDTDGSGRSFAGSVSPQEEEEFRRLAALPNIYELISKSISPSIFGGMDMKKAIACLLFGGSRKRLPDGLTRRGDINLLMLGDPGTAKSQLLKFVEKCSPIGVYTSGKGSSAAGLTASVIRDPSSRNFIMEGGAMVLADGGVVCIDEFDKMREDDRVAIHEAMEQQTISIAKAGITTTLNSRCSVLAAANSVFGRWDETKGEDNIDFMPTILSRFDMIFIVKDEHNEERDMMLAKHVMTLHVSALTQTQAVEGEIDLAKMKKFIAYCRARCGPRLSAEAAEKLKNRYIIMRSGARQHERDSDRRSSIPITVRQLEAIVRIAEALSKMKLQPFATEADVEEALRLFQVSTLDAALSGNLSGVEGFTTQEDQEMLSRIEKQLKRRFAIGSQVSEHSIVQDFTKQKYPEHAIRKVLQLMLRRGEIQHRMQRKVLYRLK

SEQ ID NO: 5565 - DNA, 2205 bp, Homo sapiens
  CDS (1)..(2205)
atgtcgggattcgacgatcctggcattttctacagcgacagcttcgggggcgacgcccaggccgacgaggggcaggcccgcaaatcgcagctgcagaggcgcttcaaggagttcctgcggcagtaccgagtgggcaccgaccgcacgggcttcaccttcaaatacagggatgaactcaagcggcattacaacctgggggagtactggattgaggtggagatggaggatctggccagctttgatgaggacctggccgactacttgtacaagcagccagccgagcacctgcagctgctggaggaagctgccaaggaggtagctgatgaggtgacccggccccggccttctggggaggaggtgctccaggacatccaggtcatgctcaagtcggacgccagcccttccagcattcgtagcctgaagtcggacatgatgccacacctggtgaagatccctggcatcatcatcgcggcctctgcggtccgtgccaaggccacccgcatctctatccagtgccgcagctgccgcaacaccctcaccaacattgccatgcgccctggcctcgagggctatgccctgcccaggaagtgcaacacagatcaggctgggcgccccaaatgcccattggacccgtacttcatcatgcccgacaaatgcaaatgcgtggacttccagaccctgaagctgcaggagctgcctgatgcagtcccccacggggagatgcccagacacatgcagctctactgcgacaggtacctgtgtgacaaggtcgtccctgggaacagggttaccatcatgggcatctactccatcaagaagtttggcctgactaccagcaggggccgtgacagggtgggcgtgggcatccgaagctcctacatccgtgtcctgggcatccaggtggacacagatggctctggccgcagctttgctggggccgtgagcccccaggaggaggaggagttccgtcgcctggctgccctcccaaatgtctatgaggtcatctccaagagcatcgccccctccatctttgggggcacagacatgaagaaggccattgcctgcctgctctttgggggctcccgaaagaggctccctgatggacttactcgccgaggagacatcaacctgctgatgctaggggaccctgggacagccaagtcccagcttctgaagtttgtggagaagtgttctcccattggggtatacacgtctgggaaaggcagcagcgcagctggactgacagcctcggtgatgagggacccttcgtcccggaatttcatcatggagggcggagccatggtcctggccgatggtggggtcgtctgtattgacgagtttgacaagatgcgagaagatgaccgtgtggcaatccacgaagccatggagcagcagaccatctctatcgccaaggctgggatcaccaccaccctgaactcccgctgctccgtcctggctgctgccaactcagtgttcggccgctgggatgagacgaagggggaggacaacattgacttcatgcccaccatcttgtcgcgcttcgacatgatcttcatcgtcaaggatgagcacaatgaggagagggatgtgatgctggccaagcatgtcatcactctgcacgtgagcgcactgacacagacacaggctgtggagggcgagattgacctggccaagctgaagaagtttattgcctactgccgagtgaagtgtggcccccggctgtcagcagaggctgcagagaaactgaagaaccgctacatcatcatgcggagcggggcccgtcagcacgagagggacagtgaccgccgctccagcatccccatcactgtgcggcagctggaggccattgtgcgcatcgcggaagccctcagcaagatgaagctgcagcccttcgccacagaggcagatgtggaggaggccctgcggctcttccaagtgtccacgttggatgctgccttgtccggtaccctgtcaggggtggagggcttcaccagccaggaggaccaggagatgctgagccgcatcgagaagcagctcaagccccgctttgccattggctcccaggtgtctgagcacagcatcatcaaggacttcaccaagcagaaatacccggagcacgccatccacaaggtgctgcagctcatgctgcggcgcggcgagatccagcatcgcatgcagcgcaaggttctctaccgcctcaagtga

SEQ ID NO: 5566 - protein, 734 aa, Homo sapiens
MSGFDDPGIFYSDSFGGDAQADEGQARKSQLQRRFKEFLRQYRVGTDRTGFTFKYRDELKRHYNLGEYWIEVEMEDLASFDEDLADYLYKQPAEHLQLLEEAAKEVADEVTRPRPSGEEVLQDIQVMLKSDASPSSIRSLKSDMMPHLVKIPGIIIAASAVRAKATRISIQCRSCRNTLTNIAMRPGLEGYALPRKCNTDQAGRPKCPLDPYFIMPDKCKCVDFQTLKLQELPDAVPHGEMPRHMQLYCDRYLCDKVVPGNRVTIMGIYSIKKFGLTTSRGRDRVGVGIRSSYIRVLGIQVDTDGSGRSFAGAVSPQEEEEFRRLAALPNVYEVISKSIAPSIFGGTDMKKAIACLLFGGSRKRLPDGLTRRGDINLLMLGDPGTAKSQLLKFVEKCSPIGVYTSGKGSSAAGLTASVMRDPSSRNFIMEGGAMVLADGGVVCIDEFDKMREDDRVAIHEAMEQQTISIAKAGITTTLNSRCSVLAAANSVFGRWDETKGEDNIDFMPTILSRFDMIFIVKDEHNEERDVMLAKHVITLHVSALTQTQAVEGEIDLAKLKKFIAYCRVKCGPRLSAEAAEKLKNRYIIMRSGARQHERDSDRRSSIPITVRQLEAIVRIAEALSKMKLQPFATEADVEEALRLFQVSTLDAALSGTLSGVEGFTSQEDQEMLSRIEKQLKPRFAIGSQVSEHSIIKDFTKQKYPEHAIHKVLQLMLRRGEIQHRMQRKVLYRLK

SEQ ID NO: 5567 - DNA, 2427 bp, Homo sapiens
  CDS (1)..(2427)
atggcgggtaccgtggtgctggacgatgtggagctgcgggaggctcagagagattacctggacttcctggacgacgaggaagaccagggaatttatcagagcaaagttcgggagctgatcagtgacaaccaataccggctgattgtcaatgtgaatgacctgcgcaggaaaaacgagaagagggctaaccggcttctgaacaatgcctttgaggagctggttgccttccagcgggccttaaaggattttgtggcctccattgatgctacctatgccaagcagtatgaggagttctacgtaggactggaaggcagctttggctccaagcacgtctccccgcggactcttacctcctgcttcctcagctgtgtggtctgtgtggaaggcattgtcactaaatgttctctagttcgtcccaaagtcgtccgcagtgtccactactgtcctgctactaagaagaccatagagcgacgttattctgatctcaccaccctggtggcctttccctccagctctgtctatcctaccaaggatgaggagaacaatccccttgagacagaatatggcctttctgtctacaaggatcaccagaccatcaccatccaggagatgccggagaaggccccagccggccagctcccccgctctgtggacgtcattctggatgatgacttggtggataaagcgaagcctggtgaccgggttcaggtggtgggaacctaccgttgccttcctggaaagaagggaggctacacctctgggaccttcaggactgtcctgattgcctgtaatgttaagcagatgagcaaggatgctcagccctctttctctgctgaggatatagccaagatcaagaagttcagtaaaacccgatccaaggatatctttgaccagctggccaagtcattggccccaagtatccatgggcatgactatgtcaagaaagcaatcctctgcttgctcttgggaggggtggaacgagacctagaaaatggcagccacatccgtggagacatcaatattcttctaataggagacccatccgttgccaagtctcagcttctgcggtatgtgctttgcactgcaccccgagctatccccaccactggccggggctcctctggagtgggtctgacggctgctgtcaccacagaccaggaaacaggagagcgccgtctggaagcaggggccatggtcctggctgaccgaggcgtggtttgcattgatgaatttgacaaaatgtctgacatggatcgcacagccatccatgaagtgatggagcagggtcgagtgaccattgccaaggctggcatccatgctcggctgaatgcccgctgcagtgttttggcagctgccaaccctgtctacggcaggtatgaccagtataagactccaatggagaacattgggctacaggactcactgctgtcacgatttgacttgctcttcatcatgctggatcagatggatcctgagcaggatcgggagatctcagaccatgtccttcggatgcaccgttacagagcacctggggagcagaatggcgatgctatgcccttgggtagtgctgtggatatcctggccacagatgatcccaactttagccaggaagatcagcaggacacccagatttatgagaagcatgacaaccttctacatgggaccaagaagaaaaaggaggagatggtgagtgcagcattcatgaagaagtacatccatgtggccaaaatcatcaagcctgtcctgacacaggagtcggccacctacattgcagaagagtattcacgcctgcgcagccaggatagcatgagctcagacaccgccaggacatctccagttacagcccgaacactggaaactctgattcgactggccacagcccatgcgaaggcccgcatgagcaagactgtggacctgcaggatgcagaggaagctgtggagttggtccagtatgcttactttaagaaggttctggagaaggagaagaaacgtaagaagcgaagtgaggatgaatcagagacagaagatgaagaggagaaaagccaagaggaccaggagcagaagaggaagagaaggaagactcgccagccagatgccaaagatggggattcatacgacccctatgacttcagtgacacagaggaggaaatgcctcaagtacacactccaaagacggcagactcacaggagaccaaggaatcccagaaagtggagttgagtgaatccaggttgaaggcattcaaggtggccctcttggatgtgttccgggaagctcatgcgcagtcaatcggcatgaatcgcctcacagaatccatcaaccgggacagcgaagagcccttctcttcagttgagatccaggctgctctgagtaagatgcaggatgacaatcaggtcatggtgtctgagggcatcatcttcctcatctga

SEQ ID NO: 5568 - protein, 808 aa, Homo sapiens
MAGTVVLDDVELREAQRDYLDFLDDEEDQGIYQSKVRELISDNQYRLIVNVNDLRRKNEKRANRLLNNAFEELVAFQRALKDFVASIDATYAKQYEEFYVGLEGSFGSKHVSPRTLTSCFLSCVVCVEGIVTKCSLVRPKVVRSVHYCPATKKTIERRYSDLTTLVAFPSSSVYPTKDEENNPLETEYGLSVYKDHQTITIQEMPEKAPAGQLPRSVDVILDDDLVDKAKPGDRVQVVGTYRCLPGKKGGYTSGTFRTVLIACNVKQMSKDAQPSFSAEDIAKIKKFSKTRSKDIFDQLAKSLAPSIHGHDYVKKAILCLLLGGVERDLENGSHIRGDINILLIGDPSVAKSQLLRYVLCTAPRAIPTTGRGSSGVGLTAAVTTDQETGERRLEAGAMVLADRGVVCIDEFDKMSDMDRTAIHEVMEQGRVTIAKAGIHARLNARCSVLAAANPVYGRYDQYKTPMENIGLQDSLLSRFDLLFIMLDQMDPEQDREISDHVLRMHRYRAPGEQNGDAMPLGSAVDILATDDPNFSQEDQQDTQIYEKHDNLLHGTKKKKEEMVSAAFMKKYIHVAKIIKPVLTQESATYIAEEYSRLRSQDSMSSDTARTSPVTARTLETLIRLATAHAKARMSKTVDLQDAEEAVELVQYAYFKKVLEKEKKRKKRSEDESETEDEEEKSQEDQEQKRKRRKTRQPDAKDGDSYDPYDFSDTEEEMPQVHTPKTADSQETKESQKVELSESRLKAFKVALLDVFREAHAQSIGMNRLTESINRDSEEPFSSVEIQAALSKMQDDNQVMVSEGIIFLI

SEQ ID NO: 5569 - DNA, 2208 bp, Xenopus tropicalis
  CDS (1)..(2208)
atgtcgggatttgacgatcttggaatctactacagcgatagttttggcggagagcagccggtgggtgacgacggacaagccaagaaatcacaacttaagaagcggttcagagagttcctcaggcagtaccgtgtagggaccgatcgcaccggcttcaccttcaaatacagagatgaactcaagcgtcactataatctgggagaatactggatagaggtggaaatggaggacctggccagctttgatgaggaccttgcagattatttgtacaaacagccaactgaacatctgcagctgctggaagaggcagcccaggaagttgcagatgaggtgactcgcccacgacctgcaggtgaagaaactatacaggaaatccaagttatgttgcggtctgatgccaaccctgctaatattcgaagcctgaagtccgagcaaatgtctcatcttgtcaaaattcccggcattatcattgctgccaccgctgtgagagccaaggctacgaagatctcaatccagtgtcgtagctgccgaaacacaattggcaacatagctgtgcgtcctggtctagagggatatgctatgccacgtaaatgcaacacggaacaggctggccgtccaaagtgcccattggacccatactttattatacctgacaagtgcaaatgtgtagattttcaaactctgaagcttcaggagtctccagatgctgtacctcatggagagctcccaagacatatgcagttgtattgtgacaggtacttgtgtgataaggttgttcctggaaacagagtgacaatcatgggtatttactcaatccggaagagtggaaagacctcaacaaagggccgggatcgagtgggagttgggatccgcagttcctatataagggtagtgggcatccaagtggatacagaaggaacaggaagaagtgcagcaggtgctataacgccacaagaggaagaggagtttaggcgcctatctgcaaagcctgatatctatgagactgttgctaaaagtattgccccctccatttatggcagtagtgacatcaagaaagccattgcttgcctgctgtttggaggctcccgcaagaggcttccagatggattgaccagaagaggtgatgttaatctgctgatgcttggggatcctggcacagctaaatcacagctgctaaagtttgtggaacgttgctctcctataggggtctatacttctgggaaaggcagcagtgcagctggcctcactgcttcagttatgcgagatccagtgtcccgtaactttattatggaaggaggtgcaatggtgctggcagatggaggggtggtctgcattgatgagtttgataagatgcgagaggatgacagagttgctattcatgaagccatggaacagcaaactatttccattgcaaaagctggcatcactaccacactaaactccagatgttctgttttggcagctgccaattcagtatatggacggtgggatgacaccaagggcgaggagaatattgacttcatgcccaccattctttctaggttcgacatgatcttcattgtaaaagatgaacacaatgagcagagagacatgactctcgcaaagcatgttatgaatgtccatctcagcgcacgtacacagagttcttctgtggagggagagattgaccttaatactcttaagaaatacattgcctactgcagagcaaaatgtggtccccggctttcagctgaatcagcagaaaagctgaagaatcgatatattcttatgcgcagcggagctagagatcacgagagagagactgagaagagatcaagtatcccaattacagtcagacaattagaagcgattgttcggatatcggaatctcttggcaaaatgaagctgcagccttttgcaacagagactgatgtagaggaagcactaagattgttccaggtgtctacattggatgctgccatgtctggaagcctttcaggtgtggaaggctttactacgcaagaggatcaggaaatgctatcccgcattgagaaacagctgaagaggcgttttgcaattggttcacaggtgtctgagcacagtattattcaagattttcttaaacagaaataccctgagcatgccatccacaaggttctgcacctcatgatgaggagaggagagattcagcatcgcttgcaacgcaaagtcctttaccgcatcaaatag

SEQ ID NO: 5570 - protein, 735 aa, Xenopus tropicalis
MSGFDDLGIYYSDSFGGEQPVGDDGQAKKSQLKKRFREFLRQYRVGTDRTGFTFKYRDELKRHYNLGEYWIEVEMEDLASFDEDLADYLYKQPTEHLQLLEEAAQEVADEVTRPRPAGEETIQEIQVMLRSDANPANIRSLKSEQMSHLVKIPGIIIAATAVRAKATKISIQCRSCRNTIGNIAVRPGLEGYAMPRKCNTEQAGRPKCPLDPYFIIPDKCKCVDFQTLKLQESPDAVPHGELPRHMQLYCDRYLCDKVVPGNRVTIMGIYSIRKSGKTSTKGRDRVGVGIRSSYIRVVGIQVDTEGTGRSAAGAITPQEEEEFRRLSAKPDIYETVAKSIAPSIYGSSDIKKAIACLLFGGSRKRLPDGLTRRGDVNLLMLGDPGTAKSQLLKFVERCSPIGVYTSGKGSSAAGLTASVMRDPVSRNFIMEGGAMVLADGGVVCIDEFDKMREDDRVAIHEAMEQQTISIAKAGITTTLNSRCSVLAAANSVYGRWDDTKGEENIDFMPTILSRFDMIFIVKDEHNEQRDMTLAKHVMNVHLSARTQSSSVEGEIDLNTLKKYIAYCRAKCGPRLSAESAEKLKNRYILMRSGARDHERETEKRSSIPITVRQLEAIVRISESLGKMKLQPFATETDVEEALRLFQVSTLDAAMSGSLSGVEGFTTQEDQEMLSRIEKQLKRRFAIGSQVSEHSIIQDFLKQKYPEHAIHKVLHLMMRRGEIQHRLQRKVLYRIK

SEQ ID NO: 5571 - DNA, 1260 bp, Homo sapiens
  CDS (1)..(1260)
atgcagggtgggcgtgggcatccgaagctcctacatccgtgtcctgggcatccaggtggacacagatggctctggccgcagcttgctggggccgtgagcccccaggaggaggaggagttccgtcgcctggctgccctcccaaatgtctatgaggtcatctccaagagcatcgccccctccatctttgggggcacagacatgaagaaggccattgcctgcctgctctttgggggctcccgaaagaggctccctgatggacttactcgccgaggagacatcaacctgctgatgctaggggaccctgggacagccaagtcccagcttctgaagtttgtggagaagtgttctcccattggggtatacacgtctgggaaaggcagcagcgcagctggactgacagcctcggtgatgagggacccttcgtcccggaatttcatcatggagggcggagccatggtcctggccgatggtggggtcgtctgtattgacgagtttgacaagatgcgagaagatgaccgtgtggcaatccacgaagccatggagcagcagaccatctctatcgccaaggctgggatcaccaccaccctgaactcccgctgctccgtcctggctgctgccaactcagtgttcggccgctgggatgagacgaagggggaggacaacattgacttcatgcccaccatcttgtcgcgcttcgacatgatcttcatcgtcaaggatgagcacaatgaggagagggatgtgatgctggccaagcatgtcatcactctgcacgtgagcgcactgacacagacacaggctgtggagggcgagattgacctggccaagctgaagaagtttattgcctactgccgagtgaagtgtggcccccggctgtcagcagaggctgcagagaaactgaagaaccgctacatcatcatgcggagcggggcccgtcagcacgagagggacagtgaccgccgctccagcatccccatcactgtgcggcagctggaggccattgtgcgcatcgcggaagccctcagcaagatgaagctgcagcccttcgccacagaggcagatgtggaggaggccctgcggctcttccaagtgtccacgttggatgctgccttgtccggtaccctgtcaggtgagcagatgcaggggccatggtctcaattgatctgggttccctggctcggagctctgtgggcagggctctggcctgctgggggcctgcagtgtgtgtcttgcttctctgagtttgctgagcttctctga

SEQ ID NO: 5572 - protein, 419 aa, Homo sapiens
MQGGRGHPKLLHPCPGHPGGHRWLWPQLAGAVSPQEEEEFRRLAALPNVYEVISKSIAPSIFGGTDMKKAIACLLFGGSRKRLPDGLTRRGDINLLMLGDPGTAKSQLLKFVEKCSPIGVYTSGKGSSAAGLTASVMRDPSSRNFIMEGGAMVLADGGVVCIDEFDKMREDDRVAIHEAMEQQTISIAKAGITTTLNSRCSVLAAANSVFGRWDETKGEDNIDFMPTILSRFDMIFIVKDEHNEERDVMLAKHVITLHVSALTQTQAVEGEIDLAKLKKFIAYCRVKCGPRLSAEAAEKLKNRYIIMRSGARQHERDSDRRSSIPITVRQLEAIVRIAEALSKMKLQPFATEADVEEALRLFQVSTLDAALSGTLSGEQMQGPWSQLIWVPWLGALWAGLWPAGGLQCVSCFSEFAELL

SEQ ID NO: 5573 - DNA, 2037 bp, Mus musculus
  CDS (1)..(2037)
atgatattactcaacctttgtacatgcaacaacttggagagattaatattacaggagagccattttttaaatgtgaactgcgaacacataaaatcatttagcaaaaatctgtatagacagctcatctcctacccacaggaggttataccaacctttgacatggctgtcaatgagatcttctttgaccgttatcctgactccatcttagaacatcagattcaagtcagaccttttaatgcgttgaagacaaagagtatgagaaacttgaatccagaagacattgatcagctcatcaccatcagtggcatggtcatcagaacatcacagctgattccggagatgcaggaggcctttttccaatgccaagtctgtgcccacaccacccgggtggagatagatcgaggcagaattgctgagccctgcagttgtgtgcactgccacactacccacagcatggcactgatccacaaccgatcattcttctctgacaagcaaatgatcaaacttcaagagtctcctgaagacatgcctgctgggcagacacctcacactattgtcctttttgcccacaatgaccttgttgacaaggttcaaccaggggacagagtgaacgtcacaggcatatatcgagcagtaccaattcgagttaatccaagagtgagcaacgtgaagtctgtctataaaacccacattgatgtcattcattatcggaaaacggatgcaaaacgtctgcatggccttgatgaagaagcagaacagaaacttttttcagagaaacgtgtgaaattgcttaaggaactttccaggaagccagatatttatgagcggcttgcttcagccttggctcccagcatttatgaacatgaagatatcaaaaagggaatcttacttcagctctttggtggaacaaggaaggatttcagtcacactgggaggggtaaattccgtgctgagatcaacatccttctgtgtggggaccctggcaccagcaagtcccagctgctacagtatgtgtacaacctggtccccagaggccagtacacgtctggaaaaggctccagtgcggtcggcctcaccgcctatgtgatgaaagaccctgagaccaggcagcttgtcctccagacaggtgccctcgtcctgagtgacaatgggatatgctgcatcgatgagtttgacaaaatgaatgaaagcacaaggtctgtgctgcatgaggtcatggaacagcagactctgtccattgcaaaggctgggatcatctgtcagctcaatgcgcgcacctctgtcctggcagcagcaaatcctattgagtctcagtggaatcctaaaaaaacaaccattgaaaatatccaactaccgcacacattgttgtcaaggtttgatctcattttcctcatgctagaccctcaggatgaggcatatgaccggcgtctagctcatcacctggtttcattgtactaccaaagtgaggagcaagtggaggaggagttcctggacatggccgtgctgaaagactacattgcatatgcccatagtaccatcatgccccgactgagtgaggaggccagccaggctctcattgaggcttatgtaaacatgaggaagattgggagtagccgggggatggtttctgcttaccctcgacagctagagtcattaattcgcttagcagaagcccatgctaaagtaagattttcaaacaaagttgaagcaattgatgtggaagaggcaaaacgcctccaccgggaggctctgaagcagtctgcaactgaccctcgtactggcattgtggatatttctattcttactacaggaatgagtgccacttctcgtaaacggaaagaagaattagctgaagcattgagaaaacttattttatctaagggtaaaacaccagccttaaagtaccaacagctgtttgaggatattcggggacagtctgacacagcaattaccaaggacatgtttgaagaagccctgcgagctttggctgatgatgatttcctaacagtgactgggaagactgtccgcctgctctga

SEQ ID NO: 5574 - protein, 678 aa, Mus musculus
MILLNLCTCNNLERLILQESHFLNVNCEHIKSFSKNLYRQLISYPQEVIPTFDMAVNEIFFDRYPDSILEHQIQVRPFNALKTKSMRNLNPEDIDQLITISGMVIRTSQLIPEMQEAFFQCQVCAHTTRVEIDRGRIAEPCSCVHCHTTHSMALIHNRSFFSDKQMIKLQESPEDMPAGQTPHTIVLFAHNDLVDKVQPGDRVNVTGIYRAVPIRVNPRVSNVKSVYKTHIDVIHYRKTDAKRLHGLDEEAEQKLFSEKRVKLLKELSRKPDIYERLASALAPSIYEHEDIKKGILLQLFGGTRKDFSHTGRGKFRAEINILLCGDPGTSKSQLLQYVYNLVPRGQYTSGKGSSAVGLTAYVMKDPETRQLVLQTGALVLSDNGICCIDEFDKMNESTRSVLHEVMEQQTLSIAKAGIICQLNARTSVLAAANPIESQWNPKKTTIENIQLPHTLLSRFDLIFLMLDPQDEAYDRRLAHHLVSLYYQSEEQVEEEFLDMAVLKDYIAYAHSTIMPRLSEEASQALIEAYVNMRKIGSSRGMVSAYPRQLESLIRLAEAHAKVRFSNKVEAIDVEEAKRLHREALKQSATDPRTGIVDISILTTGMSATSRKRKEELAEALRKLILSKGKTPALKYQQLFEDIRGQSDTAITKDMFEEALRALADDDFLTVTGKTVRLL

SEQ ID NO: 5575 - DNA, 2466 bp, Xenopus laevis
  CDS (1)..(2466)
atggaattgggaggccctgcagcagctggagacactgatatagctggacaacaactgtttaaagatgaactgtctgacaaatgtcaaaagcttttcctggagtttttggaagagtgcaaaggtaaagatggaagtaacctttatgtctctgcagcagaagaacttattagaccagaaaggaacactttggctgtcaattttacagatattgaatactacaatcaacaactagcaacaactatacaagaagagtattacagggtctaccctcatctttgccgagctgtgcgaagttttgcaagacagatgggaaacattccggcaaataaggaattctatatagcgttttcagattttcctgcaagacaaaagattcgcgagctcagctctgccaaaattggtactttactaagaattagtggtcaagttgtcagaactcatcctgttcacccagaactggtcagtggtacatttctgtgcatggactgccaatcgattgtaaaagatgtggaacagcaatttagatatactcaaccgactatctgcaaaaatccagtctgtgccaatcgccgccgattcacattggatacaaataagtctcgctttgttgattttcagaaggtaagaattcaagagacacaggcagagttaccccgtggtgctattccacgtagtgtggaaataattctacgtgcagaagctgtggaatctgcgatggctggtgatcgttgtgatttcactgggacactcattgttgtacctgatgtctctgctttggcagcaggagatgcccgtatggaaactggagccaaagtaacaggcggagaaggttttaactctgaaggagttcaaggcctaaaagcattgggagtaagagatctgtcctatcggttggcatttctagcctgttatgtgggtgctacaaatccacggtttggcggtaaagatttaagagaggaagaccaaacagctgaaagtataaaaaatcaaatgactgtacaagaatgggaaaaagtatttgaaatgagtcaagacaaaaatctctaccacaatttatgtacaagccttttcccaacaatacatggtaatgatgaaattaaaagaggagtcttactgatgctgtttggtggggttccaaagaccactatggaaggtacttctctgagaggagatatcaatgtgtgcattgttggagaccccagcacatctaagagccagtttttaaagcatgtagaagaattcagtcccagagcagtatatactagtgggaaagctagcagtgctgccggtttaactgctgctgttgtgaaagatgaggagtcccatgagtttgtgattgaagctggagctttaatgttggcagataatggagtttgctgcattgatgaattcgataagatggacctgaaagatcaagtggccattcatgaagctatggagcaacagaccatttccatcacaaaagcaggagtgaaggctacattaaatgcccgtacatctatcctggctgcagcaaatcctgtcggaggaagatacgaaagatccaaatcattaaagcataatgtcaatctatcagcgcccattatgtcacgatttgatctattttttattttagttgatgagtgcaatgaggtaacagattatgcaatagcacgaaggatagtagatttgcatgcaagaaatgaagaatcaatagaaagggtttattcaattgaagacattcagaggtatttgctgttcgctcgtcaattccagccaaaaataacaaaggaagctgaggaattcattgttgagcagtatcgtcgacttagacagcgtgatggcagcggagtagcaaaatcatcttggaggattacagtcagacaacttgagagtttgatacgattatctgaaagtatggctcgaatgcactgctctgatgaagttcagccaaaacatgtaaaagaagcttttagattgctaagtaaatccatcatacgtgtggacacaccagatgtcagctttgatcaaggcgaggatgaaaagaacattgaaggagagaataatggcaatttgaacaatggagaggaagcaatggaaacaaatcaggatgaaccaataaatgaaaagccatcctcaaatgctggattaaaaatgtcttttgcagagtataagcaaatctccaacttgttggttttgtacatgcagaagatggaagaaactgaagaagagtgccatctgacaacaactgacttggttaactggtatcttaaagaaatggaagctgaaatagagactgaaacagaactaatccttaaaaagcgtttaattgaaaaggtgattcacagattaatttattatgatcatattctgatagaactgaacaaatcggaattaaaaacaatggatgatacaaaggagacgggtgaagatgctgctgaagatcggattttagttgtgaatcctaattatatgttggaagattaa

SEQ ID NO: 5576 - protein, 821 aa, Xenopus laevis
MELGGPAAAGDTDIAGQQLFKDELSDKCQKLFLEFLEECKGKDGSNLYVSAAEELIRPERNTLAVNFTDIEYYNQQLATTIQEEYYRVYPHLCRAVRSFARQMGNIPANKEFYIAFSDFPARQKIRELSSAKIGTLLRISGQVVRTHPVHPELVSGTFLCMDCQSIVKDVEQQFRYTQPTICKNPVCANRRRFTLDTNKSRFVDFQKVRIQETQAELPRGAIPRSVEIILRAEAVESAMAGDRCDFTGTLIVVPDVSALAAGDARMETGAKVTGGEGFNSEGVQGLKALGVRDLSYRLAFLACYVGATNPRFGGKDLREEDQTAESIKNQMTVQEWEKVFEMSQDKNLYHNLCTSLFPTIHGNDEIKRGVLLMLFGGVPKTTMEGTSLRGDINVCIVGDPSTSKSQFLKHVEEFSPRAVYTSGKASSAAGLTAAVVKDEESHEFVIEAGALMLADNGVCCIDEFDKMDLKDQVAIHEAMEQQTISITKAGVKATLNARTSILAAANPVGGRYERSKSLKHNVNLSAPIMSRFDLFFILVDECNEVTDYAIARRIVDLHARNEESIERVYSIEDIQRYLLFARQFQPKITKEAEEFIVEQYRRLRQRDGSGVAKSSWRITVRQLESLIRLSESMARMHCSDEVQPKHVKEAFRLLSKSIIRVDTPDVSFDQGEDEKNIEGENNGNLNNGEEAMETNQDEPINEKPSSNAGLKMSFAEYKQISNLLVLYMQKMEETEEECHLTTTDLVNWYLKEMEAEIETETELILKKRLIEKVIHRLIYYDHILIELNKSELKTMDDTKETGEDAAEDRILVVNPNYMLED

SEQ ID NO: 5577 - DNA, 2496 bp, Zea mays
  CDS (1)..(2496)
atggaggcgttcggcgggttcttcgtggacgagaaggcagcgcgggtggagaacatcttcctcgagttcctgaagcgattcaaggagtctgatggcgcgggagagccgttctacgaggcggagatggaggtgatgcggtcgcgggagtccactaccatgtacgtagactttgcgcacgtcatgcgcttcaacgacgtcctccagaaggccatctctgaggagtacctcaggtttgaaccgtacttgaggaatgcatgcaagaggtttgcgttggagcaccgggctggcgagaaccgtgccccgctcatctcagatgatagccccaacaaagatatcaacattgctttctataacatcccgatgctgaaaaaactgagagagcttgggacagccgaaattggtaagctcacatcagtaatgggtgttgtgacacggacaagtgaagtgcggcctgaactattgcaaggaaccttcaaatgtctcgactgtgggaatgttgtgaagaatgtggagcagcagttcaagtacactgagccgataatatgcgttaatgcaacatgccagaacagaacaaaatgggcccttcttcgtcaggaaagcaaattcacagattggcagcgggtcagaatgcaggagacatcaaaagagatacccgctgggtcacttcctcgttcccttgatgtcattctgcggcatgagattgttgagaaggccagagctggggacacggttatatttactggaactgttgttgcagttcctgatgttatggctctaacttcacctggcgaacgagcagagtgtcgcagggaagctcctcagcgaaaaaacggaggtgttcaagaaggtgtaaagggcttgaagtcccttggagttagggatctgtcttatcgccttgcctttgtagcaaattcagtgcaggtcgcagatggtaggagagaagtggacatcagggaacgggacacagatggtgatgacagtgagagacagaaattcacagaagaagaggaagatgaagttgttaggatgaggaacactcctgatttctttaataagatagttgatagcatatgtcctaccgtatttggtcatcaagaaattaagagggccgtgcttcttatgcttttgggtggtgttcataagataacacatgaagggatcaaccttagaggtgacatcaatgtctgtattgttggtgacccaagctgtgcaaagtctcagttcctaaaatatactgctggtattgttccaagatctgtttacacgtcagggaagtcatcatcagctgctggtctgacagcaactgttgctaaagaaccagagactggtgaattctgtattgaggctggtgccctgatgctagctgataatggtgtttgttgtatcgatgaatttgataaaatggacattaaggatcaggtcgctatacatgaagcaatggaacagcaaacaattagcattaccaaagcaggaatacaggcaactttgaatgcacgaacatcaattttagctgcagcaaatccgaccggaggccgttatgacaagtcaaaaccacttaagtacaatgttgcattgcccccagctattctttcaagatttgatctggtctacatcatgatcgatgaacctgatgaaaacactgactaccacattgctcatcacattgtaagagtccatcagaaacgtgaagaagcacttgcccctgcatttagcaccgcacaactgaagcgttatatttcttttgcaaaatctttgaaacctcagcttagttcagaagcaaagaaagttctggtggagtcgtatgttacgcttcgtaggggggacagtactcctgggactagggttgcttacaggatgacagttcggcaattggaagcattgattcggctgtcagaagctattgctcgaagccatttagaaagagttgttctcccagctcatgtccgcctggcagttaaattgctcaagacatccatcatcagtgttgagtcaagtgaagttgatctctctgacttccaagatgctgaagatggaacaaatgtaccttctgagagtgacgctggacagccagctgaagaagatgctgctcctcagcagcagggtgcagaaaatgaccaagcagcggataatggtaagaagaaattggtaataactgaagaacacttccagagagttactcaagctttggttatgagactaaggcagcatgaagagtcagtcaagaaagatggagatggtttagctggcatgaagcaaggggatcttatcatctggtatgttgagcagcagaatgccaaaggggcatatagttctactgcagaggtgaaggaagaagtgaagtgtatcaaggccattatagagagacttatacagcgggaaggccatcttatagtcattgacgaaggtactgcagccgcagccgaagatggcagtggcgcaaggagaacatcagagagtagaatactggcagttaacccgaactatgttattgattag

SEQ ID NO: 5578 - protein, 831 aa, Zea mays
MEAFGGFFVDEKAARVENIFLEFLKRFKESDGAGEPFYEAEMEVMRSRESTTMYVDFAHVMRFNDVLQKAISEEYLRFEPYLRNACKRFALEHRAGENRAPLISDDSPNKDINIAFYNIPMLKKLRELGTAEIGKLTSVMGVVTRTSEVRPELLQGTFKCLDCGNVVKNVEQQFKYTEPIICVNATCQNRTKWALLRQESKFTDWQRVRMQETSKEIPAGSLPRSLDVILRHEIVEKARAGDTVIFTGTVVAVPDVMALTSPGERAECRREAPQRKNGGVQEGVKGLKSLGVRDLSYRLAFVANSVQVADGRREVDIRERDTDGDDSERQKFTEEEEDEVVRMRNTPDFFNKIVDSICPTVFGHQEIKRAVLLMLLGGVHKITHEGINLRGDINVCIVGDPSCAKSQFLKYTAGIVPRSVYTSGKSSSAAGLTATVAKEPETGEFCIEAGALMLADNGVCCIDEFDKMDIKDQVAIHEAMEQQTISITKAGIQATLNARTSILAAANPTGGRYDKSKPLKYNVALPPAILSRFDLVYIMIDEPDENTDYHIAHHIVRVHQKREEALAPAFSTAQLKRYISFAKSLKPQLSSEAKKVLVESYVTLRRGDSTPGTRVAYRMTVRQLEALIRLSEAIARSHLERVVLPAHVRLAVKLLKTSIISVESSEVDLSDFQDAEDGTNVPSESDAGQPAEEDAAPQQQGAENDQAADNGKKKLVITEEHFQRVTQALVMRLRQHEESVKKDGDGLAGMKQGDLIIWYVEQQNAKGAYSSTAEVKEEVKCIKAIIERLIQREGHLIVIDEGTAAAAEDGSGARRTSESRILAVNPNYVID

SEQ ID NO: 5579 - DNA, 2736 bp, Oryza sativa
  CDS (1)..(2736)
atggcgtctcgcggcggtggcggcggcggcgacggcaattcccctcctccctccgtgtcgtcgccggatgtgcgaccgtcgagccctctcccggcgaccaactcctccccgcctcagtcggggcggcgcggcggggggcggcgccggcgtggttccgccagcccgtacccgtcgtccccgtccctcggcgggttcgagacgccgccgcacccgggccgccgcacgccctccggcggcgcggcggcgcggcagcagcggcagaactggacgggggggcggttcccgccgaccccgtccacccccatgtccaccgacgacgtcccgctctcctcggaggccggggacgaggacacccccgagaccgacggcggcggcggcggcggcgcgggcgccgacgccacgccggtgttcgtctggggcaccaacatcagcgtgcaggacgtcaacgccgccatcctccggttcctccgccacttccgcgacccgcgcgacgccggccgcgtcgacccggtcatggacgagggcaagtacatgcgcgccatccaccgcatcctcgagctcgagggcggggagtcgctcgacgtcaacgcccacgacgtgttcgaccacgacccggacctctacggcaagatggtcaggtacccgctcgaggtgctcgccatctttgacatcgtgctcatggacctcgtcgcgcgcatcgagcccctcttcgagaagcacatccagaccaggatctacaacctcaagtcctcggtttgcttgaggaatctcaacccttctgatatcgagaagatggtgtccatcaagggtatgataattcggtgcagctcggtgattccagagctcaaggaggctgtgttccgctgcttggtttgcgggttctactctgagcctgtaatggttgatcgagggagggttactgagccgcacatctgtcagaaagaacaatgtaaagctacaaactctatgactcttgtgcataaccgatgcaggtttgcagataagcagatcataaagttgcaggaaacaccagatgagataccagaaggtggcactccacatactgttagtgtcttgatgcacgataagcttgtagatgctggaaagcctggagacagggttgagataactgggatatacagagccatgagtattagagttggcccaactcagaggacagtgaagtcgattttcaagacgtacattgattgccttcacataaagaagacagacaagtctagacttcatgttgaggactccatggaaactgataaccccaatgctaacaagacaactgaagatgattttctcagagataaggttgagaaattaaaagagttgtcaaagttgccagatatatatgacagattaactaggtcattggctccaaacatatgggagctggacgacgttaaaaggggcctcctttgccagctttttggtggaaatgctttgaggcttccttctggagctagtttccgaggcgacatcaatattttgcttgttggtgatcctggaacaagtaaatcccagcttctccaatacatgcacaaactgtctcctcgtggcatttatacaagtggcagaggaagttcagctgttggccttactgcatacgttaccaaggatcctgaaactggtgaaactgttcttgagagtggagcgcttgttttgagtgacaaaggtgtttgttgtattgatgaatttgataagatgtctgataatgctcgaagcatgttacatgaggtgatggaacaacagactgtctccattgccaaggctggaataattgcatctttaaatgccagaacatcagttctagcatgtgcaaatcctactgaatcacgttataatccaaggctctctgtgattgacaatatccatcttcctccaacactgctttctaggtttgacctcatttatctgatattggacaaggcagatgagcaaactgatagacgcctggctaagcatattgtttcgttgcattttgagaatccaaacatagaggagctcgaggtcttggatttgccaacacttgtagcctacataagttatgcaaggaagcatatacaaccacagttatctgatgaagctgcagaagaattgactcgcggctatgttgagatgaggaaaagaggaaacagccctggtagcagaaagaaggtcataactgcgacagctcgacaaattgagagcttgattcggctcagtgaagcactggcccgaatgcgattctctgaaatggttgaagtacaagatgttgtagaggccttcaggcttctcgaagttgccatgcagcaatcggcaactgatcatgccactggtacaatcgatatggatcttatcatgactggaatatctgcgagcgaaaggcagaggcgggacaatctcgttgcagcaacccgcaaccttgtgatggagaaaatgcagcttggagggccctcagtgcgaatgattgagttgctggaagaaattaggaagcagagctctatggaagttcatctgcatgatcttcgcggtgctcttggcactctgatgacagagggtgccgtagtcatccatggagacagcgtcaagaggaaaacaccttcttttgctgctaatcacgttttagttcgaattaatgccatccactcgatcgcgggattaagatccatccggccgttcatgtggctgctcatcctgagccataggatcggcgaaagcatattggatggtccagattttttttga

SEQ ID NO: 5580 - protein, 911 aa, Oryza sativa
MASRGGGGGGDGNSPPPSVSSPDVRPSSPLPATNSSPPQSGRRGGGRRRRGSASPYPSSPSLGGFETPPHPGRRTPSGGAAARQQRQNWTGGRFPPTPSTPMSTDDVPLSSEAGDEDTPETDGGGGGGAGADATPVFVWGTNISVQDVNAAILRFLRHFRDPRDAGRVDPVMDEGKYMRAIHRILELEGGESLDVNAHDVFDHDPDLYGKMVRYPLEVLAIFDIVLMDLVARIEPLFEKHIQTRIYNLKSSVCLRNLNPSDIEKMVSIKGMIIRCSSVIPELKEAVFRCLVCGFYSEPVMVDRGRVTEPHICQKEQCKATNSMTLVHNRCRFADKQIIKLQETPDEIPEGGTPHTVSVLMHDKLVDAGKPGDRVEITGIYRAMSIRVGPTQRTVKSIFKTYIDCLHIKKTDKSRLHVEDSMETDNPNANKTTEDDFLRDKVEKLKELSKLPDIYDRLTRSLAPNIWELDDVKRGLLCQLFGGNALRLPSGASFRGDINILLVGDPGTSKSQLLQYMHKLSPRGIYTSGRGSSAVGLTAYVTKDPETGETVLESGALVLSDKGVCCIDEFDKMSDNARSMLHEVMEQQTVSIAKAGIIASLNARTSVLACANPTESRYNPRLSVIDNIHLPPTLLSRFDLIYLILDKADEQTDRRLAKHIVSLHFENPNIEELEVLDLPTLVAYISYARKHIQPQLSDEAAEELTRGYVEMRKRGNSPGSRKKVITATARQIESLIRLSEALARMRFSEMVEVQDVVEAFRLLEVAMQQSATDHATGTIDMDLIMTGISASERQRRDNLVAATRNLVMEKMQLGGPSVRMIELLEEIRKQSSMEVHLHDLRGALGTLMTEGAVVIHGDSVKRKTPSFAANHVLVRINAIHSIAGLRSIRPFMWLLILSHRIGESILDGPDFF

SEQ ID NO: 5581 - DNA, 2424 bp, Brachydanio rerio
  CDS (1)..(2424)
atggctgctgaagttgtggacgatcaggaaatgagggaggctcagagggattacttggattttcttgacgacgaccaagaccagggcatctaccagagcaaagtacggcagatgatcagcgaaaacaaatccaggctcattgtaaacctcaacgacctgcgacgacgaaatgaaaagcgagcagcaaagctgttgaataacgcttttgaagagctcctggcattccagcgagccctgaaagatctggtggcttcaatagatgccacttacgccaagcaatgtgaggagttcttcattggtttggagggcagctttggcagcaaacatgtctcccctcgaaccctgacctctcgcctgctgggcagcatggtgtgtttggagggcatcgtcactaaatgctctttggtgcgtcccaaagtagtacgcagtgtgcactactgtccagccactaaaaagaccatggagcgcaaatacaccgatttgacttctctggatgccttcccttcaagtgccatttaccccaccaaggatgaagagaacaatccattggagacagagtttggtctgtctgtctataaggaccaccaaaccatcactatacaggagatgccggagaaggcccctgctggtcagctgccccgctctgtggacatcatcctggacaatgacctggtggacgccgtgaagcctggagaccgaacacaggtgatcggcacctaccgctgcctgccgggcaagaagggtggcttcacctcgggcaccttcaggaccatcatgattgcctgccatgtcaaacagatgagcaaagaaatttcccactacttctctgcggatgatgtggccaaaatcaagagcttctgcaggtctcgctctaagaatgtgtttgatcagttggctcgctctctggcccccagtattcacggtcatgagtacataaagaaggccatcctgtgcatgcttctaggaggagtggagaaggtgctggagaacggttcgcgtattcgaggagacattaacgtgcttctcataggtgacccatcagtggccaagtctcagttgctccggtacgttcttcacactgctcctcgggccattcccacaacaggccgtggttcatcaggtgtgggtctgaccgcagccgtcaccactgaccaggagacaggcgagcggcgtctggaagctggggccatggttttgggggatcgaggcgttgtctgcattgacgagttcgacaaaatgtcagatatggatcgcactgctatacatgaagtcatggagcagggccgagtcaccatcgctaaagctggcatccacgctagacttaatgcccgctgcagcgtcctggcagctgccaaccccgtctacggcagatatgatcagtataagacacccatggagaacatcggtctgcaggactctctgctgtctcgttttgatctgctcttcatcatgctggatcagatggaccctgagcaggaccgcgagatctcggaccacgtgctgcgtatgcaccgctacagagatccacatgagcaggacgggacagctcttgctcttggtggtacaatcgatgctttggccacggaagaccctgatgctacgcaggaggaggaagaggagctccaggtttacgagaaacacaatccactcctccacggcagcaaaaaaaacaaggatcgagtagtgagcaaagccttcatgaggaagtacatccatgtcgccaaagccatttctccagttttgacccaagatgcagccaatcacatcgcagaggaatattcacgactgcgcaaccaggagcagctgggctccgacatcgcacggacgtcaccggtcactgcccgaaccctggagactttgatccgtctgtccacggctcacgctaaagcccgcatgagtaaagctgtggagctggtggacactgaagtcgccgtggagctcgtgcagttcgcttatttcaagaaggttttggagaaggaacgtaaacgctctagaaatggacagcaggatgctgcttcagaagacgaggaagaagaggaagatgaagctcaagacacaccacgaccacccagaaaaaggcgcaggggatctcagggaagcgagtcttatgacccctatgacttcaacactgagactgatattccacagattcagtctccggctcctgcgttgcaggctgatgaagagcctgatcagaatggccacacagagttgtctgaggacaggtttaaggagtttaaagcggctctgcataaggttttccgctcttctcacgctcagtcggtgggtttgattgctctgatggagagcatcaacaagtcttgcccatcagcgtttaatgaaacagacttccgggctgctctcgcgcgcatgcaggacgacaaccaggtcatgctggctgatgacatcatcttcctgatttaa

SEQ ID NO: 5582 - protein, 807 aa, Brachydanio rerio
MAAEVVDDQEMREAQRDYLDFLDDDQDQGIYQSKVRQMISENKSRLIVNLNDLRRRNEKRAAKLLNNAFEELLAFQRALKDLVASIDATYAKQCEEFFIGLEGSFGSKHVSPRTLTSRLLGSMVCLEGIVTKCSLVRPKVVRSVHYCPATKKTMERKYTDLTSLDAFPSSAIYPTKDEENNPLETEFGLSVYKDHQTITIQEMPEKAPAGQLPRSVDIILDNDLVDAVKPGDRTQVIGTYRCLPGKKGGFTSGTFRTIMIACHVKQMSKEISHYFSADDVAKIKSFCRSRSKNVFDQLARSLAPSIHGHEYIKKAILCMLLGGVEKVLENGSRIRGDINVLLIGDPSVAKSQLLRYVLHTAPRAIPTTGRGSSGVGLTAAVTTDQETGERRLEAGAMVLGDRGVVCIDEFDKMSDMDRTAIHEVMEQGRVTIAKAGIHARLNARCSVLAAANPVYGRYDQYKTPMENIGLQDSLLSRFDLLFIMLDQMDPEQDREISDHVLRMHRYRDPHEQDGTALALGGTIDALATEDPDATQEEEEELQVYEKHNPLLHGSKKNKDRVVSKAFMRKYIHVAKAISPVLTQDAANHIAEEYSRLRNQEQLGSDIARTSPVTARTLETLIRLSTAHAKARMSKAVELVDTEVAVELVQFAYFKKVLEKERKRSRNGQQDAASEDEEEEEDEAQDTPRPPRKRRRGSQGSESYDPYDFNTETDIPQIQSPAPALQADEEPDQNGHTELSEDRFKEFKAALHKVFRSSHAQSVGLIALMESINKSCPSAFNETDFRAALARMQDDNQVMLADDIIFLI

SEQ ID NO: 5583 - DNA, 2577 bp, Xenopus laevis
  CDS (1)..(2577)
atgtcatctccaacatccacaccaagccgtaggaagagtaaacgtgggcgaggtagtaaccctccaactcctcgtggagaggaagtgcagtctcctccgtcacagaaaagacggacagaagattccacatcaattggtgagcttctgcccatgccaacctcaccttcaggagacattcagagtcccttgttttctagccctgcaccatcaaggcattcagcccatcaaagtgagcttgatctaagctctcctctgacttatggcacccctagctcaagggttgagggtaccccaagaagtggtatcagagggactcctgctcgtcagagagctgacctgggatcagcacgcaaagttaagcaggtggatttacattcagaccagcctgctgcagaggagctagttacgagtgagcaatctttgggacagaagttggtgatctggggaactgatgtcaatgttgccatatgcaaagaaaagtttcagcgttttgttcagcgattcattgatcctttggccaaagaagaggaaaatgtagggctggatctgaatgagcctatatatatgcaacgacttgaagagataaatgtggtaggcgagccatttctaaacattgactgtgaccatctcagaagctttgaccaggatctttacagacaactagtgtgctacccacaggaagttataccaacatttgatatggctgctaatgagatcttctttgagaggtaccctgactccattttggagcaccagattcaagttcgaccctataatgcattgaaaacaagaaatatgagaagcctaaatcctgaagatattgatcaacttatcacaattagtggcatggttatcagaacttctcaaatcatccctgagatgcaggaatcattttttaaatgtcaagtgtgtgccttcactactcgggtggagattgatcgtgggcgcattgcagagccatctgtctgcaaacactgcaacaccacacacagcatggctcttattcacaatcgctctatgttttcagacaagcaaatgattaaactgcaagagtctccagaagatatgcctgctggtcagacacctcatacaaccattctctatgctcataatgacttggtagataaggtacagcctggtgatagagtgaatgtcacaggtatttatagagctgtcccaattcgagttaaccctagagttcgaaatgtaaagtcggtttacaaaactcacattgatgtaattcattaccgaaaaacggattcaaagcggttgcatggtattgatgaggacactgaacagaagatgttcactgaagaaagggttgcagtgttaaaggaactggcagcaaagccagacatctacgagaggcttgctgcagctcttgcaccaagtatatatgagcatgaagatataaaaaagggaattttacttcagttgtttggtgggacacggaaggacttcagccatactggaagaggcaaattccgtgctgaagtaaacatacttttgtgtggtgatccaggaaccagtaaatctcagcttctccaatacgtatataatctggtacctagaggccagtacacctctggaaagggatccagcgcagttggattaaccgcatatgtgatgaaggacccagaaacgaggcagttggtactgcagactggcgccttggttcttagtgacaatggcatttgctgcattgatgaatttgacaaaatgaacgagagcactagatctgtcctacatgaagtaatggaacagcaaaccctctccattgcaaaggctggaataatctgtcaactaaatgcacgtacctccgttttggctgctgcaaacccagtggagtcacaatggaaccccaagaaaaccactatagaaaatatacagcttccacatacactcttatcaaggtttgatctaatatttttgatgctggatccacaagatgaaacatatgaccgccgcttagcccaccaccttgtggctttgtactaccagagtgaggagcaattgaaagaagagcacttagacatggcagtattaaaggattatattgcatatgctcgcacctacgtgaatccaagacttggtgaagaagcaagccaggctctaatagaggcctatgtagacatgaggaaaatcggcagtggtcgtggaatggtttctgcctatcccagacaactcgagtctctaatacgcttatcagaagcgcatgcaaaagtacgcttttctagcaaggtggaaacaattgatgttgaagaggcaaaacgtcttcatcgtgaggctttgaaacagtctgccactgatcccagaactggcattgttgatatatctattctcacaacaggaatgagtgcaactgctcgaaaacgcaaagaagaattggcccaggttttaaagaagcttatccagtccaagggcaaaactccagctttcaaataccagcagctttttgaggatctacgtgggcagtctgatgcagccattacaaaagacatgtttgatgaagctttgcatgcacttgcagatgaagactacttaacagtgactggaaagactgtaaggttgctgtaa

SEQ ID NO: 5584 - protein, 858 aa, Xenopus laevis
MSSPTSTPSRRKSKRGRGSNPPTPRGEEVQSPPSQKRRTEDSTSIGELLPMPTSPSGDIQSPLFSSPAPSRHSAHQSELDLSSPLTYGTPSSRVEGTPRSGIRGTPARQRADLGSARKVKQVDLHSDQPAAEELVTSEQSLGQKLVIWGTDVNVAICKEKFQRFVQRFIDPLAKEEENVGLDLNEPIYMQRLEEINVVGEPFLNIDCDHLRSFDQDLYRQLVCYPQEVIPTFDMAANEIFFERYPDSILEHQIQVRPYNALKTRNMRSLNPEDIDQLITISGMVIRTSQIIPEMQESFFKCQVCAFTTRVEIDRGRIAEPSVCKHCNTTHSMALIHNRSMFSDKQMIKLQESPEDMPAGQTPHTTILYAHNDLVDKVQPGDRVNVTGIYRAVPIRVNPRVRNVKSVYKTHIDVIHYRKTDSKRLHGIDEDTEQKMFTEERVAVLKELAAKPDIYERLAAALAPSIYEHEDIKKGILLQLFGGTRKDFSHTGRGKFRAEVNILLCGDPGTSKSQLLQYVYNLVPRGQYTSGKGSSAVGLTAYVMKDPETRQLVLQTGALVLSDNGICCIDEFDKMNESTRSVLHEVMEQQTLSIAKAGIICQLNARTSVLAAANPVESQWNPKKTTIENIQLPHTLLSRFDLIFLMLDPQDETYDRRLAHHLVALYYQSEEQLKEEHLDMAVLKDYIAYARTYVNPRLGEEASQALIEAYVDMRKIGSGRGMVSAYPRQLESLIRLSEAHAKVRFSSKVETIDVEEAKRLHREALKQSATDPRTGIVDISILTTGMSATARKRKEELAQVLKKLIQSKGKTPAFKYQQLFEDLRGQSDAAITKDMFDEALHALADEDYLTVTGKTVRLL

SEQ ID NO: 5585 - DNA, 2160 bp, Bombyx mori
  CDS (1)..(2160)
atggcaatgcgtgattacactgcagataaagaatctttcaagaactttttcgtggatttttgtcaaactgatgatgaaggaaaaaagtattttaaatatgctgaacaacttactaaagttgcacacagagaacagatagcatttgaagttgacttggatgatttacatgagatgaatgaagatttgactgaggcagtcaaacaaaataccagaagatacactaatatggtgtcagacgtggtttatgaaatgctgcctgattacaaattcaaagaggttgtagcaaaggattccttggatgtatacattgagcacagaattatgttggaagccagaaaccacaggattcctggagaaatgagggatcctaggaacagatacccaccagagcttatcaggagatttgaagtgtacttcaaagacttgtcaacatcgaaaagtgtacctatcagagaagttaaggctgaacatattgggaaactagttactgtgcgaggtatagtgactcggtgcacggacgtgaagccgctgctggtggtggcgacgtactcgtgcagcgcgtgcggcgccgagacgtaccagccggtgcgcgcgctgcagttcacgccgccgcccgcctgcaccgccgacgactgccgcctcaacaagaccgccggacagctgcatctgcagaccaggggctctaggttccagaagttccaggagcttaagatacaggagcactccgaccaagtcccggtgggcacatcccgcgccacgtgtccgtgtactgccgcggggagacgacgcggcgagcgcagccccggagaccacgtcgccatcaccggactcttcctgccgctacacaacgttggcttccggcagatcatgcagggattactctctgacacctatcttgaagcccactctgtatcgtgcctcaaccaaagtgacgagagtgagttggcggaggctctaacagaagaagaattggcagaactggccgaagaggacttatattcacgcatggcgcgtagtcttgcccccgaaatatatggacacgaagacgtgaagaaagcattgctgttgttactcgtcggtggagttgataaacgtccaaacggaatgaagattcgtggcaacatcaacatctgcttgatgggcgatcctggtgttgcgaagtctcagctgctcaactacatcgacaggctcgcgcccaggagtcagtacaccacgggccggggctcctcgggcgtcggcctcactgctgctgttttgaaggacccattcaccggggaaatgatgctagagggcggtgctctggtgctggccgaccagggcgtctgctgtatcgacgagttcgacaagatggcggagaacgaccgcacagccatacacgaagttatggagcaacagaccataagcattgcgaaggcgggtataatgacgtgcctgaacgcgcgcgtgtcgatcctggcggccgccaacccggcgtacggccgctacaacccgaagcggaccatcgaacagaacatacagctgccggccgcgctgctctcgcgcttcgatctgctctggctcatacaggataaacccaatcgcgagaaagacttagagctggcgaagcacatagcgtatgtgcaccagcactcgacccagccgcccagcagcgtccgcgcgctgtccatgaagctggtccggcgctacgtggcgctcaccaagcgcaaggagcccgccgtgccgcgcgcgctcgccgactacatcgtctcttcatacgtcgagctacggcgtgaagctagaaacgcacgtgacgtcacgttcacgtcggccaggaacttgctcgcaatactgcgcctctcgaccgcactcgcaaggctcagattatcagacgtcgttgaaaaggaggacgtatctgaggcaattcgtctcgtggagatgtcaaagcaatccctgcaacacgtggaagaaaacgttcagaggggtataacgtcaacggaccgtatattcgcgatagtgcgcgacctggccggctccaacaagaccgtcaaagtggccgatgtcatcgagaggtgcgtcgacaaaggattcaaaccagatcaggtggacgcttgcatcgaagaatacgagaacttgaacgtgtggcaagtgaaccaggtgcggaccaagataacgttcatgtga

SEQ ID NO: 5586 - protein, 719 aa, Bombyx mori
MAMRDYTADKESFKNFFVDFCQTDDEGKKYFKYAEQLTKVAHREQIAFEVDLDDLHEMNEDLTEAVKQNTRRYTNMVSDVVYEMLPDYKFKEVVAKDSLDVYIEHRIMLEARNHRIPGEMRDPRNRYPPELIRRFEVYFKDLSTSKSVPIREVKAEHIGKLVTVRGIVTRCTDVKPLLVVATYSCSACGAETYQPVRALQFTPPPACTADDCRLNKTAGQLHLQTRGSRFQKFQELKIQEHSDQVPVGTSRATCPCTAAGRRRGERSPGDHVAITGLFLPLHNVGFRQIMQGLLSDTYLEAHSVSCLNQSDESELAEALTEEELAELAEEDLYSRMARSLAPEIYGHEDVKKALLLLLVGGVDKRPNGMKIRGNINICLMGDPGVAKSQLLNYIDRLAPRSQYTTGRGSSGVGLTAAVLKDPFTGEMMLEGGALVLADQGVCCIDEFDKMAENDRTAIHEVMEQQTISIAKAGIMTCLNARVSILAAANPAYGRYNPKRTIEQNIQLPAALLSRFDLLWLIQDKPNREKDLELAKHIAYVHQHSTQPPSSVRALSMKLVRRYVALTKRKEPAVPRALADYIVSSYVELRREARNARDVTFTSARNLLAILRLSTALARLRLSDVVEKEDVSEAIRLVEMSKQSLQHVEENVQRGITSTDRIFAIVRDLAGSNKTVKVADVIERCVDKGFKPDQVDACIEEYENLNVWQVNQVRTKITFM

SEQ ID NO: 5587 - DNA, 2190 bp, Caenorhabditis briggsae
  CDS (1)..(2190)
atgaaggcaaaaacttacaacacagattttgaagccgagaagactaaaattcggaacttcttcgatgactactacgttgagaatgacgatggaacgaagtccttcccataccgtgatcagatattcgagatcgctcgtcgcgagaagcaggctattgtgatcgacgttgatcacatcaaggattccgacatcccagacgccatggagctctcagaagccatcgtcaacaacacgaaacggtatcagaagctcttcatggacacgatttacgacatcattctcgattatctcggagacaagcaagcgccagtcatcgatggactcgacgctcacatgttccaacgtatctacatggacaagaccgaaggagctaacaacgaggaagtgtctcttcaggataagctcaagaagtacccgccacaacttcttcaacgcttcgaagtctacttcaccaccgaggacaacgctcaccaaacctgcgttcgcaacatcaaggctaccgaaatcggacatctggtctctatgaaaggagtcgttatccgtgccaccgaggtaaagccatgcgttgaagtgatgacgtacacttgcgacacttgtgctgcggaggtctaccagcctgttaacggaatgcaattcaccccaccactcaactgcccgaataaggaatgtgtggaagccaaggccaacggaagactgcatatgcagctccgtggatccaagttcgtcaagttccaagagctcaaagttcaggagcttagcgagcaagtgccagtaggatccattccacgtactatgactgtctacgttcgtggagagatgaccagaagatgcaatactggaaatatagtgcagatttcgggagttttcctgccaatcatgcagtctggattccggccaactggtggtctcgttgctgacacctatttggaggctcattacatcaacaacctcgacgacaacccaacattcagtggagtccattccgaggagctcgaggttctccgtcgcaagggtgacaactacgaagccctcgccgcatcgatcgctccagaaatctacggacacgtcgatgtcaagaaatgtcttctgatggctctcgttggaggaaacgacaacacctctaacggaatgaagattcgtggttgcatcaatgttctaatgatgggagatccaggagtcgccaagtctcagcttctcggatacgtcaaccgtttggctccacgctctcagtacaccactggacgcggatcatctggagttggtctcaccgccgctgtgatgaaggatccagtcactggtgagatgtcgttggaaggaggagctcttgttttggctgacggtggaatctgttgcattgacgagtttgataagatgatggataatgacagaaccgctatccacgaggtgatggagcaacagaccatctcaatcgctaaggcaggaatcatgaccactctgaacgctcgtaccgctatcatcgcggcagccaatccagcctacggacgctacaacccaaatcgctctattgagcaaaatgtggatctcccagctgctcttctctcccgtttcgatctcatcctccttatgcaagacaaggctgatcgtgagaacgacaagactctcgccgagcacatcacctacgtccatcaacacggatgtcatccaaatcgcgagaagaaggacgtcatctcactggagactcttcgcgagtacattgctctttgcaagacctacactccaactgtggacccggctcttcgtgagcgcattgtggaggcttacgtcgagatgcgtcgtgatgctcgctattcctcggatccaacatttgtgtcaccaagaatgattctcggaatcgtcagaatggccaccgctcgtgccaagcttcgtctctccaaaattgtcgacgagactgatgttgaggaggctctccgtctcatgcagttcgccaaggactcgcttcgtccagagcagactagaatcgaaaaacgcatgtctccagtcgacgccgccttctctgtgctccgcgagatcttccactccagcaacgagccaatcgctctgtcgaacgccatccaacgatgcgctcgcaagggaatcagcgaggtcgccctccagaagtgtctggatcaatacacagccaacggcgtgctggtgatggatcgccagaacatcgttttcgcgatgaattga

SEQ ID NO: 5588 - protein, 729 aa, Caenorhabditis briggsae
MKAKTYNTDFEAEKTKIRNFFDDYYVENDDGTKSFPYRDQIFEIARREKQAIVIDVDHIKDSDIPDAMELSEAIVNNTKRYQKLFMDTIYDIILDYLGDKQAPVIDGLDAHMFQRIYMDKTEGANNEEVSLQDKLKKYPPQLLQRFEVYFTTEDNAHQTCVRNIKATEIGHLVSMKGVVIRATEVKPCVEVMTYTCDTCAAEVYQPVNGMQFTPPLNCPNKECVEAKANGRLHMQLRGSKFVKFQELKVQELSEQVPVGSIPRTMTVYVRGEMTRRCNTGNIVQISGVFLPIMQSGFRPTGGLVADTYLEAHYINNLDDNPTFSGVHSEELEVLRRKGDNYEALAASIAPEIYGHVDVKKCLLMALVGGNDNTSNGMKIRGCINVLMMGDPGVAKSQLLGYVNRLAPRSQYTTGRGSSGVGLTAAVMKDPVTGEMSLEGGALVLADGGICCIDEFDKMMDNDRTAIHEVMEQQTISIAKAGIMTTLNARTAIIAAANPAYGRYNPNRSIEQNVDLPAALLSRFDLILLMQDKADRENDKTLAEHITYVHQHGCHPNREKKDVISLETLREYIALCKTYTPTVDPALRERIVEAYVEMRRDARYSSDPTFVSPRMILGIVRMATARAKLRLSKIVDETDVEEALRLMQFAKDSLRPEQTRIEKRMSPVDAAFSVLREIFHSSNEPIALSNAIQRCARKGISEVALQKCLDQYTANGVLVMDRQNIVFAMN

SEQ ID NO: 5589 - DNA, 2472 bp, Xenopus laevis
  CDS (1)..(2472)
atggacctggtagatccttcccagagcgccgccgcggcagccggaacacaactagtcaaggatgaagtggctgagaagtgtcagaagttgttccaggactttctggaggaatttcagggtagcgatggggagttgaagtaccagagtgatgctgaggaactgatcaggccagagagaaatacactgcttgtcagctttgttgatttggaacagtttaatcagcagctcgcaactaccatccaagaggaattctacagggtgtatccgtacctctgtcgagcagtgagagcttttgctcgagatcatagcaacattccacagaacaaagaattctatgtcgccttccaggatcttcccaccagacataaaattagagagctgaccactcctcgcattggatctctgttgcggatcagcgctcaggtggttcggactcacccagtccacccggaactggtcagtgggacctttctttgcttggattgccagaccttggtgagggatgtagagcagcagtttaaatacacccagccaagcatttgcaggaacccagtgtgcgccaacagaaggaggttcatgttggatacaaacaagtcaagatttgttgatttccaaaaggttcgaattcaggaaacgcaggcagagctcccaagaggcagcattccacgaagcgttgaagtgatcctgcgagcggaagcagtggaatcatgtcaggccggggataggtgcgacttcactggatctctgatagttgtgcctgatatttctcagctctcaaccccaggtgttcgtgcagagaccagctctagggtgggtggaagagaagggtatgaggctgaaggtgtccaaggtctccgagcccttggagttcgagatctctcctataagctggtcttccttgcatgctatgtctgtccaaccaacccaagatttggtgggaaggaattgcatgaggaggatatgactgcagagagcatcaaaaaccagatgtctgtgaaggagtgggagaaggtgtttgaaatgagtcaagacaaaaacctgtaccataacctatgcaccagcctcttcccaactgtgcacggtaacgatgaagtaaagagaggcatcttactgatgctgtttgggggtgtccctaagtcaactatggagggaacatctttacgtggagacattaatgtttgtgttgttggagatccaagtactgccaagagccagttccttaagcacgttgaggagttcagtccccgtgcggtttacactagtggaaaagcctccactgctgccggtctgacagcagccgttgtgaaagatgaagaatcgcatgagtttgtgattgaagctggagcactgatgcttgctgacaatggagtttgttgcattgatgagtttgacaagatggatacaaaggaccaagtagctattcatgaggcaatggaacagcaaactatttcaatcaccaaagctggtgttaaggctacactaaatgctcggacttccattcttgctgcagcaaaccctgtagggggccgatatgatagagcaaagtcacttaagcagaatgtaaacttgtctgcccccatcatgtccagatttgatctcttcttcattcttgtggatgagtgcaatgaggtgacagattacgccattgcccgacgtattgtggacctccattccaggattgaggaatctattgatagagtttatactgtggatgaagtcaggagataccttctctttgccaggcagttcaaacctaagatctctaaggagtcagcagacttcatagtggagcagtacaagcgactaaggcagcgtgatggatcgggggtcactaaatctgcttggaggataactgtacggcagctggaaagcatgatcagattgtctgaaggcatggcaaggatgcactgcagtgatgaggtgcagccaaaacatgtaaaggaagcattccggttattgaacaaatccatcatcagggtggaaactccggatgtcaacctggatcaagacgatgaacatgagccagaggatgaaactcaggaggggacgaatggagatgctgaagttcccaatggtgtcaatggccatgtgaatggaattaatgggcattctcaggagtcaaatgctgctgccgcaaagccgtccttgcgtctaaattttgctgaatacaagcggatctctaacttgctggtccagcagctgaggaagatggaagatgaagatgaaacttcacagagaaggagtgaactcatgaattggtatctaaaggagattgagtcggaaattgactcagaagaggagcttattaataggaagcaaatcattgataaagttattcacagacttgtacactatgaccaaattttgattgaactcacacagactgaattaaaaggcacaggggatgaggttgtagcaaaagaggaggatccttaccttgtggtgaaccccaattacatactggaagattaa

SEQ ID NO: 5590 - protein, 823 aa, Xenopus laevis
MDLVDPSQSAAAAAGTQLVKDEVAEKCQKLFQDFLEEFQGSDGELKYQSDAEELIRPERNTLLVSFVDLEQFNQQLATTIQEEFYRVYPYLCRAVRAFARDHSNIPQNKEFYVAFQDLPTRHKIRELTTPRIGSLLRISAQVVRTHPVHPELVSGTFLCLDCQTLVRDVEQQFKYTQPSICRNPVCANRRRFMLDTNKSRFVDFQKVRIQETQAELPRGSIPRSVEVILRAEAVESCQAGDRCDFTGSLIVVPDISQLSTPGVRAETSSRVGGREGYEAEGVQGLRALGVRDLSYKLVFLACYVCPTNPRFGGKELHEEDMTAESIKNQMSVKEWEKVFEMSQDKNLYHNLCTSLFPTVHGNDEVKRGILLMLFGGVPKSTMEGTSLRGDINVCVVGDPSTAKSQFLKHVEEFSPRAVYTSGKASTAAGLTAAVVKDEESHEFVIEAGALMLADNGVCCIDEFDKMDTKDQVAIHEAMEQQTISITKAGVKATLNARTSILAAANPVGGRYDRAKSLKQNVNLSAPIMSRFDLFFILVDECNEVTDYAIARRIVDLHSRIEESIDRVYTVDEVRRYLLFARQFKPKISKESADFIVEQYKRLRQRDGSGVTKSAWRITVRQLESMIRLSEGMARMHCSDEVQPKHVKEAFRLLNKSIIRVETPDVNLDQDDEHEPEDETQEGTNGDAEVPNGVNGHVNGINGHSQESNAAAAKPSLRLNFAEYKRISNLLVQQLRKMEDEDETSQRRSELMNWYLKEIESEIDSEEELINRKQIIDKVIHRLVHYDQILIELTQTELKGTGDEVVAKEEDPYLVVNPNYILED

SEQ ID NO: 5591 - DNA, 2493 bp, Oryza sativa
  CDS (1)..(2493)
atggaggcgttcggcgggttcttcgtggacgagaaggcggcgcgggtggagaacatcttcctcgagttcctcaggcggttcaaggaggcggatgcggcggaggcgttctacgagacggagctggaggcgatgcggtcgcgggagtccaccaccatgtacgtcgacttcgcccacgtcatgcgattcaacgacgtcctccagaaggccatctccgaggagtatctcaggttcgagccgtacctccggaatgcgtgcaagaggtttgtgatggagcagaggactggcgagaaccgtgcaccaatcatctctgatgatagccctaacaaggacattaacattgccttctacaacataccaatgctgaagaggttgagggagcttggaacagcagagattggtaagctcacggctgtaatgggggtggttacacggacaagtgaggtccggcctgagttactgcaaggcaccttcaagtgccttgactgtggaaatgttgtaaagaatgttgagcagcagttcaagtatactgagccaataatatgtgtcaatgcaacatgccaaaatcgatcaaaatgggcccttctccgacaagagagcaagttcacagattggcagcgggtcaggatgcaggagacatcaaaagaaatacctgctggttcactaccacgctccctggatgtcattctgaggcatgagattgttgagaaggctagagctggagacacggtcatatttactggaactgttgttgctgttcctgatgttatggctctaacttcacctggtgagagagcagagtgtcgccgggaggctcctcagcgaaagaatgggtctggtgtccaagaaggtgtcaagggcttgaaatcactaggagtacgagatctgtcatatcgccttgcttttgtagcaaactcagtgcaggtggcggatggaaggagagaagtcgacatccgggacagggacatagatggagatgacagcgaaagacagaagttcactgaagaagaggaagatgaagttgttaggatgaggaacgttcctgattttttcaataagatagttgatagcatatgtcccactgtctttgggcatcaagaaattaagagagcaatccttctcatgcttttgggtggtgttcacaagataacacatgaagggataaaccttagaggtgacatcaatgtctgtattgttggtgatccaagttgtgcgaagtctcagttcttaaaatataccgctggtattgttccacgatctgtttacacatcagggaagtcctcatctgctgctggtttgacagcaactgttgctaaagaaccagagactggcgaattttgcattgaggcaggagcactcatgttagctgataatggcatctgctgcattgatgaatttgataaaatggacatcaaagatcaggttgctatacatgaagcaatggaacagcaaaccattagcataacaaaagcaggaatacaagcaactttgaatgcaaggacttcaattttggcagcagcaaatcccacaggagggcgttatgacaagtcaaaaccactcaagtataacgtggcattgcctccagctattctttcaagatttgatctggtatacataatgatcgatgagcctgatgaaaacactgactaccacattgctcatcacattgtgagggtccatcagaaacgtgaagaagcacttgcccctgcatttagcacggcagaattgaaacgttacattgcttttgcgaagtccttgaaacctcagctgagttctgaagcaaagaaagttctggttgaatcatatgttacccttcgtagaggagatagtacccctggtactagggttgcttataggatgacagttaggcaactagaggcattaatcaggctttcagaagctattgcccgaagtcatttggaaagagttgttctcccagcccatgttcgcatggcagttaaattgctcaagacatccatcatcagcgtggaatcaagtgaagttgatctctctgatttccaagatgctgatgatggcacaaatgtaccagccgataatgatgctggtcagccaacagaaatggatgctgctcctcaacaagacggtccagaaaatgagcaagcggcagatactggtaagaagaagttggttataaccgaagaacatttccagagagtcacgcaagctttagttatgagactacggcagcatgaagagtctgtcacgaaagatggagatggtctggctggcatgaagcaaggggatctgataatttggtatgttgagcagcagaatgcccaaggagcctatagttctacagcagaggtgaaggaagaagtgaagtgcatcaaggccatcatagagaggttaatacagagggatggccatctcatagtgatagacgaaggagcagccccagcggctgacgacggtgctgcacgaagaacatcagagagcagaatcctggcagttaatccgaactatgtcatcgattaa

SEQ ID NO: 5592 - protein, 830 aa, Oryza sativa
MEAFGGFFVDEKAARVENIFLEFLRRFKEADAAEAFYETELEAMRSRESTTMYVDFAHVMRFNDVLQKAISEEYLRFEPYLRNACKRFVMEQRTGENRAPIISDDSPNKDINIAFYNIPMLKRLRELGTAEIGKLTAVMGVVTRTSEVRPELLQGTFKCLDCGNVVKNVEQQFKYTEPIICVNATCQNRSKWALLRQESKFTDWQRVRMQETSKEIPAGSLPRSLDVILRHEIVEKARAGDTVIFTGTVVAVPDVMALTSPGERAECRREAPQRKNGSGVQEGVKGLKSLGVRDLSYRLAFVANSVQVADGRREVDIRDRDIDGDDSERQKFTEEEEDEVVRMRNVPDFFNKIVDSICPTVFGHQEIKRAILLMLLGGVHKITHEGINLRGDINVCIVGDPSCAKSQFLKYTAGIVPRSVYTSGKSSSAAGLTATVAKEPETGEFCIEAGALMLADNGICCIDEFDKMDIKDQVAIHEAMEQQTISITKAGIQATLNARTSILAAANPTGGRYDKSKPLKYNVALPPAILSRFDLVYIMIDEPDENTDYHIAHHIVRVHQKREEALAPAFSTAELKRYIAFAKSLKPQLSSEAKKVLVESYVTLRRGDSTPGTRVAYRMTVRQLEALIRLSEAIARSHLERVVLPAHVRMAVKLLKTSIISVESSEVDLSDFQDADDGTNVPADNDAGQPTEMDAAPQQDGPENEQAADTGKKKLVITEEHFQRVTQALVMRLRQHEESVTKDGDGLAGMKQGDLIIWYVEQQNAQGAYSSTAEVKEEVKCIKAIIERLIQRDGHLIVIDEGAAPAADDGAARRTSESRILAVNPNYVID

SEQ ID NO: 5593 - DNA, 2163 bp, Xenopus laevis
  CDS (1)..(2163)
atgcccagggactaccagaccgagaaagaaaaatgcaagacctttctgcaggagttttataaggatgatgaaattggaaagaaacacttcaagtatggcgtccaactggctaatattgctcacagagagcaggttgcattatacattgacctggatgacctggctgaggaggacccagagttagtggatgccatctgtgaaaatactaggaggtacaccaacctgtttgctgatgctgttcaggagctgctgcctcagtacaaagagcgagaggtagtgcataaagatgctttggatgtgtatatcgagcaccggttaatgatggagcagagaggcagagatcccaatgagatgcgggattctcaaaaccagtatccaccagagcttatgcgcagatttgaactatacttcaaagctccaagcagctcgaaagcccgtgtagtgcgagacgtcaaagcagattcaattggcaagttggtcaacattcgaggcatagtcacgagggtcacagaagtcaagcctatgatggtagtggccacttacacatgcgatcagtgtggagcagagacctaccaaccaattcaatctccaactttcatgccacttataatgtgcccaagcagagagtgtcagacaaaccgctctggtggcaggctttacttacaaacccgtggctctaagtttattaaattccaggaactgaagattcaagaacatagcgatcaggttccagttgggaacatccctcgctgtatgagtgtatatgtgcgtggggaaaacactcggcttgctcagcctggagaccatgttggtattaccggagtcttcctgccaatgctcagaactggcttccgtcaggtggtacagggtctcctttcagagacataccttgaatgtcatcgtttggtgaaaatgaacaagtcggaggatgatgaacttgggacagaagagctgagtgaagaggagctgcgacagatcactgaggaagatttctatgagaagctagcagcctccattgctcctgagatttatgggcatgaggatgtgaagaaggcccttctgctgctcttagtgggaggtgttgataattctcctcgtggaatgaagatcagagggaatattaacatctgcctcatgggtgacccaggagtagcaaaatcacagctgctttcttacattgatcgtctagcaccccgtagtcagtatacaacaggtcgaggctcttctggagttggtctcactgcagcggtaatgaaagacccagtgactggggagatgactctggaaggtggagcgttggtactggcggatcagggtgtttgctgcattgatgagtttgataagatgatggacactgacagaacagccatccacgaagtcatggagcagcagactatctccatagccaaggctggtataatgactacgttgaatgctcgttgctccattcttgctgctgctaacccagcatatgggagatacaacccaaagaagactgtggagcaaaatattcagctgcctgctgctttactgtctcgatttgatgtactctggctaatccaagacaagcctgaccgggacaatgatctcagactggctcagcatattacgtatgtccatcagcacagcaaacaaccaccatcacaattccagcctctggatatgaaactcatgcgacgttacatcactatgtgcaagcgcaagcagcctgcaataccagaagcgcttgcagattatttgacggctgcctatgtggagatgaggaaagaagccagaaccaacaaagacatgaccttcacttctgcccgaaccctgttgtctgttctgagactgtctacagccttggctcggctacgtctggaagatgtagtggagaaagaggatgtaaatgaagccatgaggttgatggaaatgtccaaggactccttgcttggcgacaagggccacacttcaaggactcaacgcccggctgatgtgatcttttccactatccgtgagatggtcccagaaaaaggtgcccgcagtgtaaaatactcggaggctgagcaacgctgtgtctctaaaggcttcactcctgcacagtttgaggctgctttggaagagtatgaggagctcaatgtttggctggttaatcaggcccgcaccaagatcacatttgtgtga

SEQ ID NO: 5594 - protein, 720 aa, Xenopus laevis
MPRDYQTEKEKCKTFLQEFYKDDEIGKKHFKYGVQLANIAHREQVALYIDLDDLAEEDPELVDAICENTRRYTNLFADAVQELLPQYKEREVVHKDALDVYIEHRLMMEQRGRDPNEMRDSQNQYPPELMRRFELYFKAPSSSKARVVRDVKADSIGKLVNIRGIVTRVTEVKPMMVVATYTCDQCGAETYQPIQSPTFMPLIMCPSRECQTNRSGGRLYLQTRGSKFIKFQELKIQEHSDQVPVGNIPRCMSVYVRGENTRLAQPGDHVGITGVFLPMLRTGFRQVVQGLLSETYLECHRLVKMNKSEDDELGTEELSEEELRQITEEDFYEKLAASIAPEIYGHEDVKKALLLLLVGGVDNSPRGMKIRGNINICLMGDPGVAKSQLLSYIDRLAPRSQYTTGRGSSGVGLTAAVMKDPVTGEMTLEGGALVLADQGVCCIDEFDKMMDTDRTAIHEVMEQQTISIAKAGIMTTLNARCSILAAANPAYGRYNPKKTVEQNIQLPAALLSRFDVLWLIQDKPDRDNDLRLAQHITYVHQHSKQPPSQFQPLDMKLMRRYITMCKRKQPAIPEALADYLTAAYVEMRKEARTNKDMTFTSARTLLSVLRLSTALARLRLEDVVEKEDVNEAMRLMEMSKDSLLGDKGHTSRTQRPADVIFSTIREMVPEKGARSVKYSEAEQRCVSKGFTPAQFEAALEEYEELNVWLVNQARTKITFV

SEQ ID NO: 5595 - DNA, 2592 bp, Xenopus laevis
  CDS (1)..(2592)
atgtcctctccaacatccacaccaagccgcaggaggaacaaacgtgggcgaggcagtaaccctccaactcctcatggagaggaagtgcagtctcctccgtcacagagacgacggacagaagattccacatcaattggtgaactactgcccatgccaacctctccttcaggtgacgttcagagccccagtggacaagagctcttgttttctagccctgcaccatcaagacattcagcccatcaaagtgagcttgatcttagttctcctctgacttatggcacccctagctcaagggttgagggtaccccaagaagtggtatccgagggacacctgctagacagagacctgacttgggatcagcacggaaagttaagcaagtggatttacattcagaccagcctgctgcagaggagctagttacgagtgagcaatctttgggacagaagttggtgatctggggaactgatgtcaatgtagccacttgcaaagaaaagtttcagcgttttgttcagcgtttcattgatccttcagccaaagaagaggataatgtaggactggatctgaatgagcctatatatatgcagcgacttgaagagataaatgtggtaggtgatccatttctcaacattgactgtgaccatctcagaaactttgaccaggatctttacaggcagctagtgtgctacccacaggaagtcattccaacatttgatatggctgctaatgagattttctttgagcggtatcctgactccattttggagcaccagattcaagttcgaccctataatgcattgaaaactaggaatatgagaagcctaaatcctgaagatattgatcaacttatcacaattagtggcatggttatcagaacttcacaaatcatccctgagatgcaggaagccttttttaaatgtcaagtgtgtgccttcactactcgggtggagattgatcgtggtcggattgcagagccatcggtctgcaaacactgtaacaccacacacagcatggctcttattcacaatcgctctatgttttcagacaagcaaatgattaaactgcaagagtctccagaagatatgcctgctggtcagacccctcatacaactatcctctatggtcataatgacttggtggataaggtacagcctggtgatagagtgaatgtcacaggtatttatagagctgttccaattcgagttaaccctagagttcgaaatgtgaagtctgtttacaaaactcacatcgatgtaattcattaccgaaaaactgattcaaagcggttgcatggtattgatgaagacactgaacagaagttgttcactgaagaaagggttgcaatgttaaaggaactggcagcaaagccagacatctatgagaggcttgctgcagctcttgcaccaagtatatatgagcatgaagatataaaaaagggaattttacttcagttgtttggtgggacacggaaggacttcagccataccggaaggggcaaattccgagctgaagtaaacatacttttgtgtggtgatccaggaacgagtaaatctcagcttctccaatatgtatttaatctggtacctagaggtcagtacacctctggaaagggatccagtgcagttgggttaaccgcatacgtgatgaaggacccagaaacgaggcagttggtactgcagacaggagcattggttcttagtgacaatggtatttgctgcattgatgaatttgacaaaatgaatgagagcactagatctgtgctacatgaagtaatggaacagcaaaccctctccattgctaaggctggaattatctgtcagctgaatgcacgtacatctgttttggctgctgcaaacccggtagagtcacaatggaaccccaagaaaaccactatagaaaatattcagctcccacatacactcttatcaaggtttgatctaatatttttgatgctggatccacaagatgaagcatatgatcgccgcttagcccaccaccttgtggctttgtactaccagagtgaggagcagatgaaagaagagcacttggacatggcagtattaaaggattatattgcatatgctcgcacttatgtgaatccaagacttagtgaagaagcaagccaggctctaatagaggcctatgtcagcatgcggaaaatcggcagtggtcgtggcatggtttctgcctatcccaggcagcttgagtctttaatacgcctatcagaagctcatgcgaaagtacgcttttctaacaaggtggaaacaattgatgtagaagaggccaaacgtcttcatcgtgaggctttgaaacagtctgccactgatcccagaactggcattgttgatatatctattcttacaacaggaatgagtgcaactgctcgaaaacgtaaagaggaattggctcaggttttaaagaagctcatccagtccaagggcaaaactccagcgttaaaataccagcagctctttgaggatctacgtgggcagtctgatgcagccattacaaaagacatgtttgatgaagctttgcatgcccttgcggatgacgactacttaacagtgacaggaaagactgtaaggttgctgtaa

SEQ ID NO: 5596 - protein, 863 aa, Xenopus laevis
MSSPTSTPSRRRNKRGRGSNPPTPHGEEVQSPPSQRRRTEDSTSIGELLPMPTSPSGDVQSPSGQELLFSSPAPSRHSAHQSELDLSSPLTYGTPSSRVEGTPRSGIRGTPARQRPDLGSARKVKQVDLHSDQPAAEELVTSEQSLGQKLVIWGTDVNVATCKEKFQRFVQRFIDPSAKEEDNVGLDLNEPIYMQRLEEINVVGDPFLNIDCDHLRNFDQDLYRQLVCYPQEVIPTFDMAANEIFFERYPDSILEHQIQVRPYNALKTRNMRSLNPEDIDQLITISGMVIRTSQIIPEMQEAFFKCQVCAFTTRVEIDRGRIAEPSVCKHCNTTHSMALIHNRSMFSDKQMIKLQESPEDMPAGQTPHTTILYGHNDLVDKVQPGDRVNVTGIYRAVPIRVNPRVRNVKSVYKTHIDVIHYRKTDSKRLHGIDEDTEQKLFTEERVAMLKELAAKPDIYERLAAALAPSIYEHEDIKKGILLQLFGGTRKDFSHTGRGKFRAEVNILLCGDPGTSKSQLLQYVFNLVPRGQYTSGKGSSAVGLTAYVMKDPETRQLVLQTGALVLSDNGICCIDEFDKMNESTRSVLHEVMEQQTLSIAKAGIICQLNARTSVLAAANPVESQWNPKKTTIENIQLPHTLLSRFDLIFLMLDPQDEAYDRRLAHHLVALYYQSEEQMKEEHLDMAVLKDYIAYARTYVNPRLSEEASQALIEAYVSMRKIGSGRGMVSAYPRQLESLIRLSEAHAKVRFSNKVETIDVEEAKRLHREALKQSATDPRTGIVDISILTTGMSATARKRKEELAQVLKKLIQSKGKTPALKYQQLFEDLRGQSDAAITKDMFDEALHALADDDYLTVTGKTVRLL

SEQ ID NO: 5597 - DNA, 2538 bp, Brachydanio rerio
  CDS (1)..(2538)
atgtcttcaccatcatcccagagccgtaagagagaccctccgaccccggcgagcgaggatcctctgtctcctccatcccagcgctccagagctcatgatacctccactgagctgcagccaatgcccacctctccggctcaggatgcatcgctgttctccagccccatggccccgcgctccgtcttgcagagtgagattgatgccagttctcctctgatgtacgggacgcccagctccagggtggaaggaacgccccgcagcggcatccgcgggacaccggcgcgccagcgggctgacctgggatctgtgcggaaagccccgcaggtcgacatgcactctgagccggcctctggagacgcagcagtggccggagatcagggtgcaggacagaggctcgtgatctgggggactgatgtcaatgtgggaacctgcaaggagaagtttcagcgtttccttcagcagttcacagaccccgactcgagagaagaggagaacgctggtctggatctcaatgaaccgctttatatgcagaaactggatgagatcagtgttgttggagagccggtgttgaatgtgaactgcactcatattcagacatttgatgctgatctgtaccgccagctcatctgttatccacaggaagtcatccccactttcgacatgtctgtcaatgagctcttcttcgatcgttttccagactctgtgttggagcatcagattcaagtgcgaccctacagcgctattaaaaccagaaacatgcgcaacctcaatcctgaagacattgaccagctcatcactatcagcgggatggtgatccgtacatctcagctgatcccggagatgcaggaggcttttttccgctgtcaggtttgtgcgtttaacacgcgtgtggaggtggatcgcggacgcatcgctgaacccgccgtctgccgaaactgcaacaccacacacagcatggcactggtgcacaaccgctccgtcttctccgacaaacaaatgataaagctgcaggagtctccggaggacatgcctgcgggtcaaactcctcacaccacagtcgtctacgctcacaacgacctggtggacaaagtgcagcccggagaccgagtcaacatcaccggcatctacagagctgccccgatgcgtctgaacccacggcagagccaggtgaagtctgtttacaagacccacattgacgccattcacttccgcaagactgacgagaagcgtctgcatggactggacgaggacggagagcagaaactcttcactaaagaacgagtcgctctgctaaaagagctagccgctaaacctgacgtctatgagcgcctgtcctctgctctggctcccagcatctacgaacacgaggacatcaagaagggcatcctgttgcagttatttggcgggacgcgtaaggacttcactcagacgggccgaggaaacttccgtgctgaagtcaacatcctgctgtgtggtgatccgggcaccagtaaatcccagctgctgcagtacgtgtacaacctggttcctcgcggtcagtacacgtccgggaaaggatccagcgccgttggtctcacagcctacgtgatgaaggatcctgaaacccgacagctggtcctgcagaccggagcgctcgtgctcagcgataatggcatctgctgcatcgacgagttcgacaagatgagcgacaacaccagatctgtgctgcacgaggtcatggagcagcagacgctctctattgctaaggctgggattatttgtcagcttaatgctcggacctccatcctcgcagcagccaatccggtggagtctcagtggaaccccaaaaagacaacgatagagaacattcagctgcctcacacactgctgtccaggtttgatttgatcttcctaatgctggaccctcaggacgaggcgtatgacaggcgtctggcgcaccaccttgtctctctgtattatcagagtgaagagcagattgaagaggagcatctggacatggctgtactgaaagactacatcgccttcgctcgcacaactgtacatcccagactgagtgaagaagccagtcaggcccttattgaggcctatgtggacatgcgcaagatcggcagcggtcgagggatggtgtctgcgtatccccgtcagctggagtcactcatcaggctagctgaagctcatgctaaagtacgcttctctggaaaagtggagaccatcgatgtggaggaagccaagagactccatcgagaagccctgaaacagtccgcaactgatcccaggacaggatttgtggatatttccatcctcaccacaggaatgagcgctacagcacgcaagcgtaaggaggaagtggctcaagcactgaagaagctcatccaatcaaagggcaaaacaccagcaatgaagtaccaacagctgttcgatgatctccgtggccagtcggaagcggccatcactaaggacatgtttgatgaagccctcagacttctggctgatgaagattatctgacggtcacaggaaaaactgtccggcttctctaa

SEQ ID NO: 5598 - protein, 845 aa, Brachydanio rerio
MSSPSSQSRKRDPPTPASEDPLSPPSQRSRAHDTSTELQPMPTSPAQDASLFSSPMAPRSVLQSEIDASSPLMYGTPSSRVEGTPRSGIRGTPARQRADLGSVRKAPQVDMHSEPASGDAAVAGDQGAGQRLVIWGTDVNVGTCKEKFQRFLQQFTDPDSREEENAGLDLNEPLYMQKLDEISVVGEPVLNVNCTHIQTFDADLYRQLICYPQEVIPTFDMSVNELFFDRFPDSVLEHQIQVRPYSAIKTRNMRNLNPEDIDQLITISGMVIRTSQLIPEMQEAFFRCQVCAFNTRVEVDRGRIAEPAVCRNCNTTHSMALVHNRSVFSDKQMIKLQESPEDMPAGQTPHTTVVYAHNDLVDKVQPGDRVNITGIYRAAPMRLNPRQSQVKSVYKTHIDAIHFRKTDEKRLHGLDEDGEQKLFTKERVALLKELAAKPDVYERLSSALAPSIYEHEDIKKGILLQLFGGTRKDFTQTGRGNFRAEVNILLCGDPGTSKSQLLQYVYNLVPRGQYTSGKGSSAVGLTAYVMKDPETRQLVLQTGALVLSDNGICCIDEFDKMSDNTRSVLHEVMEQQTLSIAKAGIICQLNARTSILAAANPVESQWNPKKTTIENIQLPHTLLSRFDLIFLMLDPQDEAYDRRLAHHLVSLYYQSEEQIEEEHLDMAVLKDYIAFARTTVHPRLSEEASQALIEAYVDMRKIGSGRGMVSAYPRQLESLIRLAEAHAKVRFSGKVETIDVEEAKRLHREALKQSATDPRTGFVDISILTTGMSATARKRKEEVAQALKKLIQSKGKTPAMKYQQLFDDLRGQSEAAITKDMFDEALRLLADEDYLTVTGKTVRLL

SEQ ID NO: 5599 - DNA, 2208 bp, Xenopus laevis
  CDS (1)..(2208)
atgtcgggatttgacgatcttggaatctactacagcgatagttttggtggagagcagccggtgggtgacgatggacaggccaagaaatcgcaacttaagaagcgtttcagagagttcctcaggcagtaccgggtcggcaccgatcgcacgggcttcactttcaaatacagagatgaactcaagcgtcactataatcttggagaatactggatagaggtggaaatggaggacctggctagctttgatgaggaccttgcagactatctatataagcagccaactgaacatctgcagttgctggaagaggcagcccaggaagtagcagatgaggtgactcgcccacgacctgcaggtgaagagactatccaggaaatccaagttatgttgcgatctgatgccaaccctgcaaatattcgcaacctcaagtctgagcaaatgtctcatcttgtcaaaattcctggtatcatcattgctgccaccgctgtgagagccaaggctaccaagatctcaatccagtgtcgcagctgccgaaacacaattggcaacatagctgtacggcctggtctagagggatatgccatgccacgtaaatgcaacacggaacaggctggccgtccaaagtgcccattggatccttactttattatacctgacaagtgcaaatgtgtagattttcaaacattgaaacttcaggagtctccagatgctgtgcctcatggagagctcccacgacatatgcaactgtattgtgacagatacttgtgtgataaagttgtccctggaaatagagtgacaatcatgggcatttactccatccagaagagtggaaagacctccacaaagggccgggatcgagtgggagttgggatccgcagctcctatataagggtagtgggcatccaggtggatacagaaggcacaggaagaagtgcggcaggtactataacaccacaagaggaagaggagtttaggcgcttggctgtaaagcctgatatctatgaaactgttgccaaaagtatcgcaccctccatttatggcagtactgatatcaagaaggccattgcatgcctgttgtttggaggctcccgaaaaaggcttccagatggattgaccagaagaggtgatgtcaatttattgatgcttggagatcctgggacagctaaatcacagctgctgaagtttgtagagcggtgctctcctatcggggtttatacttctgggaaaggcagcagtgcagctggccttactgcttcagttatgagagatccagtgtcccgtaacttcattatggaaggaggtgccatggtgcttgctgatggaggggtggtctgcattgatgagtttgataagatgcgagaggatgatagagttgctatccacgaagccatggagcagcaaactatttccattgcaaaagctggcatcactaccacactaaactcccgctgttctgttttggccgctgccaattcagtatatggacggtgggatgacaccaagggcgaggagaatattgacttcatgcccaccatcctttctaggttcgacatgatcttcattgtaaaagatgaacacaatgagcaaagagacatgactcttgccaagcatgttatgaatgtacatctcagtgcacgtacacagagttcttctgtggaaggagaggtggacctcaatacccttaagaaattcattgcctattgcagagcaaaatgtggccctcgactctcagctgaagcagcagaaaagctgaagaaccggtatattcttatgcgcagtggagctagagaccacgagagagagactgaaaagagatcaagtatcccaattacagtcaggcaattggaagccgttgttcggatatctgaatctcttggcaagatgaagctccagccttttgttacagagacagatgtagaggaagcactaaggttgtttcaggtgtccacattggatgctgccatgtctggaagcctttcaggtgtggaaggcttttctacacaagaggatcaggaaatgttatcccgtattgagaaacagctgaagaggcgttttgcaattggttcacaggtgtctgagcacagcattatacaagactttctcaaacagaaataccctgagcacgccatccacaaggttctaaacctcatgatgaggagaggagagattcatcatcgtttgcagcgcaaagtcctgtaccgactcaagtag

SEQ ID NO: 5600 - protein, 735 aa, Xenopus laevis
MSGFDDLGIYYSDSFGGEQPVGDDGQAKKSQLKKRFREFLRQYRVGTDRTGFTFKYRDELKRHYNLGEYWIEVEMEDLASFDEDLADYLYKQPTEHLQLLEEAAQEVADEVTRPRPAGEETIQEIQVMLRSDANPANIRNLKSEQMSHLVKIPGIIIAATAVRAKATKISIQCRSCRNTIGNIAVRPGLEGYAMPRKCNTEQAGRPKCPLDPYFIIPDKCKCVDFQTLKLQESPDAVPHGELPRHMQLYCDRYLCDKVVPGNRVTIMGIYSIQKSGKTSTKGRDRVGVGIRSSYIRVVGIQVDTEGTGRSAAGTITPQEEEEFRRLAVKPDIYETVAKSIAPSIYGSTDIKKAIACLLFGGSRKRLPDGLTRRGDVNLLMLGDPGTAKSQLLKFVERCSPIGVYTSGKGSSAAGLTASVMRDPVSRNFIMEGGAMVLADGGVVCIDEFDKMREDDRVAIHEAMEQQTISIAKAGITTTLNSRCSVLAAANSVYGRWDDTKGEENIDFMPTILSRFDMIFIVKDEHNEQRDMTLAKHVMNVHLSARTQSSSVEGEVDLNTLKKFIAYCRAKCGPRLSAEAAEKLKNRYILMRSGARDHERETEKRSSIPITVRQLEAVVRISESLGKMKLQPFVTETDVEEALRLFQVSTLDAAMSGSLSGVEGFSTQEDQEMLSRIEKQLKRRFAIGSQVSEHSIIQDFLKQKYPEHAIHKVLNLMMRRGEIHHRLQRKVLYRLK

SEQ ID NO: 5601 - DNA, 2868 bp, Triticum aestivum
  CDS (1)..(2868)
atggacgactcggagaacaacgcgccgtcgaccccgggctcgccgggcttcagcaccgaccggctgccgcccaacaccaccaccagccgcggcgccaccgacccgtcctcctactcggacgacgatggcgaggcggaggtcgaccccaatgtgctccccgaggacgacggcgccaccgttatccgcgacgaggaggaagacgatggggaggacctcttcaacgacgactacctcaatgattaccgaagaatggatgagcaggatcagtatgagtcggttgggttagacgactcgatagaggatgagaggaacctggatgagatcatggctgatcgaagggctgcagaagcggaacttcatgcaagggatgtgaggactggtgcaacagctgatcgaaaattacctcgtatgcttcatgatcaggatacagatgaggatatgaacttcaggcgtcctaaaaggcacagggctaattttagacaaccaagtggaggaccaagaacacccagaagtgatgatgatggtgatggtctcactcctagttcacctggaagatctcagccatattctggcggtgatgtgcctatgactgatcagaccgatgatgatggatatgaggatgaatttgatgaagaagatgagatgaacatgtatcgtgtgcaaggaacacttcgagagtgggtcacaagagatgaagtccggcgcttcatcgcaaagaaatttaaagaatttcttcttacatatgtaaaccctaagaatgaacaaggagagtttgaatatgtcagactcattaatgagatggttttagctaacaagtgtagtttggagatagactacaagcaatttatttatatacacccaaacattgccatctggttggctgatgcacctcaatcagtgctggaggttatggaggaagtgggcaaaaatgttgtttttgatctccacaagaattacagaaacatccatcagaaaatatatgtgcgaatcaccaaccttcctgtctatgatcaaatacgcaatatcaggcaaattcatctgaacacaatgattcgaattgggggtgttgttactcgaaggtcaggtgtgttccctcagctgcagcaggtcaagtatgactgtagcaaatgtggaactgtcctgggtcctttcttccagaactcttacactgaagtaaaggttgggtcctgccctgaatgccaatccaaaggtccatttactgtcaacattgagcaaactatatacaggaactatcagaaactcactcttcaggaaagcccagggattgttcctgctggcaggcttcccaggtacaaggaagtgatacttctgaatgatctgatcgactgcgctcgtccaggagaagaaattgaggttacagggatatacacaaacaattttgacctgtctttaaatacaaagaatggtttcccagtttttgccacagtggtggaggcaaactatgtatcaaagaagcaggatctgttctctgcatacaaattaacagatgaggacaaggctgagattgagaagttgtcgaaggatcctcgtatcagtgaaaggattgtcaaatcaattgcaccatccatttatggtcatgaagatatcaagactgccattgcactagctatgtttggcgggcaagaaaagaacgtgaagggaaagcctcgcctaagaggtgatattaactgtctcctcttgggtgacccaggcactgcgaaatcccaatttctcaagtatgttgagaaaacaggacacagggctgtatacacaactgggaaaggagcttctgctgttggactcacagcagcagttcacaaggatccagtaacacgggagtggacccttgagggaggtgcactggttcttgctgatagaggcatatgccttattgatgaatttgataagatgaatgatcaagatagggtaagtattcatgaagccatggagcaacaaagtatcagcatatcaaaggcagggattgtcacatcccttcaagctcgatgcagtgttattgctgcagcaaacccagttggaggaagatatgattcttcaaagacattcacccaaaatgttgagctaacagatccaattatttcacgttttgatgtcctctgtgttgtgaaggatattgttgacccatttacagatgaaatgcttgcaaggtttgttgttgatagccatgccagatctcagcccaagggtggtaaccttgaagatagagttgtagctgacgaggaggatgatccattgactgttgcccgaaatgctgacccagatatcctttctcaagacatgctgaagaagtatatcacatatgctaagttgaatgtattccccaaaatacatgatgctgacctggacaagattagccatgtctatgctgaacttcgacgtgaatcatctcacggtcaaggagtccccattgcagtaaggcatatcgaatcaatcattcgaatgtctgaggcacatgcaaagatgcatctgcgaagctatgtgtctcaggaagatgtggacatggccattcgtgtgctgcttgactcgttcatctcaacccagaaatttggtgtccagaaagcacttcagaagaatttccggaagtacatgacgtacaagaaggattacaatgaactgcttctgctccttctgcgcaccctggtcaaggaggcgctgcactttgaagaaatcgtgtctggatcaaccacacgcctgactcacgttgaggttaaagtggatgacctgaagaacaaggcccaagaatatgagatctacgacctgaggccgttcttctccagctctcacttcagtgacaacagctttgtcctcgatgaagggcgtgggatcatcaggcatccagttgcggcataa

SEQ ID NO: 5602 - protein, 955 aa, Triticum aestivum
MDDSENNAPSTPGSPGFSTDRLPPNTTTSRGATDPSSYSDDDGEAEVDPNVLPEDDGATVIRDEEEDDGEDLFNDDYLNDYRRMDEQDQYESVGLDDSIEDERNLDEIMADRRAAEAELHARDVRTGATADRKLPRMLHDQDTDEDMNFRRPKRHRANFRQPSGGPRTPRSDDDGDGLTPSSPGRSQPYSGGDVPMTDQTDDDGYEDEFDEEDEMNMYRVQGTLREWVTRDEVRRFIAKKFKEFLLTYVNPKNEQGEFEYVRLINEMVLANKCSLEIDYKQFIYIHPNIAIWLADAPQSVLEVMEEVGKNVVFDLHKNYRNIHQKIYVRITNLPVYDQIRNIRQIHLNTMIRIGGVVTRRSGVFPQLQQVKYDCSKCGTVLGPFFQNSYTEVKVGSCPECQSKGPFTVNIEQTIYRNYQKLTLQESPGIVPAGRLPRYKEVILLNDLIDCARPGEEIEVTGIYTNNFDLSLNTKNGFPVFATVVEANYVSKKQDLFSAYKLTDEDKAEIEKLSKDPRISERIVKSIAPSIYGHEDIKTAIALAMFGGQEKNVKGKPRLRGDINCLLLGDPGTAKSQFLKYVEKTGHRAVYTTGKGASAVGLTAAVHKDPVTREWTLEGGALVLADRGICLIDEFDKMNDQDRVSIHEAMEQQSISISKAGIVTSLQARCSVIAAANPVGGRYDSSKTFTQNVELTDPIISRFDVLCVVKDIVDPFTDEMLARFVVDSHARSQPKGGNLEDRVVADEEDDPLTVARNADPDILSQDMLKKYITYAKLNVFPKIHDADLDKISHVYAELRRESSHGQGVPIAVRHIESIIRMSEAHAKMHLRSYVSQEDVDMAIRVLLDSFISTQKFGVQKALQKNFRKYMTYKKDYNELLLLLLRTLVKEALHFEEIVSGSTTRLTHVEVKVDDLKNKAQEYEIYDLRPFFSSSHFSDNSFVLDEGRGIIRHPVAA

SEQ ID NO: 5603 - DNA, 2163 bp, Pisum sativum
  CDS (1)..(2163)
atgaacaccaaaggcgtcgattttgcctcagacaaagttctagcgagtcggtttctttccgaattcgcagacgctaatggcgaagccaagtacatcaacatcctgcaagatgttgcgaaccacaaaactcgatctgttgaaattgatctcgacgacttaatgaactacaaggatctagatgaggaatttctgacgcgagttactgagaatactcgaagatatgtagggatttttgctgatgccattgatgagctcatgccggagcctactgaggcgtttattgatgatgaccatgacattttgatgactcagaggtctgatgaaggaactgaaggtgctgatgggtctgacccgcaccagaagatgccttctgaaatcaaacgcttttttgaagtttatgttaaagcatcttccaaaggacggccttttacaattagggaggtgaaagcttcaaacattggccagcttgtaagattagctggtatagtcactcgatgctctgatgtcaaaccattgatgcaggttgctgtgtacacctgtgaggattgtggctttgaaatttaccaggaagtaacagctagaatattcatgcccttgtttgagtgtccatcaaggcgttgtgtcatgaacaagaacaagggtaatgtcatccttcaactgagagcatcaaagtttttgagatttcaagaggcaaaaatccaagagttagctgaacatgttccaaagggtcatattcctcgaacaatgactgttcatcttaggggagaactcactagaaaggtagctcctggtgatgttgttgaactatcagggatttttcttcctataccttatgttggttttagagcaatgcgtgctggcctagttgctgacacatacttagaggccatgtctgtttctcattttaagaaaaaatatgaagaatatgaacttagaggagatgaggaagagcagatcaaacgtttagcagaagatggtgatatctatgataagctggcaaggtcactagctcctgaaatttttggacatgaagatattaagaaagcactgctgctgcttcttgttggtgcaccccaccggcaattgaaagatggaatgaagattagaggagatctacatatatgtttgatgggggatcctggtgttgccaagagtcagcttcttaaacacataatcaatgtagcacccaggggtgtatacaccactggaaaaggaagtagtggagttggacttactgctgctgttcagaaagatccagtgacaaatgagatggttttggagggtggagcattggtgttatcagatatgggcatatgtgccattgatgaatttgacaagatggatgaatctgatcgtacatctatacatgaagttatggaacaacagactgttagcattgccaaggctggtatcactacatcactgaatgcaaggactgctgtccttgctgcagctaatccggcatggggaagatatgatctaagaagaactcctgctgaaaatattaatcttccacctgccctcctatcaaggtttgatttactgtggttaattctagatcgagctgatatggataacgatcttgaaatggcaaggcatgttgtctatgtccaccaaaacaaagagtcccccgcactaggattcactcctcttgaaccatctgttctacgcgcatacatatcaactgctagaagattgtctcctactgtcccaagggaactggaagagtatattgccagtgcttactccagcattcgtcaagaagaagctaaatccaccactccacattcctatacgactgtcagaacattgctcagcattctccgcatatcagctgccctagcaagactccgttttgctgaaactgttgctcagagtgacgttgatgaggcattgaggttaatgcagatgtcaaaattctctttgtactctgatgaccgacaaaggtctggtctggatgctatatctgacatttactcaatacttcgtgatgaagctgctagaagtcacaaaatggatgtcaactatcgcgatgcattgaattggatatctcggaaggggtacagcgaagcccagttgaaagagtgtttagaggagtatgcagcattgaatgtttggcagatacatcctcaaacctttgatataaaatttatcgatgcttga

SEQ ID NO: 5604 - protein, 720 aa, Pisum sativum
MNTKGVDFASDKVLASRFLSEFADANGEAKYINILQDVANHKTRSVEIDLDDLMNYKDLDEEFLTRVTENTRRYVGIFADAIDELMPEPTEAFIDDDHDILMTQRSDEGTEGADGSDPHQKMPSEIKRFFEVYVKASSKGRPFTIREVKASNIGQLVRLAGIVTRCSDVKPLMQVAVYTCEDCGFEIYQEVTARIFMPLFECPSRRCVMNKNKGNVILQLRASKFLRFQEAKIQELAEHVPKGHIPRTMTVHLRGELTRKVAPGDVVELSGIFLPIPYVGFRAMRAGLVADTYLEAMSVSHFKKKYEEYELRGDEEEQIKRLAEDGDIYDKLARSLAPEIFGHEDIKKALLLLLVGAPHRQLKDGMKIRGDLHICLMGDPGVAKSQLLKHIINVAPRGVYTTGKGSSGVGLTAAVQKDPVTNEMVLEGGALVLSDMGICAIDEFDKMDESDRTSIHEVMEQQTVSIAKAGITTSLNARTAVLAAANPAWGRYDLRRTPAENINLPPALLSRFDLLWLILDRADMDNDLEMARHVVYVHQNKESPALGFTPLEPSVLRAYISTARRLSPTVPRELEEYIASAYSSIRQEEAKSTTPHSYTTVRTLLSILRISAALARLRFAETVAQSDVDEALRLMQMSKFSLYSDDRQRSGLDAISDIYSILRDEAARSHKMDVNYRDALNWISRKGYSEAQLKECLEEYAALNVWQIHPQTFDIKFIDA

SEQ ID NO: 5605 - DNA, 2097 bp, Archaeoglobus fulgidus
  CDS (1)..(2097): transl_table=11
atgggtataagcagtccggcactttggacggagttctttgaaaggtactatcgagaggagattaacaaactcgcctacaagctgaaatcgggcggggacggtaggtcactctatgtgaactttgttagagacctctccatttttcaggagggcaagctcggagaagagttgattgaaaagcccgatgaggtgctcgttcacgctgaaaggggtctggcgaacgccaccaacatttacggcgtttctctggagggctgcaagccccgattctactcactcccaacagcaaggaaggttctgataaggaacctcagggcggagcatatcggaaaattcatggcgatagaggggattgtcaggaaggttactgaagtcaggccgagaattgttgaagccgcctttgcctgcctgaactgcggaagcataaccatggttcctcaggaggacagccagctcagacagccctttgagtgcagcaagtgcagcacgaagaagatgatttttctcccggacagcagcatctccgttgacagtcaaagggtgaagattcaggagtaccccgaaaatctcaggggtggggagcagccgcagacgatagacgtcatacttgaaggtgatttggcaggctccgtgaatccgggggacagggtgataataaacgggatcgtgagggcgaagccgagagggcttgggcagaggaaaatgacgcatatggacctttacatcgaagggaactccgttgaggttctccagcaggagtacgaggagttcgagattaccgagaaggacagggaactgataatgcagcttgccgcaagcgacgacatctacgagaagatagtaaagtcgatagccccctcaatatacggtcatgaggacgtgaagcttgccattgcccttcagcttttcggcggcgtgcccaagaagctgcccgacggcactgaaataaggggggacattcacatccttcttgtgggcgatccgggcgttgccaaatcgcagcttttgaagtacgtccacagaatagctccgcggagcgtttacacaaccggaaaggggacaacaactgcaggcctcactgccaccgcagtcagagatgaggtggatggcaggtggactcttgaagccggagccctcgttcttgcggataagggcattgcgttggttgatgagattgacaaaatgcgtaaggaagacacctcggcattgcacgaagcacttgagcagcaaaccatcagcgttgccaaagcgggaataaacgccatcttaaaggccagatgcgcgttgctcggtgcggcaaatccgaagtacggcagattcgagaaattcactcccgttcctgagcaaattgagatgtcccccaccctcctttcaaggttcgacctgattttcgttctgaaggacgagccggatgaggagaaggacaagaggctcgttgaacacattctctactctcaccagcttggagagatgacggaaaaggccaagaacgttgccgcagagtacgacgaggagttcataaggcagaggtcggagaggatagttccggaaattgaccccgacctcctaaggaagtacatagcatatgcaagaaaaaccgtctatcccgttttgacagatgaggctaaggaaaaaatcaaggagttctacttgtcactcaggtcgagagttaaggagaactcccccgttcccataaccgcaagacagcttgaaagcatcgtcaggcttgcagaagcctctgcgagagtcaggctcagcgacagggtggagccggaggacgtggacagggttatcgaaatcatgatgaggagtctcagggagattgcggttgaccccgaaacgggggagatggacatagacctggcctactcgggcacctcgaaaacgcagagggacagaatcatgatactgaagaaaatcatcgagcagcttgaggaggagcacgaaaggggtgttccggaggagctaattctggaggaggcagagaaggagggaatcgataggacgaaggccaaagagattctttccaagctcaaactgcacggagaggtttacactccaaaacacgggcattacaaattggtaagcaaactttaa

SEQ ID NO: 5606 - protein, 698 aa, Archaeoglobus fulgidus
MGISSPALWTEFFERYYREEINKLAYKLKSGGDGRSLYVNFVRDLSIFQEGKLGEELIEKPDEVLVHAERGLANATNIYGVSLEGCKPRFYSLPTARKVLIRNLRAEHIGKFMAIEGIVRKVTEVRPRIVEAAFACLNCGSITMVPQEDSQLRQPFECSKCSTKKMIFLPDSSISVDSQRVKIQEYPENLRGGEQPQTIDVILEGDLAGSVNPGDRVIINGIVRAKPRGLGQRKMTHMDLYIEGNSVEVLQQEYEEFEITEKDRELIMQLAASDDIYEKIVKSIAPSIYGHEDVKLAIALQLFGGVPKKLPDGTEIRGDIHILLVGDPGVAKSQLLKYVHRIAPRSVYTTGKGTTTAGLTATAVRDEVDGRWTLEAGALVLADKGIALVDEIDKMRKEDTSALHEALEQQTISVAKAGINAILKARCALLGAANPKYGRFEKFTPVPEQIEMSPTLLSRFDLIFVLKDEPDEEKDKRLVEHILYSHQLGEMTEKAKNVAAEYDEEFIRQRSERIVPEIDPDLLRKYIAYARKTVYPVLTDEAKEKIKEFYLSLRSRVKENSPVPITARQLESIVRLAEASARVRLSDRVEPEDVDRVIEIMMRSLREIAVDPETGEMDIDLAYSGTSKTQRDRIMILKKIIEQLEEEHERGVPEELILEEAEKEGIDRTKAKEILSKLKLHGEVYTPKHGHYKLVSKL

SEQ ID NO: 5607 - DNA, 2211 bp, Brachydanio rerio
  CDS (1)..(2211)
atgtcgggatttgatgatccaggagtttattacagtgacagttttggtggaggagaaagcgtcggcgacgagggagtcgtgaaacggagccagatcaagaagaagttccgtgagtttctgaggcagttcagagtcggaaccgatcgcactggattcacctacaaatacagagatgagctcaagagacactatactttgggagagtattggatcgaggtggaaatggaggatttggccagttttgatgaagatctatcagactgtctgtacaaacttcctgctgagaacctgcctttgttggaggaggctgcgcaggaagtggctgatgaggtcacacgtcctcggccagtaggagaagagactgttcaagacatacaggtcatgctgaagagcgacgctcatccagcctccatccgcagtctgaagtcagagcaggtttcgcgtctggtgaagattcccgggatcatcatctcctctactgctgtgagggccaaagccaccagagtgtgtcttcagtgccgcggatgcagagcggtgatcagcaacatccctctgccaccggggctgcagggttacgctctgcctcgcaggtgcaacactgagcaggcagggcgtgtcaagtgccctgtggatccatatttcatcattccagaccggtgtgtgtgtgtggatttccagactcagcgtctgcaggaagctcctgatgccgttcctcatggagagatgccacgacacatgcagctctactgcgacagatacttgtgtgatcgtgtagtaccaggcaacagagtgacagtcatgggcatctactccatcaagaaggtggcgcagaccaaagccaaaggccgtgataagggaactggtgttggcattcgctcggcatatctgcgtgttgtcggcatcgatgtggacactgaaggagcaggccgtggtgccactggttcagtttctccccaagaagaagaggagttaagatctctggccgcttctccctctgtttatgactctctggcccgctctctcgccccatccatctatggcagtgatgacctgaaaaaagctattgcctgcctgctgttcggcggctccaggaagaggttgcctgatggtctgacacgcagaggggatattaacctgctgatgctgggagatccaggcacagccaagtctcaactgctgaagtttgttgagagatgctctccaattggggtctacacctctggaaagggcagcagtgcagctggtttgaccgcctctgttcttcgggaccccaccactcgtggttttgtcatggagggaggcgctatggtgttagctgatggtggagttgtctgcatcgatgagtttgacaagatgagagaggatgatagagtcgcaatccatgaggccatggagcagcagaccatctctattgcaaaggctgggatcaccaccactctgaactcgcgctgctctgtattagctgccgccaactctgtgttcggtcgctgggatgatacaaagggagaggacaacattgacttcatgcccaccattctgtctcgattcgacatgatcttcatcatcaaagatcatcacgaccaacagcgagacatgactttggctcgacacgtgatgaatgttcacctgagcgctcaaacgcagacggagggggtcgagggagagattcctctggccacgttgaagaaatacatcgcctattctagagtaaaatgtggacctcgactgtctgcggcagctgcagagaagctgaagaacagatacgtgttgatgagaagcggagcgaaggagcatgagagagagactgacagacgagtgtccatccccatcactgtcaggcagctagaggccgtggtgcgcattgcagagtcacttgctaagatgaagctgcagcccattgctggagaagaagaggtggacgaggctctgagactcttccaggtgtccacgctggatgctgctctgtccggcagcctctccggtgttgaagggtttaccactcaggaggatcaggagatgatctcccgcatcgaagaacagctgaagagacgcttcgccatcggctcgcaggtgtctgaacacagcatcatacaggacttcgccaaacagaaatatccagagcacgctattcaaaaggtcctttacctgatgttgaggagaggtgaactgcagcaccgcatgcagaggaaggtgctttacagggtcaaatag

SEQ ID NO: 5608 - protein, 736 aa, Brachydanio rerio
MSGFDDPGVYYSDSFGGGESVGDEGVVKRSQIKKKFREFLRQFRVGTDRTGFTYKYRDELKRHYTLGEYWIEVEMEDLASFDEDLSDCLYKLPAENLPLLEEAAQEVADEVTRPRPVGEETVQDIQVMLKSDAHPASIRSLKSEQVSRLVKIPGIIISSTAVRAKATRVCLQCRGCRAVISNIPLPPGLQGYALPRRCNTEQAGRVKCPVDPYFIIPDRCVCVDFQTQRLQEAPDAVPHGEMPRHMQLYCDRYLCDRVVPGNRVTVMGIYSIKKVAQTKAKGRDKGTGVGIRSAYLRVVGIDVDTEGAGRGATGSVSPQEEEELRSLAASPSVYDSLARSLAPSIYGSDDLKKAIACLLFGGSRKRLPDGLTRRGDINLLMLGDPGTAKSQLLKFVERCSPIGVYTSGKGSSAAGLTASVLRDPTTRGFVMEGGAMVLADGGVVCIDEFDKMREDDRVAIHEAMEQQTISIAKAGITTTLNSRCSVLAAANSVFGRWDDTKGEDNIDFMPTILSRFDMIFIIKDHHDQQRDMTLARHVMNVHLSAQTQTEGVEGEIPLATLKKYIAYSRVKCGPRLSAAAAEKLKNRYVLMRSGAKEHERETDRRVSIPITVRQLEAVVRIAESLAKMKLQPIAGEEEVDEALRLFQVSTLDAALSGSLSGVEGFTTQEDQEMISRIEEQLKRRFAIGSQVSEHSIIQDFAKQKYPEHAIQKVLYLMLRRGELQHRMQRKVLYRVK

SEQ ID NO: 5609 - DNA, 2163 bp, Xenopus laevis
  CDS (1)..(2163)
atgcccagggactaccaggccgagaaagagaaatgcaagacctttcttcaggagttttataaggatgatgaatttggaaagaaaaacttcaagtatggcgtccagctggctaatattgctcacagagagcaggttgcactgtgcattgacctggatgacttggctgaggaggacccagagttggtggatgccatctgtgaaaatactcgcaggtacacaaacctctttgctgatgctgttcaggagctgctgcctcagtataaagagcgagaggtagtgcataaagatgctttggatgtgtatattgaacaccgcttaatgatggagcagaggggcagagatcccaatgagatgcgagatcctcacaaccagtatccaccagagcttatgcgcagatttgaactatacttcaaagctccaagtagctcaaaggcccgtgtagtacgagacgtcaaagcggattcgattggcaagttggttacagttcgaggcatcgtcacgagggtcacagaagtcaagcctatgatggtcgtggccacttacacttgtgaccagtgcggtgcagagacctaccaaccgattcaatctccgactttcatgccgcttataatgtgcccgagcagagagtgtcagacaaaccgttccggtggcaggctttacttgcaaacccggggctccaagtttattaagttccaggagctgaagattcaagaacatagtgatcaggttccagttgggaacatcccgcgctgtatgagtgtgtatgtgcgtggggaaaacacccgcctcgctcagcctggagaccatgttggtattactggagtcttcctgccaatgctcagaactggcttccggcaggtggtacagggtctcctttcagagacatacctcgaatctcatcgtttagtgaaaatgaacaagaccgaggatgatgaacttggcacagaagagctgagtgaagaggagctgcgacagattactgaggaagatttctatgagaagctagcagcctccattgctcctgagatttatggccatgaggatgtgaagaaagcccttcttttgctattggtgggaggtgttgaccattctcctcgtggcatgaagatcagagggaatattaacgtttgcctcatgggtgacccaggagtagcaaaatcacagctactttcttacattgatcgtcttgcacctcgaagtcagtacacaacaggtcgtggctcttctggggttggtctcactgcagcagtaatgaaagacccagtgactggggagatgactctggaaggtggagctttggtactggcagatcagggggtttgctgcattgatgaatttgataagatgatggactctgacagaacagccattcacgaagtcatggagcagcagactatctccatagcaaaggctggtataatgaccacgttgaatgctcgttgctccattcttgctgctgctaacccagcctatgggagatacaacccaaagaagactgtggagcaaaatatccagctgcctgctgccctactgtctcgatttgaccttctctggctaatacaagacaagcctgaccgggacaatgatctcagactggctcagcacattacatatgtccatcagcacagcaaacaaccgccatcacaattccagcctatggatatgaaactcatgcggcgttacatcactatgtgcaagagcaagcagcctgccattccagaatcccttgccgattatttgacagctgcctatgtggagatgagaaaagaagccagaaccaacaaagatatgaccttcacttctgccagaaccctattgtctatcctgagattgtctacagccttggctcggctgcgtctggaagatgtagtggagaaagaggatgtaaatgaggccatgaggttgactgaaatgtcaaaggactcgttgcaaggagacaagggccacgcttcaaggactcaacggccggctgatgtgatcttttcaactatccgcgagatggtcccagaaaaaggtgctcgcagtgttaaatactcggaggctgagcagcgctgtgtgtctaaaggcttcacccctgcccagtttgaggcagccttggaggagtatgaggagcttaatgtttggctggttaatcaggcccgcaccaagatcacatttgtctaa

SEQ ID NO: 5610 - protein, 720 aa, Xenopus laevis
MPRDYQAEKEKCKTFLQEFYKDDEFGKKNFKYGVQLANIAHREQVALCIDLDDLAEEDPELVDAICENTRRYTNLFADAVQELLPQYKEREVVHKDALDVYIEHRLMMEQRGRDPNEMRDPHNQYPPELMRRFELYFKAPSSSKARVVRDVKADSIGKLVTVRGIVTRVTEVKPMMVVATYTCDQCGAETYQPIQSPTFMPLIMCPSRECQTNRSGGRLYLQTRGSKFIKFQELKIQEHSDQVPVGNIPRCMSVYVRGENTRLAQPGDHVGITGVFLPMLRTGFRQVVQGLLSETYLESHRLVKMNKTEDDELGTEELSEEELRQITEEDFYEKLAASIAPEIYGHEDVKKALLLLLVGGVDHSPRGMKIRGNINVCLMGDPGVAKSQLLSYIDRLAPRSQYTTGRGSSGVGLTAAVMKDPVTGEMTLEGGALVLADQGVCCIDEFDKMMDSDRTAIHEVMEQQTISIAKAGIMTTLNARCSILAAANPAYGRYNPKKTVEQNIQLPAALLSRFDLLWLIQDKPDRDNDLRLAQHITYVHQHSKQPPSQFQPMDMKLMRRYITMCKSKQPAIPESLADYLTAAYVEMRKEARTNKDMTFTSARTLLSILRLSTALARLRLEDVVEKEDVNEAMRLTEMSKDSLQGDKGHASRTQRPADVIFSTIREMVPEKGARSVKYSEAEQRCVSKGFTPAQFEAALEEYEELNVWLVNQARTKITFV

SEQ ID NO: 5611 - DNA, 2421 bp, Xenopus laevis
  CDS (1)..(2421)
atggctgcagttaccgagctggacgatcaggagatgcgggaggcgcagagggaataccttgatttcctggatgatgaggaagaccaaggtatataccaaagcaaagtgcgggacatgatcagcgagaatcagtaccgtttgattgtcaacattaatgatctccggaggaaaaatgagaaaagagccagcttgctcatgaacaacgccttcgagggtctcatcgcattccaacgagctctaaaggactttgttgcctctattgatggcacctatgccaagcaatatgaagacttctacattggcctggagggaagcttcggctccaaacacgtgactcctcgcaccctaacgtcccgcttcttgagtagtgttgtctgcgtggaaggaatagtaacaaagtgttctttggtccgcccaaaagtggttcggagtgtccattattgccctgccacgaagaagaccatagagaggaaatacacagacttgaccagcttagaggcatttccttcaagtgctgtctatcctacaaaggatgaagagaataatccgcttgagacagagtatggcctttctatctataaagaccatcaaacaattacgattcaggagatgcctgaaaaagcaccagctggccagctgcctcggtctgtagacatcattttagatgatgatctggtggacaaagtaaaacctggagaccgtgtccaggttattggcacataccgttgtttgccatcaaaacaaaatggctacacttctgcctcgttcaggactatactgattgcatgcaatgtaatccaaatgagtaaagaggtgactccagtcttttcagctgacgatttagccaaaattaagaaattcagcaaaagccatagcaaggatgtatttgagcagctgtctagatctcttgctccgagtattcatgggcacagttacatcaagaaggcaatactctgcatgctccttggaggggttgagaaagttttggacaacggaacccgtatcagaggcgatattaacgtgctgttaataggggacccttctgttgcaaagtcccagctcctaagatacgttctgttcactgccccccgtgctattcccaccactggtagaggatcgtctggtgtgggtttaacggctgcagtcaccactgatcaggagactggtgaaagaaggctggaggctggcgccatggtgttggcagacaggggagttgtgtgcattgatgagtttgataaaatgtctgatatggaccgcacagcaatccatgaagtcatggaacagggtcgtgtgaccatcgctaaagctggtattcatgccaggttaaatgcccgctgcagtgtgctggctgctgccaatccagtctatggaaggtatgaccagtataaaactcccatggagaacattggcctgcaggactctctgttgtctcgttttgatctcctcttcattatgctggatcagatggacccagaacacgacagggagatatctgaccatgttctgcgcatgcaccgatatagatctgctggagagcaggatggtgatgctttgcctctgggcagtgcagtggatatccttgccactgaagatcccaacgttaccagcgaggaacagcaggaactgcaggtgtatgagaaacatgatagtcttctccatggggttaagaagagacgggagaaagtcctcagcatggaatttatgcgaaaatacatccatgtagccaaaatattcaaacctgtgctgacgcaagaggctgccagttttattgcagaggagtatacacgcctgcggaatcaagatcagatgagcacagatgttgcaaggacttcccctgtaactgcacgtagtttggaaaccctaatccgtctgtccacagcacatgcaaaagtgcgaatgagtaagactgtgcaactacaggatgccgaggctgctttggagcttgtgcagtatgcatacttcaagaaggtactggagaaagagaagaagcggagaaggcgggagggggagtctgacacagaggaggagcagacccagcctgatggcgaaggcaagaagagaaggaagaagcgtcgtgcacaagacggggagtcgcatgatccctatgagtttagtgatacagaagatgaaactcctgtcgtgcatacacctaaaacacctgtgaatgggcaagaagagatggaaacagattcctctgcaaaacctggattgtctggtgataggttgaaagcttttaagtctgccctgctggatgcctttaaagctgcacatgctcagtccatcgccatggcggccatgatggaggccattaacaagaacaacgactctcccttctcccaggctgaggtgaaggcggctttggaacttatggaagaagccaaccacatcatggtttccgataacattgttttcttaatctga

SEQ ID NO: 5612 - protein, 806 aa, Xenopus laevis
MAAVTELDDQEMREAQREYLDFLDDEEDQGIYQSKVRDMISENQYRLIVNINDLRRKNEKRASLLMNNAFEGLIAFQRALKDFVASIDGTYAKQYEDFYIGLEGSFGSKHVTPRTLTSRFLSSVVCVEGIVTKCSLVRPKVVRSVHYCPATKKTIERKYTDLTSLEAFPSSAVYPTKDEENNPLETEYGLSIYKDHQTITIQEMPEKAPAGQLPRSVDIILDDDLVDKVKPGDRVQVIGTYRCLPSKQNGYTSASFRTILIACNVIQMSKEVTPVFSADDLAKIKKFSKSHSKDVFEQLSRSLAPSIHGHSYIKKAILCMLLGGVEKVLDNGTRIRGDINVLLIGDPSVAKSQLLRYVLFTAPRAIPTTGRGSSGVGLTAAVTTDQETGERRLEAGAMVLADRGVVCIDEFDKMSDMDRTAIHEVMEQGRVTIAKAGIHARLNARCSVLAAANPVYGRYDQYKTPMENIGLQDSLLSRFDLLFIMLDQMDPEHDREISDHVLRMHRYRSAGEQDGDALPLGSAVDILATEDPNVTSEEQQELQVYEKHDSLLHGVKKRREKVLSMEFMRKYIHVAKIFKPVLTQEAASFIAEEYTRLRNQDQMSTDVARTSPVTARSLETLIRLSTAHAKVRMSKTVQLQDAEAALELVQYAYFKKVLEKEKKRRRREGESDTEEEQTQPDGEGKKRRKKRRAQDGESHDPYEFSDTEDETPVVHTPKTPVNGQEEMETDSSAKPGLSGDRLKAFKSALLDAFKAAHAQSIAMAAMMEAINKNNDSPFSQAEVKAALELMEEANHIMVSDNIVFLI

SEQ ID NO: 5613 - DNA, 2478 bp, Xenopus laevis
  CDS (1)..(2478)
atggacctggtagatccttcccagagcgccgccgcggcagccggaacacaactagtcaaggatgaagtggccgagaagtgtcagaagttgttccaggatttcctggaggagtttcggggtagcgatggggagttgaagtaccagagtgatgcagaggaactgatcaggccggagagaaatacgctgcttgtcagctttgttgatttggaacagtttaatcagcaactcgctaccaccatccaggaagagttctatagggtgtatccgtacctctgtcgagcagttaaagcctttgcccgagatcatggcaacattccacagaacaaagaattctatgttgccttccaggagcttcctactagacataaaattcgagagttgactacccctcgcattggttcactgctgcggatcagcggtcaggtggttcggactcacccagtccacccagaactggtcagcggaacctttctttgcttggattgccagaccttggtaagggatgtagagcagcagtttaaatacacacagccaagcatctgcaggaatccagtgtgcgccaacagaaagaggttcatgttggatacaaacaagtccagatttgttgatttccagaaggtccgtattcaggaaacgcaggcagagcttccaagaggcagcattccacgaagtgttgaagtgatcctgcgagctgaagctgtggaatcgtgtcaggccggggataggtgtgacttcactggatctctgattgttgtgcctgatatttctcagctctcaaccccaggtgttcgtgcagagaccagctccagggtgggtggaagagaagggtatgaggcagaaggtgtccaaggtcttcgtgcccttggtgttcgagatctctcctataaactggtcttcctcgcatgctatgtctgtccaaccaacccaagatttggtgggaaggatctacatgaagaggacatgactgcagagagcatcaaaaaccagatgtccgtgaaggagtgggagaaggtgtttgaaatgagtcaagacaaaaacctttaccataacctatgcaccagcctcttcccaactgtgcatggtaatgatgaagtgaagaggggaatcttattgatgctgtttgggggtgtccctaaatcaactatggagggcacatctttacgtggagacattaatgtttgtgttgttggagatccaagtactgccaagagccagttcctcaagcacgttgaggagttcagtccccgtgcggtttacactagtgggaaagcctccactgctgccggtctgacagcagccgttgtgagagatgaagaatcccatgagtttgtgattgaagctggggcactgatgcttgctgacaatggagtttgttgtattgatgagtttgacaagatggatacaaaggaccaagtggctattcatgaggcaatggaacagcaaactatttcaattaccaaagctggtgttaaggctacactaaatgctcggacttccatccttgctgctgcgaaccctgtagggggccgctatgatagagcaaagtcacttaagcagaatgtgaacttgtctgctcccatcatgtccagatttgatctatttttcattcttgtggatgagtgcaatgaggtgaccgattacgccattgcccgacgtatagtggacctccattccaggattgaggaatcaattgatagagtatatacactggatgaagtcaggagatatcttctttttgccaggcaattcaaacctaagatctctaaggagtcagaagacttcatagtggagcagtacaagcgactgaggcagcgagatggctcaggagtcactaaatctgcttggaggattactgtacggcagctggaaagcatgatcagattgtctgaaggcatggcaaggatgcactgcagtgatgaggtgcagccaaaacatgtaaaggaagcatttcggttattgaacaaatccatcatcagggtggaaactccggatgtcaacctcgatcaagaggatgaacatgaggtagaggaacctcaggagggcattaatggagatgctgatgttcccaatggtgttaatggccacataaatggaattaatgggcatgctgaggagacgaatgctgctcccccaaagccatctttgcgtcttaattttgctgaatacaaaaggatctccaacttgctggtcctgcagttgaggaagattgaagatgaagatgatgaaaatgaaacttctcagagaaagagtgaactcattaactggtacctaaaggagattgagtcagaaattgactcggaagaggagctcgttaataggaagcaaatcattgacaaagttattcacagacttgtgcactatgaccaaattttgattgagctcatacaaactggattaaaaggcacagaagacgagaacgtagcaaaagaagaggatccttaccttgtggttaatcccaactacatactggaagattaa

SEQ ID NO: 5614 - protein, 825 aa, Xenopus laevis
MDLVDPSQSAAAAAGTQLVKDEVAEKCQKLFQDFLEEFRGSDGELKYQSDAEELIRPERNTLLVSFVDLEQFNQQLATTIQEEFYRVYPYLCRAVKAFARDHGNIPQNKEFYVAFQELPTRHKIRELTTPRIGSLLRISGQVVRTHPVHPELVSGTFLCLDCQTLVRDVEQQFKYTQPSICRNPVCANRKRFMLDTNKSRFVDFQKVRIQETQAELPRGSIPRSVEVILRAEAVESCQAGDRCDFTGSLIVVPDISQLSTPGVRAETSSRVGGREGYEAEGVQGLRALGVRDLSYKLVFLACYVCPTNPRFGGKDLHEEDMTAESIKNQMSVKEWEKVFEMSQDKNLYHNLCTSLFPTVHGNDEVKRGILLMLFGGVPKSTMEGTSLRGDINVCVVGDPSTAKSQFLKHVEEFSPRAVYTSGKASTAAGLTAAVVRDEESHEFVIEAGALMLADNGVCCIDEFDKMDTKDQVAIHEAMEQQTISITKAGVKATLNARTSILAAANPVGGRYDRAKSLKQNVNLSAPIMSRFDLFFILVDECNEVTDYAIARRIVDLHSRIEESIDRVYTLDEVRRYLLFARQFKPKISKESEDFIVEQYKRLRQRDGSGVTKSAWRITVRQLESMIRLSEGMARMHCSDEVQPKHVKEAFRLLNKSIIRVETPDVNLDQEDEHEVEEPQEGINGDADVPNGVNGHINGINGHAEETNAAPPKPSLRLNFAEYKRISNLLVLQLRKIEDEDDENETSQRKSELINWYLKEIESEIDSEEELVNRKQIIDKVIHRLVHYDQILIELIQTGLKGTEDENVAKEEDPYLVVNPNYILED

SEQ ID NO: 5615 - DNA, 2605 bp, Mus musculus
  CDS (32)..(2236)
gggcttcctctaggagggctgaggtacagtcatgtcgggcttcgacgacccgggcattttctacagcgacagcttcggtggcgaccccggtgcggaagagggccaggcccgcaagtcgcaactgcagaggcgattcaaggagttcctgagacagtaccgagtgggcaccgatcgcacgggcttcaccttcaagtacagagatgaactcaagcggcattacaacctgggtgaatactggatcgaggtggagatggaggacctggccagttttgacgaggaactggctgaccacttgcataaacagccggccgagcacttacagctgcttgaggaagctgccaaggaggtggcagatgaggtgacccggccccggccagctggagatgagctgctccaagacatccaggtcatgctcaagtcagatgccagcccgtcgagcattcggattctgaagtcagacatgatgtcacacctggtgaagatccctggcatcatcatttcagcctctgcagtccgtgccaaggctactcgtatctccattcagtgccgcagctgccacaataccctcaccaatatcgccatgcgcccaggcctagagggctatgcccttcccaggaagtgcaatatggatcaggctgggcgcccaaagtgcccactggatccatacttcatcatgcctgacaagtgcaagtgtgtggacttccagactctgaaactgcaggagctgcctgatgcagtccctcatggtgagatgcccaggcacatgcagctttattgtgacaggtacctgtgtgacaaggttgttcctgggaacagggtcaccatcatgggcatttattccatcaagaagtttggcttgaaccccagcaagggccgggacagggtaggtgtgggcatccggagctcgtacatccgagtgctgggcatccaggtggacacagatggctctggccgaagctttgctgggtctgtcagcccacaggaagaggaggaatttcgtcgcctggctgccctccccaacatatatgagctcatctccaagagcatttccccctccatctttgggggcatggatatgaagaaggccattgcctgcctgctttttgggggttcccggaagaggctcccagatggactcactcgccgaggtgatatcaacttgctgatgttgggagaccctggtacagccaagtctcagcttctgaagtttgtggagaagtgctctcccattggggtgtacacatctgggaaaggtagcagtgctgctggcttgactgcctcagtgatacgggacccctcatctcgaaacttcatcatggaaggtggagccatggttctggccgatggtggggttgtctgtattgatgagtttgacaagatgcgggaaggtgaccgtgttgcaatccatgaggctatggagcagcagaccatctccattgctaaagctgggatcactaccaccttgaactctcgctgctctgttctggctgcagccaactcagtgtttggccgatgggatgagacaaaaggggaggacaatattgacttcatgcctaccatcttgtcccgatttgatatgatcttcatcgtcaaagatgagcacaatgaggagagggacatgatgctagccaaacatgtgatgactctgcatgtgagtgcactgacacagacacaggctgtggagggtgagatcgacctggccaagatgaagaagttcattgcctactgccgagcgaggtgtggacctcggctatcagcagaggcagcagagaagctgaaaaaccgctacatcatcatgcggagtggggctcgtcagcatgagagggacagtgaccggcgttccagcatccccatcactgtgcggcagctggaggctattgtgcgcattgctgaggccctcagtaagatgaaactgcagccctttgccactgaggctgatgtagaggaggcattgagactgttccaggtgtccacactggatgctgctttgtctggcaatctgtcgggggtggagggcttcactacccaggaggaccaggagatgctgagccgcattgagaagcaactcaagcgccgttttgccattggctctcaggtgtctgaacacagcattgtccaggacttcaccaaacagaaatatccagagcacgctatccgaaaggtgctgcagctcatgctacgcaggggtgagatccaacaccgtatgcagcgcaaggtgctctatcgcctcaagtgagcccattgcccatcaaccctcaagcctgaaatgctgccaccaccctatctcccagtcagtgctccaaacctccttttgccctgcctctccacctcagactgcagtctgcagcacatctgcagcccctggaaatgtactttggtctgttggcctcatactgtgtttgagtgtctgaggactctctgctctgggtgtctatcccctgtcatgccttctcaacaagatgagtctggagcaggaacaggccctggaatgtagatgggtctgtatattggctcccgggccactcactgccaagcttctttgtatgtacagaggtaataaagcaattgagtccctggctgctaaggtcagtggacccagtatgat

SEQ ID NO: 5616 - protein, 734 aa, Mus musculus
MSGFDDPGIFYSDSFGGDPGAEEGQARKSQLQRRFKEFLRQYRVGTDRTGFTFKYRDELKRHYNLGEYWIEVEMEDLASFDEELADHLHKQPAEHLQLLEEAAKEVADEVTRPRPAGDELLQDIQVMLKSDASPSSIRILKSDMMSHLVKIPGIIISASAVRAKATRISIQCRSCHNTLTNIAMRPGLEGYALPRKCNMDQAGRPKCPLDPYFIMPDKCKCVDFQTLKLQELPDAVPHGEMPRHMQLYCDRYLCDKVVPGNRVTIMGIYSIKKFGLNPSKGRDRVGVGIRSSYIRVLGIQVDTDGSGRSFAGSVSPQEEEEFRRLAALPNIYELISKSISPSIFGGMDMKKAIACLLFGGSRKRLPDGLTRRGDINLLMLGDPGTAKSQLLKFVEKCSPIGVYTSGKGSSAAGLTASVIRDPSSRNFIMEGGAMVLADGGVVCIDEFDKMREGDRVAIHEAMEQQTISIAKAGITTTLNSRCSVLAAANSVFGRWDETKGEDNIDFMPTILSRFDMIFIVKDEHNEERDMMLAKHVMTLHVSALTQTQAVEGEIDLAKMKKFIAYCRARCGPRLSAEAAEKLKNRYIIMRSGARQHERDSDRRSSIPITVRQLEAIVRIAEALSKMKLQPFATEADVEEALRLFQVSTLDAALSGNLSGVEGFTTQEDQEMLSRIEKQLKRRFAIGSQVSEHSIVQDFTKQKYPEHAIRKVLQLMLRRGEIQHRMQRKVLYRLK

SEQ ID NO: 5617 - DNA, 1557 bp, Mus musculus
  CDS (1)..(1185)
atgtccatctttgggggcatggatatgaagaaggccattgcctgcctgctttttgggggttcccggacgaggctcccagatggactcactcgccgaggtgatatcaacttgctgatgttgggagaccctggtacagccaagtctcagcttctgaagtttgtggagaagtgctctcccattggggtgtacacatctgggaaaggtagcagtgctgctggcttgactgcctcagtgatacgggacccctcatctcgaaacttcatcatggaaggtggagccatggttctggccgatggtggggttgtctgtattgatgagtttgacaagatgcgggaagatgaccgtgttgcaatccatgaggctatggagcagcagaccatctccattgctaaagctgggatcactaccaccttgaactctcgctgctctgttctggctgcagccaactcagtgtttggccgatgggatgagacaaaaggggaggacaatattgacttcatgcctaccatcttgtcccgatttgatatgatcttcatcgtcaaagatgagcacaatgaggagagggacatgatgctagccaaacatgtgatgactctgcatgtgagtgcactgacacagacacaggctgtggagggtgagatcgacctggccaagatgaagaagttcattgcctactgccgagcgaggtgtggacctcggctatcagcagaggcagcagagaagctgaaaaaccgctacatcatcatgcggagtggggctcgtcagcatgagagggacagtgaccggcgttccagcatccccatcactgtgcggcagctggaggctattgtgcgcattgctgaggccctcagtaagatgaaactgcagccctttgccactgaggctgatgtagaggaggcattgagactgttccaggtgtccacactggatgctgctttgtctggcaatctgtcgggggtggagggcttcactacccaggaggaccaggagatgctgagccgcattgagaagcaactcaagcgccgttttgccattggctctcaggtgtctgaacacagcattgtccaggacttcaccaaacagaaatatccagagcacgctatccgaaaggtgctgcagctcatgctacgcaggggtgagatccaacaccgtatgcagcgcaaggtgctctatcgcctcaagtgagcccattgcccatcaaccctcaagcctgaaatgctgccaccaccctatctcccagtcagtgctccaaacctccttttgccctgcctctccacctcagactgcagtctgcagcacatctgcagcccctggaaatgtactttggtctgttggcctcatactgtgtttgagtgtctgaggactctctgctctgggtgtctatcccctgtcatgccttctcaacaagatgagtctggagcaggaacaggccctggaatgtagatgggtctgtatattggctcccgggccactcactgccaagcttctttgtatgtacagaggtaataaagcaattgagtccctggctgctaaggtcagtggacccagtatgatagt

SEQ ID NO: 5618 - protein, 394 aa, Mus musculus
MSIFGGMDMKKAIACLLFGGSRTRLPDGLTRRGDINLLMLGDPGTAKSQLLKFVEKCSPIGVYTSGKGSSAAGLTASVIRDPSSRNFIMEGGAMVLADGGVVCIDEFDKMREDDRVAIHEAMEQQTISIAKAGITTTLNSRCSVLAAANSVFGRWDETKGEDNIDFMPTILSRFDMIFIVKDEHNEERDMMLAKHVMTLHVSALTQTQAVEGEIDLAKMKKFIAYCRARCGPRLSAEAAEKLKNRYIIMRSGARQHERDSDRRSSIPITVRQLEAIVRIAEALSKMKLQPFATEADVEEALRLFQVSTLDAALSGNLSGVEGFTTQEDQEMLSRIEKQLKRRFAIGSQVSEHSIVQDFTKQKYPEHAIRKVLQLMLRRGEIQHRMQRKVLYRLK

SEQ ID NO: 5619 - DNA, 2598 bp, Nicotiana tabacum
  CDS (1)..(2598)
atggaagagcatgatcagtatgaatcgttgggattggatgattcgatggaggatgaaagagatttggatcaaatcatggcggatcgtcgggctgctgaagtggaacttgacactagagatgtacaggtcacgaaccgcaagcttccccaacttcttcacgatcaagatactgatgatgacaactataggccatcgaaaaggactagagctgatttcaggcccaccaacacacaaagaaactttgatgatactgatgcaatgccgagttcaccaggagcatcacaacgagtaaattctagccaggatgtgccaatgactgatcaaactgatgatgatgcctatgaggatgatgaaaatgatgaaggagagtttgagatgtacagagttcagggaacacttagggagtgggtaactagagatgaagtccggcgtttcattgcaaagaagttcaaggaattcttactcacatatgtaaatccgaaaagtgagcatggggactttgaatatcttagacagattaatgagatggtatcagttaacaagtgtagccttgagattgattacaaacaattcatatatgtccatcccaatattgccatctggctggcagatgcacctcaatccgtccttgaagtgatggaagaaattgctaacaaagttgtctttgatcttcatcccaactacaagcaaattcatcaaaaagtctatgtcaggattaccaacttacctgtttatgatcagattcgcaatataaggcagatccatttgaatacaatgattcgtattggtggagttgtcacccgacgttctggtgtctttccccagctgcaacaagtgaaatatgattgcaacaagtgtggagcaattttgggtccttttttccagaactcatactcagaagtcaaggttggttcttgcccagagtgccaatccaaaggaccattcactgtcaatgttgagcagacaatatacaggaactaccagaaactgacactacaagaaagcccaggaattgttccagctggtcggcttcctagatacaaggaagtgatactgttgaatgatcttattgattgtgcccgaccaggagaagagatagaagtcacaggagtctacacaaataactttgacttgtccttgaataccaagaatgggtttcctgtctttgctactgtgattgaagcaaattatgtcacaaaaaagcaagacctcttttcagcttacaagctaactcaggaggacaaggaagaaattgaaaagctggcaaaagacccccgaattggagaacgaatatctaagtccattgctccatcaatctatggtcatgaagatataaagaccgccttagctcttgcgatgtttgggggccaagagaaaaatgttgaaggaaaacacagactgagaggagacataaatattctcctgctaggtgatccgggcactgcaaaatcacagttcctcaagtacgtagagaagacaggacagcgggctgtctatacaactggaaaaggagcttctgctgtagggcttacggcagcagtacacaaggaccctgtcactcgggaatggacccttgaaggaggagcactagttctggccgatagaggaatctgtttgattgacgagttcgataagatgaatgatcaggatagagtgagtattcatgaagcaatggaacagcagagtataagcatatcgaaggctggcattgtcacatctctccaggcccgctgttctgttattgctgctgcaaatcctattggaggaagatatgattcctcgaagactttgacgcaaaatgttgaattaacagatccaatcatttctcgctttgatgtactctgcgtggtcaaggatgtggttgatccagtcatagacgagatgcttgcaaaatttgtagttgatagtcatttcaggtcacaagcaaaaggtgctactttagatgagaaatcctttactgattcacgggatgatgcccgtgctgctatggccccaactgaccctgagataattcctcaagagttgctaaagaagtacataacttatgcaaagttgaatgtattcccgaaattgcacgatggggacttggacaagctcacacaggtttatgctgaattaaggagagaatcttcgcatggacaaggagttcccatagcagtgaggcacattgaatccatgataaggatgtctgaagcccatgcaagaatgcatcttagacaacatgttactcaagaagatgtggacatggcaattcgtgtcctcctagattcatttatatcaactcagaaattcggggtgcaaaaagctttgcaaaagagcttcaaaaagtacatgacatacaaaaaagatttcaatgctatcattcttcacctcctacgtgggcttgtaaacgacgcaatgcaatttgaggaaattgtttcgggttctactgccaatctagaccatattgatatcaaagtggatgagcttcaaagcaaggcacttgattatggcattactgatctcaaagcatttttcacaagcaatgacttttctaaagcgaactttgagttggacaaggaacgaggtataataaggcataaaagggcatcgtcttaa

SEQ ID NO: 5620 - protein, 865 aa, Nicotiana tabacum
MEEHDQYESLGLDDSMEDERDLDQIMADRRAAEVELDTRDVQVTNRKLPQLLHDQDTDDDNYRPSKRTRADFRPTNTQRNFDDTDAMPSSPGASQRVNSSQDVPMTDQTDDDAYEDDENDEGEFEMYRVQGTLREWVTRDEVRRFIAKKFKEFLLTYVNPKSEHGDFEYLRQINEMVSVNKCSLEIDYKQFIYVHPNIAIWLADAPQSVLEVMEEIANKVVFDLHPNYKQIHQKVYVRITNLPVYDQIRNIRQIHLNTMIRIGGVVTRRSGVFPQLQQVKYDCNKCGAILGPFFQNSYSEVKVGSCPECQSKGPFTVNVEQTIYRNYQKLTLQESPGIVPAGRLPRYKEVILLNDLIDCARPGEEIEVTGVYTNNFDLSLNTKNGFPVFATVIEANYVTKKQDLFSAYKLTQEDKEEIEKLAKDPRIGERISKSIAPSIYGHEDIKTALALAMFGGQEKNVEGKHRLRGDINILLLGDPGTAKSQFLKYVEKTGQRAVYTTGKGASAVGLTAAVHKDPVTREWTLEGGALVLADRGICLIDEFDKMNDQDRVSIHEAMEQQSISISKAGIVTSLQARCSVIAAANPIGGRYDSSKTLTQNVELTDPIISRFDVLCVVKDVVDPVIDEMLAKFVVDSHFRSQAKGATLDEKSFTDSRDDARAAMAPTDPEIIPQELLKKYITYAKLNVFPKLHDGDLDKLTQVYAELRRESSHGQGVPIAVRHIESMIRMSEAHARMHLRQHVTQEDVDMAIRVLLDSFISTQKFGVQKALQKSFKKYMTYKKDFNAIILHLLRGLVNDAMQFEEIVSGSTANLDHIDIKVDELQSKALDYGITDLKAFFTSNDFSKANFELDKERGIIRHKRASS

SEQ ID NO: 5621 - DNA, 2133 bp, Pisum sativum
  CDS (1)..(2133)
atgcaatcattctgtgatgcggtgactgatgctgttcgtgctattgatcccaagtatttgaaggaaggggaacatgttcttgtgggattggaaggcccttttgtttctcgcagggttacacctagggatcttctttctgaattcataggttctatggtttgtgttgagggcattatcaccaaatgctctcttgtaaggccaaaggttgttaaaagtgttcatttctgccccaccactggcagcttcacgagccgtgattatcgagatattacatctaatttgggtttgcccacagggtctgtgtatcccacaagggatgaaaatggcaacttacttgtgaccgagtatgggttgtgcaaatacaaggatcatcaaaccttgtccatgcaggaagttcctgaaaattctgcgcctggtcagctcccaagaacagtggatgtcatagcagaggacgaccttgttgattcttgcaagcctggagatcgtgtggctattgttgggatatataaggctcttccaggaaaaagcaaaggcagtgttaatggtgtattcaggactgtgctcatagccaacaatgtagctcttctcaataaagaagctaatgctccaatctacagcactgaagaccttaaaaacataaaaaagatagctgaaagagatgatacatttgatctgcttggtaattcacttgcaccttccatacacggacattcttggataaagaaagcagtgattttattgatgcttagtggagtggaaaagaacttaaagaatggcactcatttgagaggtgacattaacatgatgatggttggtgatccctctgttgccaagtctcaactcttgagagcaattatgaatattgcccccttggccatatcaactacaggtcggggttcttctggggttggtttgacagcagcagttacttcagatcaagaaacaggagaaagaaggctagaagctggggcaatggttcttgctgacagaggtgttgtctgcattgatgaatttgacaaaatgaatgaccaagatcgtgtagctatacacgaagttatggaacagcagactgtaacaattgctaaagctgggatccatgcatcacttaatgctcgttgtagtgtagttgcagctgcaaatcccatatatggaacttatgaccgttcactgactccaactaaaaatattggactcccagactctttgctttctcgatttgatctgttgtttattgtgttggatcaaatggatcctgatattgatcgccaaatatcagagcatgtcctgcgtatgcatcggttccgttctgccattgatggaggtgaggcagcacatgacgggagtgcaagatatgggaagaaagaggaagctgatactgaatcatctgtctttgtcaaatataacagaatgctacatgggaagaaaactgatagaggccgcaagcgcgatacacttacaattaagtttcttaaaaagtatatccattatgccaagcataggattcaaccggacttgactgatgaggcatctgaccagattgccacagcatatgctgagctcagaaatgcaaattcaaatgcgaagactggaggaacacttcctataactgccaggactttagaaaccataatacgtctctcaactgctcatgccaaattgaaattgagcagaaaggttacaaagtctgatgtggatgctgctttgaagattcttaattttgcaatatatcataaagagctgacagaaatggatgagcgtgaagaagagagggaaaaagaaagggaaagagaacaggagaggaagcgaaaggctgatgctgaaaacaatggtcctgatcgtggttctaaaagcaaaagagactcaacatccgaagccatggaattagatgatacctcagcagccccaccagctgttggtctcactcctgaaagaattgaagcattcaattccctatttggtcagcatatgcgtgccaatcccttggatcaaatatctattgctgacatagaagatgttatcaatagaggggctgattctacttacagctcggcagatatattgctcctgttagagaaattgcaagaagacaatagattaatgatagttgctggaatggtgcatatgatatcataa

SEQ ID NO: 5622 - protein, 710 aa, Pisum sativum
MQSFCDAVTDAVRAIDPKYLKEGEHVLVGLEGPFVSRRVTPRDLLSEFIGSMVCVEGIITKCSLVRPKVVKSVHFCPTTGSFTSRDYRDITSNLGLPTGSVYPTRDENGNLLVTEYGLCKYKDHQTLSMQEVPENSAPGQLPRTVDVIAEDDLVDSCKPGDRVAIVGIYKALPGKSKGSVNGVFRTVLIANNVALLNKEANAPIYSTEDLKNIKKIAERDDTFDLLGNSLAPSIHGHSWIKKAVILLMLSGVEKNLKNGTHLRGDINMMMVGDPSVAKSQLLRAIMNIAPLAISTTGRGSSGVGLTAAVTSDQETGERRLEAGAMVLADRGVVCIDEFDKMNDQDRVAIHEVMEQQTVTIAKAGIHASLNARCSVVAAANPIYGTYDRSLTPTKNIGLPDSLLSRFDLLFIVLDQMDPDIDRQISEHVLRMHRFRSAIDGGEAAHDGSARYGKKEEADTESSVFVKYNRMLHGKKTDRGRKRDTLTIKFLKKYIHYAKHRIQPDLTDEASDQIATAYAELRNANSNAKTGGTLPITARTLETIIRLSTAHAKLKLSRKVTKSDVDAALKILNFAIYHKELTEMDEREEEREKEREREQERKRKADAENNGPDRGSKSKRDSTSEAMELDDTSAAPPAVGLTPERIEAFNSLFGQHMRANPLDQISIADIEDVINRGADSTYSSADILLLLEKLQEDNRLMIVAGMVHMIS

SEQ ID NO: 5623 - DNA, 2484 bp, Pisum sativum
  CDS (1)..(2484)
atggaagctttcggcggttacttggtcgatgagaaagccgttagggttgagaacgctttcttagattttctcaaaagttttagatccggacaacggaatgaactatattacgaagcggagattgaagtgatgagagctaacgagtccaacaccatgttcatcgatttcgagcatgtcatcagattcagtgatcttcttcagaaagctatctccgatgaatatttgaggtttgaaccttacttgcagaacgcttgcaagaggtttgttatggagctcaagccaacttttatatctgacgataaccctaacaaggacatcaatgttgccttctataacattccaattgtcaagaggttaagagagttggctacatcagagattgggaggcttgtatctgtaacaggagtggtaacaaggacaagtgaggttcggcccgagcttctccaagggactttcaagtgtctagaatgtggaggggttataaagaatgttgagcagcagttcaagtatactgagccaacaatctgtccgaatgccacctgtaacaatagaacaaggtgggctctgctgcgccaagagagcaaatttactgattggcaaagggtcagaatgcaggaaacttccaaagagatacccgcgggctctttgccaaggtcattggatgttattctccgtcatgagattgtggaacatgctagggctggtgacacagtgatttttactggcactgtaattgtcatacctgatatattggcattggcatcccctggagagagatcagaatgtcgtagggaagcttctcaacgcaagggttcttcatctggaaatgaaggtgtgaggggccttagggctttgggagtcagagacctctcatatcgtctggcttttatcgctaactctgttcagatttgtgatggtagaagagaaatagacatcaggaataggaagaaggattcagaggaagatgacctgctattttctcaacaggaactggatgaagttcaacgaatgaggaacaccccagatttcttcacaaaacttgttgagagtgttgctcctactatttttggtcatcaagatataaagcgagcaatccttcttatgcttatgagtggggtccataaatctactcatgaaggcatcagccttagaggagacataaatgtttgtatagttggagatcctagctgtgcaaagtctcaatttctcaagtatacttcaagcattgttccaagatctgtgtatacatctggtaaatcatcatctgctgctggtttgactgcaactgttgccaaggaaccagaaactggagagttttgtattgaggctggtgctttgatgcttgctgacaatggcatttgctgcattgatgaatttgacaagatggacataagagatcaggttgcaattcatgaggcaatggaacaacaaactattagtatcactaaagcaggaatacaagcaacactcaatgctcgtacttccattcttgctgctgccaaccccgctggaggacggtatgataagtctaagccgctgaagtacaatgtggctcttccaccggctatactttcaaggtttgatcttgtatacattatgattgatgacccggacgataatacagattaccacatagcttctcacattgtgcgggttcatcaaaagcgcgaagatgctcttgctccaacattcactacagcagaactgaagcgttatatagcctatgcaaagactcttaaaccaaagctaacgtcagatgcaagaaaactactggtagactcttatgttgctctccgtagggctgatacaaatcctggcagtagggttgcatatcgtatgacagttaggcagttggaggctttaatcaggctgtcggaggccattgcacggtgtcatttggataatcaggtacaacctcgtcatgttcgtttagcagtaaaactgctgcaaacatctataataagagtggagtccagtgagattgatctatctgagtttcaagatcaagatagggaggaagaagcaggcagtggtgatggaaataataataataatgatgctgatggaaccaacggtgataatgaaaaagcagctgatgaatctaacccccaaagaaagaaatcaactgtaactgatgaatactttcagaggattaccagggcccttgtcacacgtctcagacaacatgaggagactgtggtggaacaaggaagtgacttggctgggatgaggcaacgagatttgattaaatggtatgtagaccagcagaatgagaaaaataactacagttccatagaggaggcgaaaactgaagtttcccaaattaaagcaattatagagattttaattcgaagagaggggcatttgatagtagtagatgatgggagacaagcagcagcagaggctgctggtgcagaacaaaccgagtctgcggctagaaatgatagaattttggctgtagctcctcattatgttgttgactga

SEQ ID NO: 5624 - protein, 827 aa, Pisum sativum
MEAFGGYLVDEKAVRVENAFLDFLKSFRSGQRNELYYEAEIEVMRANESNTMFIDFEHVIRFSDLLQKAISDEYLRFEPYLQNACKRFVMELKPTFISDDNPNKDINVAFYNIPIVKRLRELATSEIGRLVSVTGVVTRTSEVRPELLQGTFKCLECGGVIKNVEQQFKYTEPTICPNATCNNRTRWALLRQESKFTDWQRVRMQETSKEIPAGSLPRSLDVILRHEIVEHARAGDTVIFTGTVIVIPDILALASPGERSECRREASQRKGSSSGNEGVRGLRALGVRDLSYRLAFIANSVQICDGRREIDIRNRKKDSEEDDLLFSQQELDEVQRMRNTPDFFTKLVESVAPTIFGHQDIKRAILLMLMSGVHKSTHEGISLRGDINVCIVGDPSCAKSQFLKYTSSIVPRSVYTSGKSSSAAGLTATVAKEPETGEFCIEAGALMLADNGICCIDEFDKMDIRDQVAIHEAMEQQTISITKAGIQATLNARTSILAAANPAGGRYDKSKPLKYNVALPPAILSRFDLVYIMIDDPDDNTDYHIASHIVRVHQKREDALAPTFTTAELKRYIAYAKTLKPKLTSDARKLLVDSYVALRRADTNPGSRVAYRMTVRQLEALIRLSEAIARCHLDNQVQPRHVRLAVKLLQTSIIRVESSEIDLSEFQDQDREEEAGSGDGNNNNNDADGTNGDNEKAADESNPQRKKSTVTDEYFQRITRALVTRLRQHEETVVEQGSDLAGMRQRDLIKWYVDQQNEKNNYSSIEEAKTEVSQIKAIIEILIRREGHLIVVDDGRQAAAEAAGAEQTESAARNDRILAVAPHYVVD

SEQ ID NO: 5625 - DNA, 2031 bp, Homo sapiens
  CDS (1)..(2031)
atggcgggtaccgtggtgctggacgatgtggagctgcgggaggctcagagagattacctggacttcctggacgacgaggaagaccagggaatttatcagagcaaagttcgggagctgatcagtgacaaccaataccggctgattgtcaatgtgaatgacctgcgcaggaaaaacgagaagagggctaaccggcttctgaacaatgcctttgaggagctggttgccttccagcgggccttaaaggattttgtggcctccattgatgctacctatgccaagcagtatgaggagttctacgtaggactggaaggcagctttggctccaagcacgtctccccgcggactcttacctcctgcttcctcagctgtgtggtctgtgtggagggcattgtcactaaatgttctctagttcgtcccaaagtcgtccgcagtgtccactactgtcctgctactaagaagaccatagagcgacgttattctgatctcaccaccctggtggcctttccctccagctctgtctatcctaccaaggatgaggagaacaatccccttgagacagaatatggcctttctgtctacaaggatcaccagaccatcaccatccaggagatgccggagaaggccccagccggccagctcccccgctctgtggacgtcattctggatgatgacttggtggataaagcgaagcctggtgaccgggttcaggtggtgggaacctaccgttgccttcctggaaagaagggaggctacacctctgggaccttcaggactgtcctgattgcctgtaatgttaagcagatgagcaaggatgctcagccctctttctctgctgaggatatagccaagatcaagaagttcagtaaaacccgatccaaggatatctttgaccagctggccaagtcattggccccaagtatccatgggcatgactatgtcaagaaagcaatcctctgcttgctcttgggaggggtggaacgagacctagaaaatggcagccacatccgtggggacatcaatattcttctaataggagacccatccgttgccaagtctcagcttctgcggtatgtgctttgcactgcaccccgagctatccccaccactggccggggctcctctggagtgggtctgacggctgctgtcaccacagaccaggaaacaggagagcgccgtctggaagcaggggccatggtcctggctgaccgaggcgtggtttgcattgatgaatttgacaaaatgtctgacatggatcgcacagccatccatgaagtgatggagcagggtcgagtgaccattgccaaggctggcatccatgctcggctgaatgcccgctgcagtgttttggcagctgccaaccctgtctacggcaggtatgaccagtataagactccaatggagaacattgggctacaggactcactgctgtcacgatttgacttgctcttcatcatgctggatcagatggatcctgagcaggatcgggagatctcagaccatgtccttcggatgcaccgttacagagcacctggggagcaggatggcgatgctatgcccttgggtagtgctgtggatatcctggccacagatgatcccaactttagccaggaagatcagcaggacacccagatttatgagaagcatgacaaccttctacatgggaccaagaagaaaaaggagaagatggtgagtgcagcattcatgaagaagtacatccatgtggccaaaatcatcaagcctgtcctgacacaggagtcggccacctacattgcagaagagtattcacgcctgcgcagccaggatagcatgagctcagacaccgccaggacatctccagttacagcccgaacactggaaactctgattcgactggccacagcccatgcgaaggcccgcatgagcaagactgtggacctgcaggatgcagaggaagctgtggagttggtccagtatgcttactttaagaaggttctggagaaggagaagaaacgtaagaagcgaagtgaggatgaatcagagacagaagattga

SEQ ID NO: 5626 - protein, 676 aa, Homo sapiens
MAGTVVLDDVELREAQRDYLDFLDDEEDQGIYQSKVRELISDNQYRLIVNVNDLRRKNEKRANRLLNNAFEELVAFQRALKDFVASIDATYAKQYEEFYVGLEGSFGSKHVSPRTLTSCFLSCVVCVEGIVTKCSLVRPKVVRSVHYCPATKKTIERRYSDLTTLVAFPSSSVYPTKDEENNPLETEYGLSVYKDHQTITIQEMPEKAPAGQLPRSVDVILDDDLVDKAKPGDRVQVVGTYRCLPGKKGGYTSGTFRTVLIACNVKQMSKDAQPSFSAEDIAKIKKFSKTRSKDIFDQLAKSLAPSIHGHDYVKKAILCLLLGGVERDLENGSHIRGDINILLIGDPSVAKSQLLRYVLCTAPRAIPTTGRGSSGVGLTAAVTTDQETGERRLEAGAMVLADRGVVCIDEFDKMSDMDRTAIHEVMEQGRVTIAKAGIHARLNARCSVLAAANPVYGRYDQYKTPMENIGLQDSLLSRFDLLFIMLDQMDPEQDREISDHVLRMHRYRAPGEQDGDAMPLGSAVDILATDDPNFSQEDQQDTQIYEKHDNLLHGTKKKKEKMVSAAFMKKYIHVAKIIKPVLTQESATYIAEEYSRLRSQDSMSSDTARTSPVTARTLETLIRLATAHAKARMSKTVDLQDAEEAVELVQYAYFKKVLEKEKKRKKRSEDESETED

SEQ ID NO: 5627 - DNA, 2238 bp, Notophthalmus viridescens
  CDS (1)..(2238)
atgaggttgtgtgggcattgcagaccaggagctccgggaagctcagcggagtacctggactttctcgatgacgatcaagaccaggggctgtatcatggcaaagtccgggatatgatcagcgagaaccggcaccggctgattgtcaacatgaacgacctgcggcgcaacgacgaggccagagccaaccgattattaaatgatgcgtttggagaagtgattgcattccagaaagcactgaaagatatggttagctcaattgatgcaacatattccaaacagtttgaggagttcagcattggatttgaaggaagctttggaacaaacgacgtttcacctcgcacacttggtcgtcactttcttggtaacctggtctgtgtagaaggcattgtaacaaaatgctcattggtgaggcctaaagttatgcgaagtgtacattactgccctgccacaaagaagacactggagcgcaagtatacagacctcaccagtttggacccattcccgtcaagtgctgtgtaccccacaaaggacgaggaaaataatcccttggaaacggagtatggactttgtacctacaaagatcaccagacgctgaccatccaggagatgcccgagaaggcacctgctgggcaacttcctcgatctgttgatattattgcagatgatgatttggttgacagctgcaaacctggggaccgagtgcagattgtgggaatctatcgctgccttccttccaagcagggaggcttcacctctggcacgttcaggaccatcatgctggctaataacgtcaaacagatgagcaaggaaatggctcctacattttcagctgatgatgtggcaaagatcaagaaattctgcagagctcatacgaatgatatattccagcacttgagcaaatcgttggcaccgagtattcatggacatgagtatattaaaaaagctattttgtgcatgctgcttggaggcaatgagaaggttcttgaaaatgggacacgcataagaggagacattaatgttttattgataggtgatccttctgttgcgaagtctcagcttcttcgatatgtgctgcataccgctccaagagctatacctaccactggtaggggatcatctggagtaggattgactgctgctgttactactgaccaggaaactggggaacgaagattggacatgggcgctatggttttagcagatagaggggttgtctgcattgatgagtttgacaaaatgtctgatatggaccgaacagctattcatgaagtaatggaacaaggacgtgtcactatagcaaaagcaggaatccaggcaaggctgaatgcccgctgcagtgtattagctgctgccaacccggtgtatggaaggtacgaccagtacaaaacaccgatggaaaacattgggctgcaagactcccttctgtccagattcgatctcctcttcatagttcttgatcaaatggatgcggacagtgatcgagaaatttcggaccatgttctgcgcatgcacagatacagggctcaaggagaacgagacggacatgcattgccgcttggatgcaatgtagaggtctttgcaactgatgacccaaatgctcaaaacgaggcagaggaggaactgcagatttatgaaaaacatgacaacttacttcacggtccacgtgcaaaaagagagaaggttgtaagcatgcaatttattcgaaagtatatccatgtggctaaactggtcaagcctgttcttagtcaggaagcagctgattatatagcggaggaatattcgaagatccgcagccatgatcagatgaataatgaacgtgcaaggacgatgccagttacggcaagagctctggaaaccatgatccgattgtccacagctcatgctaaactccgaatgagcaaaaccattgatattcaagatgctgaagtggccctggagcttattcagtttgcttacttccaaaaggttttggagaaagagaagaaaaaagttgttggtgatggtataaatgaggataattctagccaagtcgtcccaagccaggaaagtgtaaggaagagttctaagcgggggtcaaaagatgaaggtgatgagatggaggacacaatggatccgtactctttcagcgaaaaaagcatgacccaagatttagtattgtctgctcggaaaacaaggactcctaggaaaaagccaacagatattggggctagggggcagataacgatctatgacagataa

SEQ ID NO: 5628 - protein, 745 aa, Notophthalmus viridescens
MRLCGHCRPGAPGSSAEYLDFLDDDQDQGLYHGKVRDMISENRHRLIVNMNDLRRNDEARANRLLNDAFGEVIAFQKALKDMVSSIDATYSKQFEEFSIGFEGSFGTNDVSPRTLGRHFLGNLVCVEGIVTKCSLVRPKVMRSVHYCPATKKTLERKYTDLTSLDPFPSSAVYPTKDEENNPLETEYGLCTYKDHQTLTIQEMPEKAPAGQLPRSVDIIADDDLVDSCKPGDRVQIVGIYRCLPSKQGGFTSGTFRTIMLANNVKQMSKEMAPTFSADDVAKIKKFCRAHTNDIFQHLSKSLAPSIHGHEYIKKAILCMLLGGNEKVLENGTRIRGDINVLLIGDPSVAKSQLLRYVLHTAPRAIPTTGRGSSGVGLTAAVTTDQETGERRLDMGAMVLADRGVVCIDEFDKMSDMDRTAIHEVMEQGRVTIAKAGIQARLNARCSVLAAANPVYGRYDQYKTPMENIGLQDSLLSRFDLLFIVLDQMDADSDREISDHVLRMHRYRAQGERDGHALPLGCNVEVFATDDPNAQNEAEEELQIYEKHDNLLHGPRAKREKVVSMQFIRKYIHVAKLVKPVLSQEAADYIAEEYSKIRSHDQMNNERARTMPVTARALETMIRLSTAHAKLRMSKTIDIQDAEVALELIQFAYFQKVLEKEKKKVVGDGINEDNSSQVVPSQESVRKSSKRGSKDEGDEMEDTMDPYSFSEKSMTQDLVLSARKTRTPRKKPTDIGARGQITIYDR

SEQ ID NO: 5629 - DNA, 2163 bp, Zea mays
  CDS (1)..(2163)
atgaagaaccctgacttcgccttagacaaagcgctcgccaaggacttcctgtccaatttcaccggccctcacggcgagcccaagtacctgaacatcctgcaagatgtcgcgaacaggaagatacgcgcggtccagatcgagctggacgacctattccactataaggatgtcgacgaggagttcttgcaacgtgtcaccgaaaacacgcggcgctacatcggcatcttcgcggaggccatggacgagatcatgccggagcccacagaggcgtacaccgtcgacgaggaccaggacatcctgatgacgcagcgtgtggatgaggggcccgacggcggcgcggacggcacggacccgctacagaaaatgccgccagagatcaaacggttctttgaggtttacatcaaggcattctcaaaggtgactccactcaccattcgacaagtgaaggcatccaacattggtcagcttgtgaaaatatctgggattgttactcgctgctcggatgtgaagcccttgatgcaggttgctgtttatacatgtgaagaatgtggcttcgagatataccaggaagtgactgctagagtgtttatgcccctcatcgaatgtccatctcaacgatgcaagctgaacaaagcgaaggggaatctaatccttcaactgcgtgcgtcaaagtttttgaaatttcaggaggtaaagcttcaagagttagcagagcacgtaccaaagggccacattcctcgtgctctgactgttcatctaagaggagagttgactagaaaggttgcacctggagatgtggttgagatgtcgggtatttttctccctatgccatactacgggtttagagcgatgcgcgcaggattagttgctgatacttacttggaagcaatgtctgtcacccacttcaagaaaaaatatgaggagtatgatctaaaaggtgatgaacaagaacaaattgaccgattggctgaggacggtgatatctacagtaagctggcaaggtccttggcacctgaaatatttggccatgaagatgtcaaaaaagcactgctgttactacttgttggtgcaccccatcggaagctcgcagatggcatgaagatcagaggagacctgcatatatgcatgatgggagatcctggtgttgcaaagagtcaacttctgaagcatattatcaatgttgcaccaagaggagtgtacaccactggacgtgggagcagtggtgttggacttaccgctgcagtccagaaagatccagtaacaaatgagtttgtcctcgaaggtggagcactggtactggcagatatgggcatttgtgctatagatgagtttgacaagatggaagagtcagacaggacagcgattcatgaggtaatggagcagcaaacagttagcattgccaaggctggcatcaccacctctcttaatgcgagaactgcaattctggctgctgcaaatccagcatggggaaggtatgatatgaggagaaccccagcagaaaatataaatctacctccagctcttctgtctcgtttcgacctcctttggttaatcctggatcgtgcagacatggaaactgatcttgaaatggcaagacacgttgttcatgtgcatcaaaatcttgaatcaccagcgctggggttcacaccacttgagccatctgtactcagagcatacatatctgctgctagaagagtcattccttctgttcctagagagctcgaggaatacattgcaactgcatattccagcatccgccaagaggaggcgaagtcaaatgcaccaacctcctacacaactatcagaacacttttgagcatactccgtatctctattgccttggcaagactgaggttctcagaaactgtggctcagagcgatgtcgacgaagcactgcgactgatgcaaatgtccaagtactcattatactcagatgaccgccagcggtctggccttgatgcaatatctgacatatattccatcctgagagacgaagctgctaggacgagcagcatggatgtgagatacgctcacgctcttaacttgatctccagaaagggatacagcgaggctcaattgaaggaatgcttggaggaatacgcttccctgaatgtgtggcagatccatccaagcacatttgacatccacttcattgatgtctga

SEQ ID NO: 5630 - protein, 720 aa, Zea mays
MKNPDFALDKALAKDFLSNFTGPHGEPKYLNILQDVANRKIRAVQIELDDLFHYKDVDEEFLQRVTENTRRYIGIFAEAMDEIMPEPTEAYTVDEDQDILMTQRVDEGPDGGADGTDPLQKMPPEIKRFFEVYIKAFSKVTPLTIRQVKASNIGQLVKISGIVTRCSDVKPLMQVAVYTCEECGFEIYQEVTARVFMPLIECPSQRCKLNKAKGNLILQLRASKFLKFQEVKLQELAEHVPKGHIPRALTVHLRGELTRKVAPGDVVEMSGIFLPMPYYGFRAMRAGLVADTYLEAMSVTHFKKKYEEYDLKGDEQEQIDRLAEDGDIYSKLARSLAPEIFGHEDVKKALLLLLVGAPHRKLADGMKIRGDLHICMMGDPGVAKSQLLKHIINVAPRGVYTTGRGSSGVGLTAAVQKDPVTNEFVLEGGALVLADMGICAIDEFDKMEESDRTAIHEVMEQQTVSIAKAGITTSLNARTAILAAANPAWGRYDMRRTPAENINLPPALLSRFDLLWLILDRADMETDLEMARHVVHVHQNLESPALGFTPLEPSVLRAYISAARRVIPSVPRELEEYIATAYSSIRQEEAKSNAPTSYTTIRTLLSILRISIALARLRFSETVAQSDVDEALRLMQMSKYSLYSDDRQRSGLDAISDIYSILRDEAARTSSMDVRYAHALNLISRKGYSEAQLKECLEEYASLNVWQIHPSTFDIHFIDV

SEQ ID NO: 5631 - DNA, 2619 bp, Dugesia japonica
  CDS (1)..(2619)
atggggaaaaataatttcaaaaaagatatgagcaataatttggaacgaagtctatcagaagcagatgattctccctttgaagatgaaacagagcaattattgggagctgagtatcaagacgaagagtctgaagaagaagaattaataaatgattctatggaaagggattacaggcgaattccagaacttgacagctatgaagctgctggtatagatgatgagtctgatgttgatgaaatatctcaaaatgaacgaaatgttgtcgaacaagaacttgatcgacgtgatagattagaagcagtggcttctggcgatctaagaagaggcgtgatacctgatatatttgaagatgaaagtagtgatgccgaagcatcattcagacgacaacgcatggctgacaaaatagcatcatatgattcggcaggtgaaacattgggatcacaacagacttatgaagcagtagagaatctcgaagataccaaaggaatgtcggtagccatgtggattcaacaacctgctaccaaattagaaattagaaataggtttttctcattcttgaggacattcctaaacgacgaaggaaaagcggtatattcggaaagaattggaacaatggcgcaagcaaataaaaaaagtttaacaattaattacgaacatcttgttgctgtagaacaagctcttgcatattttttacctgaagctccacagggaatgctagaaatttttgatgaagtagcatttgcagtgactttgtcgagatatccaaattataaaaccatcaccgaatctattcatgttaggataagtcatttaccgctcgttgatgagattcgatcattacgacaagttcacattaaccaattgattcgaacaccggagttgtgtcaagttgtactcctgttttgcccccaattgaatcttgtccagttcaattgcatgagatgtggttgtactattggaccttttacacaaacagattccaccaatgaaattaaaccgtcaacttgtccagattgtcaatctaatgggccatttgaaatcaatgttgaaaaaacattgtacaaaaattatcaacgaattacaggtcaagagagtccagggactgtccctgcaggtcgattaccgagaagtaaagatgcgatattattggacgatttagttgatagttgcaagcctggagatgaaattgatatcaccgggatttactttatttattatgatcgagctctcaacaataaacaatgttttcctgtattttcaacaaacattctcgttaattatgttctgaaaactgacgaacatttaattttgagtggagtgactgatgaagacattgtaaacattcaaaatctcgctaaagatgagagattatttgatagaattctgcgcagcattgctccgagcatatacggacacgaaaatatcaaacgagctattgcgctctcgttatttggaggagttgcaaaaactaagggacaaaagttgcgaggtcgcggcgatattaatgtattgatttgtggtgatcctggcactgcgaaatctcaatttctgaaatttgttgaacaactagctcccagatgtgttttcacaactggtcaaggagctagcgctgttggattgacagcatatgtgagcaggaatcctacaagcaaggagtggactctggaagcaggagcgttagttctggctgataaaggcgtgtgtttgattgacgagtttgacaaaatgaatggtcaagacagaacttcaatccacgaagcgatggagcagcagaccatctcgatcagcaaggctggcattgttacaagtctccaagctcgatcaaccatcatcgcagctgcgaatccgattgcgggacgatacgacacgagcagaaacttttccgacaatgttgatttgacgagtccgattctgtcgcgatttgatatcctttgtgttgtcagagacattgtggatccaattcaagatagcatgttggcgaaatacgtgattggcagccacatgcgtcaccacggtcgtctgagtgaggaggagaagaaggaagtggtgaaacgattggaggcgctcggcgcaatggtcaacactagcgacagcgaggcaggagatttgcaagcgatcccattggaactgttgcagaaatatataatttacgcgagacagcgagtgagtcccagattgagcaaaacaaacgagggcaaattatgcgaagtttatgttgaattaagaaaagcatccaaggaaaatggaggtatcgatgtaactgtaagatacttcgagtcaatgattcgactgtcggaggcgcatgccaaattacacttccgagaagtggtgaatgaggaagatgtgaacatggcgattcgagtgctgctcgagtcgttcatctcaaccgagaaatacagcctcatgaaaaacttggaaaataaattccggcattatctcaactacaagaaaaatgatcacgaactaatcatgttcacattaaagcaaatgttccatgaccaattgaccactttgcgagctgaagggaaatcattgaacaattcaataatcgagatcactgaaaaatcgctgttggacaaggtcagaagaatgaacataatgacaatcaaagattcctga

SEQ ID NO: 5632 - protein, 872 aa, Dugesia japonica
MGKNNFKKDMSNNLERSLSEADDSPFEDETEQLLGAEYQDEESEEEELINDSMERDYRRIPELDSYEAAGIDDESDVDEISQNERNVVEQELDRRDRLEAVASGDLRRGVIPDIFEDESSDAEASFRRQRMADKIASYDSAGETLGSQQTYEAVENLEDTKGMSVAMWIQQPATKLEIRNRFFSFLRTFLNDEGKAVYSERIGTMAQANKKSLTINYEHLVAVEQALAYFLPEAPQGMLEIFDEVAFAVTLSRYPNYKTITESIHVRISHLPLVDEIRSLRQVHINQLIRTPELCQVVLLFCPQLNLVQFNCMRCGCTIGPFTQTDSTNEIKPSTCPDCQSNGPFEINVEKTLYKNYQRITGQESPGTVPAGRLPRSKDAILLDDLVDSCKPGDEIDITGIYFIYYDRALNNKQCFPVFSTNILVNYVLKTDEHLILSGVTDEDIVNIQNLAKDERLFDRILRSIAPSIYGHENIKRAIALSLFGGVAKTKGQKLRGRGDINVLICGDPGTAKSQFLKFVEQLAPRCVFTTGQGASAVGLTAYVSRNPTSKEWTLEAGALVLADKGVCLIDEFDKMNGQDRTSIHEAMEQQTISISKAGIVTSLQARSTIIAAANPIAGRYDTSRNFSDNVDLTSPILSRFDILCVVRDIVDPIQDSMLAKYVIGSHMRHHGRLSEEEKKEVVKRLEALGAMVNTSDSEAGDLQAIPLELLQKYIIYARQRVSPRLSKTNEGKLCEVYVELRKASKENGGIDVTVRYFESMIRLSEAHAKLHFREVVNEEDVNMAIRVLLESFISTEKYSLMKNLENKFRHYLNYKKNDHELIMFTLKQMFHDQLTTLRAEGKSLNNSIIEITEKSLLDKVRRMNIMTIKDS

SEQ ID NO: 5633 - DNA, 3316 bp, Mus musculus
  CDS (156)..(2744)
gaccctgcgggcccaggaacgttctcctgggtggcgagaaccctgactcgccgttttgtgcgcgtttgcaactaacccggatccgaggtacgagatgtcccggagcgggacaactgagagccagatttcttttgtcgcgcagcaaccacagcaccatgtcgtccccggcatccaccccgagccgccgcagcagccgacgcggacgagtcaccccaacccagtcccttcgaagtgaggaaagcaggtcgtcacccaatcggagacgtagaggcgaagattcttccaccggagagctactgccaatgcccacctcaccaggagccgacctgcagagcccacctgcacagaatgccttgttttccagccctcctcagatgcattctttagctattcctttggactttgatgttagttcaccattgacatatggcactcccagctcgcgagtggaaggaaccccaagaagtggggtgagaggcacacctgtaaggcagaggccagatctgggctcagcacgaaagggtttgcaggtggatctgcagtctgatggcgcagcagcagaagacatcgtaccaagtgaacagtctctaggccaaaagcttgtgatttggggaacagatgtgaatgtggcaacatgtaaagagaattttcagagattccttcagtgttttactgatcctctggccaaagaagaagaaaatgttggcatagatattactcaacctttgtacatgcaacaacttggagagattaatattacaggagagccatttttaaatgtgaactgcgaacacataaaatcatttagcaaaaatctgtatagacagctcatctcctacccacaggaggttatacgaacctttgacatggctgtcaatgagatcttctttgaccgttatcctgactccatcttagaacatcagattcaagtcagaccttttaatgcgttgaagacaaagagtatgagaaacttgaatccagaagacattgatcagctcatcaccatcagtggcatggtcatcagaacatcacagctgattccggagatgcaggaggcctttttccaatgccaagtctgtgcccacaccacccgggtggagatagatcgaggcagaattgctgagccctgcagttgtgtgcactgccacactacccacagcatggcactgatccacaaccgatcattcttctctgacaagcaaatgatcaaacttcaagagtctcctgaagacatgcctgctgggcagacacctcacactattgtcctttttgcccacaatgaccttgttgacaaggttcaaccaggggacagagtgaacgtcgcaggcatatatcgagcagtaccaattcgagttaatccaagagtgagcaacgtgaagtctgtctataaaacccacattgatgtcattcattatcggaaaacggatgcaaaacgtctgcatggccttgatgaagaagcagaacagaaacttttttcagagaaacgtgtgaaattgcttaaggaactttccaggaagccagatatttatgagcggcttgcttcagccttggctcccagcatttatgaacatgaagatatcaaaaagggaatcttacttcagctctttggtggaacaaggaaggatttcagtcacactgggaggggtaaattccgtgctgagatcaacatccttctgtgtggggaccctggcaccagcaagtcccagctgctacagtatgtgtacaacctggtccccagaggccagtacacgtctggaaaaggctccagtgcggtcggcctcaccgcctatgtgatgaaagaccctgagaccaggcagcttgtcctccagacaggtgccctcgtcctgagtgacaatgggatatgctgcatcgatgagtttgacaaaatgaatgaaagcacaaggtctgtgctgcatgaggtcatggaacagcagactctgtccattgcaaaggctgggatcatctgtcagctcaatgcgcgcacctctgtcctggcagcagcaaatcctattgagtctcagtggaatcctaaaaaaacaaccattgaaaatatccaactaccgcacacattgttgtcaaggtttgatctcattttcctcatgctagaccctcaggatgaggcatatgaccggcgtctagctcatcacctggtttcattgtactaccaaagtgaggagcaagtggaggaggagttcctggacatggccgtgctgaaagactacattgcatatgcccatagtaccatcatgccccgactgagtgaggaggccagccaggctctcattgaggcttatgtaaacatgaggaagattgggagtagccgggggatggtttctgcttaccctcgacagctagagtcattaattcgcttagcagaagcccatgctaaagtaagattttcaaacaaagttgaagcaattgatgtggaagaggcaaaacgcctccaccgggaggctctgaagcagtctgcaactgaccctcgtactggcattgtggatatttctattcttactacaggaatgagtgccacttctcgtaaacggaaagaagaattagctgaagcattgagaaaacttattttatctaagggtaaaacaccagccttaaagtaccaacagctgtttgaggatattcggggacagtctgacacagcaattaccaaggacatgtttgaagaagccctgcgagctttggctgatgatgatttcctaacagtgactgggaagactgtccgcctgctctgagctgcatggccctcggactagagtcactcactgttgttattgctgcaaaaggagtctgaaaggcagtattccactatataaacctcttctattcctggaatgtattttgttagtaaatgtatgttttcacctttttttaacattttaaattatcaacatatagtagagtttatattctcaatatgccatattttttaagcagcttgcttcttacctgtttgtacacagagagcctaagcccagttttggaggttttttttaatgtaggggctgtgcctttgttgtgttgcaatgctggggaggaaggtaagagtaccatgcatgctgtatgtagaggctatgtccttactgtgtggagcattgtgtgcttggtataactggcagccgtacatcctttactgtgatatgatgggctaatgatttttatagcacctggacttaactttctttacagagactttttcccataactattattagaacaaagatatgcttgaaaaattattaaatcaagttgccttctgttttttcctaatatgtaaaacattttcctaaataaatgatagaaaagc

SEQ ID NO: 5634 - protein, 862 aa, Mus musculus
MSSPASTPSRRSSRRGRVTPTQSLRSEESRSSPNRRRRGEDSSTGELLPMPTSPGADLQSPPAQNALFSSPPQMHSLAIPLDFDVSSPLTYGTPSSRVEGTPRSGVRGTPVRQRPDLGSARKGLQVDLQSDGAAAEDIVPSEQSLGQKLVIWGTDVNVATCKENFQRFLQCFTDPLAKEEENVGIDITQPLYMQQLGEINITGEPFLNVNCEHIKSFSKNLYRQLISYPQEVIRTFDMAVNEIFFDRYPDSILEHQIQVRPFNALKTKSMRNLNPEDIDQLITISGMVIRTSQLIPEMQEAFFQCQVCAHTTRVEIDRGRIAEPCSCVHCHTTHSMALIHNRSFFSDKQMIKLQESPEDMPAGQTPHTIVLFAHNDLVDKVQPGDRVNVAGIYRAVPIRVNPRVSNVKSVYKTHIDVIHYRKTDAKRLHGLDEEAEQKLFSEKRVKLLKELSRKPDIYERLASALAPSIYEHEDIKKGILLQLFGGTRKDFSHTGRGKFRAEINILLCGDPGTSKSQLLQYVYNLVPRGQYTSGKGSSAVGLTAYVMKDPETRQLVLQTGALVLSDNGICCIDEFDKMNESTRSVLHEVMEQQTLSIAKAGIICQLNARTSVLAAANPIESQWNPKKTTIENIQLPHTLLSRFDLIFLMLDPQDEAYDRRLAHHLVSLYYQSEEQVEEEFLDMAVLKDYIAYAHSTIMPRLSEEASQALIEAYVNMRKIGSSRGMVSAYPRQLESLIRLAEAHAKVRFSNKVEAIDVEEAKRLHREALKQSATDPRTGIVDISILTTGMSATSRKRKEELAEALRKLILSKGKTPALKYQQLFEDIRGQSDTAITKDMFEEALRALADDDFLTVTGKTVRLL

SEQ ID NO: 5635 - DNA, 2916 bp, Plasmodium falciparum
  CDS (1)..(2916)
atggaggataagaaaaaattagaagaagatttagaatctaacaagtatgatattgatgaagaagatttactagaagatgaaggaaggttaaatgaagaagaaagacaagccgagctagaaggagaaagtttatttgaagaagatgaaggatttatttttggagctgatgatgaaaaaaaagaaatgcaaaagttacgaaatttaggattagataatgatgattatgatgatgattttattgatgatgaattagattatgaggataatttaaaagcaagaagagcagcagaaagacatatgcagatgcaaagaaaacaagagggtaaatatgaaaaaaataaattttggaaaacattagaagatcaattagaaggtgatgatgaagaagaagatatttttgataaggttgctgaaaaggtagcaaagagaagagagaatttacacttaacagctgaagaaacagatattccagatttatcaaatttagaaagtgcaaaaatttgtttatctgtgaatcctaaagatgtagtatttgatgaaagatatcaacaagctgcagatacatgttttcgatatttcttacataaattttctttaaaagattctatgggtttaaatattgatgaatctaatacagaattacatgaagaggaacatatgaatagttctcatcaatattatatagataagatagaaaaaatgattttaaatgataaacataccttaattgtatcagccaaacatttgattcaatttcattgtgaaaatttagttcaatggattgaatttaaacctgaacaaattttagaagtattacatgaatgtttaatggtagaagcatatagaatatctcctaaattatataaaggaagaatatgtaaagttgtgttacgtgattggccatattctacacaattaagaaatttaagatgtactgaattaaatacattaataaaagttacaggagtatgtattaaaagaggctatgtgttaccaaaattaagagttatgtatttaaaatgtaattcatgtgatactaccttatcagaagtacctatatattttgctgatggaaaaaaaccagtattaccaagaagatgtcctcattgtcaatcagctacgttttctgttgataggataaaaacagcttataccgattatcaaaaaattactttacaagaatctccatgttctgtacctgcaggtagagcaccgagacaaagagaagttgtagtgacaggagatttagtggataaagtgaaaccaggtgaagaagtagaagtgttaggtatatataaaaccaaatatgatataggtctaaatataaaatatggatttccaatattacaaacagaaattgaagctaataacattgaaaggaaggaagatatacaattaagcgaattaacagaagatgatataaaggatatattaaaattatcaaaagatccaaatataagagaacgcattattacttcaatagctcctgcaatttggggacataaagatattaaaacatctattgcttatgctttatttggtggagtacaaaagggtggagataaaagtttttcaaaaaataatgaaactaacaattttggtgtacaaaatagagatatattaaataattttaaaggaggtcatactataagaggagatattaatgtattactattaggagatccaggtttaggaaaatcacaagttttacaatatgtacataaaacaaatttaagaactgtatatactactggtaaaggagcatcagctgttggtttgactgctggtgttagaaaagatcatacaactaacgaatggacattagaaggaggtgctttggttttagctgatgaaggtatttgtattattgatgaatttgataaaatgactgataaagatcgagtaagtattcatgaagcaatggaacaacaatcaatttctatttcaaaggctggtatagttacaactttgagagcaagatgtgcagttatagcagctgctaatcctatatatggtcgttataatccttcattaacttttaaagaaaatgtggatttatcagatcctattttaagtagattcgatttaattactgttttgagagatatacctaatgtagatgaagatttttatttagctgaatatgtcgtaacaaatcatcaattgagtcatccgaaattagaaaatacacaaaattatcaaaaaagaattgaaaatttaaaaaatgttattgtttcttcatcagcatatgaacctattcctcaagatttgttacagaaatatattatctatgctagaactaattgtaaaccaagtttatcagatgttccatatgctgaaattagtgcaaaattatctaatttttatagtagagtaagacaaaaagcatgcgcctcaggtggatatccattaacactaagacatattgaaagtattatcagaattgcagaagcaaatgcaaaaatgagattatcgcatcaaatttattcaaaagatgttgattatgctatagctacattattagaatcatatgtatcatgtcaaagatttgcagtagctaaacaattaagtaaagaatttgcaagatatagagctttatttagaggtggttatgaagtcttacgtgaattattaagaagaactgtacaacaaatgatacaaagacaaaacttaaaaaatgcctctgcaaaagattttcaaaatgattcagaatcaggaactgaaagtgaagcagaaattttaaatcctaataatgtgttcttgccactacatatatttatgaagacagctatgcaaaataaattctcagaatatcaagtactcaattggatgaaatctaaagtctttaacgaacactatgcagtaataaaaagagatggagtcgaaggaataataagtaaaaagtttaaggtgtaa

SEQ ID NO: 5636 - protein, 971 aa, Plasmodium falciparum
MEDKKKLEEDLESNKYDIDEEDLLEDEGRLNEEERQAELEGESLFEEDEGFIFGADDEKKEMQKLRNLGLDNDDYDDDFIDDELDYEDNLKARRAAERHMQMQRKQEGKYEKNKFWKTLEDQLEGDDEEEDIFDKVAEKVAKRRENLHLTAEETDIPDLSNLESAKICLSVNPKDVVFDERYQQAADTCFRYFLHKFSLKDSMGLNIDESNTELHEEEHMNSSHQYYIDKIEKMILNDKHTLIVSAKHLIQFHCENLVQWIEFKPEQILEVLHECLMVEAYRISPKLYKGRICKVVLRDWPYSTQLRNLRCTELNTLIKVTGVCIKRGYVLPKLRVMYLKCNSCDTTLSEVPIYFADGKKPVLPRRCPHCQSATFSVDRIKTAYTDYQKITLQESPCSVPAGRAPRQREVVVTGDLVDKVKPGEEVEVLGIYKTKYDIGLNIKYGFPILQTEIEANNIERKEDIQLSELTEDDIKDILKLSKDPNIRERIITSIAPAIWGHKDIKTSIAYALFGGVQKGGDKSFSKNNETNNFGVQNRDILNNFKGGHTIRGDINVLLLGDPGLGKSQVLQYVHKTNLRTVYTTGKGASAVGLTAGVRKDHTTNEWTLEGGALVLADEGICIIDEFDKMTDKDRVSIHEAMEQQSISISKAGIVTTLRARCAVIAAANPIYGRYNPSLTFKENVDLSDPILSRFDLITVLRDIPNVDEDFYLAEYVVTNHQLSHPKLENTQNYQKRIENLKNVIVSSSAYEPIPQDLLQKYIIYARTNCKPSLSDVPYAEISAKLSNFYSRVRQKACASGGYPLTLRHIESIIRIAEANAKMRLSHQIYSKDVDYAIATLLESYVSCQRFAVAKQLSKEFARYRALFRGGYEVLRELLRRTVQQMIQRQNLKNASAKDFQNDSESGTESEAEILNPNNVFLPLHIFMKTAMQNKFSEYQVLNWMKSKVFNEHYAVIKRDGVEGIISKKFKV

SEQ ID NO: 5637 - DNA, 2811 bp, Arabidopsis thaliana
  CDS (1)..(2811)
atggcgggagaaaattccgataacgagccgtcttcaccagcttcaccttcttccgctggattcaacacagatcagttaccaatcagtacaagccaaaactccgaaaatttctccgatgaagaagaagcagctgtagatacccaagtcattagagatgagcctgacgaagcggaggatgaagaagaagaagaaggagaagatctcttcaatgatacttttatgaacgattatcggaagatggatgagaatgatcagtatgagtctaatggaatagatgattccgtcgatgatgaaagagatttaggtcaggctatgcttgaccgtcgtgctgctgacgctgatcttgatgctcgtgaaaatcgacttgcgaatcgcaagcttcctcatcttcttcacgataacgattcagatgattggaactatagaccttcgaagaggtctcgaactacggttccaccgagaggtaatggtggtgatcctgatgggaatcctccaagttcgccaggagtgtcacagccagatatctctatgactgatcaaactgatgattatcaagatgaggatgataatgatgatgaagcagagtttgagatgtataggattcaaggaactctgagggaatgggttatgagagatgaagtgagacggtttattgctaagaagtttaaagactttttgcttacgtatgttaaaccaaagaatgagaatggagatattgaatatgttcgtttaattaacgaaatggtttcagctaataagtgcagtctggaaattgattacaaagaattcatacacgtccacccgaatattgcaatctggcttgcggatgctccacaacctgtgcttgaagtaatggaggaagtttctgaaaaggtcatctttgatctgcatccaaactacaagaatattcacacgaagatatatgttcgtgttaccaacctaccagttaatgatcagattcggaacatcaggcagattcatcttaacacgatgatccgtatcggtggagttgtcactaggcgttctggggtctttcctcagctgcagcaagtgaaatatgattgtaacaagtgtggagcagttttggggcctttcttccaaaactcttattcagaagtcaaggtcggttcttgttctgaatgccagtcaaaaggaccgtttactgttaatgtcgaacagacaatatacaggaactatcagaagcttacaatccaagagagtccaggaacagtgcctgctggacgacttccaagacacaaagaagttatcctgctgaatgaccttattgattgcgctcgtcctggggaagaaattgaggttactggcatatataccaacaactttgacctatctttgaacacaaagaatgggtttccagtctttgccactgtggtggaagctaactatgttacaaagaaacaagacctcttctctgcgtacaagctaacccaagaagacaagacacaaatcgaagagctatccaaggatccacgaatagttgaacgtatcattaagtcaattgctccgtcaatatatggccacgaagatatcaaaacagctcttgctcttgctatgtttggtggccaagagaaaaatatcaaagggaaacacagattgcgtggagatattaatgtacttttactaggtgatccaggaacagcaaaatcacaatttctgaagtatgttgaaaaaactggtcaaagagctgtctacacgactggaaagggagcttctgctgttggtctaaccgcagcagtacacaaagatccagttacaagggagtggacgcttgaaggaggggctcttgtacttgctgaccgaggaatttgtcttatcgatgagtttgacaagatgaacgaccaggacagggtgagtatccatgaagccatggaacaacagagtattagtatatcgaaggcaggaatagttacttctcttcaagctcgttgctctgttattgctgcagctaatccagttggtggaaggtatgattcatcgaaatcatttgcacaaaatgtcgagttgacagatccgatcctttctcgttttgatatcttgtgtgttgtcaaggatgtggttgacccagttacagatgaaatgctagctgaatttgttgtcaatagccacttcaagtcacaacccaaaggtggtaagatggaagatagcgatcccgaagatggcattcagggatctagcgggtcaactgatccggaggtccttcctcagaacctgctgaagaaatacttaacatactcgaagttgtatgtattcccaaaactgggtgaactagatgccaagaagttagagactgtttatgctaatctaagacgagaatcaatgaacggacaaggagtttctatagcgacaaggcaccttgagtccatgatccgaatgtctgaagcacatgctaggatgcaccttaggcaatatgtcacagaagaggatgttaatatggccattcgagtcctacttgactctttcatatcaacccagaaatttggtgtccagagaactctaagagagagtttcaaacggtacattacatacaaaaaggacttcaactcattgctgctcgttcttctcaaagagctcgtaaagaacgccttgaagtttgaagaaatcatttcaggatcgaactcaggactacctacaatcgaggttaagatagaggaactgcagacaaaggccaaggaatacgacattgcagatctacgacccttcttttcaagcacagatttttccaaagctcacttcgagttggatcatggccgaggaatgatcaagtgtccaaaaaggctgatcacttggtaa

SEQ ID NO: 5638 - protein, 936 aa, Arabidopsis thaliana
MAGENSDNEPSSPASPSSAGFNTDQLPISTSQNSENFSDEEEAAVDTQVIRDEPDEAEDEEEEEGEDLFNDTFMNDYRKMDENDQYESNGIDDSVDDERDLGQAMLDRRAADADLDARENRLANRKLPHLLHDNDSDDWNYRPSKRSRTTVPPRGNGGDPDGNPPSSPGVSQPDISMTDQTDDYQDEDDNDDEAEFEMYRIQGTLREWVMRDEVRRFIAKKFKDFLLTYVKPKNENGDIEYVRLINEMVSANKCSLEIDYKEFIHVHPNIAIWLADAPQPVLEVMEEVSEKVIFDLHPNYKNIHTKIYVRVTNLPVNDQIRNIRQIHLNTMIRIGGVVTRRSGVFPQLQQVKYDCNKCGAVLGPFFQNSYSEVKVGSCSECQSKGPFTVNVEQTIYRNYQKLTIQESPGTVPAGRLPRHKEVILLNDLIDCARPGEEIEVTGIYTNNFDLSLNTKNGFPVFATVVEANYVTKKQDLFSAYKLTQEDKTQIEELSKDPRIVERIIKSIAPSIYGHEDIKTALALAMFGGQEKNIKGKHRLRGDINVLLLGDPGTAKSQFLKYVEKTGQRAVYTTGKGASAVGLTAAVHKDPVTREWTLEGGALVLADRGICLIDEFDKMNDQDRVSIHEAMEQQSISISKAGIVTSLQARCSVIAAANPVGGRYDSSKSFAQNVELTDPILSRFDILCVVKDVVDPVTDEMLAEFVVNSHFKSQPKGGKMEDSDPEDGIQGSSGSTDPEVLPQNLLKKYLTYSKLYVFPKLGELDAKKLETVYANLRRESMNGQGVSIATRHLESMIRMSEAHARMHLRQYVTEEDVNMAIRVLLDSFISTQKFGVQRTLRESFKRYITYKKDFNSLLLVLLKELVKNALKFEEIISGSNSGLPTIEVKIEELQTKAKEYDIADLRPFFSSTDFSKAHFELDHGRGMIKCPKRLITW

SEQ ID NO: 5639 - DNA, 2163 bp, Arabidopsis thaliana
  CDS (1)..(2163)
atgtccactgacgagccactgccttcttccgatgacggtgaagaagacggaggcgacgatactactccgactttcgtttggggaactaacatcagtgtgcaagatgttaaatctgcgattgaaatgtttgttaagcatttcagagaagctagagagaatagtgatgatttgtttagagaagggaagtatatggtttcgataaggaaggtgattgagattgaaggagaatggattgatgttgatgcgtttgatgtgtttgattatgatcctgatttgtataacaagatggttcgttatcctttggaagttctcgctatcttcgatattgtgctgatggatattgtttccacgattaatcgtttgttcgagaaacatgttcaagttaggatttttaacctcaggacatctacttccatgagaaatctcaatccatctgatatcgagaagatgatctctttgaaaggtatgataattcggagtagctctatcattcctgaaataagggaagctgtgtttagatgccttgtttgtggttacttctctgaccccatcatcgttgatagagggaaaataagtgagcctcctacttgcttgaaacaagagtgcatgaccaagaactccatgacactagtgcacaaccgatgcaggtttgctgataagcagattgtgaggcttcaggaaacacctgatgagattccagaaggaggaacacctcacacagttagcttgttgctgcatgataagctagttgataatgggaagcctggtgatagaattgaggtcaccggaatttacagagcaatgactgtccgagtgggacctgctcacaggactgtgaaatctgtgtttaagacctatatcgattgccttcacataaagaaagcaagtaagttaagaatgtctgctgaggatcctatggatgttgacaatagtctgcgtagagttgatgaagatctgaggaagtttcaggaactctctaaacaaccagatatatatgagaggcttagtagatcactagcaccaaacatctgggagttggatgatgttaaaaagggtcttctatgccagctttttggagggaatgctttgaacttagcatctggtgctaattttcgtggtgacatcaacatcttacttgttggtgaccctggtacgagcaagtcccagctgctccagtacattcataagctttcaccccgtggcatttacacaagtgggcgagggagctcagctgttggtttaacagcttatgtagctaaagatcctgagacaggagaaactgttttggagagtggagctcttgttcttagtgaccgaggtatctgctgtattgatgaatttgacaaaatgtctgacagtgcgaggagcatgctacacgaggtgatggaacagcagactgtttcaatagcaaaggctggtattattgcatctctaaatgccagaacctctgtgttggcttgtgcaaatcctagtggctcacgttataatccccggctttctgttattgagaatattcaccttcctccaaccttgctatctagattcgatttgatctacttgattcttgacaagcccgatgagcagactgaccgaaggcttgcaaagcatattgtggcccttcactttgagaacgctgagagtgctcaggaggaagctatagatattactacactgacaacttatgttagctatgcccgcaagaacattcatcctaaactgtcagatgaagctgcagaggagttgacccgaggatatgttgagctgagaaaagcagggaagtttgctggcagtagcaaaaaggtcataacagcaactcctaggcagattgaaagtttgatcagacttagtgaggccttggctcggatgcgcttctccgaatgggttgaaaagcatgacgtggacgaggcatttcgacttctcagagttgcaatgcagcaatcagcaacggatcacgccacagggaccattgacatggacctgataaatactggagtgtcagcaagtgaacgaatgaggcgggatacctttgcgtcgtcaattagagacatagctctggagaagattacaatggaaatgttgttgttgcagttacttgaagaactgaagaagcatggaggcaacataaacaccgaaattcatcttcatgatgtgagtcatttataa

SEQ ID NO: 5640 - protein, 720 aa, Arabidopsis thaliana
MSTDEPLPSSDDGEEDGGDDTTPTFVWGTNISVQDVKSAIEMFVKHFREARENSDDLFREGKYMVSIRKVIEIEGEWIDVDAFDVFDYDPDLYNKMVRYPLEVLAIFDIVLMDIVSTINRLFEKHVQVRIFNLRTSTSMRNLNPSDIEKMISLKGMIIRSSSIIPEIREAVFRCLVCGYFSDPIIVDRGKISEPPTCLKQECMTKNSMTLVHNRCRFADKQIVRLQETPDEIPEGGTPHTVSLLLHDKLVDNGKPGDRIEVTGIYRAMTVRVGPAHRTVKSVFKTYIDCLHIKKASKLRMSAEDPMDVDNSLRRVDEDLRKFQELSKQPDIYERLSRSLAPNIWELDDVKKGLLCQLFGGNALNLASGANFRGDINILLVGDPGTSKSQLLQYIHKLSPRGIYTSGRGSSAVGLTAYVAKDPETGETVLESGALVLSDRGICCIDEFDKMSDSARSMLHEVMEQQTVSIAKAGIIASLNARTSVLACANPSGSRYNPRLSVIENIHLPPTLLSRFDLIYLILDKPDEQTDRRLAKHIVALHFENAESAQEEAIDITTLTTYVSYARKNIHPKLSDEAAEELTRGYVELRKAGKFAGSSKKVITATPRQIESLIRLSEALARMRFSEWVEKHDVDEAFRLLRVAMQQSATDHATGTIDMDLINTGVSASERMRRDTFASSIRDIALEKITMEMLLLQLLEELKKHGGNINTEIHLHDVSHL

SEQ ID NO: 5641 - DNA, 2307 bp, Zea mays
  CDS (1)..(2307)
atggaaatcaacgaggaggcaatggcggcgcataagcgcgccttcctcgacttcctcgaccaagacgtcgggaagggggtttacatgcaggccgtccgcgacatggtccagaacaagcgccaccgcctcatcatcggcatggacgacctccgcaatcacaatctcgatctcgcccgcagggtgatccggacccccggggagtatatgcagccggcgtcggacgcggtgtcggaggtggcgaggaacctggatcccaagtttttgaaggaaggggagcgcgtgatggtgggcttctcgggtccgttcgggttccacagggtcacgcctagggatctcatgtcctccttcatcggcaccatggtctgcgttgagggcatcgtcaccaaatgctcgttggttaggccaaaagttgttaagagtgtccacttctgccctgtgactggggactttctttcgcgtgaatacagggacatcacttcttttgtaggcttgcctactggctcggtttatccaacaagggatgacaatggtaacttgttggttaccgagtatggaatgtgtgaatacaaggatcaccagacattgtccatgcaagaagtgcctgaaaattctgcacctggacagctcccaagaactgtcgatgttattgtagaagatgatcttgtagattgttgcaaacctggcgaccgtgtctcaattgtcggtgtgtacaaggctctaccagggaaaagcaagggaagtgttagtggtgtcttcagaactgtccttatcgcaaataatgtgtcgcttcttaacaaagaggcaaatgcacctgtctacactcgggaagatctgaagcgtatgaaagaaatatcaaggagaaatgacacctttgacttactgggaaattctcttgctccatccatatatggtcatctatggataaagaaggcagtggtactgttgatgctaggtggcgtcgagaagaatctaaaaaatggaactcacttgagaggagatataaacatgatgatggtgggagatccttcagttgccaagtcccagctcctaagagctgtcatgaacattgcccctttggctatctcaacaactggcaggggttcatctggtgttggtttgactgctgctgtgacttctgatcaagagactggggagcgaaggcttgaagctggtgccatggttcttgctgatcgtggtgttgtctgcattgatgagtttgataaaatgaatgatcaagatcgagttgctattcatgaagttatggaacagcaaactgtaaccattgcaaaggcaggaatacatgcttcactaaatgcaagatgtagtgtaattgctgcagcaaatccaatatatggaacttatgatcgttcattgacaccaacaaagaatatcgggcttccggattcactgctttcccgttttgatttactttttattgttcttgatcaaatggaccctgagattgaccggcaaatctcagaacacgttgcacgaatgcatagatattgcactgacgatggaggagcaaggtctcttgataaagagggatatgctgaagaagatgatggtgatgctaatgcagccatttttgtcaagtatgatagaatgctccatggtcaggatagaagaagaggaaagaaatccaagcaggacaggctaactgtcaaatttctgaagaaatatattcattatgcaaagaaccttattcaaccaaggctcactgatgaggcatctgatcatattgcaacctcatatgctgagctcagggatggtagtgcaaatgcaaagtccggtggaggtacacttccaattacagcaaggacactggaaaccataattcgtctatcgacagctcatgccaagatgaaactgaggcatgaggttctgaaatccgatgttgaggctgcattgcaagttctaaattttgcaatataccacaaggaattgactgagatggaagagagagaacagagagaaatggagatgaaacagcaagctgatcatgatgcaggtgcaaccggtggcactgtggatgggcatggaagctctggcaatgatccaatggatgtggatgtaggatcaaatgatcagaatgtttccgcagagagaattcaagcatttgaagctcttctgggtcagcatgtgttggcaaaccatatagatcaaatgtcaattgatgaaatcgagcagatggttaatagggaatcaactgcaccttacaccagaagccaagtagagtttattttggagaggatgcaagatgcaaacagggtaatgatacgagatggtgttgttcgaatcatataa

SEQ ID NO: 5642 - protein, 768 aa, Zea mays
MEINEEAMAAHKRAFLDFLDQDVGKGVYMQAVRDMVQNKRHRLIIGMDDLRNHNLDLARRVIRTPGEYMQPASDAVSEVARNLDPKFLKEGERVMVGFSGPFGFHRVTPRDLMSSFIGTMVCVEGIVTKCSLVRPKVVKSVHFCPVTGDFLSREYRDITSFVGLPTGSVYPTRDDNGNLLVTEYGMCEYKDHQTLSMQEVPENSAPGQLPRTVDVIVEDDLVDCCKPGDRVSIVGVYKALPGKSKGSVSGVFRTVLIANNVSLLNKEANAPVYTREDLKRMKEISRRNDTFDLLGNSLAPSIYGHLWIKKAVVLLMLGGVEKNLKNGTHLRGDINMMMVGDPSVAKSQLLRAVMNIAPLAISTTGRGSSGVGLTAAVTSDQETGERRLEAGAMVLADRGVVCIDEFDKMNDQDRVAIHEVMEQQTVTIAKAGIHASLNARCSVIAAANPIYGTYDRSLTPTKNIGLPDSLLSRFDLLFIVLDQMDPEIDRQISEHVARMHRYCTDDGGARSLDKEGYAEEDDGDANAAIFVKYDRMLHGQDRRRGKKSKQDRLTVKFLKKYIHYAKNLIQPRLTDEASDHIATSYAELRDGSANAKSGGGTLPITARTLETIIRLSTAHAKMKLRHEVLKSDVEAALQVLNFAIYHKELTEMEEREQREMEMKQQADHDAGATGGTVDGHGSSGNDPMDVDVGSNDQNVSAERIQAFEALLGQHVLANHIDQMSIDEIEQMVNRESTAPYTRSQVEFILERMQDANRVMIRDGVVRII

SEQ ID NO: 5643 - DNA, 2307 bp, Zea mays
  CDS (1)..(2307)
atggaaatcaacgaggaggcaatggcggcgcataagcgcgccttcctcgacttcctcgaccaagacgtcgggaagggggtttacatgcaggccgtccgcgacatggtccagaacaagcgccaccgcctcatcatcggcatggacgacctccgcaatcacaatctcgatctcgcccgcagggtgatccggacccccggggagtatatgcagccggcgtcggacgcggtgtcggaggtggcgaggaacctggatcccaaatttttgaaggaaggggagcgcgtgatggtgggcttctcgggtccgttcgggttccacagggtcacgcccagggatctcatgtcctccttcatcggcaccatggtctgcgttgagggcatcgtcaccaaatgctcgttggttaggccaaaagttgttaagagtgtccacttctgccctgtgactggggactttctctcgcgtgaatacagggacatcacatcttttgtaggcttgcctactggctcggtttatccaacaagggatgacaatggtaacttgttggttaccgagtatggaatgtgtgaatacaaggatcaccagacattgtccatgcaagaagtgcctgaaaattctgcacctggacagctcccaagaactgtcgatgttattgtagaagatgatcttgtagattgttgcaaacctggtgaccgtgtctcaattgtcggtgtgtacaaggctctaccagggaaaagcaagggaagtgttagtggtgtcttcagaactgtccttatcgcaaataatgtgtcgcttcttaacaaagaggcaaatgcacctgtctacactcgggaagatctgaagcggatgaaagaaatatcaaggagaaatgacacctttgacttactgggaaattctcttgctccatccatatatggtcatctatggataaagaaggcagtagtactgttgatgctaggtggtgtcgagaagaatctaaaaaatggaactcacttgagaggagatataaacatgatgatggtgggagatccttcagttgccaagtcccagctcctaagagctgtcatgaacattgcccctttggctatctcaacaactggcaggggttcatctggtgttggtttgactgctgctgtgacttctgatcaagagactggggagcgaaggcttgaagctggtgccatggttcttgctgatcgtggtgttgtctgcattgatgagtttgataaaatgaatgatcaagatcgagttgctattcatgaagttatggaacagcaaactgtaaccattgcaaaggcaggaatacatgcctcactaaatgcaagatgtagtgtaattgctgcagcaaatccaatatatggaacttatgatcgttcattgacaccaacaaagaatatcgggcttccggattcactgctttcccgttttgatttactttttattgttcttgatcaaatggaccctgagattgaccggcaaatctcagaacatgttgcccgaatgcatagatattgcactgacgatggaggagcaaggtctcttgataaagagggatatgctgaagaagatgatggtgatgctaatgcagccatttttgtcaagtatgatagaatgctccatggtcaggatagaagaagaggaaagaaatccaagcaggacaggctaactgtcaaatttctgaagaaatatattcattatgcgaagaaccttattcaaccaaggctcactgatgaggcatctgatcatattgcaacctcatatgctgagctcagggatggtagtgcaaatgcaaagtccggtggaggtacacttccaattacagcaaggacactggaaaccataattcgtctatcgacagctcatgccaagatgaaactgaggcatgaggttctgaaatccgatgttgaggctgcattgcaagttctaaattttgcaatataccacaaggaattgactgagatggaagagagagaacagagagaaatggagatgaaacagcaagctgatcatgatgcaggtgcaaccggtggcaccgtggatgggcatggaagctctggcaatgatccaatggatgtggatgtaggatcaaatgatcagaatgtttccgcagagagaattgaagcatttgaagcacttctgggtcagcatgtgttggcaaaccatatagatcaaatgtcaattgatgatatcgagcagatggttaatagggagtcaactgcaccttacaccagaagccaagtagagtttattttggagaggatgcaagatgcaaacagggtaatgatacgagatggtgttgttcgaatcatataa

SEQ ID NO: 5644 - protein, 768 aa, Zea mays; identical to SEQ ID NO: 2556

SEQ ID NO: 5645 - DNA, 2178 bp, Leishmania major
  CDS (1)..(2178)
atgactacaccagataagcgcgcgtacgccgctgcagcatccagcaagtatcctaactacatcaatgaccgggatgtttgcaagcgttttcttgaggagttcagggactctacggggcaggcgaagtatgtgattcaggcccatcacattgcgcagcgacagagcattgtattttccatctttctcgacgatgttgcgggtttcgggcagcttcatctagcgcaaagggttcagatgaacgttgtcggatacatggaggagctttacagggttgtcgactctattattcctcaaactgaccgcgttgtggacatggtggaccaactgatcatggaagcacggatgtctggccaagagctgcccgccttgctgacacgtcgatacgagctgaaaatacacccgcttagcgaagacagtgttcccattcctctgcgagagttgaagggaggaaagattggcacgctgactgttcttcgcggcatttgcatcgctgccactgcagtccgcccaaagctctctatgctcgtgtcggtgtgcgaggtctgtgccgagacgaccttccagcaggtcatcggtgatcgcctaacaccgctacaggtgtgccaatcgcagcgctgcaagctgaacaatgctgtgggtaggctgttggcccagaataaggcaagcaagttcatgaaatatcaggaactacgggtgcaggagctgcccgaagatgttccgcgtggcgccatcccgcggacgatccgtgttgtctgcgaaggagagcaaacccgtattgctacaccggggcaggttgttcgtatcacaggagtctactgtccggacccttccactgggcagggtcacgaggccttccgcgcgtccacgatggtgaaaacactttacaaagccatccacatcgagttagagaagagaagctaccaggaagcagcagaggacatgcgcgcacaggtggaggatatccgggactaccctgaccgagaagctgtgatcgaaaagctcacccgcagcatagcgccagagatctggggtatggaggacgtgaagaaggcactcttatgccagcttgtcggaggtagctccattgcgaacggtattcggattcgcagcgacatcaatatccttttcatgggagatcccggagtggcgaagagtcagcttctaaagtggattgcatctgttgcaccccgatccgtgttcacgaccggtaagggcagctctggggttgggcttacggctgccgtaactcacgatacccacacaggtgaggtgatgctcgagggcggcgcccttgtgttgtccgataagggagtttgctgcatcgatgagttcgacaaaatggatgactctgaccgcacagctctgcatgaggtcatggagcagcagatggtttccatcgccaaggcgggtatcatcacgtcgctgaacgcgcgcacgtccattctcgccgcggcaaatcccaagtttggtcggtggaagcgtaacgcgacgccaacggagaacgtgaatttaccgccagcacttctttctcgttttgatctgctttggctgctgctcgacgaatcgagccgggagcgcgatgctgagctttcgatgcacgttacccacgtccatctccacggtgtcgcgcctggcacggtggcggatgatggagtgcgaggtaccaccaccgagtattttggccgcgactttttgcgggcgtacgtgggtgaggtcaagcgcattcacccctacgttgacccaggtgccgctaaggctatcagtgacatttactgtgaaatgcgagcgcagagtgcgcgacacagcaatgtcgtcacagctcgtacgttgctgagcctcatccgtctctcgcaggcgtgcgcccgcctgcgcttttcggagcgcgtgctggaggaggacgtgcgggaggctggccgtctgcttgactgtagcaaggcatctcttcaggatagaccggccacggatatgcatcgcgtggtgacaacatctgacgcgtctatcttttcggtcatcagagacatcgctcgtgggcgttcatccgtcgatctctccgagattcgccccgcgctcatgatgaaggggattggcgaatcccacctgcagagatgccttcgaacgtactgtgaagtcggtgtctggtccgtttccgggacaatgctggagtttgccgaagactag

SEQ ID NO: 5646 - protein, 725 aa, Leishmania major
MTTPDKRAYAAAASSKYPNYINDRDVCKRFLEEFRDSTGQAKYVIQAHHIAQRQSIVFSIFLDDVAGFGQLHLAQRVQMNVVGYMEELYRVVDSIIPQTDRVVDMVDQLIMEARMSGQELPALLTRRYELKIHPLSEDSVPIPLRELKGGKIGTLTVLRGICIAATAVRPKLSMLVSVCEVCAETTFQQVIGDRLTPLQVCQSQRCKLNNAVGRLLAQNKASKFMKYQELRVQELPEDVPRGAIPRTIRVVCEGEQTRIATPGQVVRITGVYCPDPSTGQGHEAFRASTMVKTLYKAIHIELEKRSYQEAAEDMRAQVEDIRDYPDREAVIEKLTRSIAPEIWGMEDVKKALLCQLVGGSSIANGIRIRSDINILFMGDPGVAKSQLLKWIASVAPRSVFTTGKGSSGVGLTAAVTHDTHTGEVMLEGGALVLSDKGVCCIDEFDKMDDSDRTALHEVMEQQMVSIAKAGIITSLNARTSILAAANPKFGRWKRNATPTENVNLPPALLSRFDLLWLLLDESSRERDAELSMHVTHVHLHGVAPGTVADDGVRGTTTEYFGRDFLRAYVGEVKRIHPYVDPGAAKAISDIYCEMRAQSARHSNVVTARTLLSLIRLSQACARLRFSERVLEEDVREAGRLLDCSKASLQDRPATDMHRVVTTSDASIFSVIRDIARGRSSVDLSEIRPALMMKGIGESHLQRCLRTYCEVGVWSVSGTMLEFAED

SEQ ID NO: 5647 - DNA, 1584 bp, Entamoeba histolytica
  CDS (1)..(1584)
atgagaggttgggaaaaaaaagaagattatatagaaagtgatactggtggtccaatgatgcaagttattattaaagatactcaaagtaaaatgattcaacctcgtatgttacaatcttcttttcttagtaaagttattagagtaagtggtattattgtttcaattagtagagttgaacctaaagttactaaagcaatattaagatgtaagttgcaaaaagaaattgcagttatagttccatcatgttgtggtattattaattatcctaaatcatgtgatggagtaagtccagtaactggtaaaaaatgtcctccagacccttatgatgttgttactgaaaaatgtaaatttgttgatagaattgtattaaaattacaagaaacaccagagaacgttgcaccaggtgaagttccaagaacagttaccgttatttttagaaacgatatctgtttgttgttggatttaacagctggtcaaagaatatttattgaaggtatttttggtgcatgtttacaaagaaaaggaactatttcaacatcatatattagagcaattggaattgaaattagtggtcaagttgtttctcaagatgatagaagaatgaaagaagttgcaagaacaataactaaagaaaaacttattaaatcaattgcaccagctatttgtgggtatgatgatattaaagaagctgttttatgtcttatgcttggtggaagtggtaaagcacttccagatggaactcatttaagaggagatattaatgttttattaatgggagatcctggaacagcaaaatctcaattacttaaatttgttcaaatggcaactccaattggtgtttatacttctggtaaaggttcttctgctgctggattaactgcagctgttaataaagattcttctactggagaattttatcttaatggaggagctcttgtacttggagatggaggtgttgtttgtattgatgaatttgataaaatgaatgaagttgatcgtgttgctattcatgaagcaatggaacaacaaacaatttctattgcaaaagcaggtattacagctgttttaaatgcacgatctgctgttttagctgcagcaaatccatcatttggaagatttaatgagagagcatcatttggtgataatgtcaatttaaaaactacgattttgtcaagatttgatatgatttttatgattagagataaacatgacgcaaaaagagataaagaaatagttaaacattattatggatattctatcgtcaagcgtaaagttgataatttaagtcaggcatttaaagaatatattgcttattgtaaagcatattgtattccacgtcttacagtaaatgcttcaaataaattatcgaattattttgtttcaattagacaaaaagtaagagaaaataaacttgaaaatgataatgatgaaggtattccaataactgtaagacaacttgaagctattattcgtattagtgaagcattagcaaaaatgactatgagtgatattgctgatgaaaatcatgtagatgaagctataagattatttgaattatcaacaatgaattctgctgttagataa

SEQ ID NO: 5648 - protein, 527 aa, Entamoeba histolytica
MRGWEKKEDYIESDTGGPMMQVIIKDTQSKMIQPRMLQSSFLSKVIRVSGIIVSISRVEPKVTKAILRCKLQKEIAVIVPSCCGIINYPKSCDGVSPVTGKKCPPDPYDVVTEKCKFVDRIVLKLQETPENVAPGEVPRTVTVIFRNDICLLLDLTAGQRIFIEGIFGACLQRKGTISTSYIRAIGIEISGQVVSQDDRRMKEVARTITKEKLIKSIAPAICGYDDIKEAVLCLMLGGSGKALPDGTHLRGDINVLLMGDPGTAKSQLLKFVQMATPIGVYTSGKGSSAAGLTAAVNKDSSTGEFYLNGGALVLGDGGVVCIDEFDKMNEVDRVAIHEAMEQQTISIAKAGITAVLNARSAVLAAANPSFGRFNERASFGDNVNLKTTILSRFDMIFMIRDKHDAKRDKEIVKHYYGYSIVKRKVDNLSQAFKEYIAYCKAYCIPRLTVNASNKLSNYFVSIRQKVRENKLENDNDEGIPITVRQLEAIIRISEALAKMTMSDIADENHVDEAIRLFELSTMNSAVR

SEQ ID NO: 5649 - DNA, 2538 bp, Saccharomyces cerevisiae
  CDS (1)..(2538)
atgagtgcggcacttccatcaattcagcttcctgtcgactataataatctttttaatgaaatcaccgattttttggtgactttcaagcaggatacgttgtcttctgatgcaacacgaaatgagaacgaagatgaaaatttggatgctgagaatatcgaacaacatctattggaaaaggggcccaagtacatggcgatgctacagaaagtggctaatagggaactgaattccgtgattattgatttagatgacattctacagtatcaaaacgaaaagtttctccagggcacacaggcagacgaccttgtgtctgccattcaacaaaacgctaatcacttcactgaattattttgccgtgccattgacaacaacatgccgctaccaacaaaagaaattgactacaaggacgacgttcttgatgttattttaaaccaaaggagactgaggaatgagagaatgctctcggacaggaccaatgagatccgaagcgaaaacctcatggataccacgatggatccaccctcttccatgaatgatgcgttaagagaagttgtcgaggatgaaactgagttatttcctcctaatttaactagacgctatttcctttattttaagcctctatcgcaaaattgtgctcgtcgttacaggaagaaagcaattagttctaaaccattatctgttaggcagattaaaggtgacttcctaggccaattgattaccgtcagaggtattatcaccagagtttctgatgtcaaaccagctgtggaagttatcgcatatacctgcgatcaatgtgggtacgaagttttccaagaggtcaactctcgtacttttactccgttgtcagaatgtacttccgaagaatgttcccaaaatcaaacaaagggtcaattgtttatgagtacacgagcttccaaatttagtgcctttcaggaatgtaaaattcaggagttatcacaacaagtgccagtgggtcatattcctaggtcgctaaatatccacgttaacgggacgctggtaagatctttatcgcctggtgatatcgtcgatgtaactggtatattcttgccagcgccctacaccggtttcaaagctttgaaagctggcttactgacagaaacttatttagaggcacagtttgtccgtcaacacaagaagaaatttgcgtctttcagtctgacttctgatgtagaagagagagttatggaattaatcacctctggtgatgtttataataggctggcaaaatctattgcaccggaaatctacggtaacttggacgtaaagaaagcgttgctgctattacttgtcggaggtgttgataaaagggtaggtgacggtatgaaaatcagaggtgatatcaatgtttgtctgatgggtgatcccggtgttgccaaatctcaactgctgaaggccatttgcaaaatatcacctcgaggagtgtataccactggtaagggttcctcaggcgttggtctgaccgctgccgtcatgaaagatcctgtcacggatgaaatgattctagaaggtggtgccttagtactcgctgataacggtatttgttgtatcgatgaatttgataagatggatgaaagtgacagaacggcaatccatgaagttatggaacaacaaacaatttcgatatccaaggcggttatcaatacaaatccgggcgccagaacctcaatcttagcggcagcaaatccgttgtatggtagaattaatcctagattatcacctctggacaatataaatctaccagctgctttactatccagatttgatattctcttcttaatgttagatataccaagtagagatgacgacgaaaaattagccgagcacgttacatatgtgcatatgcataataaacaaccggatttggacttcactccagtagaaccctctaaaatgagagagtacattgcctatgctaagacaaagaggccagtgatgagtgaagctgtaaacgattatgtggtgcaagcttacatcagattaagacaagactccaagagagaaatggattccaaattttcctttggtcaagccactccgagaactttactaggtattataagattatctcaagcgctagcaaagttaaggttggctgatatggtggatatagatgatgtggaggaagccttgaggttggtccgagtctccaaggaatcattgtatcaagaaaccaacaaatctaaagaagatgaaagccccacaacgaaaatctttacgatcatcaagaaaatgttacaagaaactggtaaaaacacgctatcatatgaaaatattgtgaaaactgtaagactaagagggtttaccatgctacaattaagcaactgtatccaagaatattcttacttaaacgtctggcatttaattaatgagggtaacactttgaaattcgtggatgacggtaccatggacacagaccaggaagactcactagtgagcacgcctaaactcgcaccacaaacgaccgcttccgctaatgtgagcgcccaagattctgatatcgatctacaagacgcttga

SEQ ID NO: 5650 - protein, 845 aa, Saccharomyces cerevisiae
MSAALPSIQLPVDYNNLFNEITDFLVTFKQDTLSSDATRNENEDENLDAENIEQHLLEKGPKYMAMLQKVANRELNSVIIDLDDILQYQNEKFLQGTQADDLVSAIQQNANHFTELFCRAIDNNMPLPTKEIDYKDDVLDVILNQRRLRNERMLSDRTNEIRSENLMDTTMDPPSSMNDALREVVEDETELFPPNLTRRYFLYFKPLSQNCARRYRKKAISSKPLSVRQIKGDFLGQLITVRGIITRVSDVKPAVEVIAYTCDQCGYEVFQEVNSRTFTPLSECTSEECSQNQTKGQLFMSTRASKFSAFQECKIQELSQQVPVGHIPRSLNIHVNGTLVRSLSPGDIVDVTGIFLPAPYTGFKALKAGLLTETYLEAQFVRQHKKKFASFSLTSDVEERVMELITSGDVYNRLAKSIAPEIYGNLDVKKALLLLLVGGVDKRVGDGMKIRGDINVCLMGDPGVAKSQLLKAICKISPRGVYTTGKGSSGVGLTAAVMKDPVTDEMILEGGALVLADNGICCIDEFDKMDESDRTAIHEVMEQQTISISKAVINTNPGARTSILAAANPLYGRINPRLSPLDNINLPAALLSRFDILFLMLDIPSRDDDEKLAEHVTYVHMHNKQPDLDFTPVEPSKMREYIAYAKTKRPVMSEAVNDYVVQAYIRLRQDSKREMDSKFSFGQATPRTLLGIIRLSQALAKLRLADMVDIDDVEEALRLVRVSKESLYQETNKSKEDESPTTKIFTIIKKMLQETGKNTLSYENIVKTVRLRGFTMLQLSNCIQEYSYLNVWHLINEGNTLKFVDDGTMDTDQEDSLVSTPKLAPQTTASANVSAQDSDIDLQDA

SEQ ID NO: 5651 - DNA, 2802 bp, Saccharomyces cerevisiae
  CDS (1)..(2802)
atgtctcaacagtctagctctccaacaaaagaggataataactccagctcccccgttgtgcctaatcctgattctgttccaccacagctttcttccccagctctattttatagctcctcttcatcacaaggtgatatctatggtcgcaacaatagccagaacttaagtcagggagagggaaacatcagagctgctataggttcttctccactaaattttccatcttcttcccaaagacaaaattccgatgttttccaatctcaaggcagacagggcagaattcgttcttctgcgagcgcttctggaaggtctagatatcattctgatctgagaagtgatagagcactgcctacttcttcctcttctttaggccgtaatggtcaaaaccgtgtacacatgcgaagaaatgatattcatacatctgatttatcctctccaagaagaattgtggattttgatactagatccggcgtgaatactttggatacttcttcttcttctgctcctccatcggaagccagtgaacccttgagaataatttggggtaccaacgtcagtatccaggaatgtacaactaattttcgtaattttttgatgtctttcaagtataaattccgtaaaatattggatgaaagggaggaattcattaacaatactaccgacgaagaactatactatatcaagcagcttaatgaaatgagagaacttggtacctctaatttaaacttggatgctagaaacttacttgcttacaagcaaacagaagacttataccatcaactattaaattatcctcaagaagtgatttctatcatggatcaaactatcaaggactgtatggtttccttaatagtagacaacaatttggattacgatttagatgaaatagagaccaagttttataaagtaaggccttacaatgtaggttcttgtaaaggtatgcgcgaattgaatccaaatgatattgataaattgataaacttaaagggtcttgtcctgagatcaactccggttatccctgatatgaaggtagcgtttttcaaatgcaacgtctgcgatcatacaatggcagtggaaattgatagaggagttatacaagagcccgctaggtgtgaacgtattgattgtaatgaacccaattccatgtcactgattcacaacaggtgttcattcgcagataaacaagtcattaagttacaggaaactccagactttgtgcctgatggacaaacgcctcactctatctcattatgtgtttacgatgaattagtggattcttgcagggcgggcgatcgtattgaggtgactggcacgttcaggtccatccccattagagctaattccaggcaacgcgtactaaagtcgttgtataaaacatacgtcgatgtggtccacgttaaaaaagtttcagataagaggttagacgtcgatacttctactattgaacaagaattaatgcagaacaaggtagatcataacgaggtcgaagaagtaagacaaattactgatcaggatttagcaaaaattcgcgaggttgcggcaagagaagatttatacagtttattagcccgctctattgccccaagtatttacgagctagaagatgtcaagaagggtatattacttcagctatttggcggcacgaataaaacctttaccaagggtggccgttatagaggtgacataaatattttactttgtggggatccttctacttccaaatcgcaaattttgcaatacgttcacaaaattactcctcgtggtgtgtatacttcgggtaaaggttcatctgccgttggtttaactgcttatattacaagggatgtcgacacaaaacaacttgttttggaaagtggtgcattagtattgtctgatggaggtgtttgttgtattgacgagtttgataaaatgagtgattctacaaggtccgtcttgcacgaagtcatggaacagcagactatttcaatcgcaaaagcgggaattatcacaacacttaatgccagaagttctattttggccagtgctaacccaattggttcacgctacaaccccaatttgcctgtgactgaaaatattgatctaccgcccccactactttcgagattcgatctggtctatcttgtccttgataaggttgatgagaaaaatgacagagaactagccaaacacttaacaaatctttacctggaagataagcccgaacatatttctcaagacgacgtgctaccagttgaatttttaacgatgtatattagttatgcaaaggagcacatacacccaataatcaccgaggccgctaagactgagcttgttcgtgcttatgtaggaatgagaaagatgggtgacgattcgagatccgatgagaagagaatcacagctaccacaagacaacttgaaagtatgattcgtttggctgaggcgcacgccaaaatgaaattgaaaaacgtcgtagagctggaggatgttcaagaagccgttagattaattagatcagccataaaagattatgcaacagaccctaaaaccggtaaaatcgacatgaatttagttcaaacaggtaaatcagttattcagagaaaactacaggaggatttgtcaagggaaattatgaatgttttgaaggatcaggcatcagactcaatgtcattcaatgagcttataaaacaaatcaatgaacactctcaagatagagttgagtcttctgatatccaggaagccttgtcaagattgcaacaagaggacaaggtcattgtccttggcgagggtgtaaggagatcagttcgcctgaataaccgtgtctga

SEQ ID NO: 5652 - protein, 933 aa, Saccharomyces cerevisiae
MSQQSSSPTKEDNNSSSPVVPNPDSVPPQLSSPALFYSSSSSQGDIYGRNNSQNLSQGEGNIRAAIGSSPLNFPSSSQRQNSDVFQSQGRQGRIRSSASASGRSRYHSDLRSDRALPTSSSSLGRNGQNRVHMRRNDIHTSDLSSPRRIVDFDTRSGVNTLDTSSSSAPPSEASEPLRIIWGTNVSIQECTTNFRNFLMSFKYKFRKILDEREEFINNTTDEELYYIKQLNEMRELGTSNLNLDARNLLAYKQTEDLYHQLLNYPQEVISIMDQTIKDCMVSLIVDNNLDYDLDEIETKFYKVRPYNVGSCKGMRELNPNDIDKLINLKGLVLRSTPVIPDMKVAFFKCNVCDHTMAVEIDRGVIQEPARCERIDCNEPNSMSLIHNRCSFADKQVIKLQETPDFVPDGQTPHSISLCVYDELVDSCRAGDRIEVTGTFRSIPIRANSRQRVLKSLYKTYVDVVHVKKVSDKRLDVDTSTIEQELMQNKVDHNEVEEVRQITDQDLAKIREVAAREDLYSLLARSIAPSIYELEDVKKGILLQLFGGTNKTFTKGGRYRGDINILLCGDPSTSKSQILQYVHKITPRGVYTSGKGSSAVGLTAYITRDVDTKQLVLESGALVLSDGGVCCIDEFDKMSDSTRSVLHEVMEQQTISIAKAGIITTLNARSSILASANPIGSRYNPNLPVTENIDLPPPLLSRFDLVYLVLDKVDEKNDRELAKHLTNLYLEDKPEHISQDDVLPVEFLTMYISYAKEHIHPIITEAAKTELVRAYVGMRKMGDDSRSDEKRITATTRQLESMIRLAEAHAKMKLKNVVELEDVQEAVRLIRSAIKDYATDPKTGKIDMNLVQTGKSVIQRKLQEDLSREIMNVLKDQASDSMSFNELIKQINEHSQDRVESSDIQEALSRLQQEDKVIVLGEGVRRSVRLNNRV

SEQ ID NO: 5653 - DNA, 2664 bp, Drosophila melanogaster
  CDS (1)..(2664)
atggacaatcccagttcaccaccgccaaatacgcccagcgatgccgccgaacgccgcgatctgcgggcagcaatgacgtcgccggttggcgactttgagccgttcgagaacgaggacgagatcctgggagatcagaccgttcgcgatgaggccgaggaggaggatggcgaggagctgttcggggacaacatggagaacgattaccggcccatgcctgagctggatcactacgatccggcgctgctggacgacgaggatgacttctcggagatgtcccagggcgatcgctttgccgccgagtcggagatgcgtcgacgcgaccgggccgccggaatccaccgcgacgatcgtgatctgggtttcggtcagtccgatgatgaggacgacgttggaccccgggccaagagacgagctggcgagaaggcagctgttggcgaggtagaggacaccgagatggtggagtctattgaaaacctggaggataccaagggacactcaactaaagagtgggtcagtatgctaggaccacgcacggaaatcgccaatcgctttcaatcctttttgagaacttttgtggatgaaaggggcgcatacacctatcgtgatcgcatacgtcggatgtgcgagcagaacatgtcttcgttcgtcgtctcctacactgatctggccaacaaggaacacgtattggcctatttcctgcccgaggctccctttcaaatgctcgagattttcgataaagtggctaaggacatggtgctctccattttccccacttacgaacgtgtcaccacagagattcacgtgcgcatctcggagctgccgctgatcgaggagctgcgcacattcagaaaactgcatctgaaccagttggttcgcactttgggcgtggtaactgccaccaccggagttcttccccagctatccgtgatcaagtacgactgcgttaagtgcggctatgtgctgggtcccttcgttcagtcgcaaaatacggagataaagcccggttcctgcccagagtgccagagcactggacccttctcaatcaacatggagcagacgttgtatcgaaattatcaaaagatcacgttgcaggagtcgccaggcaggattccagccggacgcattcctcgcagcaaggatgtcattttgctcgctgatttgtgtgatcaatgcaagcctggagatgaacttgaggtcacaggtatatataccaataactacgatggctccttgaacaccgaccaaggatttcccgtgtttgccaccgtgattattgccaatcatgtggttgtaaaggactccaagcaggtagtgcagtcgcttacggacgaggacattgccaccattcagaagttgagcaaggatccgcgtatcgtagagcgtgtagtagcatccatggcgccttctatatacggacatgattatatcaagagggcgctggccttagctctctttgggggtgagtcaaagaatcccggtgagaaacacaaggttagaggtgatataaacctactcatctgtggagatcccggaacggcaaagtcgcagttcctcaagtacaccgaaaaggttgcgccacgtgcggttttcacgactgggcagggagccagtgccgtgggtctcacggcttatgtgcgccgcaatccagtatctcgggagtggacattggaagcgggtgctctggttctggctgatcagggagtttgtctaatcgacgagttcgacaaaatgaacgaccaggatcgtacctctattcacgaagccatggagcagcagtctatttcgatttccaaggctggtattgtcacctctcttcaagctcgttgcaccgtgattgctgctgccaatcccattggcggtcgctatgatccgtcgatgaccttctcggagaacgtgaatctctcggagcccatcctgtcccgtttcgatgtgctgtgcgtggtgaaggacgaatttgaccccatgcaggatcagcagctcgccaaattcgtggtacactcgcatatgaagcatcacccgagtgaggaggagcagccggagttggaggaaccacagctgaagaccgttgatgagatcccgcaggacttgttgcgacaatacattgtatacgctaaggagaacattcggcccaagctaacgaacatcgacgaggacaagatcgccaagatgtacgcccagctgcgacaggagtcttttgccacgggctcactgcccattacggtgcgtcacattgagagtgtcatccgaatgtccgaagcgcacgcgcggatgcatctgcgcgaaaacgtaatggaggcagatgtcagcatggccatccgcatgatgttggagagctttatcgaggcgcagaagttcagcgttatgaagaagatgcgcagcacattccagaagtacctgtccttccaaaaggaccattccgagctgctgttctttattctgcgacagctgacgctcgaccagctcgcctacattcgctgcaaggacgggcctggcgccacacatgtggagattatggagcgggatttgatcgaacgggctaagcagctggatattgtaaacctgaagccgttctacgaatcagatctgtttcgcacaaatggcttctcttacgatcccaagcgacgcatcatccttcaaattgtggtcgacggcaacacagcttaa

SEQ ID NO: 5654 - protein, 887 aa, Drosophila melanogaster
MDNPSSPPPNTPSDAAERRDLRAAMTSPVGDFEPFENEDEILGDQTVRDEAEEEDGEELFGDNMENDYRPMPELDHYDPALLDDEDDFSEMSQGDRFAAESEMRRRDRAAGIHRDDRDLGFGQSDDEDDVGPRAKRRAGEKAAVGEVEDTEMVESIENLEDTKGHSTKEWVSMLGPRTEIANRFQSFLRTFVDERGAYTYRDRIRRMCEQNMSSFVVSYTDLANKEHVLAYFLPEAPFQMLEIFDKVAKDMVLSIFPTYERVTTEIHVRISELPLIEELRTFRKLHLNQLVRTLGVVTATTGVLPQLSVIKYDCVKCGYVLGPFVQSQNTEIKPGSCPECQSTGPFSINMEQTLYRNYQKITLQESPGRIPAGRIPRSKDVILLADLCDQCKPGDELEVTGIYTNNYDGSLNTDQGFPVFATVIIANHVVVKDSKQVVQSLTDEDIATIQKLSKDPRIVERVVASMAPSIYGHDYIKRALALALFGGESKNPGEKHKVRGDINLLICGDPGTAKSQFLKYTEKVAPRAVFTTGQGASAVGLTAYVRRNPVSREWTLEAGALVLADQGVCLIDEFDKMNDQDRTSIHEAMEQQSISISKAGIVTSLQARCTVIAAANPIGGRYDPSMTFSENVNLSEPILSRFDVLCVVKDEFDPMQDQQLAKFVVHSHMKHHPSEEEQPELEEPQLKTVDEIPQDLLRQYIVYAKENIRPKLTNIDEDKIAKMYAQLRQESFATGSLPITVRHIESVIRMSEAHARMHLRENVMEADVSMAIRMMLESFIEAQKFSVMKKMRSTFQKYLSFQKDHSELLFFILRQLTLDQLAYIRCKDGPGATHVEIMERDLIERAKQLDIVNLKPFYESDLFRTNGFSYDPKRRIILQIVVDGNTA

SEQ ID NO: 5655 - DNA, 3466 bp, Homo sapiens
  CDS (74)..(2788)
gtgggtcacgtgaaccacttttcgcgcgaaacctggttgttgctgtagtggcggagaggatcgtggtactgctatggcggaatcatcggaatccttcaccatggcatccagcccggcccagcgtcggcgaggcaatgatcctctcacctccagccctggccgaagctcccggcgtactgatgccctcacctccagccctggccgtgaccttccaccatttgaggatgagtccgaggggctcctaggcacagaggggcccctggaggaagaagaggatggagaggagctcattggagatggcatggaaagggactaccgcgccatcccagagctggacgcctatgaggccgagggactggctctggatgatgaggacgtagaggagctgacggccagtcagagggaggcagcagagcgggccatgcggcagcgtgaccgggaggctggccggggcctgggccgcatgcgccgtgggctcctgtatgacagcgatgaggaggacgaggagcgccctgcccgcaagcgccgccaggtggagcgggccacggaggacggcgaggaggacgaggagatgatcgagagcatcgagaacctggaggatctcaaaggccactctgtgcgcgagtgggtgagcatggcgggcccccggctggagatccaccaccgcttcaagaacttcctgcgcactcacgtcgacagccacggccacaacgtcttcaaggagcgcatcagcgacatgtgcaaagagaaccgtgagagcctggtggtgaactatgaggacttggcagccagggagcacgtgctggcctacttcctgcctgaggcaccggcggagctgctgcagatctttgatgaggctgccctggaggtggtactggccatgtaccccaagtacgaccgcatcaccaaccacatccatgtccgcatctcccacctgcctctggtggaggagctgcgctcgctgaggcagctgcatctgaaccagctgatccgcaccagtggggtggtgaccagctgcactggcgtcctgccccagctcagcatggtcaagtacaactgcaacaagtgcaatttcgtcctgggtcctttctgccagtcccagaaccaggaggtgaaaccaggctcctgtcctgagtgccagtcggccggcccctttgaggtcaacatggaggagaccatctatcagaactaccagcgtatccgaatccaggagagtccaggcaaagtggcggctggccggctgccccgctccaaggacgccattctcctcgcagatctggtggacagctgcaagccaggagacgagatagagctgactggcatctatcacaacaactatgatggctccctcaacactgccaatggcttccctgtctttgccactgtcatcctagccaaccacgtggccaagaaggacaacaaggttgctgtaggggaactgaccgatgaagatgtgaagatgatcactagcctctccaaggatcagcagatcggagagaagatctttgccagcattgctccttccatctatggtcatgaagacatcaagagaggcctggctctggccctgttcggaggggagcccaaaaacccaggtggcaagcacaaggtacgtggtgatatcaacgtgctcttgtgcggagaccctggcacagcgaagtcgcagtttctcaagtatattgagaaagtgtccagccgagccatcttcaccactggccagggggcgtcggctgtgggcctcacggcgtatgtccagcggcaccctgtcagcagggagtggaccttggaggctggggccctggttctggctgaccgaggagtgtgtctcattgatgaatttgacaagatgaatgaccaggacagaaccagcatccatgaggccatggagcaacagagcatctccatctcgaaggctggcatcgtcacctccctgcaggctcgctgcacggtcattgctgccgccaaccccataggagggcgctacgacccctcgctgactttctctgagaacgtggacctcacagagcccatcatctcacgctttgacatcctgtgtgtggtgagggacaccgtggacccagtccaggacgagatgctggcccgcttcgtggtgggcagccacgtcagacaccaccccagcaacaaggaggaggaggggctggccaatggcagcgctgctgagcccgccatgcccaacacgtatggcgtggagcccctgccccaggaggtcctgaagaagtacatcatctacgccaaggagagggtccacccgaagctcaaccagatggaccaggacaaggtggccaagatgtacagtgacctgaggaaagaatctatggcgacaggcagcatccccattacggtgcggcacatcgagtccatgatccgcatggcggaggcccacgcgcgcatccatctgcgggactatgtgatcgaagacgacgtcaacatggccatccgcgtgatgctggagagcttcatagacacacagaagttcagcgtcatgcgcagcatgcgcaagacttttgcccgctacctttcattccggcgtgacaacaatgagctgttgctcttcatactgaagcagttagtggcagagcaggtgacatatcagcgcaaccgctttggggcccagcaggacactattgaggtccctgagaaggacttggtggataaggctcgtcagatcaacatccacaacctctctgcattttatgacagtgagctcttcaggatgaacaagttcagccacgacctgaaaaggaaaatgatcctgcagcagttctgaggccctatgccatccataaggattccttgggattctggtttggggtggtcagtgccctctgtgctttatggacacaaaaccagagcacttgatgaactcggggtactagggtcagggcttatagcaggatgtctggctgcacctggcatgactgtttgtttctccaagcctgctttgtgcttctcacctttgggtgggatgccttgccagtgtgtcttacttggttgctgaacatcttgccacctccgagtgctttgtctccactcagtaccttggatcagagctgctgagttcaggatgcctgcgtgtggtttaggtgttagccttcttacatggatgtcaggagagctgctgccctcttggcgtgagttgcgtattcaggctgcttttgctgcctttggccagagagctggttgaagatgtttgtaatcgttttcagtctcctgcaggtttctgtgcccctgtggtggaagagggcacgacagtgccagcgcagcgttctgggctcctcagtcgcaggggtgggatgtgagtcatgcggattatccactcgccacagttatcagctgccattgctccctgtctgtttccccactctcttatttgtgcattcggtttggtttctgtagttttaatttttaataaagttgaataaaatataaaaaaaaaaaaaaaaaa

SEQ ID NO: 5656 - protein, 904 aa, Homo sapiens
MAESSESFTMASSPAQRRRGNDPLTSSPGRSSRRTDALTSSPGRDLPPFEDESEGLLGTEGPLEEEEDGEELIGDGMERDYRAIPELDAYEAEGLALDDEDVEELTASQREAAERAMRQRDREAGRGLGRMRRGLLYDSDEEDEERPARKRRQVERATEDGEEDEEMIESIENLEDLKGHSVREWVSMAGPRLEIHHRFKNFLRTHVDSHGHNVFKERISDMCKENRESLVVNYEDLAAREHVLAYFLPEAPAELLQIFDEAALEVVLAMYPKYDRITNHIHVRISHLPLVEELRSLRQLHLNQLIRTSGVVTSCTGVLPQLSMVKYNCNKCNFVLGPFCQSQNQEVKPGSCPECQSAGPFEVNMEETIYQNYQRIRIQESPGKVAAGRLPRSKDAILLADLVDSCKPGDEIELTGIYHNNYDGSLNTANGFPVFATVILANHVAKKDNKVAVGELTDEDVKMITSLSKDQQIGEKIFASIAPSIYGHEDIKRGLALALFGGEPKNPGGKHKVRGDINVLLCGDPGTAKSQFLKYIEKVSSRAIFTTGQGASAVGLTAYVQRHPVSREWTLEAGALVLADRGVCLIDEFDKMNDQDRTSIHEAMEQQSISISKAGIVTSLQARCTVIAAANPIGGRYDPSLTFSENVDLTEPIISRFDILCVVRDTVDPVQDEMLARFVVGSHVRHHPSNKEEEGLANGSAAEPAMPNTYGVEPLPQEVLKKYIIYAKERVHPKLNQMDQDKVAKMYSDLRKESMATGSIPITVRHIESMIRMAEAHARIHLRDYVIEDDVNMAIRVMLESFIDTQKFSVMRSMRKTFARYLSFRRDNNELLLFILKQLVAEQVTYQRNRFGAQQDTIEVPEKDLVDKARQINIHNLSAFYDSELFRMNKFSHDLKRKMILQQF

SEQ ID NO: 5657 - DNA, 3297 bp, Mus musculus
  CDS (40)..(2754)
aaaaccggtggcagctggtgcggtggagctagcgcagacatggcggagtcttctgagtctctctcagcatctagccctgcccgtcagcggcgccggatcagtgatcccctcacctccagcccaggccgcagctccagacgtgctgacgccctgacctccagccctggcagagacctccccccatttgaagatgagtctgaggggctgctgggcacagaggggcccatggaggaagaagaggatggagaggaactcattggtgatggcatggagagagactaccgtcccattccggagctcgatgtctacgaggccgagggattggccctggatgatgaagatgtggaggagctgacagccagtcagagagaggcagctgagcggaccatgaggcagcgggaccgtgaggctggcagaggcctgggacgcatgcgccgggggctgctctatgacagcagcgaggaagatgaggagcggcctgcccgtaagcgccgccacgtagaacgcgccacagaggatggcgaggaggatgaagagatgatcgagagtattgagaatctggaggacctcaagggccactcggtgcgcgagtgggtgagcatggcagggcccaggctggagatccaccaccgcttcaagaacttcctgcgcacccacgtggacagccatggccacaacgtcttcaaggagcgcatcagtgatatgtgcaaagagaaccgtgagagtttggtggtaaattatgaagacctggcagcccgggagcacgtgttggcatacttcctgccggaagcaccggctgagttgctgcagatctttgacgaggctgccctggaggtcgtgttggccatgtaccctaaatatgaccgtatcaccaaccacatccatgtgcgcatctcccacctgcctctggtggaggagctgcgttcactgaggcagttgcacctgaaccagctgatccgtaccagtggcgtggtgaccagctgcaccggagtcctgccccagctcagcatggtcaagtacaactgtagcaagtgcaactttgtactggggcctttctgccagtctcagaatcaggaggtgaagcctggctcctgccctgagtgccagtctgctgggccctttgagatcaacatggaggagaccatctatcagaactaccaacgtatccgcatccaggagagtcccggcaaggtggcggctggccgactgccccgttccaaggatgccattctcctcgctgatctggtggacagctgcaagccaggggacgagatagagctgaccggcatttaccataataactatgacggctcgcttaacaccgccaacggctttccagtctttgccactattatcttggccaaccatgttgccaagaaggacaacaaagtagctgtgggggagctcaccgatgaggacgtgaagatgatcaccggtctctccaaggatcagcaaattggagagaagatctttgccagcattgcaccctccatctatgggcatgaagacatcaagagaggcctggctctggccctgtttggaggggagcccaagaacccaggtggaaagcacaaggttcgaggtgacattaatgtgctcttgtgtggggaccctggcacagcaaagtcccaattcctcaaatacatcgagaaagtgtctagccgtgccatcttcaccactggccagggtgcgtcagcagtgggtctcaccgcgtacgttcagcggcatcccgtcagcagagagtggaccttagaggcgggagccctggttctggctgaccggggggtgtgtctcattgacgagtttgacaagatgaatgaccaggacaggaccagcatccacgaggccatggaacagcaaagcatctccatctccaaggctggcatcgttacctcgctgcaagcccgctgcactgtcatagctgctgccaaccccataggaggccgctacgacccttcactgaccttctcagagaatgtagacctcacagagcccatcatttcccgctttgatgtcctgtgtgtggtgagggacactgttgatccagttcaggatgagatgctggcccgctttgtggttggcagccacgtcagacaccaccccagtaacaagaaggatgaagggttgactaatggtggcaccttggagccagccatgcccaacacatatggcgtggagcccctgcctcaggaggtgctgaagaagtatatcatctatgccaaggagagggtccgcccgaagctcaaccagatggaccaggataaagtggccaggatgtacagtgacctgaggaaggagtccatggcaacgggcagcattcccatcacggtgcgccacatcgagtccatgatccgcatggccgaggcccatgcccgcatgcacctgcgggactacgtgatggaagacgatgtcaacatggccatccgagtgatgatggagagcttcattgacacccagaagttcagcgtcatgcggagtatgcgcaagacttttgcccggtatctctccttccggcgagataacaatgatctgctgctcttcatactgaagcagttggtggctgagcaggtgacatatcaacgcaaccgctttggggcccagcaggacaccattgaaatacctgagaaggatctgatggacaaggccaggcagatcaatattcacaacctctctgccttctacgacagcgacctcttcaaattcaacaagttcagccgtgacctgaaacgcaaactgatcctacagcagttctgagaccagcacaggggcctctatgtctgaatgaggctcggtcaccacgctgagcctacgtcacttcccacttccactggggcttggtgccctgtaggggtgggaggatggcttaatgcagacctttacctgtgagcccctaggccaaggctgtagcattaaatgactatttattcttctgcccccctctagagcactcttcttggccagaccctctgtccaaggctcattagaaggctggggttgtgttcaggtgacagactttatcaaaactattgctgttttggcatgagttgtgtttctggactgttttgttttcccctttagacaaagagcaacttagaagtatttgcaaacttttccagaacattctcaaagcctgtgatggaggagcacaagaccctgtctgctgagggcccatgctcctctcatgggtttcttcccacctagccagtgccttcatttgcttgttgtacagtttcttgtagtttattttttaatagatttgaataaaacctaaatagcgctaaaaaaaaaaaaaaaaaa

SEQ ID NO: 5658 - protein, 904 aa, Mus musculus
MAESSESLSASSPARQRRRISDPLTSSPGRSSRRADALTSSPGRDLPPFEDESEGLLGTEGPMEEEEDGEELIGDGMERDYRPIPELDVYEAEGLALDDEDVEELTASQREAAERTMRQRDREAGRGLGRMRRGLLYDSSEEDEERPARKRRHVERATEDGEEDEEMIESIENLEDLKGHSVREWVSMAGPRLEIHHRFKNFLRTHVDSHGHNVFKERISDMCKENRESLVVNYEDLAAREHVLAYFLPEAPAELLQIFDEAALEVVLAMYPKYDRITNHIHVRISHLPLVEELRSLRQLHLNQLIRTSGVVTSCTGVLPQLSMVKYNCSKCNFVLGPFCQSQNQEVKPGSCPECQSAGPFEINMEETIYQNYQRIRIQESPGKVAAGRLPRSKDAILLADLVDSCKPGDEIELTGIYHNNYDGSLNTANGFPVFATIILANHVAKKDNKVAVGELTDEDVKMITGLSKDQQIGEKIFASIAPSIYGHEDIKRGLALALFGGEPKNPGGKHKVRGDINVLLCGDPGTAKSQFLKYIEKVSSRAIFTTGQGASAVGLTAYVQRHPVSREWTLEAGALVLADRGVCLIDEFDKMNDQDRTSIHEAMEQQSISISKAGIVTSLQARCTVIAAANPIGGRYDPSLTFSENVDLTEPIISRFDVLCVVRDTVDPVQDEMLARFVVGSHVRHHPSNKKDEGLTNGGTLEPAMPNTYGVEPLPQEVLKKYIIYAKERVRPKLNQMDQDKVARMYSDLRKESMATGSIPITVRHIESMIRMAEAHARMHLRDYVMEDDVNMAIRVMMESFIDTQKFSVMRSMRKTFARYLSFRRDNNDLLLFILKQLVAEQVTYQRNRFGAQQDTIEIPEKDLMDKARQINIHNLSAFYDSDLFKFNKFSRDLKRKLILQQF

SEQ ID NO: 5659 - DNA, 2493 bp, Schizosaccharomyces pombe
  CDS (1)..(2493)
atggattcttttcggaaaaggggtcgccgcgattctgaaagtttaccttttgaatcagaaaattcttctctcggtgctacacctctttctttacctccttcttcacctcctccagaattctctgatgaagctgcagaagctctcgtggaggaggatattgaggatctggacggagaagctttagatgtagaggatgaagaaggtgaagatttgttcggagaaggaatggaacgtgattatcaacaaaatttggagctagatcgttatgacattgaagaactagatgacgataacgatcttgaagaattagatatcggggcccgaagagctgttgatgccaggttgagacgacgtgatattgagctcgatgctgctgcaggtagaacaaaacctgctgcatttttacaagatgaagatgatgatttggactccaatcttggcacaggcttcactcgtcatcgacatcgaatttacgacgaatattcacctaatgttggcgcattggacgaatctggtgaacttcctcttgaatcaattgccgacgtaaaggccgatagtattgccgaatgggttactcttgatcctgttcggcgtacaattgctcgagaattcaaaaatttccttcttgaatatacagatgaaaatggcacctctgtatacggtaaccgtattcgcacattgggtgaggttaatgctgagtcgttgatggttaattatgcccatcttggtgaatctaaacccattttggcttatttcttggccaatgcgcctgcacctatttttcgcatatttgatcgtgttgctttggaagccactcttttgcattatccagactatgaaagaatacactctgatattcatgttcgtatcactaatcttcctacttgttttactttacgcgatctacgacaatcccatcttaattgccttgtacgggtatctggtgtcgtaactaggcgcactgggctttttccacaattaaaatacattcggtttacatgtaccaaatgtggtgctactttgggtccattttttcaagactctagcgttgaagtaaaaatttctttctgtcacaactgttccagccgtggtccgtttgtaatcaactctgaacggactgtatataataactatcaaaggatcactttacaagaatcacctggcaccgtcccctcaggtagactgcctcgacaccgtgaagttattcttttagcggacttggttgatgttgccaaaccaggcgaagagattgatgttactggcatataccgcaataacttcgatgctagtctgaataccaaaaacgggtttcctgtcttcgctacaattatagaagcaaatcacatatcgcaacttgacggcagtggtaatactgatgatgatttctctttaagtcggcttactgatgatgaggaaagggaaattcgggcattagcaaagtcgcctgatattcacaacagaattattgcatcgatggcgccttctatttatggacatcgctctatcaaaactgctattgctgctgctttattcggtggtgtccccaaaaatattaacggtaagcataaaattagaggtgatatcaatgttttattgttgggagatccaggaaccgccaaatctcaatttcttaagtatgttgaaaaaacggcacatagggctgtcttcgccacaggtcagggtgccagtgctgttggtctaactgcatccgtccgtaaagaccccattacgaatgaatggactttggaagggggtgctttggttttagcagataaaggtgtttgtttgattgacgagttcgataaaatgaatgatcaggatcgtacttctattcacgaagccatggaacaacaaagtatttctatttctaaggcgggtattgtgactaccttgcaggcgaggtgcactattattgctgccgctaatcccatcggtggacgttataacactacaattccttttaatcaaaatgttgagctgaccgaacctattttatctcgttttgacatccttcaggtcgtcaaagacacggttaatcctgaaattgatgaacagctagctaattttgttgtatcaagtcatattcgatctcatcctgcatttgatccgaatatggatgtcttgaagaaagtccctactgagactggtattgatgccaaacccattccccaagatcttcttcgtaaatatatccatttcgctcgtgaaaaagtttttcctcgattacagcaaatggatgaagaaaagatttcgagactttatagcgatatgagacgcgagtcactggctactggaagttatcctattactgtgcgtcatctggagtctgctatccgtttaagtgaagcatttgcaaaaatgcagctcagtgagtttgtgcgcccttcacatatagacaaagccattcaagtgattattgattcctttgtgaatgcccaaaaaatgagtgttaaacgaagtttgtcaagaacatttgctaaatatcttatttaa

SEQ ID NO: 5660 - protein, 830 aa, Schizosaccharomyces pombe
MDSFRKRGRRDSESLPFESENSSLGATPLSLPPSSPPPEFSDEAAEALVEEDIEDLDGEALDVEDEEGEDLFGEGMERDYQQNLELDRYDIEELDDDNDLEELDIGARRAVDARLRRRDIELDAAAGRTKPAAFLQDEDDDLDSNLGTGFTRHRHRIYDEYSPNVGALDESGELPLESIADVKADSIAEWVTLDPVRRTIAREFKNFLLEYTDENGTSVYGNRIRTLGEVNAESLMVNYAHLGESKPILAYFLANAPAPIFRIFDRVALEATLLHYPDYERIHSDIHVRITNLPTCFTLRDLRQSHLNCLVRVSGVVTRRTGLFPQLKYIRFTCTKCGATLGPFFQDSSVEVKISFCHNCSSRGPFVINSERTVYNNYQRITLQESPGTVPSGRLPRHREVILLADLVDVAKPGEEIDVTGIYRNNFDASLNTKNGFPVFATIIEANHISQLDGSGNTDDDFSLSRLTDDEEREIRALAKSPDIHNRIIASMAPSIYGHRSIKTAIAAALFGGVPKNINGKHKIRGDINVLLLGDPGTAKSQFLKYVEKTAHRAVFATGQGASAVGLTASVRKDPITNEWTLEGGALVLADKGVCLIDEFDKMNDQDRTSIHEAMEQQSISISKAGIVTTLQARCTIIAAANPIGGRYNTTIPFNQNVELTEPILSRFDILQVVKDTVNPEIDEQLANFVVSSHIRSHPAFDPNMDVLKKVPTETGIDAKPIPQDLLRKYIHFAREKVFPRLQQMDEEKISRLYSDMRRESLATGSYPITVRHLESAIRLSEAFAKMQLSEFVRPSHIDKAIQVIIDSFVNAQKMSVKRSLSRTFAKYLI

SEQ ID NO: 5661 - DNA, 2607 bp, Saccharomyces cerevisiae
  CDS (1)..(2607)
atgtctgataatagaagacgtagacgtgaggaagatgattcggactcagaaaatgagctaccgccatcctcacctcagcaacattttagaggggggatgaacccagtttcatcacctattggttctccagatatgattaaccctgaaggtgacgataatgaagttgacgatgtaccagatattgatgaagttgaagaacaaatgaacgaagtagatttgatggacgataatatgtatgaggattatgcggctgatcataatagagatagatatgatccagatcaagttgacgacagggaacaacaagaactatctttaagcgaacgtcgccgcattgatgctcaactaaatgaaagagataggctattgagaaatgttgcctacatagatgacgaggacgaagaacaagaaggtgcagcgcaacttgatgaaatgggccttcctgtgcaaagacgaagaaggagaaggcagtatgaggacttagagaatagtgatgacgatctattgagtgacatggacattgacccattaagagaagaacttactttagaatctctgagtaacgttaaggctaacagttactcggaatggataacacaacctaatgtctcaagaactattgccagagagttaaaatcattcctgctggaatatacagatgaaacgggtcgttctgtatatggtgcacgtattagaacattaggtgaaatgaattctgaatctttggaggttaattatagacacttagcggagtccaaagccatcctggcactatttttagctaaatgtccagaagaaatgttgaaaatattcgatctcgtggctatggaggcaacagaattgcattacccagattatgcccgtattcactccgaaattcacgtaagaatctctgattttccaacaatatacagtttacgtgaattgcgtgagtctaatttgtcctctctagtacgcgtcactggggtggtgacaagaagaacaggagtcttccctcaattaaaatatgtcaaattcaattgtttgaaatgtggctccattttgggcccattttttcaagattctaatgaagaaattagaatctcattctgtacaaactgcaaatcaaaaggtccctttagagtcaatggagaaaaaactgtgtaccgaaattatcaaagggttacgctccaggaagctcccggaaccgttcctccaggccgtctaccaagacatagagaagtcattttgttggcggatttggtagatgtatccaagccaggtgaagaggtagaagttaccggcatctacaaaaataactacgatggtaacttgaatgcaaagaacggattccccgtttttgcaacaattatcgaggcaaattctataaaaagaagagagggcaatacagctaacgaaggcgaagaagggttggatgttttcagttggactgaagaagaagaacgtgaatttagaaagatttctagggatcgtggtataattgataaaattatatcatcgatggcaccgtctatctatggtcatagagatattaaaactgcagtcgcgtgctcattatttggaggtgttccaaaaaacgtcaatggaaaacattctattcgtggtgatatcaatgtgttattattaggtgatccaggtactgccaaatctcaaatcttaaaatacgtcgagaaaacagcgcatagagcggtctttgcaactggtcagggtgcttcggctgtcggtctgacagcatccgtcagaaaagatcctattactaaagaatggaccttagaagggggggcgctagtattggctgataagggtgtttgtttaattgatgaattcgataagatgaacgatcaggatcgtacatctattcatgaggctatggaacagcaaagtatttccatttccaaggccggtattgttactacattacaagcgcgctgctcaattattgctgcggcaaatcctaatggtggtagatataattcaaccttgcctttagctcagaatgttagtttgaccgagcctattctgtctagatttgatattttatgtgttgtcagagaccttgttgatgaagaggcagacgaaagattggccacatttgttgtcgattctcatgtaagatctcatccagaaaacgatgaagatcgagaaggcgaagagcttaaaaataatggcgaatcggcgatagaacaaggagaagatgaaataaatgagcagcttaatgcaaggcaaagaagacttcaaagacaaaggaagaaggaggaagagatctcgcctattccacaggaattattgatgaaatatattcactatgcgaggacaaaaatataccctaaattgcatcagatggatatggataaggttagcagggtatatgcggatttgagaagagaaagtatttctacaggttcgtttccaatcacagttcgtcatttagaatctattctaagaattgcagaatcttttgctaaaatgagattatctgaatttgtgtcttcttatgatttggatagagctatcaaagttgtagttgattcctttgttgatgcccaaaaagtcagtgttcgccgccaactccgcaggtctttcgcaatttataccttgggtcactaa

SEQ ID NO: 5662 - protein, 868 aa, Saccharomyces cerevisiae
MSDNRRRRREEDDSDSENELPPSSPQQHFRGGMNPVSSPIGSPDMINPEGDDNEVDDVPDIDEVEEQMNEVDLMDDNMYEDYAADHNRDRYDPDQVDDREQQELSLSERRRIDAQLNERDRLLRNVAYIDDEDEEQEGAAQLDEMGLPVQRRRRRRQYEDLENSDDDLLSDMDIDPLREELTLESLSNVKANSYSEWITQPNVSRTIARELKSFLLEYTDETGRSVYGARIRTLGEMNSESLEVNYRHLAESKAILALFLAKCPEEMLKIFDLVAMEATELHYPDYARIHSEIHVRISDFPTIYSLRELRESNLSSLVRVTGVVTRRTGVFPQLKYVKFNCLKCGSILGPFFQDSNEEIRISFCTNCKSKGPFRVNGEKTVYRNYQRVTLQEAPGTVPPGRLPRHREVILLADLVDVSKPGEEVEVTGIYKNNYDGNLNAKNGFPVFATIIEANSIKRREGNTANEGEEGLDVFSWTEEEEREFRKISRDRGIIDKIISSMAPSIYGHRDIKTAVACSLFGGVPKNVNGKHSIRGDINVLLLGDPGTAKSQILKYVEKTAHRAVFATGQGASAVGLTASVRKDPITKEWTLEGGALVLADKGVCLIDEFDKMNDQDRTSIHEAMEQQSISISKAGIVTTLQARCSIIAAANPNGGRYNSTLPLAQNVSLTEPILSRFDILCVVRDLVDEEADERLATFVVDSHVRSHPENDEDREGEELKNNGESAIEQGEDEINEQLNARQRRLQRQRKKEEEISPIPQELLMKYIHYARTKIYPKLHQMDMDKVSRVYADLRRESISTGSFPITVRHLESILRIAESFAKMRLSEFVSSYDLDRAIKVVVDSFVDAQKVSVRRQLRRSFAIYTLGH

SEQ ID NO: 5663 - DNA, 2331 bp, Arabidopsis thaliana
  CDS (1)..(2331)
atggatgtgccagaggagacgaggcttcgccacaagcgagattttatccagttcctcgatagtatgtatatggaggaaatcaaggctttggtacatcaaaagcgtcaccgtctcattattaatatctctgacattcaccaccacttcagggaagttgcctctaggatactgaagaatccaaatgagtatatgcagtcattttgtgacgcagccactgaagctactcgtgctattgaccctaaatacttgaaggaaggagagcttgtccttgttggttttgaaggttattttgtttctcgcgttgttactcctagagagcttctctctgattttattggatctatggtctgtgttgagggcattgtcaccaaatgctctcttgtgaggccaaaggttgttaaaagcgttcacttttgtccatcaaccggtgaatttaccaatcgagattatcgagacataacatctcacgctggtttacccactggctctgtctatcccacaagggatgataagggaaacttattggtgactgagtatgggctgtgcaaatacaaagatcaccagaccttgtcaattcaagaagtgcctgaaaatgctgctcctggtcagcttccacgaagcgttgatgtcattgctgaggatgaccttgttgactcatgcaagccaggagatcgagtatctgttttcggtatttacaaagctcttcctggaaaaagcaagggtagtgtaaatggagtctttaggactatcctcatagccaataatatcgctctgctcaataaagaagcaaatgcacctatatacactaagcaagacctagataacattaaaaatattgcacgaagagatgatgcatttgatctccttgctcgttccttagcaccttctatttatgggcacgcttggataaagaaagcagtagttttactgatgcttggtggtgttgaaaagaacctgaagaacggaacccacttgaggggagacatcaacatgatgatggttggtgatccatctgttgccaaatctcaacttctgagagcgataatgaatattgcacctttggctatatcaaccacaggccgtggttcttccggtgttgggttaactgctgctgtgacttctgaccaagaaacaggggaacgaagactagaagctggtgcaatggtcctcgctgataaaggtatcgtgtgcattgacgagtttgataagatgaatgatcaggaccgagttgctatacacgaagtgatggagcaacagactgtaacaattgcaaaagccggtatccatgcatcactgaatgctagatgcagtgtggttgcagctgcaaatcccatatacggaacttatgacagatcactgactccaacaaagaacattggacttccagattcgctgctttctcgttttgatctactgtttattgtgttggatcaaatggatgctggtatcgacagcatgatttcagaacatgtcttgcgcatgcatcgttacaagaacgatagaggtgaggcagggccagatgggagcttgccttacgcgagagaagacaatgctgagagtgaaatgtttgttaagtataaccaaacactacatgggaagaagaaaagaggccaaacacatgataaaacccttacgattaagttcttgaagaagtacattcattacgccaagcaccgtattacaccaaagctcactgatgaagcatcggaacgtattgcagaagcatatgcagatctcagaaatgcaggttccgatactaagactggaggtacgcttccgataacagccagaactctagagacaataattcgtcttgctacggcacatgccaaaatgaagttgagtagcgaggttactaaagctgatgcagaggctgccttgaagcttatgaactttgcaatatatcatcaagaattaactgagatggatgatcgtgagcaagaagaacgtcaaagggaacaagctgaacaagaaagaacaccaagtggacgtagaggcaaccaacgcaggaataatgaagatggagcagagaatgacactgcaaatgtcgacagtgaaacagcagatccaatggaagtagatgaaccttctgtagagcaattcagcggcacggtctctgcagcaaggattgaaacctttgagcgagtgtttgggcagcacatgaggacacacaggctcgatgacatctctattgcagatatagagactgttgtcaacaacaatggggttggagcatctcgttactctgcagatgagattatggctctcttagagaaactgcaagatgataacaaagtgatgatcagcgatggcaaagttcatatcatttga

SEQ ID NO: 5664 - protein, 776 aa, Arabidopsis thaliana
MDVPEETRLRHKRDFIQFLDSMYMEEIKALVHQKRHRLIINISDIHHHFREVASRILKNPNEYMQSFCDAATEATRAIDPKYLKEGELVLVGFEGYFVSRVVTPRELLSDFIGSMVCVEGIVTKCSLVRPKVVKSVHFCPSTGEFTNRDYRDITSHAGLPTGSVYPTRDDKGNLLVTEYGLCKYKDHQTLSIQEVPENAAPGQLPRSVDVIAEDDLVDSCKPGDRVSVFGIYKALPGKSKGSVNGVFRTILIANNIALLNKEANAPIYTKQDLDNIKNIARRDDAFDLLARSLAPSIYGHAWIKKAVVLLMLGGVEKNLKNGTHLRGDINMMMVGDPSVAKSQLLRAIMNIAPLAISTTGRGSSGVGLTAAVTSDQETGERRLEAGAMVLADKGIVCIDEFDKMNDQDRVAIHEVMEQQTVTIAKAGIHASLNARCSVVAAANPIYGTYDRSLTPTKNIGLPDSLLSRFDLLFIVLDQMDAGIDSMISEHVLRMHRYKNDRGEAGPDGSLPYAREDNAESEMFVKYNQTLHGKKKRGQTHDKTLTIKFLKKYIHYAKHRITPKLTDEASERIAEAYADLRNAGSDTKTGGTLPITARTLETIIRLATAHAKMKLSSEVTKADAEAALKLMNFAIYHQELTEMDDREQEERQREQAEQERTPSGRRGNQRRNNEDGAENDTANVDSETADPMEVDEPSVEQFSGTVSAARIETFERVFGQHMRTHRLDDISIADIETVVNNNGVGASRYSADEIMALLEKLQDDNKVMISDGKVHII

SEQ ID NO: 5665 - DNA, 2427 bp, Homo sapiens
  CDS (1)..(2427)
atggcgggtaccgtggtgctggacgatgtggagctgcgggaggctcagagagattacctggacttcctggacgacgaggaagaccagggaatttatcagagcaaagttcgggagctgatcagtgacaaccaataccggctgattgtcaatgtgaatgacctgcgcaggaaaaacgagaagagggctaaccggcttctgaacaatgcctttgaggagctggttgccttccagcgggccttaaaggattttgtggcctccattgatgctacctatgccaagcagtatgaggagttctacgtaggactggaaggcagctttggctccaagcacgtctccccgcggactcttacctcctgcttcctcagctgtgtggtctgtgtggagggcattgtcactaaatgttctctagttcgtcccaaagtcgtccgcagtgtccactactgtcctgctactaagaagaccatagagcgacgttattctgatctcaccaccctggtggcctttccctccagctctgtctatcctaccaaggatgaggagaacaatccccttgagacagaatatggcctttctgtctacaaggatcaccagaccatcaccatccaggagatgccggagaaggccccagccggccagctcccccgctctgtggacgtcattctggatgatgacttggtggataaagcgaagcctggtgaccgggttcaggtggtgggaacctaccgttgccttcctggaaagaagggaggctacacctctgggaccttcaggactgtcctgattgcctgtaatgttaagcagatgagcaaggatgctcagccctctttctctgctgaggatatagccaagatcaagaagttcagtaaaacccgatccaaggatatctttgaccagctggccaagtcattggccccaagtatccatgggcatgactatgtcaagaaagcaatcctctgcttgctcttgggaggggtggaacgagacctagaaaatggcagccacatccgtggggacatcaatattcttctaataggagacccatccgttgccaagtctcagcttctgcggtatgtgctttgcactgcaccccgagctatccccaccactggccggggctcctctggagtgggtctgacggctgctgtcaccacagaccaggaaacaggagagcgccgtctggaagcaggggccatggtcctggctgaccgaggcgtggtttgcattgatgaatttgacaaaatgtctgacatggatcgcacagccatccatgaagtgatggagcagggtcgagtgaccattgccaaggctggcatccatgctcggctgaatgcccgctgcagtgttttggcagctgccaaccctgtctacggcaggtatgaccagtataagactccaatggagaacattgggctacaggactcactgctgtcacgatttgacttgctcttcatcatgctggatcagatggatcctgagcaggatcgggagatctcagaccatgtccttcggatgcaccgttacagagcacctggggagcaggatggcgatgctatgcccttgggtagtgctgtggatatcctggccacagatgatcccaactttagccaggaagatcagcaggacacccagatttatgagaagcatgacaaccttctacatgggaccaagaagaaaaaggagaagatggtgagtgcagcattcatgaagaagtacatccatgtggccaaaatcatcaagcctgtcctgacacaggagtcggccacctacattgcagaagagtattcacgcctgcgcagccaggatagcatgagctcagacaccgccaggacatctccagttacagcccgaacactggaaactctgattcgactggccacagcccatgcgaaggcccgcatgagcaagactgtggacctgcaggatgcagaggaagctgtggagttggtccagtatgcttactttaagaaggttctggagaaggagaagaaacgtaagaagcgaagtgaggatgaatcagagacagaagatgaagaggagaaaagccaagaggaccaggagcagaagaggaagagaaggaagactcgccagccagatgccaaagatggggattcatacgacccctatgacttcagtgacacagaggaggaaatgcctcaagtacacactccaaagacggcagactcacaggagaccaaggaatcccagaaagtggagttgagtgaatccaggttgaaggcattcaaggtggccctcttggatgtgttccgggaagctcatgcgcagtcaatcggcatgaatcgcctcacagaatccatcaaccgggacagcgaagagcccttctcttcagttgagatccaggctgctctgagcaagatgcaggatgacaatcaggtcatggtgtctgagggcatcatcttcctcatctga

SEQ ID NO: 5666 - protein, 808 aa, Homo sapiens
MAGTVVLDDVELREAQRDYLDFLDDEEDQGIYQSKVRELISDNQYRLIVNVNDLRRKNEKRANRLLNNAFEELVAFQRALKDFVASIDATYAKQYEEFYVGLEGSFGSKHVSPRTLTSCFLSCVVCVEGIVTKCSLVRPKVVRSVHYCPATKKTIERRYSDLTTLVAFPSSSVYPTKDEENNPLETEYGLSVYKDHQTITIQEMPEKAPAGQLPRSVDVILDDDLVDKAKPGDRVQVVGTYRCLPGKKGGYTSGTFRTVLIACNVKQMSKDAQPSFSAEDIAKIKKFSKTRSKDIFDQLAKSLAPSIHGHDYVKKAILCLLLGGVERDLENGSHIRGDINILLIGDPSVAKSQLLRYVLCTAPRAIPTTGRGSSGVGLTAAVTTDQETGERRLEAGAMVLADRGVVCIDEFDKMSDMDRTAIHEVMEQGRVTIAKAGIHARLNARCSVLAAANPVYGRYDQYKTPMENIGLQDSLLSRFDLLFIMLDQMDPEQDREISDHVLRMHRYRAPGEQDGDAMPLGSAVDILATDDPNFSQEDQQDTQIYEKHDNLLHGTKKKKEKMVSAAFMKKYIHVAKIIKPVLTQESATYIAEEYSRLRSQDSMSSDTARTSPVTARTLETLIRLATAHAKARMSKTVDLQDAEEAVELVQYAYFKKVLEKEKKRKKRSEDESETEDEEEKSQEDQEQKRKRRKTRQPDAKDGDSYDPYDFSDTEEEMPQVHTPKTADSQETKESQKVELSESRLKAFKVALLDVFREAHAQSIGMNRLTESINRDSEEPFSSVEIQAALSKMQDDNQVMVSEGIIFLI

SEQ ID NO: 5667 - DNA, 2439 bp, Mus musculus
  CDS (1)..(2439)
atggcgggcacagtagtgctggatgatgtggagctgcgggaagcgcagagagactacttggacttcctggatgacgaggaggaccaaggcatttaccagaacaaggttcgggaactgatcagtgacaaccagtatcggctgattgtcagcgtgaatgacctgcgcaggaagaatgaaaagagggctaaccgcctcctgaacaatgcgtttgaggagctggttgccttccagcgggccttgaaggatttcgtggcctccattgacgccacctacgccaagcagtatgaggagttctacataggattggaaggcagctttggctcaaagcacgtttctccccggactctcacttcctgcttcctcagctgtgtggtctgtgtggaaggcattgttactaaatgctctctggttcgccccaaagtcgttcgcagtgttcactactgtcctgctactaagaagaccatagagcgacgctactctgacctcaccaccctagtggctttcccatccagttctgtttatcccacaaaggatgaggagaacaaccccctggagacagagtatggcctgtctgtctacaaggaccaccagaccatcaccatccaggagatgccagagaaggcccctgctggtcagctccctcgctccgtggacgtcattctagacgatgacctggtggataaagtgaagcctggtgacagaatacaggtggtggggacctaccgctgccttccagggaagaagggctgctacacctcggggaccttcaggaccgtcctgattgcctgtaatgtgaagcagatgagtaaggatattcagcctgcattctctgcggacgatatagccaagatcaagaagttcagcaaaactcgttccaaggatgtctttgagcagctggcccggtcgttagccccgagcatccatgggcatgactatgtcaagaaggcaatcctctgcttgctcctgggaggggtggagcgggaacttgaaaacggcagccacatccgtggagacatcaatattcttctaataggtgacccctccgttgccaagtcccagcttctgcggtacgtgctttgcacggcgcccagggccattcccaccacgggacggggctcctctggagtgggtctcacagctgctgtcactacagaccaggaaacaggggagcgccgcctggaagctggtgctatggtcctggctgaccgtggagtggtttgcattgatgagtttgacaagatgtctgacatggaccgcacagccatccacgaggtgatggagcagggtcgagtgaccattgcaaaggctggcatccatgcccgactcaatgcccgctgcagtgttttggcagctgccaatccagtctatggcaggtatgatcagtataagacccccatggagaacattgggctgcaggactcactgctgtctagatttgacctgctcttcatcatgctggatcagatggatcctgaacaggatcgggagatctcagaccacgtccttaggatgcaccaatacagggccccgggggagcaggacggtgatgctttgccattgggtagttcagtggatatcctggccacagacgatcctgactttacccaggatgaccagcaagatacccgcatttatgagaagcatgacagccttctacatgggaccaagaagaaaaaggagaagatggtgagcgcagcttttatgaagaagtacattcacgtggccaaaattatcaagcccaccctgacacaggagtcagcagcctacattgcagaagaatactcacgcctgcgcagccaggacagtatgagctcagacactgcccggacatctccagttacagcacggacactggaaactctgattcgactggccacggcccatgcgaaggcccggatgagcaagactgtggacctgcaggatgcagaggaagccgtggagctggttcagtatgcttatttcaagaaggttctggagaaggagaagaaacgtaagaaggcaagtgaggatgaatcagacctagaagatgaagaggaaaagagccaggaagacactgagcagaagcggaaaaggaggaagactcatgccaaggatggagagtcctatgacccttacgacttcagtgaagcagagacgcagatgcctcaagtgcacaccccaaagactgacgattcccaagagaagaccgatgattctcaggagacccaggactcccagaaagtggaactcagtgagcccaggctgaaggcttttaaggcggccctcttagaagtgttccaggaagctcatgagcagtctgtgggcatgctccacctcacagaatccatcaaccggaatagagaagagcctttctcctcagaggaaatccaggcttgcctgagccggatgcaggatgataaccaggtcatggtgtctgagggcatcgtcttccttatctga

SEQ ID NO: 5668 - protein, 812 aa, Mus musculus
MAGTVVLDDVELREAQRDYLDFLDDEEDQGIYQNKVRELISDNQYRLIVSVNDLRRKNEKRANRLLNNAFEELVAFQRALKDFVASIDATYAKQYEEFYIGLEGSFGSKHVSPRTLTSCFLSCVVCVEGIVTKCSLVRPKVVRSVHYCPATKKTIERRYSDLTTLVAFPSSSVYPTKDEENNPLETEYGLSVYKDHQTITIQEMPEKAPAGQLPRSVDVILDDDLVDKVKPGDRIQVVGTYRCLPGKKGCYTSGTFRTVLIACNVKQMSKDIQPAFSADDIAKIKKFSKTRSKDVFEQLARSLAPSIHGHDYVKKAILCLLLGGVERELENGSHIRGDINILLIGDPSVAKSQLLRYVLCTAPRAIPTTGRGSSGVGLTAAVTTDQETGERRLEAGAMVLADRGVVCIDEFDKMSDMDRTAIHEVMEQGRVTIAKAGIHARLNARCSVLAAANPVYGRYDQYKTPMENIGLQDSLLSRFDLLFIMLDQMDPEQDREISDHVLRMHQYRAPGEQDGDALPLGSSVDILATDDPDFTQDDQQDTRIYEKHDSLLHGTKKKKEKMVSAAFMKKYIHVAKIIKPTLTQESAAYIAEEYSRLRSQDSMSSDTARTSPVTARTLETLIRLATAHAKARMSKTVDLQDAEEAVELVQYAYFKKVLEKEKKRKKASEDESDLEDEEEKSQEDTEQKRKRRKTHAKDGESYDPYDFSEAETQMPQVHTPKTDDSQEKTDDSQETQDSQKVELSEPRLKAFKAALLEVFQEAHEQSVGMLHLTESINRNREEPFSSEEIQACLSRMQDDNQVMVSEGIVFLI

SEQ ID NO: 5669 - DNA, 2640 bp, Schizosaccharomyces pombe
  CDS (1)..(2640)
atgactgagctgttagcagatgaggtttttaaagaccgtgttagaatttttcaagaatatcttgaacatgacactgatgatgctaacgttaccttgtaccaagaggcaatccttagaatgcttaacatgggtcagcgtcgtttaattgtcaatattgatgaactgcgcgattacaaccgagaattagctgatggtgttcttttgaagcctcttgaatatgtggaaccttttgatgaggcattgagaaatgtagttagcactctcatagatcctgttgttcataaggacctaaaggataagctgttttacgtgggtttcaggggatcgtttggtgaccaccatgtgaatccacgtactttgagagccatgcatttaaataagatgatttctctggaaggaattgttacgcgctgctcttttgttcgtcctaaagtaattaaatctgttcattactgcgaagctacaaaaagacatcatttcaaacaatatgccgatgctactatgaatggcggccttagctttcaatccactgtatatccaacacaagacgaaaacggtaatcccctatcaatagaatttggcttcagcacctttcgcgatcatcagtcaatttctcttcaggaaatgcctgaacgtgcaccaccaggacaacttcctagatcaattgacattttgttggatgatgacttagttgatactgttaaacctggtgatcgtgttaatatagtaggacaatatcgttctatggggtctaaaacatctggtaatacaagcgcgacgtttcgaactgtgctgctagcgaacaatgttgttttgttagggaataaacctggtttgggaaatgttggtggtggtgcattagacatcactgatgctgatattcgtaacataaataaattggccagaaaaaaaaatgtgtttgaacttctctctacgagtcttgctcccagtatttatggctatgaatacgtcaagcaagcaattttacttcttcttctgggaggaactgaaaaaaatttgacgaatggaactcatattcgtggtgatataaatattttgatggttggtgatccgtccactgcaaaatctcaacttcttagatttgtacttaataccgctccacttgctatagctacgactggtcgtggttcttctggcgtaggtttaactgctgcagtgaccacagataaagaaactggcgagcgtcgtttagaggctggtgccatggtattagcagaccgtggcgtggtttgcattgatgagtttgacaagatgagtgacatagatagagttgctattcatgaagttatggaacaacagacagttacgattgctaaagccggtattcatacttcgcttaatgctcggtgtagtgtgattgccgctgcaaatcctatatatggacaatacgatattcgtaaagatcctcaccaaaatatagcacttccagattctatgctttcgcgttttgaccttcttttcattgttacagatgatatcgatgataaaaaggaccgtgctctcagtgagcatgtattgagaatgcatcgttacttgcctcctggtgttgagccaggtacgccggttcgtgattccttaaacagtgtattaaacgttggagctacaaacgctgctggtgtctctacggaaaacgttgaacaggaagttgagactccagtctgggaaacattttcaagtcttttgcatgcgaatgctcgaacgaagaagaaagaattgcttaacatcaactttgtgcggaaatatattcagtatgcaaaatctcgtatccaccctattctgaatcaagcaaccgctgagtacattaccaatatttattgtgggttacgaaatgacgatttacaaggaaaccagcggcgcacaagtcccttgacggcacgtactttagaaaccttgattcgattaagtactgctcacgccaaagcacgtttgagctcagttgtggaagtcaaagatgcaaaggctgcggaaaaaattttgcgttatgctttgtttcgtgaagttgttaaaccgaaaaggaagaagcacaaaaaacaacgcctagaggctggtgaagagtttgactcagaagacgataattccgatgacatggatattgaggaatctgaagaagaaatggatacaaacatggtcattgattcgggatcgagaagagttacccgatctcagaatgcaacttcgcaaagtcaagaatctggttcggagattggttcaagtatcgctggaacagctggttcctataatgtaggaacatcaaatacccagttatcatggccttccactcactcgaccttaccagctacatcgagagagctagccagcagtgaccgtaacatcaatacaggcactagcgtggcttctgaagtgtcggcatctgtgagcgagcagagcacagtttcattacctcgtgagaagatgtctgtgttcatggcccggttggcttcccttacaaaatccgagctgttctcagaagagtgtgcctctttggaagatgttttggaatcaattaataatatcgaggatgatgtaggattttcgagagaagaagctattgtggcacttaaagaaatggacgctcagaacaagatcatgttttcagataatgtggtttatcgtatttaa

SEQ ID NO: 5670 - protein, 879 aa, Schizosaccharomyces pombe
MTELLADEVFKDRVRIFQEYLEHDTDDANVTLYQEAILRMLNMGQRRLIVNIDELRDYNRELADGVLLKPLEYVEPFDEALRNVVSTLIDPVVHKDLKDKLFYVGFRGSFGDHHVNPRTLRAMHLNKMISLEGIVTRCSFVRPKVIKSVHYCEATKRHHFKQYADATMNGGLSFQSTVYPTQDENGNPLSIEFGFSTFRDHQSISLQEMPERAPPGQLPRSIDILLDDDLVDTVKPGDRVNIVGQYRSMGSKTSGNTSATFRTVLLANNVVLLGNKPGLGNVGGGALDITDADIRNINKLARKKNVFELLSTSLAPSIYGYEYVKQAILLLLLGGTEKNLTNGTHIRGDINILMVGDPSTAKSQLLRFVLNTAPLAIATTGRGSSGVGLTAAVTTDKETGERRLEAGAMVLADRGVVCIDEFDKMSDIDRVAIHEVMEQQTVTIAKAGIHTSLNARCSVIAAANPIYGQYDIRKDPHQNIALPDSMLSRFDLLFIVTDDIDDKKDRALSEHVLRMHRYLPPGVEPGTPVRDSLNSVLNVGATNAAGVSTENVEQEVETPVWETFSSLLHANARTKKKELLNINFVRKYIQYAKSRIHPILNQATAEYITNIYCGLRNDDLQGNQRRTSPLTARTLETLIRLSTAHAKARLSSVVEVKDAKAAEKILRYALFREVVKPKRKKHKKQRLEAGEEFDSEDDNSDDMDIEESEEEMDTNMVIDSGSRRVTRSQNATSQSQESGSEIGSSIAGTAGSYNVGTSNTQLSWPSTHSTLPATSRELASSDRNINTGTSVASEVSASVSEQSTVSLPREKMSVFMARLASLTKSELFSEECASLEDVLESINNIEDDVGFSREEAIVALKEMDAQNKIMFSDNVVYRI

SEQ ID NO: 5671 - DNA, 2424 bp, Xenopus laevis
  CDS (1)..(2424)
atggattacggaggtgggtttgaggatcatgagctgcgggaggcgcagagggaatatttagatttcctagatgatgatcaagatcaaggcctttaccatgggaaggtgagggacatgattggctccaatgagcaccggctgatcgtcaacctgaatgatgtgaggaggaagaatgacaaaagagccaacctgatgctgaatgatgcgtttgcagaaactattgcttttcagagggcattaaaagatctggtggcttccattgatgcaacatatgccaagcagtttgaggagttcagtgttggattcgaaggcagctttggaagcaagcatgtctctccccgtaccctaacagccagtctcctgggctctttggtttgtgtggaagggatcgtgaccaaatgttccttggttagacccaaagtaatgcgcagtgtccattattgtccagccaccaaaaaaacccttgaaaggaaatactctgaccttacatccctggaagcatttccttctagctccatttatcctacaaaggatgaggaaaacaacccactggaaacagaatatggactgagcacttacaaggaccaccaaaccttgagtatccaagaaatgccagaaaaggccccagctgggcagcttcctcgttctgttgacattattgcagatgatgatctagtagataaatgtaaaccaggtgatagagtgcagatagtagggatataccgttgccttccttccaagcaagggggcttcacatctggaactttcaggaccatattattggctaataacattaagttgatgagtaaggagattgcgccaacattttcagctgatgatgtagctaaaatcaagaaattctgcaaagctcattccaaagacatatttgaacatttaagcaaatcgttggcccccagtattcatggccatgagtatattaagaaggccattttgtgtatgcttcttgggggcaatgagaaggttcttgagaatggcacacgtataagaggagatatcaatgttctcctaataggagatccctcagttgccaagtctcagctattgcgctatgtactgcacaccgctccacgagccatccctactactggtagaggatcctctggagtagggttaacggcagctgtcacaacagaccaggaaactggggagaggcgcttggaagctggggctatggtgcttgcagacagaggagtggtgtgcattgatgaatttgacaaaatgtctgatatggacaggactgcaatccatgaagtgatggagcagggccgagtgacaattgcaaaagcagggatccaggcacgattaaatgcccgatgtagcgtactggcagcagcaaatcctgtttatggaaggtatgaccaatatagaactccaatggagaacattgggttgcaggattctctgctttcaagatttgacttgctttttattgtcctggacaaaatggatgcagacaatgatcaagaaattgctgaccatgttctgaggatgcacagatataggactccaggggaacaagatggttatgcattgcctcttggatgcagtgttgagatctttgccacagatgatccaaatgcctctgatgttacagatcaagagctgcaaatttatgagaaacatgataatttactccatgggccacggaaaaacaagtcaaagattgtgagcatgcagtttattcggaagtatatccatgttgctaaactgataaagcccgtcctgacttccgaagctgctgactacatatctcaggaatatgcaaagatcaggaaccacgatcagataaataatggtagtgccaggacaatgccagttactgccagagcgctggaaaccatgatcagattgtctactgctcacgctaaggtcagaatgagcaaaaccattgagcgccaggatgctgaaactgcacttgagctggtccagtttgcctatttcaagaaggtcttggcaaaagaaaagaaaaaaacagacaaggatctgcatgatgaaaacttaagtcaagacacacttagccaagagagtgttcggaaaagttctagacgtgcaggaaaaattgctgactctcaagatgatccaatggacccatactcttttagtgagcaagatagcagtctaaatgaaaacctttctcagagtttaagacctcaacggaaaaaagcagaaagtcaagatggcaagcggtccttgagtcaaaacaggaccaaagagtttaaagctgccctcctgaaagcctttaagagcagtcggtcacagtctgttgcggtcagtcagctgctggagctcatcaacaaggggaatccagagccttttgaacggagtgaagtaaaggaggccttggacaatatgcagaatgacaatcaggtcatggtgtcagaagatgtggttttcctaatctaa

SEQ ID NO: 5672 - protein, 807 aa, Xenopus laevis
MDYGGGFEDHELREAQREYLDFLDDDQDQGLYHGKVRDMIGSNEHRLIVNLNDVRRKNDKRANLMLNDAFAETIAFQRALKDLVASIDATYAKQFEEFSVGFEGSFGSKHVSPRTLTASLLGSLVCVEGIVTKCSLVRPKVMRSVHYCPATKKTLERKYSDLTSLEAFPSSSIYPTKDEENNPLETEYGLSTYKDHQTLSIQEMPEKAPAGQLPRSVDIIADDDLVDKCKPGDRVQIVGIYRCLPSKQGGFTSGTFRTILLANNIKLMSKEIAPTFSADDVAKIKKFCKAHSKDIFEHLSKSLAPSIHGHEYIKKAILCMLLGGNEKVLENGTRIRGDINVLLIGDPSVAKSQLLRYVLHTAPRAIPTTGRGSSGVGLTAAVTTDQETGERRLEAGAMVLADRGVVCIDEFDKMSDMDRTAIHEVMEQGRVTIAKAGIQARLNARCSVLAAANPVYGRYDQYRTPMENIGLQDSLLSRFDLLFIVLDKMDADNDQEIADHVLRMHRYRTPGEQDGYALPLGCSVEIFATDDPNASDVTDQELQIYEKHDNLLHGPRKNKSKIVSMQFIRKYIHVAKLIKPVLTSEAADYISQEYAKIRNHDQINNGSARTMPVTARALETMIRLSTAHAKVRMSKTIERQDAETALELVQFAYFKKVLAKEKKKTDKDLHDENLSQDTLSQESVRKSSRRAGKIADSQDDPMDPYSFSEQDSSLNENLSQSLRPQRKKAESQDGKRSLSQNRTKEFKAALLKAFKSSRSQSVAVSQLLELINKGNPEPFERSEVKEALDNMQNDNQVMVSEDVVFLI

SEQ ID NO: 5673 - DNA, 2916 bp, Saccharomyces cerevisiae
  CDS (1)..(2916)
atggaaggctcaacgggatttgatggagacgctactacttttttcgctccagacgctgtgtttggtgacagagtgcgcagatttcaagagtttttagatactttcacctcatacagagactctgtaaggtccatacaagtttacaacagcaataacgcggccaactacaacgatgatcaagatgacgcagacgaacgagatttgctaggtgatgacgacggtgatgatcttgaaaaggaaaagaaagcagcatcgtccacctcattgaatatactccctcacaggattatcatctcgcttgatgacttgagagaattcgacaggtcgttctggtcgggcattttagtcgaaccagcatacttcatcccgcctgccgaaaaggcgcttactgacctagcagattccatggacgatgttccacatcccaatgcctctgcagtatcgtctcgccatccttggaagctttcgttcaaaggctcatttggtgcacacgcattgtctcctcgtactctaacggcacaacatttaaacaaactggtctctgttgagggtatcgtaactaagacttcgttggtcaggccaaagcttatcagatctgtccactacgcggcaaagactggtagattccattacagagattatacagatgctactacaactctcaccacccgcatcccaacgcctgccatctatccaacggaggacactgaaggtaacaaactaaccaccgaatatgggtatagtacgttcatagaccatcagcgtatcactgtgcaagaaatgcccgaaatggcccccgctggccaacttcccaggtccattgacgtcattctcgatgacgaccttgtggacaagaccaagccaggtgacagagttaacgttgtcggggtattcaagtcgcttggtgctggtggcatgaaccagtccaactctaatacattgatcgggttcaaaactctgatcctaggtaatacggtgtatcctctccacgccagatccacgggtgtcgctgcgagacaaatgttgacagatttcgatataagaaatatcaataaactatccaaaaaaaaggacattttcgatatcttgtctcaatctttagcgccttctatttatggacatgaccatataaagaaagccattttattgatgctcatgggaggtgtggagaaaaatttagaaaatggctcgcatttaagaggtgacatcaatatcctaatggtgggtgatccatccactgccaagtcccaattgctaaggtttgtgttgaatacagcatcactggcaattgctactactggtagaggttcttccggtgtcggtttgaccgcagcggtcactactgatagggaaacaggtgaaagaagactagaggctggtgccatggttcttgctgaccgcggggttgtatgtattgatgaatttgataagatgacagatgtggatagagtcgccattcatgaagtaatggaacaacaaacggtgacgattgccaaagcaggtattcacacaacattaaatgctcgttgtagtgttattgctgccgcaaatcccgtttttgggcagtacgatgtcaatagagatccacaccaaaacattgccctaccggactcgctgttgtctcgttttgatttactatttgttgtgacagacgatatcaatgaaatcagagatagatccattagtgagcatgtcttaagaacacacagatatttgcctccaggttatttagagggtgaacctgtgagagagcgtttgaatttatcattagccgttggggaggatgcagatataaatcctgaagagcattccaactccggggctggtgtagaaaatgaaggagaagatgatgaagaccatgtcttcgaaaagttcaaccccttattacaagcaggtgctaagttagcaaaaaacaaaggtaactataacggtacagaaattccaaagctagtcaccatcccattcttaagaaagtacgttcaatatgccaaggaaagggttattccacagttaacacaagaagccatcaatgttattgtgaaaaattatactgatttaagaaacgatgataataccaaaaaatcgcccattactgcaagaactttggagactttgatcagattagccacagctcacgccaaagtcaggttatccaaaacagtcaacaaggtggatgctaaagtggctgccaatctactaaggtttgcactattgggtgaggatatcggcaatgatatcgatgaagaggaaagtgaatacgaagaagctttgtcgaagaggtctccacagaaatcaccgaaaaaaagacaaagagtcagacaaccagcaagcaactctggatccccaatcaaatctactccaagaaggtcaacggcatcttccgttaatgccacgccatcgtcagcacgcagaatattacgttttcaagatgacgaacagaacgctggtgaagacgataacgatataatgtcaccgcttcctgcggatgaggaagctgaattacaaagaaggcttcaactggggttgagagtgtctccaagacgtagagaacatcttcacgcacctgaggaaggttcgtcgggacctcttaccgaggtcggtactccaagattacctaacgtatcttctgcaggtcaggatgatgagcaacaacagtcagttatttcttttgacaatgtggagcctggtaccatttctactggtagattgtctttaatctcaggtattattgcgcgtctgatgcaaacagaaatatttgaagaagaatcctatcctgtggcctctttgttcgaaagaatcaacgaagaactaccggaggaggaaaaattctccgctcaagaatatttagcaggtttgaagatcatgtcggacagaaataacttaatggttgctgacgataaagtttggagagtctga

SEQ ID NO: 5674 - protein, 971 aa, Saccharomyces cerevisiae
MEGSTGFDGDATTFFAPDAVFGDRVRRFQEFLDTFTSYRDSVRSIQVYNSNNAANYNDDQDDADERDLLGDDDGDDLEKEKKAASSTSLNILPHRIIISLDDLREFDRSFWSGILVEPAYFIPPAEKALTDLADSMDDVPHPNASAVSSRHPWKLSFKGSFGAHALSPRTLTAQHLNKLVSVEGIVTKTSLVRPKLIRSVHYAAKTGRFHYRDYTDATTTLTTRIPTPAIYPTEDTEGNKLTTEYGYSTFIDHQRITVQEMPEMAPAGQLPRSIDVILDDDLVDKTKPGDRVNVVGVFKSLGAGGMNQSNSNTLIGFKTLILGNTVYPLHARSTGVAARQMLTDFDIRNINKLSKKKDIFDILSQSLAPSIYGHDHIKKAILLMLMGGVEKNLENGSHLRGDINILMVGDPSTAKSQLLRFVLNTASLAIATTGRGSSGVGLTAAVTTDRETGERRLEAGAMVLADRGVVCIDEFDKMTDVDRVAIHEVMEQQTVTIAKAGIHTTLNARCSVIAAANPVFGQYDVNRDPHQNIALPDSLLSRFDLLFVVTDDINEIRDRSISEHVLRTHRYLPPGYLEGEPVRERLNLSLAVGEDADINPEEHSNSGAGVENEGEDDEDHVFEKFNPLLQAGAKLAKNKGNYNGTEIPKLVTIPFLRKYVQYAKERVIPQLTQEAINVIVKNYTDLRNDDNTKKSPITARTLETLIRLATAHAKVRLSKTVNKVDAKVAANLLRFALLGEDIGNDIDEEESEYEEALSKRSPQKSPKKRQRVRQPASNSGSPIKSTPRRSTASSVNATPSSARRILRFQDDEQNAGEDDNDIMSPLPADEEAELQRRLQLGLRVSPRRREHLHAPEEGSSGPLTEVGTPRLPNVSSAGQDDEQQQSVISFDNVEPGTISTGRLSLISGIIARLMQTEIFEEESYPVASLFERINEELPEEEKFSAQEYLAGLKIMSDRNNLMVADDKVWRV

SEQ ID NO: 5675 - DNA, 2601 bp, Drosophila melanogaster
  CDS (1)..(2601)
atgtcaagccccgctcgttcgcccagtgttggaggtgcgacgcccaaacaaggcgcccgcacacccactagaggcattgcgtcgcaagatgtggagacacccatgcgcatgggtcccgggagggctgtccggccctcggacaacatcagtttgccgcccacctcgccgggaaacatcagcttgccagccaccagtccggctcgaggattgggtgcgaacatgagcgagatcgatctgagttcgccgctgaactacggcacccccagctcgatggggtccattcgaacccctcgttccggaattagaggcactccgctgcgggcgcggcccgatataagaacggacaagcgcatccgccaggtggccatcggtgggggctctgggctcgaaccaattcctgagaagggctctgaaaccaccgatcctgtatcggaatcttcgcaagcacctcagctcgtcgtctggggaaccaatgttgttgtcagccagtgcaaatccaagttcaagtcgtttattatgcgctttattgaccccagtgccgagcaggacgaaatctccgagaatattgatgttaaccagccactgtatcttcagaagctggaggagattcacacattggaggagccctatctgaatctcaactgtgcccatctcaagacctttgatcaggacttgtaccgccagttgatctgctatccgcaggaggttattcctggctttgatatggccataaacgagatgttctttgagcgttatcctgccgctcttctggaacaccagattcaagtgcgccccttcaacgcggacaagacacgcaacatgcgatccctaaatcccgaggatatggaccagttgatcagcattagtggcatggtcattcgctcgtcgaacgtcattcccgagatgcgcgaagcctttttcagttgcaacatctgttccttcagcacaaccgtcgaggtggaccgcggtcgcattaaccagcccacgctctgcaccaactgcaacacgaaccactgcttccgtttaatccacaatcgatcggagtttacggataagcagcttgtcaaacttcaggagtctccagatgacatggcggcgggacagactccgcataatgtgcttttgtatgctcacaacgatctggtggacaaggtgcagcctggtgatcgcgtcacggtcacaggcatctatcgggcgacgccactgaagactggaggcctcagttcgtcggtaaaaagtgtgtataagacgcacgtggatgtggttcacttccggaaggtggacaacaagcgactgtacgaggatgaggagggtaaggatcacatcttcccgccagaacgcgttgagctgctacaattgctggccaagaaaccggacatctacgaccgcttggccagggccattgccccatctatttacgagaacgacgacatcaagaaaggcatcttgctgcagctctttggtggcaccaagaagaagcatgcaactctcggccgccagaatttcagatcggaaattcacctgctgttatgcggtgatccgggtacttccaagtcccagatgctgcagtacgtcttcaacctcgtgccaagatcacagtacacctccggtcgcggttcttcggccgtcggtttgactgcctatgtgaccaaagatccggagactcgccagctggttctgcaaacaggtgcactggttttggccgataatggagtttgctgcattgacgagtttgacaagatgaacgactcgacacgcagtgtgctgcacgaggtgatggagcagcagacactgagtattgccaaggcgggaatcatctgtcagctaaacgcgaggacctcgattcttgctgccgccaatcccgccgagtctcagtggaataagcgcaagaacatcattgataacgtccagcttccgcacaccctgttgtcccgcttcgacctaatctttctggtcctggatccccaggatgagatctttgacaagcgactggccagccatttggtatctttgtactatgtgacgcgtcatgaggaggaggataccatgtttgacatgagcgtcctgcgcgactacatcgcctatgcccgcgaacatctgtcgcctacgttgtcggatgaagcgcaacaacgactcattcaggcctacgtggacatgcgaaaggtgggcgccggtcgtggccagatctctgcttacccgcgccagctggagagtctcatccgactgtcggaggcgcacgccaaggtgcgtctcagcaaccaggtggaattgctggacgtggaggaggcttggcggcttcatcgcgaggctctcaagcagtcggccacggatcccctgtccggcaaaattgacgtgggcattctcaccaccggcttatcaacagccgctcgcaaaaagcgcgccgatctggtggcagccatcaaggaaaacctcaagaagaagggcaaagttctcacagttccctatcagaaactgtttagcgatattaaggaaggatcccaaattatgatcacacgcgagcaatttgaagatgccctgaaggaggtgcaagatgagggcgcaattgttgtcatgggaaagaacaccattcgtatttgttaa

SEQ ID NO: 5676 - protein, 866 aa, Drosophila melanogaster
MSSPARSPSVGGATPKQGARTPTRGIASQDVETPMRMGPGRAVRPSDNISLPPTSPGNISLPATSPARGLGANMSEIDLSSPLNYGTPSSMGSIRTPRSGIRGTPLRARPDIRTDKRIRQVAIGGGSGLEPIPEKGSETTDPVSESSQAPQLVVWGTNVVVSQCKSKFKSFIMRFIDPSAEQDEISENIDVNQPLYLQKLEEIHTLEEPYLNLNCAHLKTFDQDLYRQLICYPQEVIPGFDMAINEMFFERYPAALLEHQIQVRPFNADKTRNMRSLNPEDMDQLISISGMVIRSSNVIPEMREAFFSCNICSFSTTVEVDRGRINQPTLCTNCNTNHCFRLIHNRSEFTDKQLVKLQESPDDMAAGQTPHNVLLYAHNDLVDKVQPGDRVTVTGIYRATPLKTGGLSSSVKSVYKTHVDVVHFRKVDNKRLYEDEEGKDHIFPPERVELLQLLAKKPDIYDRLARAIAPSIYENDDIKKGILLQLFGGTKKKHATLGRQNFRSEIHLLLCGDPGTSKSQMLQYVFNLVPRSQYTSGRGSSAVGLTAYVTKDPETRQLVLQTGALVLADNGVCCIDEFDKMNDSTRSVLHEVMEQQTLSIAKAGIICQLNARTSILAAANPAESQWNKRKNIIDNVQLPHTLLSRFDLIFLVLDPQDEIFDKRLASHLVSLYYVTRHEEEDTMFDMSVLRDYIAYAREHLSPTLSDEAQQRLIQAYVDMRKVGAGRGQISAYPRQLESLIRLSEAHAKVRLSNQVELLDVEEAWRLHREALKQSATDPLSGKIDVGILTTGLSTAARKKRADLVAAIKENLKKKGKVLTVPYQKLFSDIKEGSQIMITREQFEDALKEVQDEGAIVVMGKNTIRIC

SEQ ID NO: 5677 - DNA, 3533 bp, Homo sapiens
  CDS (212)..(2803)
gggtctcgcggtttgggagcgctactcgccaggtggactcggagtccgcgagcgtcgtcggcaagcggccgcctttccacggtaaccgcgcgccggcggggagggcgtggcgcggagccgacgggaacgtccgcgctgcggagcagggcagggaagccgggaggcgggcccggcccgagcttgtccttgtcgcgcaggtactccgagcactatgtcgtccccggcgtcgaccccgagccgccgcggcagccggcgtggaagggccacccccgcccagacgcctcggagtgaggatgccaggtcatctccctctcagagacgtagaggcgaggattccacctccacgggggagttgcagccgatgccaacctcgcctggagtggacctgcagagccctgctgcgcaggacgtgctgttttccagccctccccaaatgcattcttcagctatccctcttgactttgatgttagttcaccactgacatacggcactcccagctctcgggtagagggaaccccaagaagtggtgttaggggcacacctgtgagacagaggcctgacctgggctctgcacagaagggcctgcaagtggatctgcagtctgacggggcagcagcagaagatatagtggcaagtgagcagtctctaggccaaaaacttgtgatctggggaacagatgtaaatgtggcagcatgcaaagaaaactttcagagatttcttcagcgttttattgaccctctggctaaagaagaagaaaatgttggcatagatattactgaacctctatacatgcaacgacttggggagattaatgttattggtgagccatttttaaatgtgaactgtgaacacatcaaatcatttgacaaaaatttgtacagacaactcatctcttacccacaggaagttattccaacttttgacatggctgtcaatgaaatcttctttgaccgttaccctgactcaatcttagaacatcagattcaagtaagaccattcaacgcattgaagactaagaatatgagaaacctgaatccagaagacattgaccagctcatcaccatcagcggcatggtgatcaggacatcccagctgattcccgagatgcaggaggccttcttccagtgccaagtgtgtgcccacacgacccgggtggagatggaccgcggccgcattgcagagcccagtgtgtgcgggcgctgccacaccacccacagcatggcactcatccacaaccgctccctcttctctgacaagcagatgatcaagcttcaggagtctccggaagacatgcctgcagggcagacaccacacacagttatcctgtttgctcacaatgatctcgttgacaaggtccagcctggggacagagtgaatgttacaggcatctatcgagctgtgcctattcgagtcaatccaagagtgagtaatgtgaagtctgtctacaaaacccacattgatgtcattcattatcggaaaacggatgcaaaacgtctgcatggccttgatgaagaagcagaacagaaacttttttcagagaaacgtgtggaattgcttaaggaactttccaggaaaccagacatttatgagaggcttgcttcagccttggctccaagcatttatgaacatgaagatataaagaagggaattttgcttcagctctttggcgggacaaggaaggattttagtcacactggaaggggcaaatttcgggctgagatcaacatcttgctgtgtggcgaccctggtaccagcaagtcccagctgctgcagtacgtgtacaacctcgtccccaggggccagtacacgtctgggaagggctccagtgcagttggcctcactgcgtacgtaatgaaagaccctgagacaaggcagctggtcctgcagacaggtgctcttgtcctgagtgacaacggcatctgctgtatcgatgagttcgacaagatgaatgaaagtacaagatcggtattgcatgaagtcatggaacagcagactctgtccattgcaaaggctgggatcatctgtcagctcaatgcgcgcacctctgtcctggcagcagcaaatcccattgagtctcagtggaatcctaaaaaaacaaccattgaaaacatccagctgcctcatactttattatcaaggtttgatttgatcttcctcttgctggaccctcaggacgaagcctatgacaggcgtctggctcaccacctggtcgcactgtactaccagagcgaggagcaggcagaggaggagctcctggacatggcggtgctaaaggactacattgcctacgcgcacagcaccatcatgccgcggctaagtgaggaagccagccaggctctcatcgaggcttatgtagacatgaggaagattggcagtagccggggaatggtttctgcataccctcgacagctagagtcattaatccgcttagcagaagcccatgctaaagtaagattgtctaacaaagttgaagccattgatgtggaagaggccaaacgcctccatcgggaagctctgaagcagtctgcaactgatccccggactggcatcgtggacatatctattcttactacggggatgagtgccacctctcgtaaacggaaagaagaattagctgaagcattgaaaaagcttattttatctaagggcaaaacaccagctctaaaataccagcaactttttgaagatattcggggacaatctgacatagcaattactaaagatatgtttgaagaagcactgcgtgccctggcagatgatgatttcctgacagtgactgggaagaccgtgcgcttgctctgaagccttgtgagcaaggaaggctccctgcatgtcctgcttgctgcacgccacatgggtgtggtctgcatctcagttggccgccatcagtgtaaatagagcttaaagtcatggtttggctgcataaaaattttctaacttgggttcaatatttgtagtgaagtatctgttttcatttttttcacgttataaataaaaatactatgctggccgggcgcggtggctcacacctgtaatcccagcactttgggaggccaatgtgggtggatcatgaggtcaggagttcaagaccagcctagccaagatggtgaaaccccgtctctagtaaagataacaaaaaattagctgggcttgatggcatgcgcctgtaatcccagctactcgggaggttgaggcaggagaatcgcttaaacccaggcggcagaggttgcagtgagccaagatcgcgccactgcactccagcctcagcaatagagtgagactgtctcaaaaaaaaaaaaaaaaaaaaaacctgccaattttcaaacataccgtagagattattttcaggtgccattttatagtatagcagcagggcttttactctgtgtatgcacagatgcagtctggggcatggtttgtgtgctggactttctcatggccatcatcagtatgcttatggatttgatgacaggcatagcctgggcatatcacctcattggtaaagggctagagcctttcttttttatggcac

SEQ ID NO: 5678 - protein, 863 aa, Homo sapiens
MSSPASTPSRRGSRRGRATPAQTPRSEDARSSPSQRRRGEDSTSTGELQPMPTSPGVDLQSPAAQDVLFSSPPQMHSSAIPLDFDVSSPLTYGTPSSRVEGTPRSGVRGTPVRQRPDLGSAQKGLQVDLQSDGAAAEDIVASEQSLGQKLVIWGTDVNVAACKENFQRFLQRFIDPLAKEEENVGIDITEPLYMQRLGEINVIGEPFLNVNCEHIKSFDKNLYRQLISYPQEVIPTFDMAVNEIFFDRYPDSILEHQIQVRPFNALKTKNMRNLNPEDIDQLITISGMVIRTSQLIPEMQEAFFQCQVCAHTTRVEMDRGRIAEPSVCGRCHTTHSMALIHNRSLFSDKQMIKLQESPEDMPAGQTPHTVILFAHNDLVDKVQPGDRVNVTGIYRAVPIRVNPRVSNVKSVYKTHIDVIHYRKTDAKRLHGLDEEAEQKLFSEKRVELLKELSRKPDIYERLASALAPSIYEHEDIKKGILLQLFGGTRKDFSHTGRGKFRAEINILLCGDPGTSKSQLLQYVYNLVPRGQYTSGKGSSAVGLTAYVMKDPETRQLVLQTGALVLSDNGICCIDEFDKMNESTRSVLHEVMEQQTLSIAKAGIICQLNARTSVLAAANPIESQWNPKKTTIENIQLPHTLLSRFDLIFLLLDPQDEAYDRRLAHHLVALYYQSEEQAEEELLDMAVLKDYIAYAHSTIMPRLSEEASQALIEAYVDMRKIGSSRGMVSAYPRQLESLIRLAEAHAKVRLSNKVEAIDVEEAKRLHREALKQSATDPRTGIVDISILTTGMSATSRKRKEELAEALKKLILSKGKTPALKYQQLFEDIRGQSDIAITKDMFEEALRALADDDFLTVTGKTVRLL

SEQ ID NO: 5679 - DNA, 2589 bp, Mus musculus
  CDS (1)..(2589)
atgtcgtccccggcatccaccccgagccgccgcagcagccgacgcggacgagtcaccccaacccagtcccttcgaagtgaggaaagcaggtcgtcacccaatcggagacgtagaggcgaagattcttccaccggagagctactgccaatgcccacctcaccaggagccgacctgcagagcccacctgcacagaatgccttgttttccagccctcctcagatgcattctttagctattcctttggactttgatgttagttcaccattgacatatggcactcccagctcgcgagtggaaggaaccccaagaagtggggtgagaggcacacctgtaaggcagaggccagatctgggctcagcacgaaagggtttgcaggtggatctgcagtctgatggcgcagcagcagaagacatcgtaccaagtgaacagtctctaggccaaaagcttgtgatttggggaacagatgtgaatgtggcaacatgtaaagagaattttcagagattccttcagtgttttactgatcctctggccaaagaagaagaaaatgttggcatagatattactcaacctttgtacatgcaacaacttggagagattaatattacaggagagccatttttaaatgtgaactgcgaacacataaaatcatttagcaaaaatctgtatagacagctcatctcctacccacaggaggttataccaacctttgacatggctgtcaatgagatcttctttgaccgttatcctgactccatcttagaacatcagattcaagtcagaccttttaatgcgttgaagacaaagagtatgagaaacttgaatccagaagacattgatcagctcatcaccatcagtggcatggtcatcagaacatcacagctgattccggagatgcaggaggcctttttccaatgccaagtctgtgcccacaccacccgggtggagatagatcgaggcagaattgctgagccctgcagttgtgtgcactgccacactacccacagcatggcactgatccacaaccgatcattcttctctgacaagcaaatgatcaaacttcaagagtctcctgaagacatgcctgctgggcagacacctcacactattgtcctttttgcccacaatgaccttgttgacaaggttcaaccaggggacagagtgaacgtcacaggcatatatcgagcagtaccaattcgagttaatccaagagtgagcaacgtgaagtctgtctataaaacccacattgatgtcattcattatcggaaaacggatgcaaaacgtctgcatggccttgatgaagaagcagaacagaaacttttttcagagaaacgtgtgaaattgcttaaggaactttccaggaagccagatatttatgagcggcttgcttcagccttggctcccagcatttatgaacatgaagatatcaaaaagggaatcttacttcagctctttggtggaacaaggaaggatttcagtcacactgggaggggtaaattccgtgctgagatcaacatccttctgtgtggggaccctggcaccagcaagtcccagctgctacagtatgtgtacaacctggtccccagaggccagtacacgtctggaaaaggctccagtgcggtcggcctcaccgcctatgtgatgaaagaccctgagaccaggcagcttgtcctccagacaggtgccctcgtcctgagtgacaatgggatatgctgcatcgatgagtttgacaaaatgaatgaaagcacaaggtctgtgctgcatgaggtcatggaacagcagactctgtccattgcaaaggctgggatcatctgtcagctcaatgcgcgcacctctgtcctggcagcagcaaatcctattgagtctcagtggaatcctaaaaaaacaaccattgaaaatatccaactaccgcacacattgttgtcaaggtttgatctcattttcctcatgctagaccctcaggatgaggcatatgaccggcgtctagctcatcacctggtttcattgtactaccaaagtgaggagcaagtggaggaggagttcctggacatggccgtgctgaaagactacattgcatatgcccatagtaccatcatgccccgactgagtgaggaggccagccaggctctcattgaggcttatgtaaacatgaggaagattgggagtagccgggggatggtttctgcttaccctcgacagctagagtcattaattcgcttagcagaagcccatgctaaagtaagattttcaaacaaagttgaagcaattgatgtggaagaggcaaaacgcctccaccgggaggctctgaagcagtctgcaactgaccctcgtactggcattgtggatatttctattcttactacaggaatgagtgccacttctcgtaaacggaaagaagaattagctgaagcattgagaaaacttattttatctaagggtaaaacaccagccttaaagtaccaacagctgtttgaggatattcggggacagtctgacacagcaattaccaaggacatgtttgaagaagccctgcgagctttggctgatgatgatttcctaacagtgactgggaagactgtccgcctgctctga

SEQ ID NO: 5680 - protein, 862 aa, Mus musculus
MSSPASTPSRRSSRRGRVTPTQSLRSEESRSSPNRRRRGEDSSTGELLPMPTSPGADLQSPPAQNALFSSPPQMHSLAIPLDFDVSSPLTYGTPSSRVEGTPRSGVRGTPVRQRPDLGSARKGLQVDLQSDGAAAEDIVPSEQSLGQKLVIWGTDVNVATCKENFQRFLQCFTDPLAKEEENVGIDITQPLYMQQLGEINITGEPFLNVNCEHIKSFSKNLYRQLISYPQEVIPTFDMAVNEIFFDRYPDSILEHQIQVRPFNALKTKSMRNLNPEDIDQLITISGMVIRTSQLIPEMQEAFFQCQVCAHTTRVEIDRGRIAEPCSCVHCHTTHSMALIHNRSFFSDKQMIKLQESPEDMPAGQTPHTIVLFAHNDLVDKVQPGDRVNVTGIYRAVPIRVNPRVSNVKSVYKTHIDVIHYRKTDAKRLHGLDEEAEQKLFSEKRVKLLKELSRKPDIYERLASALAPSIYEHEDIKKGILLQLFGGTRKDFSHTGRGKFRAEINILLCGDPGTSKSQLLQYVYNLVPRGQYTSGKGSSAVGLTAYVMKDPETRQLVLQTGALVLSDNGICCIDEFDKMNESTRSVLHEVMEQQTLSIAKAGIICQLNARTSVLAAANPIESQWNPKKTTIENIQLPHTLLSRFDLIFLMLDPQDEAYDRRLAHHLVSLYYQSEEQVEEEFLDMAVLKDYIAYAHSTIMPRLSEEASQALIEAYVNMRKIGSSRGMVSAYPRQLESLIRLAEAHAKVRFSNKVEAIDVEEAKRLHREALKQSATDPRTGIVDISILTTGMSATSRKRKEELAEALRKLILSKGKTPALKYQQLFEDIRGQSDTAITKDMFEEALRALADDDFLTVTGKTVRLL

SEQ ID NO: 5681 - DNA, 2796 bp, Schizosaccharomyces pombe
  CDS (1)..(2796)
atgtcctctagtcagcaaagtggcagagccaatgagttgaggactcctggaagagctaacagctcttcaagagaagcagtggattcttctccgttattttttcctgcttcgtctcctggttctacacgccttacaacaccgaggactacagcgcgtacacctctcgcttcctctcctttactgtttgaatctagttcaccaggtccaaacattcctcagagttcacgttctcatcttttatctcagcgtaatgacttgttccttgacagtagttcgcagagaacaccgcgctcgacaagacgtggagacatccattctagcgtgcaaatgtctaccccatctcgtcgaagagaagttgaccctcaacgtcccggggtaagcactcctagtagcttgttgttttctgggtcagatgcactcacgtttagtcaggcgcacccaagcagtgaagtagctgatgacactgtccgtgtcatttggggaacaaatgtatctattcaagaaagtatcgcttcctttcgtggatttctacgtgggtttaagaaaaagtatcgacctgaatacagaaatgaacttatgccacctcctgatgccgaacaactagtgtatattgaagcgctacgaaacatgcgtattatgggtttggaaatattaaatcttgatgttcaggatttaaagcattatcccccaaccaagaagctatatcaccagctttactcataccctcaagaaatcattcctatcatggatcaaaccattaaagacgttatgctagacttgttaggaactaatcctcccgaagatgttcttaatgacattgagcttaaaatttacaaaattcgtccttttaatcttgaaaaatgcattaatatgcgtgatcttaatcctggtgacattgacaaattgatctctattaaaggtctggtacttaggtgtacacctgtaatacccgacatgaagcaagcattttttcgatgttcagtttgtggtcattgtgttaccgtggaaatcgatagagggcgaattgctgagcccataaaatgccctagagaagtctgtggtgctacaaatgcaatgcagctaattcataatcgttctgaattcgccgataagcaagttattaaactccaagagacacctgacgtggtaccggatggccaaaccccacactctgtaagtctgtgcgtatatgatgaactggttgactctgctagagcaggagatcgtatagaagtcactgggatttttcgctgtgtaccagttcgtttgaaccctcgcatgcgtactgtaaaatcattatttaaaacttatgtcgacgttgttcacataaaaaagcaggacaaacgtcgtttgggtacggatccttctacgttggaaagcgatattgctgaagatgctgctttacaaattgatgaagtacggaaaatatcagacgaagaagtggaaaaaattcaacaagtttcaaagcgggacgatatatacgatattctttcccggtctctggcacctagcatttacgaaatggatgatgttaaaaaggggcttttgctacagctatttggtggaacgaacaagtcttttcataaaggcgcaagtccgagatatcgtggagacataaatatcttgatgtgtggtgatccatctacgtctaagtctcaaattttgaagtatgtccataagatagcacccagaggtgtttacactagtggcaagggttcatctgctgttggtttaactgcctatattactcgtgaccaagacacgaagcaactagtcttggaaagtggtgctttggtactgtcagatgggggcatttgctgcattgatgagtttgacaaaatgtccgatgctacacgttctattcttcatgaagttatggagcagcaaaccgttacagttgccaaggctggcattattactactttgaacgctaggacttctattttagctagtgcaaatccaattggaagcaaatacaatccagacttgcctgtcaccaaaaatattgatcttccgcctactctcttatctagatttgatttggtgtatttaatattagaccgcgtggatgaaacgctggataggaagctcgcaaatcatattgtttctatgtacatggaagatactcctgaacatgctacagatatggaggtctttagtgtggaatttttgacaagctatatcacatatgctagaaataatattaatcctgtcattagtgaagaggcagcaaaggaactagtgaatgcttatgttggtatgcgaaagcttggggaggatgtgcgagcatctgagaaaagaattactgctacaacaagacaactggaatcaatgattcgtctatctgaggcccatgcgaaaatgcatcttcgcaacgttgttgaggtaggagatgttcttgaagctgctcgcttgattaagaccgctattaaggattatgcaactgatcctgcaacaggaaagatttctcttgacctaatttatgttaatgaaagagagactttggtacctgaagatatggtcaaagaactggcgaatttaatttcaaatttaactgtgggtggaaaaactatgttggtcagtcaattgttaactcggtttcgtgagcagagttctactcgcttagatgcttctgatttcgaagcttgtctgggtgcttttcgtgagcagagttctactcgcttagatgcttctgatttcgaagcttgtctgggtgctttggaaaggcgaggacgtattaaggttattaccagtgctggacatcgcattgtacgttcaattgcacagactgattaa

SEQ ID NO: 5682 - protein, 931 aa, Schizosaccharomyces pombe
MSSSQQSGRANELRTPGRANSSSREAVDSSPLFFPASSPGSTRLTTPRTTARTPLASSPLLFESSSPGPNIPQSSRSHLLSQRNDLFLDSSSQRTPRSTRRGDIHSSVQMSTPSRRREVDPQRPGVSTPSSLLFSGSDALTFSQAHPSSEVADDTVRVIWGTNVSIQESIASFRGFLRGFKKKYRPEYRNELMPPPDAEQLVYIEALRNMRIMGLEILNLDVQDLKHYPPTKKLYHQLYSYPQEIIPIMDQTIKDVMLDLLGTNPPEDVLNDIELKIYKIRPFNLEKCINMRDLNPGDIDKLISIKGLVLRCTPVIPDMKQAFFRCSVCGHCVTVEIDRGRIAEPIKCPREVCGATNAMQLIHNRSEFADKQVIKLQETPDVVPDGQTPHSVSLCVYDELVDSARAGDRIEVTGIFRCVPVRLNPRMRTVKSLFKTYVDVVHIKKQDKRRLGTDPSTLESDIAEDAALQIDEVRKISDEEVEKIQQVSKRDDIYDILSRSLAPSIYEMDDVKKGLLLQLFGGTNKSFHKGASPRYRGDINILMCGDPSTSKSQILKYVHKIAPRGVYTSGKGSSAVGLTAYITRDQDTKQLVLESGALVLSDGGICCIDEFDKMSDATRSILHEVMEQQTVTVAKAGIITTLNARTSILASANPIGSKYNPDLPVTKNIDLPPTLLSRFDLVYLILDRVDETLDRKLANHIVSMYMEDTPEHATDMEVFSVEFLTSYITYARNNINPVISEEAAKELVNAYVGMRKLGEDVRASEKRITATTRQLESMIRLSEAHAKMHLRNVVEVGDVLEAARLIKTAIKDYATDPATGKISLDLIYVNERETLVPEDMVKELANLISNLTVGGKTMLVSQLLTRFREQSSTRLDASDFEACLGAFREQSSTRLDASDFEACLGALERRGRIKVITSAGHRIVRSIAQTD

SEQ ID NO: 5683 - DNA, 2592 bp, Xenopus laevis
  CDS (1)..(2592)
atgtcctctccaacatccacaccaagccgcaggaggaacaaacgtgggcgaggcagtaaccctccaactcctcatggagaggaagtgcagtctcctccgtcacagagacgacggacagaagattccacatcaattggtgaactactgcccatgccaacctctccttcaggtgacgttcagagccccagtggacaagagctcttgttttctagccctgtaccatcaagacattcagcccatcaaagtgagcttgatcttagttctcctctgacttatggcacccctagctcaagggttgagggtaccccaagaagtggtatccgagggacacctgctagacagagacctgacttgggatcagcacggaaagttaagcaagtggatttacattcagaccagcctgctgcagaggagctagttacgagtgagcaatctttgggacagaagttggtgatctggggaactgatgtcaatgtagccacttgcaaagaaaagtttcagcgttttgttcagcgtttcattgatccttcagccaaagaagaggataatgtaggactggatctgaatgagcctatatatatgcagcgacttgaagagataaatgtggtaggtgatccatttctcaacattgactgtgaccatctcagaaactttgaccaggatctttacaggcagctagtgtgctacccacaggaagtcattccaacatttgatatggctgctaatgagattttctttgagcggtatcctgactccattttggagcaccagattcaagttcgaccctataatgcattgaaaactaggaatatgagaagcctaaatcctgaagatattgatcaacttatcacaattagtggcatggttatcagaacttcacaaatcatccctgagatgcaggaagccttttttaaatgtcaagtgtgtgccttcactactcgggtggagattgatcgtggtcggattgcagagccatcggtctgcaaacactgtaacaccacacacagcatggctcttattcacaatcgctctatgttttcagacaagcaaatgattaaactgcaagagtctccagaagatatgcctgctggtcagacccctcatacaactatcctctatggtcataatgacttggtggataaggtacagcctggtgatagagtgaatgtcacaggtatttatagagctgttccaattcgagttaaccctagagttcgaaatgtgaagtctgtttacaaaactcacatcgatgtaattcattaccgaaaaactgattcaaagcggttgcatggtattgatgaagacactgaacagaagttgttcactgaagaaagggttgcaatgttaaaggaactggcagcaaagccagacatctatgagaggcttgctgcagctcttgcaccaagtatatatgagcatgaagatataaaaaagggaattttacttcagttgtttggtgggacacggaaggacttcagccataccggaaggggcaaattccgagctgaagtaaacatacttttgtgtggtgatccaggaacgagtaaatctcagcttctccaatatgtatttaatctggtacctagaggtcagtacacctctggaaagggatccagtgcagttgggttaaccgcatacgtgatgaaggacccagaaacgaggcagttggtactgcagacaggagcattggttcttagtgacaatggtatttgctgcattgatgaatttgacaaaatgaatgagagcactagatctgtgctacatgaagtaatggaacagcaaaccctctccattgctaaggctggaattatctgtcagctgaatgcacgtacatctgttttggctgctgcaaacccggtagagtcacaatggaaccccaagaaaaccactatagaaaatattcagctcccacatacactcttatcaaggtttgatctaatatttttgatgctggatccacaagatgaagcatatgatcgccgcttagcccaccaccttgtggctttgtactaccagagtgaggagcagatgaaagaagagcacttggacatggcagtattaaaggattatattgcatatgctcgcacttatgtgaatccaagacttagtgaagaagcaagccaggctctaatagaggcctatgtcagcatgcggaaaatcggcagtggtcgtggcatggtttctgcctatcccaggcagcttgagtctttaatacgccgagcagaagctcatgcgaaagtacgcttttctaacaaggtggaaacaattgatgtagaagaggccaaacgtcttcatcgtgaggctttgaaacagtctgccactgatcccagaactggcattgttgatatatctattcttacaacaggaatgagtgcaactgctcgaaaacgtaaagaggaattggctcaggttttaaagaagctcatccagtccaagggcaaaactccagcgttaaaataccagcagctctttgaggatctacgtgggcagtctgatgcagccattacaaaagacatgtttgatgaagctttgcatgcccttgcggatgacgactacttaacagtgacaggaaagactgtaaggttgctgtaa

SEQ ID NO: 5684 - protein, 863 aa, Xenopus laevis
MSSPTSTPSRRRNKRGRGSNPPTPHGEEVQSPPSQRRRTEDSTSIGELLPMPTSPSGDVQSPSGQELLFSSPVPSRHSAHQSELDLSSPLTYGTPSSRVEGTPRSGIRGTPARQRPDLGSARKVKQVDLHSDQPAAEELVTSEQSLGQKLVIWGTDVNVATCKEKFQRFVQRFIDPSAKEEDNVGLDLNEPIYMQRLEEINVVGDPFLNIDCDHLRNFDQDLYRQLVCYPQEVIPTFDMAANEIFFERYPDSILEHQIQVRPYNALKTRNMRSLNPEDIDQLITISGMVIRTSQIIPEMQEAFFKCQVCAFTTRVEIDRGRIAEPSVCKHCNTTHSMALIHNRSMFSDKQMIKLQESPEDMPAGQTPHTTILYGHNDLVDKVQPGDRVNVTGIYRAVPIRVNPRVRNVKSVYKTHIDVIHYRKTDSKRLHGIDEDTEQKLFTEERVAMLKELAAKPDIYERLAAALAPSIYEHEDIKKGILLQLFGGTRKDFSHTGRGKFRAEVNILLCGDPGTSKSQLLQYVFNLVPRGQYTSGKGSSAVGLTAYVMKDPETRQLVLQTGALVLSDNGICCIDEFDKMNESTRSVLHEVMEQQTLSIAKAGIICQLNARTSVLAAANPVESQWNPKKTTIENIQLPHTLLSRFDLIFLMLDPQDEAYDRRLAHHLVALYYQSEEQMKEEHLDMAVLKDYIAYARTYVNPRLSEEASQALIEAYVSMRKIGSGRGMVSAYPRQLESLIRRAEAHAKVRFSNKVETIDVEEAKRLHREALKQSATDPRTGIVDISILTTGMSATARKRKEELAQVLKKLIQSKGKTPALKYQQLFEDLRGQSDAAITKDMFDEALHALADDDYLTVTGKTVRLL

SEQ ID NO: 5685 - DNA, 2280 bp, Caenorhabditis elegans
  CDS (1)..(2280)
atgtctaacctcgacaaccccggaatctactatcaggaacgattctttgcgaatgacggagttccagatactggaagagagttgatcgctgaatatcgtcagcttatcactcaattccgcaattttatccgtgatttttccactggaggcttcggaatgatttacagagatcagctgaagcgcaactacttcagccatgaatatcgccttgaaattaacctgaatcatctgaaaaatttcgacgaggacattgagatgaagctgagaaaattcccaggaaaagtgctcccagctctcgaggaagccgccaaaattgtcgctgatgagattaccacgccaagaccaaagggagaggagaagcttcatgatattcaagtgacactgacgcttgacgagtatccaacctcacttcgacaggttaaatctgctcaggtctcccaggttgtcaagatttccggaattattgtggctgctgctcaggttcgctctaaagccactaaagtaaccctccaatgtcgtcagtgcaagcacacaattccagatgtttcgatcaagccaggacttgaaggatttgctcttccaagaacttgtgcagcaccacaacaaggacaaatgcagcgatgcccaatagatccatatattatgctgcccgacaagtgtgaatgtgtcgattatcagactttgaagcttcaggagaatccagaagacgttccacatggagaaatgccacgtcatcttcagcttttcacggagagatatttgactgataaagtggttcctggaaatcgagtcacaattgttggagtttattcgattaaaaagttgattcaaaaaaagggtggtgacaaatctcttcaaggaattcgtacaccatatctcagagttcttggaatccacatggaaacatctggacctggaagaaccaatttcacaacgtttacacctgaagaagagagaatgttcaagactttggctcagaggaaagatgcttatgaacttatcgctaaatcgattgctccatcaatctatggatccgctgatatcaagaaatcgattgcttgtttgttgttcggaggtgctcgtaagaagcttccagatggaattacacgacgtggagacatcaatgttctcttgctcggagatccaggaacagcaaaatctcagttgttgaagttcgttgagcaagtgtctccaattggagtgtacacatctggaaaaggatcatcggctgctggtctcactgcatcagttattcgtgatccacaatcacgctcgttcatcatggaaggtggtgcaatggttctggctgatggtggagtcgtttgtattgatgaattcgataaaatgcgtgaagatgatcgagttgcaattcacgaagcaatggaacaacagaccatttctattgcaaaggctggaattacaactactttgaattctcgttgctcggttctggcggccgctaattcggtttacggaagatgggatgagtcgagaggagatgataatatcgattttatgccaactattctgtctcgtttcgatatgatctacattgtgaaggatactcatgatgttctcaaagatgctaccctcgcgaagcacgtcatcgaagttcatgtgaatgcatctgctgctaaagaacgtgatattgcaggagtcccaaaaacagccacaactgattcagatggtgtgatgacaatgttcgatacggatggtttcttgactatcgagttcctcaagaaattcgtcacatatgctcgtttgaactgtggaccacgtcttactccgcaagcttctgagaagctcgttaatcactacgttaagatgagaaatccagttgtcaatgctgatgcttttaaatcaggaaagaaggctcataattcggcaattccgattaccgttcgtcaactcgaagccattgttcgtattgctgaaagtattgcaaagatggagcttcagcagtttgccactgacaagcacgtcgaggaagcgctccgtctgttccgtgtttcaacaattgaagcggcggcaactggaaatttggcaggagtcgaaggatttacttcaacagctgatcaagaagcattgaatcgtatcgaagtgcaaatgaagaagagattcgcaatcggtacacacgtttctgagcatttgattgttcaagactttgttgctcgtcaacattatagagagtctcttgtcaagaaggttatcgataatttggtccgtcgtggagacttgcaacaaaagatgcaacgcaagatgctctaccgtgttcgataa

SEQ ID NO: 5686 - protein, 759 aa, Caenorhabditis elegans
MSNLDNPGIYYQERFFANDGVPDTGRELIAEYRQLITQFRNFIRDFSTGGFGMIYRDQLKRNYFSHEYRLEINLNHLKNFDEDIEMKLRKFPGKVLPALEEAAKIVADEITTPRPKGEEKLHDIQVTLTLDEYPTSLRQVKSAQVSQVVKISGIIVAAAQVRSKATKVTLQCRQCKHTIPDVSIKPGLEGFALPRTCAAPQQGQMQRCPIDPYIMLPDKCECVDYQTLKLQENPEDVPHGEMPRHLQLFTERYLTDKVVPGNRVTIVGVYSIKKLIQKKGGDKSLQGIRTPYLRVLGIHMETSGPGRTNFTTFTPEEERMFKTLAQRKDAYELIAKSIAPSIYGSADIKKSIACLLFGGARKKLPDGITRRGDINVLLLGDPGTAKSQLLKFVEQVSPIGVYTSGKGSSAAGLTASVIRDPQSRSFIMEGGAMVLADGGVVCIDEFDKMREDDRVAIHEAMEQQTISIAKAGITTTLNSRCSVLAAANSVYGRWDESRGDDNIDFMPTILSRFDMIYIVKDTHDVLKDATLAKHVIEVHVNASAAKERDIAGVPKTATTDSDGVMTMFDTDGFLTIEFLKKFVTYARLNCGPRLTPQASEKLVNHYVKMRNPVVNADAFKSGKKAHNSAIPITVRQLEAIVRIAESIAKMELQQFATDKHVEEALRLFRVSTIEAAATGNLAGVEGFTSTADQEALNRIEVQMKKRFAIGTHVSEHLIVQDFVARQHYRESLVKKVIDNLVRRGDLQQKMQRKMLYRVR

SEQ ID NO: 5687 - DNA, 2205 bp, Homo sapiens
  CDS (1)..(2205)
atgtcgggattcgacgatcctggcattttctacagcgacagcttcgggggcgacgcccaggccgacgaggggcaggcccgcaaatcgcagctgcagaggcgcttcaaggagttcctgcggcagtaccgagtgggcaccgaccgcacgggcttcaccttcaaatacagggatgaactcaagcggcattacaacctgggggagtactggattgaggtggagatggaggatctggccagctttgatgaggacctggccgactacttgtacaagcagccagccgagcacctgcagctgctggaggaagctgccaaggaggtagctgatgaggtgacccggccccggccttctggggaggaggtgctccaggacatccaggtcatgctcaagtcggacgccagcccttccagcattcgtagcctgaagtcggacatgatgtcacacctggtgaagatccctggcatcatcatcgcggcctctgcggtccgtgccaaggccacccgcatctctatccagtgccgcagctgccgcaacaccctcaccaacattgccatgcgccctggcctcgagggctatgccctgcccaggaagtgcaacacagatcaggctgggcgccccaaatgcccattggacccgtacttcatcatgcccgacaaatgcaaatgcgtggacttccagaccctgaagctgcaggagctgcctgatgcagtcccccacggggagatgcccagacacatgcagctctactgcgacaggtacctgtgtgacaaggtcgtccctgggaacagggttaccatcatgggcatctactccatcaagaagtttggcctgaccaccagcaggggccgtgacagggtgggcgtgggcatccgaagctcctacatccgtgtcctgggcatccaggtggacacagatggctctggccgcagctttgctggggccgtgagcccccaggaggaggaggagttccgtcgcctggctgccctcccaaatgtctatgaggtcatctccaagagcatcgccccctccatctttgggggcacagacatgaagaaggccattgcctgcctgctctttgggggctcccgaaagaggctccctgatggacttactcgccgaggagacatcaacctgctgatgctaggggaccctgggacagccaagtcccagcttctgaagtttgtggagaagtgttctcccattggggtatacacgtctgggaaaggcagcagcgcagctggactgacagcctcggtgatgagggacccttcgtcccggaatttcatcatggagggcggagccatggtcctggccgatggtggggtcgtctgtattgacgagtttgacaagatgcgagaagatgaccgtgtggcaatccacgaagccatggagcagcagaccatctctatcgccaaggctgggatcaccaccaccctgaactcccgctgctccgtcctggctgctgccaactcagtgttcggccgctgggatgagacgaagggggaggacaacattgacttcatgcccaccatcttgtcgcgcttcgacatgatcttcatcgtcaaggatgagcacaatgaggagagggatgtgatgctggccaagcatgtcatcactctgcacgtgagcgcactgacacagacacaggctgtggagggcgagattgacctggccaagctgaagaagtttattgcctactgccgagtgaaatgtggcccccggctgtcagcagaggctgcagagaaactgaagaaccgctacatcatcatgcggagcggggcccgtcagcacgagagggacagtgaccgccgctccagcatccccatcactgtgcggcagctggaggccattgtgcgcatcgcggaagccctcagcaagatgaagctgcagcccttcgccacagaggcagatgtggaggaggccctgcggctcttccaagtgtccacgttggatgctgccttgtccggtaccctgtcaggggtggagggcttcaccagccaggaggaccaggagatgctgagccgcatcgagaagcagctcaagcgccgctttgccattggctcccaggtgtctgagcacagcatcatcaaggacttcaccaagcagaaatacccggagcacgccatccacaaggtgctgcagctcatgctgcggcgcggcgagatccagcatcgcatgcagcgcaaggttctctaccgcctcaagtga

SEQ ID NO: 5688 - protein, 734 aa, Homo sapiens
MSGFDDPGIFYSDSFGGDAQADEGQARKSQLQRRFKEFLRQYRVGTDRTGFTFKYRDELKRHYNLGEYWIEVEMEDLASFDEDLADYLYKQPAEHLQLLEEAAKEVADEVTRPRPSGEEVLQDIQVMLKSDASPSSIRSLKSDMMSHLVKIPGIIIAASAVRAKATRISIQCRSCRNTLTNIAMRPGLEGYALPRKCNTDQAGRPKCPLDPYFIMPDKCKCVDFQTLKLQELPDAVPHGEMPRHMQLYCDRYLCDKVVPGNRVTIMGIYSIKKFGLTTSRGRDRVGVGIRSSYIRVLGIQVDTDGSGRSFAGAVSPQEEEEFRRLAALPNVYEVISKSIAPSIFGGTDMKKAIACLLFGGSRKRLPDGLTRRGDINLLMLGDPGTAKSQLLKFVEKCSPIGVYTSGKGSSAAGLTASVMRDPSSRNFIMEGGAMVLADGGVVCIDEFDKMREDDRVAIHEAMEQQTISIAKAGITTTLNSRCSVLAAANSVFGRWDETKGEDNIDFMPTILSRFDMIFIVKDEHNEERDVMLAKHVITLHVSALTQTQAVEGEIDLAKLKKFIAYCRVKCGPRLSAEAAEKLKNRYIIMRSGARQHERDSDRRSSIPITVRQLEAIVRIAEALSKMKLQPFATEADVEEALRLFQVSTLDAALSGTLSGVEGFTSQEDQEMLSRIEKQLKRRFAIGSQVSEHSIIKDFTKQKYPEHAIHKVLQLMLRRGEIQHRMQRKVLYRLK

SEQ ID NO: 5689 - DNA, 2202 bp, Mus musculus
  CDS (1)..(2202)
atgtcgggcttcgacgacccgggcattttctacagcgacagcttcggtggcgaccccggtgcggaagagggccaggcccgcaagtcgcaactgcagaggcgattcaaggagttcctgagacagtaccgagtgggcaccgatcgcacgggcttcaccttcaagtacagagatgaactcaagcggcattacaacctgggtgaatactggatcgaggtggagatggaggacctggccagttttgacgaggaactggctgaccacttgcataaacagccggccgagcacttacagctgcttgaggaagctgccaaggaggtggcagatgaggtgacccggccccggccagctggagatgagctgctccaagacatccaggtcatgctcaagtcagatgccagcccgtcgagcattcggattctgaagtcagacatgatgtcacacctggtgaagatccctggcatcatcatttcagcctctgcagtccgtgccaaggctactcgtatctccattcagtgccgcagctgccacaacaccctcaccaatatcgccatgcccaggcctagagggctatgccttcccaggaagtgcaatatggatcaggctgggcgcccaaagtgcccactggatccatacttcatcatgcctgacaagtgcaagtgtgtggacttccagactctgaaactgcaggagctgcctgatgcagtccctcatggtgagatgcccaggcacatgcagctttattgtgacaggtacctgtgtgacaaggttgttcctgggaacagggtcaccatcatgggcatttattccatcaagaagtttggcttgaaccccagcaagggccgggacagggtaggtgtgggcatccggagctcgtacatccgagtgctgggcatccaggtggacacagatggctctggccgaagctttgctgggtctgtcagcccacaggaagaggaggaatttcgtcgcctggctgccctccccaacatatatgagctcatctccaagagcatttccccctccatctttgggggcatggatatgaagaaggccattgcctgcctgctttttgggggttcccggaagaggctcccagatggactcactcgccgaggtgatatcaacttgctgatgttgggagaccctggtacagccaagtctcagcttctgaagtttgtggagaagtgctctcccattggggtgtacacatctgggaaaggtagcagtgctgcaggcttgactgcctcagtgatacgggacccctcatctcgaaacttcatcatggaaggtggagccatggttctggccgatggtggggttgtctgtattgatgagtttgacaagatgcgggaagatgaccgtgttgcaatccatgaggctatggagcagcagaccatctccattgctaaagctgggatcactaccaccttgaactctcgctgctctgttctggctgcagccaactcagtgtttggccgatgggatgagacaaaaggggaggacaatattgacttcatgcctaccatcttgtcccgatttgatatgatcttcatcgtcaaagatgagcacaatgaggagagggacatgatgctagccaaacatgtgatgactctgcatgtgagtgcactgacacagacacaggctgtggagggtgagatcgacctggccaagatgaagaagttcattgcctactgccgagcgaggtgtggacctcggctatcagcagaggcagcagagaagctgaagaaccgctacatcatcatgcggagtggggctcgtcagcatgagagggacagtgaccggcgttccagcatccccatcactgtgcggcagctggaggctattgtgcgcattgctgaggccctcagtaagatgaaactgcagccctttgccactgaggctgatgtagaggaggcattgagactgttccaggtgtccacactggatgctgctttgtctggcaatctgtcgggggtggagggcttcactacccaggaggaccaggagatgctgagccgcattgagaagcaactcaagcgccgttttgccattggctctcaggtgtctgaacacagcattgtccaggacttcaccaaacagaaatatccagagcacgctatccgaaaggtgctgcagctcatgctacgcaggggtgagatccaacaccgtatgcagcgcaaggtgctctatcgcctcaagtga

SEQ ID NO: 5690 - protein, 733 aa, Mus musculus
MSGFDDPGIFYSDSFGGDPGAEEGQARKSQLQRRFKEFLRQYRVGTDRTGFTFKYRDELKRHYNLGEYWIEVEMEDLASFDEELADHLHKQPAEHLQLLEEAAKEVADEVTRPRPAGDELLQDIQVMLKSDASPSSIRILKSDMMSHLVKIPGIIISASAVRAKATRISIQCRSCHNTLTNIAMPRPRGLCLPRKCNMDQAGRPKCPLDPYFIMPDKCKCVDFQTLKLQELPDAVPHGEMPRHMQLYCDRYLCDKVVPGNRVTIMGIYSIKKFGLNPSKGRDRVGVGIRSSYIRVLGIQVDTDGSGRSFAGSVSPQEEEEFRRLAALPNIYELISKSISPSIFGGMDMKKAIACLLFGGSRKRLPDGLTRRGDINLLMLGDPGTAKSQLLKFVEKCSPIGVYTSGKGSSAAGLTASVIRDPSSRNFIMEGGAMVLADGGVVCIDEFDKMREDDRVAIHEAMEQQTISIAKAGITTTLNSRCSVLAAANSVFGRWDETKGEDNIDFMPTILSRFDMIFIVKDEHNEERDMMLAKHVMTLHVSALTQTQAVEGEIDLAKMKKFIAYCRARCGPRLSAEAAEKLKNRYIIMRSGARQHERDSDRRSSIPITVRQLEAIVRIAEALSKMKLQPFATEADVEEALRLFQVSTLDAALSGNLSGVEGFTTQEDQEMLSRIEKQLKRRFAIGSQVSEHSIVQDFTKQKYPEHAIRKVLQLMLRRGEIQHRMQRKVLYRLK

SEQ ID NO: 5691 - DNA, 2208 bp, Xenopus laevis
  CDS (1)..(2208)
atgtcgggatttgatgatcttggagtctactacagcgatagttttggcggagagcagcaggtgggtgacgatggacaagccaagaaatcgcaactcaagaaacggttcagagagttcctaaggcagtatcgtatcggcaccgaccgcaccggcttcactttcaaatacagagatgaactcaagcgtcactataatcttggagaatactggatcgaggtggaaatggaggacctggctagctttgatgaggatcttgccgattatctgtataaacagccaactgaacatctgcagttgctggaagaggcagcccaggaagtggcagatgaggtgactcgcccacgacctgcaggcgaagagacaatccaggaaatacaagttatgttgcgatctgatgccaaccctgcaaatattcgcagcttgaagtcagagcaaatgtctcatcttgtcaaaattccgggtatcatcattgctgccaccgctgtgagagccaaggctaccaagatttccattcagtgtcgtagctgccgaaatacaattggcaacatagctgtacggcctggtctagagggatatgccatgcctcgtaaatgcaacacggaacaagctggccgtccaaattgcccattggacccttactttattatacctgacaagtgcaaatgtgtagattttcaaactttgaagctccaggagtctccagatgctgtgcctcatggagagctcccacgacatatgcaactgtattgtgacaggtacctgtgtgataaggttgttcctggaaacagagtgacaatcatgggcatttactcaatccggaagagtggaaagacctcaacaaagggccgggatcgagtgggagttgggatccgcagctcctatataagagtagtgggcatccaagtggatactgaaggcacaggaagaagcgcagcaggtgctataactccacaagaggaagaggagtttagacgtttggctgcaaagcctgatatctatgagactgttgctaaaagtattgcaccctccatttatggcagtagtgatatcaagaaggccattgcatgcttactgtttggaggctccagaaaaaggcttccagatggcttgacacgaagaggtgatgtcaatctacttatgcttggagatcctggtacagctaaatcacaactgctgaagtttgtggagcggtgctctcctataggggtttatacatctggcaaaggcagcagtgcagctggcctcactgcttcagttatgagagatccagtgtcccgtaacttcattatggaaggaggtgctatggtgcttgctgatggaggggtggtctgcattgatgagtttgataagatgcgagaagatgacagagttgctatccacgaagccatggagcagcaaactatttccattgcaaaagctggcatcactaccacactaaactcccgctgttctgttttggcagctgccaattcagtatatggacggtgggatgacaccaagggagaagagaatattgacttcatgcctaccatcctttctaggtttgacatgatcttcattgtgaaagatgaacacaacgagcaaagagatatgactcttgccaagcatgttatgaatgtacatctcagcgcacgtacacagagttcttccgttgaaggagaggtggacctcaatacccttaagaaatacattgcctactgcagagcgaaatgtggtccccggctttcagctgaagccgcagaaaagctgaagaaccggtatattcttatgcgcagtggcgctagagagcatgagagagagactgagaagagatcaagtatcccaattacagtcaggcaattggaagccattgttcggatatctgaatctcttggcaagatgaagctacagccttttgctacagagaccgatgtagaggaagcactaaggttgttccaggtatccacattagatgctgctatgtctggaagcctttcaggtgtggaaggctttactacacaggaggatcaggaaatgttatcccgcattgagaaacagatgaagaaacgttttgcaataggttcacaggtgtcagagcacagcattattcaagattttctcaaacagaaataccctgagcacgccattcacaaggtcctgagccttatgatgaggagaggagagattcagcatcgattacagcgcaaagtcctgtaccgcatcaagtag

SEQ ID NO: 5692 - protein, 735 aa, Xenopus laevis
MSGFDDLGVYYSDSFGGEQQVGDDGQAKKSQLKKRFREFLRQYRIGTDRTGFTFKYRDELKRHYNLGEYWIEVEMEDLASFDEDLADYLYKQPTEHLQLLEEAAQEVADEVTRPRPAGEETIQEIQVMLRSDANPANIRSLKSEQMSHLVKIPGIIIAATAVRAKATKISIQCRSCRNTIGNIAVRPGLEGYAMPRKCNTEQAGRPNCPLDPYFIIPDKCKCVDFQTLKLQESPDAVPHGELPRHMQLYCDRYLCDKVVPGNRVTIMGIYSIRKSGKTSTKGRDRVGVGIRSSYIRVVGIQVDTEGTGRSAAGAITPQEEEEFRRLAAKPDIYETVAKSIAPSIYGSSDIKKAIACLLFGGSRKRLPDGLTRRGDVNLLMLGDPGTAKSQLLKFVERCSPIGVYTSGKGSSAAGLTASVMRDPVSRNFIMEGGAMVLADGGVVCIDEFDKMREDDRVAIHEAMEQQTISIAKAGITTTLNSRCSVLAAANSVYGRWDDTKGEENIDFMPTILSRFDMIFIVKDEHNEQRDMTLAKHVMNVHLSARTQSSSVEGEVDLNTLKKYIAYCRAKCGPRLSAEAAEKLKNRYILMRSGAREHERETEKRSSIPITVRQLEAIVRISESLGKMKLQPFATETDVEEALRLFQVSTLDAAMSGSLSGVEGFTTQEDQEMLSRIEKQMKKRFAIGSQVSEHSIIQDFLKQKYPEHAIHKVLSLMMRRGEIQHRLQRKVLYRIK

SEQ ID NO: 5693 - DNA, 2433 bp, Caenorhabditis elegans
  CDS (1)..(2433)
atggacaacattatcggcggtcaagcccagcaagtggaggacaccgacggaactcgtgtgcagaacgagttttccaagtttttgaagagcttcaaagaccagaaaaatgagtttatctacaaatctgcgatgaaggagctcgtgcaaccagaaaagaataccattttcattaacatgcaacatctctacaagttcagtaacaatctcgcaacaactatcgagctgcaatactacagggtctatccattcatgtgcgaagctctacacttggccactttagatgcttgtgatgaaagtgagagacagcaaatgttcaagaagcaattgtacgtttcgctgttcaatctcgatgcgaaaacgaaagttcgtgagctttctgcggacaaagtcggaggcctcgtgcgcattgccggtcagattgtccgaactcacccagtgcatccagaactttcacgggcttgtttcgtgtgtgaggattgcggtgttaccacacgtgatgttcaacagcagttcagatacactcagccaactaaatgtgctaatcctcaatgcatgaatcgtaccagattcagtctcgatgtcaactcatctactttcgtcgacttccagaagattagaattcaggagactcaagcagagttgcctcgtggatcaattccacgtactgtcgatgtgattgttcgaggagaaatggttgaaactgtccaaccaggagataaatgtgacattgttggaactcttatcgtcattccagatattgctcaattgagcactcctggacttcgtgctgagacttcaaatcagaacagaggcagagcgaccgataaaagcgaaggaatcactggattgaaagctcttggagtccgtgatcttacctataaaatggcattcttggcttgtcatattcaacaaaccgagagtcttgttggtggagatgcttcgggagctgttgaggagactgattatcttgatttatggtcgaaaatgtcaacagaagatcgtgcaacactgaagaaaatgagtgacgataagaaaatcgagaagaacattgtcgattcacttttcccgaacatttatggaaaccacgaagttaagcttggagttcttctgatgcttcttggaggtgtcgcgaagaagagcagggacgaaggaacttcactgagaggtgatatcaacgtttgtcttgttggagatccatcaactgccaagtcgcaagttctgaaagctgtggaagagttcagtccaagagctatttacacttctggaaaagcatcttcagctgctggtctgactgctgctgttgtaaaagacgaggaatcgttcgagtttgtcattgaagctggagctctcatgcttgccgacaatggagtttgttgtattgatgagttcgacaaaatggacctcaaggatcaggttgccattcacgaggcaatggaacaacaaaccatttccatcaccaaagctggagtcaaagcaacattgaatgcccgtgcatcaattcttgccgctgcaaatccagttaatggacgttatgatagaagtcgtccgttgaagtataatgtccagatgtcagctccgattatgtcacgtttcgatcttttctttgtgttggtcgatgagtgcaatgaagttactgattacgctattgcccgtcggatccttgataatcatcgtgcgatcagtgagcatactgaacgtgacagtgtttacaaaattgatgatatcaagaagtatatcgcgtttgctcgttgcttcaagccgaagatttcggataaagctgctgaaactcttgttcgagagtacaagaaacttcgtatgtctgacagcaacaatgcagccacgtcatcatggagaatcactgttcgtcaattggagtctctcgttcgtctgtctgaggctcttgctcgtcttcactgtggaaaggaagtactggtggaacatgtcgaaaaggctgccgaacttctcaacaagtctatcgtcagagttgagcaaccagacattgctttggatgatgacgactttgacaacaatatcatggttgttgaagcagacaaagagaatcaaagaggagatgatagtatggatcatgatggagagaaggaaaatgctccgaagattgatatagcaaagctcaaaatctcattcaaggaatacaagcaattgtctgatgttctcgttttacatatgcgatccgatgaagacaatcaaggagaagacgagtatgatggtgtcaagcagagtgcacttgttgaatggtacttgtcgacaatcgaagcagatttggagacggaggaagacttcaacgtacaaaagactatttgcgagcgtgtaattcatcgtctcattcaccaggatcacgttcttcttgaagttgagcaaggagaagatccaactctctgtgttcatccgaactatgttattgccgacgaataa

SEQ ID NO: 5694 - protein, 810 aa, Caenorhabditis elegans
MDNIIGGQAQQVEDTDGTRVQNEFSKFLKSFKDQKNEFIYKSAMKELVQPEKNTIFINMQHLYKFSNNLATTIELQYYRVYPFMCEALHLATLDACDESERQQMFKKQLYVSLFNLDAKTKVRELSADKVGGLVRIAGQIVRTHPVHPELSRACFVCEDCGVTTRDVQQQFRYTQPTKCANPQCMNRTRFSLDVNSSTFVDFQKIRIQETQAELPRGSIPRTVDVIVRGEMVETVQPGDKCDIVGTLIVIPDIAQLSTPGLRAETSNQNRGRATDKSEGITGLKALGVRDLTYKMAFLACHIQQTESLVGGDASGAVEETDYLDLWSKMSTEDRATLKKMSDDKKIEKNIVDSLFPNIYGNHEVKLGVLLMLLGGVAKKSRDEGTSLRGDINVCLVGDPSTAKSQVLKAVEEFSPRAIYTSGKASSAAGLTAAVVKDEESFEFVIEAGALMLADNGVCCIDEFDKMDLKDQVAIHEAMEQQTISITKAGVKATLNARASILAAANPVNGRYDRSRPLKYNVQMSAPIMSRFDLFFVLVDECNEVTDYAIARRILDNHRAISEHTERDSVYKIDDIKKYIAFARCFKPKISDKAAETLVREYKKLRMSDSNNAATSSWRITVRQLESLVRLSEALARLHCGKEVLVEHVEKAAELLNKSIVRVEQPDIALDDDDFDNNIMVVEADKENQRGDDSMDHDGEKENAPKIDIAKLKISFKEYKQLSDVLVLHMRSDEDNQGEDEYDGVKQSALVEWYLSTIEADLETEEDFNVQKTICERVIHRLIHQDHVLLEVEQGEDPTLCVHPNYVIADE

SEQ ID NO: 5695 - DNA, 2679 bp, Schizosaccharomyces pombe
  CDS (1)..(2679)
atgtcttctcttgcatctcagggtaataatgcttcaactcctgcatatcgttatgggtttcaaacttcagaagttggggacaggccaactgtaagtatgccttcacaacctgagtcgagtgctatgctcgaggatgatggaatggtgaaaaggaaaccttttgctgctataggagaagccataccaaaggtaattgatacaaccggagaatcagtacgtgaagcctttgaagagtttttattgtcattttctgatgaccgcgttgctggaggtgatgctctcccttctgcatcacaagagaaatattatgttcaacagattcatggattggcaatgtatgagattcataccgtttacgttgattataagcatttaacctcgtacaatgatgtgttagctcttgcgatagttgagcaatattatcgattttctcctttcttacttcgagctttacaaaagttgattgaaaagtttgaaccagaatattatagaagttctctttctcgtgaaaatgcttcactttcaccgaactttaaagccagtgacaaaacatttgctcttgcattttacaatttaccctttcgatccacaattcgggacttacgaacagatcgtatcggtagactcacgactattacaggtacagttactcgtacttctgaagtacgccctgaattagcacaaggtacttttatctgtgaggaatgccacactgtagtttcaaatgttgagcaagcatttcgctatactgaaccaactcaatgccctaatgaactttgtgctaataaaagaagttggcggctcaatatttcacagtcttcttttcaggactggcaaaaggtgcgcattcaagaaaatagcaacgagattcctacgggttctatgccacgaactttggacgtaattttgcgcggagatattgttgaaagggctaaggctggtgacaaatgcgcatttacgggaattcttattgccgttccagatgtctcacagctaggaattcctggtgtaaagccagaagcttatcgagattctcgcaattttggtggtagagatgcagatggtgtgacaggactgaagtctttaggtgtacgtgatcttacatataaactatcttttttagcttgcatggttcaaccagatgatgcaaatgataaaagcggtgcggatgtcagaggggatggttctcaagggatcgaagagcaagatgaatttttgcaatcgctttctcaagaagaaattgatgatttacgtgcgatggtgcattcagatcatatttattctcgtttgacaaactcactggctccctctgtttatggtcatgaaataattaagaaggggattcttttacagttaatgggtggtgttcacaagttaactcctgaaggtataaatcttcgtggcgacctgaacatttgtattgtcggcgaccccagtacttcgaaatcacaatttcttaaatacgtttgcaattttcttcctcgtgcaatctacacttctggaaaggcatcatctgcggccggtctcacagctgcagttgttaaggacgaagaaactggggattttactatagaagcaggcgctttaatgttggctgacaatggaatatgtgctatagatgaattcgataaaatggatctgtcagaccaagttgctattcatgaagcaatggaacaacaaacgatatctatagcaaaagctggaattcaagctacattaaacgcacggacatctatccttgctgctgcaaatccaataggtggccgctataaccgaaaaacaactttgcggaataacatcaatatgtctgctcctatcatgtcacggtttgatttattcttcgttgtactagatgagtgcaatgaatcagttgatagacatttagctaagcatattgttgacattcatcgtttacgggatgatgccatgcaacctgaatttagtactgagcaacttcaacgatatatcagatatgcaaggactttcaaaccaaagttaaatacagaatcttgtgccgaaattgttaaaaagtacaagcaattgcggatggatgacgcgcaaggtgctggtaaaaattcatatcgtattaccgtgcgacaactggagtcaatgattcgtctatcagaagccattgcaagagcaaactgtgtagatgatattactcctgcatttgtcaacgaagcatactctttattacgtcaatcaattatccatgtggaaagagatgatattgaggttgaagaagatgatgcagaggcccaagaacttgagaatgataatactaatacaacaaatggcaatgataatgtttcttcggaagaagctttgcagaaaccaaaagtaaaaattacttacgacaaatatgtttcgattatgaacggaatattacaggttttacgccagcgctctactgaaggtgtagatggagtaccagcgggagacctagttcagtcatatctcgagcttagggaagaccaattccataccgaggaagacatcatctatgaggttggtcttgtgcgtaaggtattaaccaggcttgttcacgaatcgatcatcatggaaattcaaaatttaactgacagcgccgtgaggcttccttttgaagaacgcgtattttcaatacaccctaactgtgacattgatgctctactgagcaatggcgatgttccgaactaa

SEQ ID NO: 5696 - protein, 892 aa, Schizosaccharomyces pombe
MSSLASQGNNASTPAYRYGFQTSEVGDRPTVSMPSQPESSAMLEDDGMVKRKPFAAIGEAIPKVIDTTGESVREAFEEFLLSFSDDRVAGGDALPSASQEKYYVQQIHGLAMYEIHTVYVDYKHLTSYNDVLALAIVEQYYRFSPFLLRALQKLIEKFEPEYYRSSLSRENASLSPNFKASDKTFALAFYNLPFRSTIRDLRTDRIGRLTTITGTVTRTSEVRPELAQGTFICEECHTVVSNVEQAFRYTEPTQCPNELCANKRSWRLNISQSSFQDWQKVRIQENSNEIPTGSMPRTLDVILRGDIVERAKAGDKCAFTGILIAVPDVSQLGIPGVKPEAYRDSRNFGGRDADGVTGLKSLGVRDLTYKLSFLACMVQPDDANDKSGADVRGDGSQGIEEQDEFLQSLSQEEIDDLRAMVHSDHIYSRLTNSLAPSVYGHEIIKKGILLQLMGGVHKLTPEGINLRGDLNICIVGDPSTSKSQFLKYVCNFLPRAIYTSGKASSAAGLTAAVVKDEETGDFTIEAGALMLADNGICAIDEFDKMDLSDQVAIHEAMEQQTISIAKAGIQATLNARTSILAAANPIGGRYNRKTTLRNNINMSAPIMSRFDLFFVVLDECNESVDRHLAKHIVDIHRLRDDAMQPEFSTEQLQRYIRYARTFKPKLNTESCAEIVKKYKQLRMDDAQGAGKNSYRITVRQLESMIRLSEAIARANCVDDITPAFVNEAYSLLRQSIIHVERDDIEVEEDDAEAQELENDNTNTTNGNDNVSSEEALQKPKVKITYDKYVSIMNGILQVLRQRSTEGVDGVPAGDLVQSYLELREDQFHTEEDIIYEVGLVRKVLTRLVHESIIMEIQNLTDSAVRLPFEERVFSIHPNCDIDALLSNGDVPN

SEQ ID NO: 5697 - DNA, 2160 bp, Homo sapiens
  CDS (1)..(2160)
atggcactgaaggactacgcgctagagaaggaaaaggttaagaagttcttacaagagttctaccaggatgatgaactcgggaagaagcagttcaagtatgggaaccagttggttcggctggctcatcgggaacaggtggctctgtatgtggacctggacgacgtagccgaggatgaccccgagttggtggactcaatttgtgagaatgccaggcgctacgcgaagctctttgctgatgccgtacaagagctgctgcctcagtacaaggagagggaagtggtaaataaagatgtcctggacgtttacattgagcatcggctaatgatggagcagcggagtcgggaccctgggatggtccgaagcccccagaaccagtaccctgctgaactcatgcgcagatttgagctgtattttcaaggccctagcagcaacaagcctcgtgtgatccgggaagtgcgggctgactctgtggggaagttggtaactgtgcgtggaatcgtcactcgtgtctctgaagtcaaacccaagatggtggtggccacttacacttgtgaccagtgtggggcagagacctaccagccgatccagtctcccactttcatgcctctgatcatgtgcccaagccaggagtgccaaaccaaccgctcaggagggcggctgtatctgcagacacggggctccagattcatcaaattccaggagatgaagatgcaagaacatagtgatcaggtgcctgtgggaaatatccctcgtagtatcacggtgctggtagaaggagagaacacaaggattgcccagcctggagaccacgtcagcgtcactggtattttcttgccaatcctgcgcactgggttccgacaggtggtacagggtttactctcagaaacctacctggaagcccatcggattgtgaagatgaacaagagtgaggatgatgagtctggggctggagagctcaccagggaggagctgaggcaaattgcagaggaggatttctacgaaaagctggcagcttcaatcgccccagaaatatacgggcatgaagatgtgaagaaggcactgctgctcctgctagtcgggggtgtggaccagtctcctcgaggcatgaaaatccggggcaacatcaacatctgtctgatgggggatcctggtgtggccaagtctcagctcctgtcatacattgatcgactggcgcctcgcagccagtacacaacaggccggggctcctcaggagtggggcttacggcagctgtgctgagagactccgtgagtggagaactgaccttagagggtggggccctggtgctggctgaccagggtgtgtgctgcattgatgagttcgacaagatggctgaggccgaccgcacagccatccacgaggtcatggagcagcagaccatctccattgccaaggccggcattctcaccacactcaatgcccgctgctccatcctggctgccgccaaccctgcctacgggcgctacaaccctcgccgcagcctggagcagaacatacagctacctgctgcactgctctcccggtttgacctcctctggctgattcaggaccggcccgaccgagacaatgacctacggttggcccagcacattacctatgtgcaccagcacagccggcagcccccctcccagtttgaacctctggacatgaagctcatgaggcgttacatagccatgtgccgcgagaagcagcccatggtgccagagtctctggctgactacatcacagcagcatacgtggagatgaggcgagaggcttgggctagtaaggatgccacctatacttctgcccggaccctgctggctatcctgcgcctttccactgctctggcacgtctgagaatggtggatgtggtggagaaagaagatgtgaatgaagccatcaggctaatggagatgtcaaaggactctcttctaggagacaaggggcagacagctaggactcagagaccagcagatgtgatatttgccaccgtccgtgaactggtctcagggggccgaagtgtccggttctctgaggcagagcagcgctgtgtatctcgtggcttcacacccgcccagttccaggcggctctggatgaatatgaggagctcaatgtctggcaggtcaatgcttcccggacacggatcacttttgtctga

SEQ ID NO: 5698 - protein, 719 aa, Homo sapiens
MALKDYALEKEKVKKFLQEFYQDDELGKKQFKYGNQLVRLAHREQVALYVDLDDVAEDDPELVDSICENARRYAKLFADAVQELLPQYKEREVVNKDVLDVYIEHRLMMEQRSRDPGMVRSPQNQYPAELMRRFELYFQGPSSNKPRVIREVRADSVGKLVTVRGIVTRVSEVKPKMVVATYTCDQCGAETYQPIQSPTFMPLIMCPSQECQTNRSGGRLYLQTRGSRFIKFQEMKMQEHSDQVPVGNIPRSITVLVEGENTRIAQPGDHVSVTGIFLPILRTGFRQVVQGLLSETYLEAHRIVKMNKSEDDESGAGELTREELRQIAEEDFYEKLAASIAPEIYGHEDVKKALLLLLVGGVDQSPRGMKIRGNINICLMGDPGVAKSQLLSYIDRLAPRSQYTTGRGSSGVGLTAAVLRDSVSGELTLEGGALVLADQGVCCIDEFDKMAEADRTAIHEVMEQQTISIAKAGILTTLNARCSILAAANPAYGRYNPRRSLEQNIQLPAALLSRFDLLWLIQDRPDRDNDLRLAQHITYVHQHSRQPPSQFEPLDMKLMRRYIAMCREKQPMVPESLADYITAAYVEMRREAWASKDATYTSARTLLAILRLSTALARLRMVDVVEKEDVNEAIRLMEMSKDSLLGDKGQTARTQRPADVIFATVRELVSGGRSVRFSEAEQRCVSRGFTPAQFQAALDEYEELNVWQVNASRTRITFV

SEQ ID NO: 5699 - DNA, 2283 bp, Schizosaccharomyces pombe
  CDS (1)..(2283)
atggcacttcccaccatagatttaaaaatcccagagtatgaagaatgtcaacataaaattacggattttctatcccacttcaagcaggaacaggttcaagatggacaacaaaatcaggatatttcgatgtcggatgcaggtgatgagccttttttaaaatcaaagtatatggatatactacaaaaaatctccaatcgagagtcaaatgttattaatgttgatttgaatgatttgtacgagttcgatccaagtgatactcagcttttgcataatattgaatctaatgctaaacggtttgttgaacttttttcgcagtgcgcagatgcgttgatgcctcctcctactgtggaaattaattatcgcaacgaagtacttgatgtaattatgcagcaacgtgttcaaaggaatgaaaatatagaccctgagcataaaggatttcctcctgaattaacccgaggttatgacttatactttcgaccagtaactcgcaacaaaaaaccattcagcgttcgtgatttaagaggcgaaaacttgggatctcttttgactgtccgtggtatagttactcgtacaagtgatgttaagcctagcttaactgtaaatgcttatacatgtgatcgatgtgggtatgaagtgtttcaagaaatccgtcagaagacattccttccaatgtctgaatgtccttcggatgaatgtaaaaagaatgatgcaaaaggtcagcttttcatgagcacaagagccagtaaatttcttccttttcaggaagtaaaaatacaagaattaacgaaccaagtacctattggccatatccctagatcattaaccgtccacttatatggtgctatcactcgctctgtaaatcctggcgatatcgttgatatttctggtatatttttgccgactccgtatactggttttcgagcaatgcgcgccgggctcttaaccgatacttacttagaatgccattatgtttcacaaatcattaaaaattacacaaatattgaaaaaactcctcaatcggaggctgctatcgctgaattaaatcaaggaggcaatgtgtacgaaaaactggccaagtccattgctcccgagatatatggacatgaagatgttaaaaaagctttacttctgttgcttgtcggaggtgttactaaagagttaggggatggaatgagaattcgtggtgacataaatatttgtttaactggtgatcctggtgtcgcaaaatctcaattattaaagtatatttcgaaggttgccccgagaggagtatacaccacaggtcgtggatcttcaggtgttggtttaactgctgctgtaatgcgtgatccagtgacggatgaaatggttttagagggaggtgccttagtacttgctgacaacggtatttgctgcattgacgaatttgataagatggatgaaagtgaccgtacagcaattcatgaagtaatggaacagcaaactatttcaatttcaaaggcaggaatcactacgactttaaatgctcgaacaagtattttggccgctgcgaaccccttatatggacgatataatccgaaagtggcaccaatccacaatataaatcttccagctgcactgctttcccggtttgatattttatttttaattttagatactccttctcgtgaaacagacgagcatttggcacaacacgtaacatatgttcacatgcataacgaacaacctaaaatggactttgaaccattagatccaaacatgattaggcattatatttcttctgctagacaatatcgcccagtcgtaccaaaggatgtatgcgactatgttactggtgcttatgttcaacttcgacaaaaccaaaagcgtgatgaagccaatgagcgtcaattcgctcacactactccacgtacacttctcgctattttgcgaatgggacaagcattagctcgtttgcgtttcagtaatagagtggagattggcgatgttgatgaagctttgagattaatgtctgtttcaaagtcatcactatacgatgatttggatcctagttctcacgatactactattacctcgaaaatatataaaattattcgagacatgcttaatagcataccagatgttgaaggcaatgaacgctcacttacactacgtgctattcgtgaacgcgtacttgctaagggttttactgaagatcatttaataaatacaatacaggaatatacagaccttggtgttcttttaactacaaacaatggtcaaacaataatgttcctcgatccggatttacatatggagaattaa

SEQ ID NO: 5700 - protein, 760 aa, Schizosaccharomyces pombe
MALPTIDLKIPEYEECQHKITDFLSHFKQEQVQDGQQNQDISMSDAGDEPFLKSKYMDILQKISNRESNVINVDLNDLYEFDPSDTQLLHNIESNAKRFVELFSQCADALMPPPTVEINYRNEVLDVIMQQRVQRNENIDPEHKGFPPELTRGYDLYFRPVTRNKKPFSVRDLRGENLGSLLTVRGIVTRTSDVKPSLTVNAYTCDRCGYEVFQEIRQKTFLPMSECPSDECKKNDAKGQLFMSTRASKFLPFQEVKIQELTNQVPIGHIPRSLTVHLYGAITRSVNPGDIVDISGIFLPTPYTGFRAMRAGLLTDTYLECHYVSQIIKNYTNIEKTPQSEAAIAELNQGGNVYEKLAKSIAPEIYGHEDVKKALLLLLVGGVTKELGDGMRIRGDINICLTGDPGVAKSQLLKYISKVAPRGVYTTGRGSSGVGLTAAVMRDPVTDEMVLEGGALVLADNGICCIDEFDKMDESDRTAIHEVMEQQTISISKAGITTTLNARTSILAAANPLYGRYNPKVAPIHNINLPAALLSRFDILFLILDTPSRETDEHLAQHVTYVHMHNEQPKMDFEPLDPNMIRHYISSARQYRPVVPKDVCDYVTGAYVQLRQNQKRDEANERQFAHTTPRTLLAILRMGQALARLRFSNRVEIGDVDEALRLMSVSKSSLYDDLDPSSHDTTITSKIYKIIRDMLNSIPDVEGNERSLTLRAIRERVLAKGFTEDHLINTIQEYTDLGVLLTTNNGQTIMFLDPDLHMEN

SEQ ID NO: 5701 - DNA, 2163 bp, Xenopus laevis
  CDS (1)..(2163)
atgcccagggactaccagaccgagaaagaaaaatgcaagacctttctgcaggagttttataaggatgatgaaattggaaagaaacacttcaagtatggcgtccaactggctaatattgctcacagagagcaggttgcattgtacattgacctggatgacctggctgaggaggacccagagttagtggatgccatctgtgaaaatactaggaggtacaccaacctgtttgctgatgctgttcaggagctgctgcctcagtacaaagagcgagaggtagtgcataaagatgctttggatgtgtatatcgagcaccggttaatgatggagcagagaggcagagatcccaatgagatgcgtgattctcaaaaccagtacccgccagagcttatgcgcagatttgaactatacttcaaagctccaagcagctcgaaagcccgtgtagtgcgagacgtcaaagcagattcaattggcaagttggttaacgttcgaggcatagtcacgagggtcacagaagtcaagcctatgatggtagtggccacttacacatgcgatcagtgtggagcagagacctaccaaccaattcaatctccaactttcatgccacttataatgtgcccaagcagagagtgtcagacaaaccgctctggtggtaggctttacttacagacccgtggctctaagtttattaaattccaggaactgaagattcaagaacatagcgatcaggttccagttgggaacatccctcgctgtatgagtgtatatgtgcgtggggaaaacactcggcttgctcagcctggagaccatgttggtattaccggagtcttccttccaatgctcagaactggcttccgtcaggtggtacagggtctcctttcagagacataccttgaatgtcatcgtttggtgaaaatgaacaagacggaggatgatgaacttgggacagaagagctgagtgaagaggagctgcgacagatcactgaggaagatttctatgagaagctagcagcctccattgctcctgagatttatgggcatgaggatgtgaagaaggcccttctgctgctcttagtgggaggtgttgataattctcctcgtggaatgaagatcagagggaatattaacatctgcctcatgggtgacccaggagtagcaaaatcacagctgctttcttacattgatcgtctagcaccccgtagtcagtatacaacaggtcgaggctcttctggagttggtctcactgcagcggtaatgaaagacccagtgactggggagatgactctggaaggtggagcgttggtactggcggatcagggtgtttgctgcattgatgagtttgataagatgatggacactgacagaacagccatccacgaagtcatggagcagcagactatctccatagccaaggctggtataatgactacgttgaatgctcgttgctccattcttgctgctgctaacccagcatatgggagatacaacccaaagaagactgtggagcaaaatattcagctacctgctgctttactgtctcgatttgatgtactctggctaatccaagacaagcctgaccgggacaatgatctcagacttgctcagcatattacgtatgtccatcagcacagcaaacaaccaccatcacaattccagcctctggatatgaaactcatgcgacgttacatcactatgtgcaagcgcaagcagcctgcaataccagaagcgcttgcagattatttgacggctgcctatgtggagatgaggaaagaagccagaaccaacaaagacatgaccttcacttctgcccgaaccctgttgtctgttctgagactgtctacagccttggctcggctacgtctggaagatgtagtggagaaagaggatgtaaatgaagccatgaggttgatggaaatgtccaaggactccttgcttggcgacaagggccacacttcaaggactcaacgcccggctgatgtgatcttttccactatccgtgagatggtcccagaaaaaggtgcccgcagtgtaaaatactcggaggctgagcaacgctgtgtctctaaaggcttcactcctgcacagtttgaggctgctttggaagagtatgaggagctcaatgtttggctggttaatcaggcccgcaccaagatcacatttgtgtga

SEQ ID NO: 5702 - protein, 720 aa, Xenopus laevis
MPRDYQTEKEKCKTFLQEFYKDDEIGKKHFKYGVQLANIAHREQVALYIDLDDLAEEDPELVDAICENTRRYTNLFADAVQELLPQYKEREVVHKDALDVYIEHRLMMEQRGRDPNEMRDSQNQYPPELMRRFELYFKAPSSSKARVVRDVKADSIGKLVNVRGIVTRVTEVKPMMVVATYTCDQCGAETYQPIQSPTFMPLIMCPSRECQTNRSGGRLYLQTRGSKFIKFQELKIQEHSDQVPVGNIPRCMSVYVRGENTRLAQPGDHVGITGVFLPMLRTGFRQVVQGLLSETYLECHRLVKMNKTEDDELGTEELSEEELRQITEEDFYEKLAASIAPEIYGHEDVKKALLLLLVGGVDNSPRGMKIRGNINICLMGDPGVAKSQLLSYIDRLAPRSQYTTGRGSSGVGLTAAVMKDPVTGEMTLEGGALVLADQGVCCIDEFDKMMDTDRTAIHEVMEQQTISIAKAGIMTTLNARCSILAAANPAYGRYNPKKTVEQNIQLPAALLSRFDVLWLIQDKPDRDNDLRLAQHITYVHQHSKQPPSQFQPLDMKLMRRYITMCKRKQPAIPEALADYLTAAYVEMRKEARTNKDMTFTSARTLLSVLRLSTALARLRLEDVVEKEDVNEAMRLMEMSKDSLLGDKGHTSRTQRPADVIFSTIREMVPEKGARSVKYSEAEQRCVSKGFTPAQFEAALEEYEELNVWLVNQARTKITFV

SEQ ID NO: 5703 - DNA, 2061 bp, Sulfolobus solfataricus
  CDS (1)..(2061): transl_table=11
ttggaaattcctagtaaacagattgactatagagacgtatttatagagtttctgacaactttcaagggtaacaataatcaaaacaaatatatcgagaggataaacgagctagtagcgtataggaaaaaaagtcttataatagaattttctgatgtactttcgttcaatgaaaatttggcttatgagataataaataataccaaaattattctaccaattctggaaggtgcattgtatgatcatatcttgcaattggatcctacatatcaacgagatatagaaaaagttcatgttagaattgtaggaatacctagagtaatagaacttagaaaaataagaagtaccgatataggtaaactaataactattgatggaatcttagttaaagttactccggtaaaagagagaatttacaaggcaacttataagcacattcacccagactgtatgcaggagtttgagtggccagaagatgaagagatgccagaagtattagaaatgccaactatatgtccaaaatgtggtaagcctggacagttcagactaatcccagagaaaacaaagttaattgactggcaaaaagcggtaatccaggagagaccagaagaggtaccctcaggtcagttacctaggcagttggaaataatacttgaagatgatttagttgattctgcgagacctggagatagggtaaaagtaacgggaattttagatataaaacaagactccccggtcaaaaggggaagtagagcagtatttgacatttatatgaaagtaagtagtatagaagtttcacaaaaagtattagatgaggtaatcatctctgaagaagacgagaaaaagattaaagacttagctaaagatccttggatacgtgatagaatcatatcatcgatagcaccatctatttacggtcactgggaactaaaagaagctctagcattagcattatttggaggagttcctaaggttctagaagatacgagaataagaggagatattcacatactgataataggtgatcccggtactgccaaatcacaaatgctacagtttatctcaagagtagccccaagggcagtttacacgaccggtaaaggatccacagctgcaggtttaacagctgctgtagtaagagaaaagggaactggagagtattacttagaagctggtgcgttagtacttgctgatggtggaatagcagttattgatgaaatagacaagatgagggatgaagatagagtagccattcatgaggcaatggaacaacagacagtctcaatagcaaaagctggaatagtagctaaattaaacgctagggctgcagttatagctgcagggaatccgaaattcgggagatacataagtgaaagaccagtgtctgataatatcaacctacctccaacaatcttgtcaagatttgacctaatatttatactaaaggatcaaccaggtgaacaagatagagaacttgcgaattacatattagatgtacattcaggaaaatccacaaaaaatattatagatatagatacattaagaaaatatatagcatatgcaaggaaatacgttacaccaaaaattactagtgaggctaagaatctgattacagatttcttcgtagaaatgaggaagaaaagctcagaaacacctgatagcccaatattgataactccaagacaattagaggctttaataagaatttcagaagcctatgccaagatggctcttaaggctgaagtcactagagaagatgcagaaagagcaataaatatcatgagacttttcctagagagtgtaggagttgatatggaaagtggaaaaatagatatagatacaataatgactggtaaacctaaaagcgctagagagaaaatgatgaaaataatagaaataatagatagtttagctgtaagttctgagtgcgcaaaagttaaggacatactaaaagaagctcaacaagtaggcattgaaaaaagtaatatagaaaaattacttacagatatgagaaagagtggtataatatatgaagcaaaaccagaatgttacaaaaaagtctag

SEQ ID NO: 5704 - protein, 686 aa, Sulfolobus solfataricus
MEIPSKQIDYRDVFIEFLTTFKGNNNQNKYIERINELVAYRKKSLIIEFSDVLSFNENLAYEIINNTKIILPILEGALYDHILQLDPTYQRDIEKVHVRIVGIPRVIELRKIRSTDIGKLITIDGILVKVTPVKERIYKATYKHIHPDCMQEFEWPEDEEMPEVLEMPTICPKCGKPGQFRLIPEKTKLIDWQKAVIQERPEEVPSGQLPRQLEIILEDDLVDSARPGDRVKVTGILDIKQDSPVKRGSRAVFDIYMKVSSIEVSQKVLDEVIISEEDEKKIKDLAKDPWIRDRIISSIAPSIYGHWELKEALALALFGGVPKVLEDTRIRGDIHILIIGDPGTAKSQMLQFISRVAPRAVYTTGKGSTAAGLTAAVVREKGTGEYYLEAGALVLADGGIAVIDEIDKMRDEDRVAIHEAMEQQTVSIAKAGIVAKLNARAAVIAAGNPKFGRYISERPVSDNINLPPTILSRFDLIFILKDQPGEQDRELANYILDVHSGKSTKNIIDIDTLRKYIAYARKYVTPKITSEAKNLITDFFVEMRKKSSETPDSPILITPRQLEALIRISEAYAKMALKAEVTREDAERAINIMRLFLESVGVDMESGKIDIDTIMTGKPKSAREKMMKIIEIIDSLAVSSECAKVKDILKEAQQVGIEKSNIEKLLTDMRKSGIIYEAKPECYKKV

SEQ ID NO: 5705 - DNA, 2151 bp, Arabidopsis thaliana
  CDS (1)..(2151)
atgaaagaccacgatttcgacggcgacaaagggcttgccaagggatttctcgagaatttcgccgacgctaatggcagatctaagtacatggagattctccaagaggtttcaaatcgtaagattcgagctattcaagtcgatctcgatgacttattcaattataaagatgaaagtgaggagtttctcggacggttgacggaaaacactcgccgatatgtttcaattttctccgccgctgttgacgagttgttacccgaaccaacggaagcgtttccagatgatgatcatgatattctcatgactcagagagcagatgatgggactgataatccagatgtttctgatcctcatcagcagattccttctgagattaaaagatattatgaggtttattttaaagctccttcaaagggaaggccatctaccatcagggaggttaaggcttcacacattgggcaacttgttaggatatctggtattgtgacccgttgttccgatgtcaagccattgatggcggttgctgtttacacatgtgaagattgtggtcatgagatttaccaggaagttacatctagagtcttcatgcctttgtttaagtgtccttctagtcgctgtcgtcttaatagtaaagccgggaatcctattcttcagctcagagcatcaaagtttctaaagtttcaggaggccaagatgcaagagttggctgaacatgttcccaaagggcatattccgaggtctatgactgttcatctaagaggagagttgacaagaaaggtatcaccaggtgatgttgttgagttctcagggatttttcttcccattccttacactgggtttaaggcacttcgagctggcttagtagcagacacctatctggaagcaacgtctgttactcatttcaagaagaaatatgaggaatatgagtttcagaaagatgaggaagaacagattgcacgtttggctgaggatggtgacatatacaataagctgtcgcgatccctggcccctgagatttatggacatgaagatattaagaaagctttgcttctccttcttgtgggtgctcctcacaggcaattaaaggatggaatgaagattagaggagatgtgcatatctgtctgatgggtgatcctggagttgccaagagtcagcttctcaagcacattataaatgttgctccaaggggagtctacacaacaggcaaaggtagcagtggagttggtctaactgccgctgttatgagagatcaagtaacaaatgagatggttttagaaggaggagcactggtgctggctgacatgggaatctgtgcaattgatgagtttgataagatggatgaatcagatcgtactgctattcatgaggtcatggagcagcaaactgtaagcattgcaaaagctgggattaccacgtctttgaatgctcgaacagctgttcttgctgcagccaatccagcctggggaagatatgatttgcgaagaactccagctgaaaacattaatcttccaccggcccttctttcaagattcgatctgctgtggttgatcttagatcgagctgacatggacagtgaccttgaattggcaaagcatgtgcttcacgtacatcagacagaagaatctcctgcgcttggtttcgagcctctggaacccaacattctccgtgcatacatttcagctgcaaggagattatcaccatacgtcccagcagagttggaggaatatatagcaactgcttattccagcatcaggcaagaagaagcgaaatcaaatactcctcattcttacacaacagtgaggacactgctcagcattctgcgcatatccgctgcattagcaaggttgagattttcagaatcagtggcacagagtgatgtggatgaggcgcttagactaatgcagatgtcgaaaatatcattgtatgctgatgaccgacaaaaagcaggactagatgcaatatcagacacatactcaatcataagagacgaagctgcaagatcaaaaaagacccatgtgagctacgcaaatgccctgaactggatctccagaaagggatacagtgaggctcagctaaaggagtgtttggaggaatatgcagctttgaatgtttggcagattgatcctcacacctttgacatccgttttatctga

SEQ ID NO: 5706 - protein, 716 aa, Arabidopsis thaliana
MKDHDFDGDKGLAKGFLENFADANGRSKYMEILQEVSNRKIRAIQVDLDDLFNYKDESEEFLGRLTENTRRYVSIFSAAVDELLPEPTEAFPDDDHDILMTQRADDGTDNPDVSDPHQQIPSEIKRYYEVYFKAPSKGRPSTIREVKASHIGQLVRISGIVTRCSDVKPLMAVAVYTCEDCGHEIYQEVTSRVFMPLFKCPSSRCRLNSKAGNPILQLRASKFLKFQEAKMQELAEHVPKGHIPRSMTVHLRGELTRKVSPGDVVEFSGIFLPIPYTGFKALRAGLVADTYLEATSVTHFKKKYEEYEFQKDEEEQIARLAEDGDIYNKLSRSLAPEIYGHEDIKKALLLLLVGAPHRQLKDGMKIRGDVHICLMGDPGVAKSQLLKHIINVAPRGVYTTGKGSSGVGLTAAVMRDQVTNEMVLEGGALVLADMGICAIDEFDKMDESDRTAIHEVMEQQTVSIAKAGITTSLNARTAVLAAANPAWGRYDLRRTPAENINLPPALLSRFDLLWLILDRADMDSDLELAKHVLHVHQTEESPALGFEPLEPNILRAYISAARRLSPYVPAELEEYIATAYSSIRQEEAKSNTPHSYTTVRTLLSILRISAALARLRFSESVAQSDVDEALRLMQMSKISLYADDRQKAGLDAISDTYSIIRDEAARSKKTHVSYANALNWISRKGYSEAQLKECLEEYAALNVWQIDPHTFDIRFI

SEQ ID NO: 5707 - DNA, 2534 bp, Triticum aestivum; identical to SEQ ID NO: 2543
  CDS (57)..(2246)

SEQ ID NO: 5708 - protein, 729 aa, Triticum aestivum; identical to SEQ ID NO: 2544

SEQ ID NO: 5709 - DNA, 2493 bp, Zea mays; identical to SEQ ID NO: 2597
  CDS (1)..(2493)

SEQ ID NO: 5710 - protein, 830 aa, Zea mays; identical to SEQ ID NO: 2598

SEQ ID NO: 5711 - DNA, 26 bp, Artificial sequence
  primer
atgtcatttgatagaccggaaatata

SEQ ID NO: 5712 - DNA, 26 bp, Artificial sequence
  primer
tcatacaccacttctgtaaatattct

SEQ ID NO: 5713 - protein, 846 aa, Artificial sequence
  consensus sequence
  Variant (2)..(59): Xaa in position 2 to 59 is any amino acid
  Variant (60)..(165): Xaa in position 60 to 165 is any or no amino acid
  Variant (167)..(170): Xaa in position 167 to 170 is any amino acid
  Variant (171)..(180): Xaa in position 171 to 180 is any or no amino acid
  Variant (182)..(184): Xaa in position 182 to 184 is any amino acid
  Variant (185)..(199): Xaa in position 185 to 199 is any or no amino acid
  Variant (201)..(205): Xaa in position 201 to 205 is any amino acid
  Variant (206)..(270): Xaa in position 206 to 270 is any or no amino acid
  Variant (272)..(275): Xaa in position 272 to 275 is any amino acid
  Variant (278)..(282): Xaa in position 278 to 282 is any amino acid
  Variant (284)..(284): Xaa in position 284 is any amino acid
  Variant (286)..(287): Xaa in position 286 to 287 is any amino acid
  Variant (289)..(298): Xaa in position 289 to 298 is any amino acid
  Variant (299)..(307): Xaa in position 299 to 307 is any or no amino acid
  Variant (309)..(314): Xaa in position 309 to 314 is any amino acid
  Variant (316)..(339): Xaa in position 316 to 339 is any amino acid
  Variant (340)..(426): Xaa in position 340 to 426 is any or no amino acid
  Variant (428)..(428): Xaa in position 428 is any amino acid
  Variant (431)..(431): Xaa in position 431 is any amino acid
  Variant (433)..(433): Xaa in position 433 is any amino acid
  Variant (435)..(438): Xaa in position 435 to 438 is any amino acid
  Variant (440)..(445): Xaa in position 440 to 445 is any amino acid
  Variant (447)..(447): Xaa in position 447 is any amino acid
  Variant (450)..(458): Xaa in position 450 to 458 is any amino acid
  Variant (459)..(484): Xaa in position 459 to 484 is any or no amino acid
  Variant (487)..(487): Xaa in position 487 is any amino acid
  Variant (490)..(493): Xaa in position 490 to 493 is any amino acid
  Variant (497)..(499): Xaa in position 497 to 499 is any amino acid
  Variant (503)..(503): Xaa in position 503 is any amino acid
  Variant (505)..(511): Xaa in position 505 to 511 is any amino acid
  Variant (513)..(516): Xaa in position 513 to 516 is any amino acid
  Variant (518)..(518): Xaa in position 518 is any amino acid
  Variant (520)..(520): Xaa in position 520 is any amino acid
  Variant (524)..(525): Xaa in position 524 to 525 is any amino acid
  Variant (530)..(530): Xaa in position 530 is any amino acid
  Variant (532)..(533): Xaa in position 532 to 533 is any amino acid
  Variant (535)..(541): Xaa in position 535 to 541 is any amino acid
  Variant (542)..(543): Xaa in position 542 to 543 is any or no amino acid
  Variant (545)..(545): Xaa in position 545 is any amino acid
  Variant (548)..(548): Xaa in position 548 is any amino acid
  Variant (551)..(551): Xaa in position 551 is any amino acid
  Variant (553)..(553): Xaa in position 553 is any amino acid
  Variant (555)..(557): Xaa in position 555 to 557 is any amino acid
  Variant (565)..(566): Xaa in position 565 to 566 is any amino acid
  Variant (567)..(567): Xaa in position 567 is any or no amino acid
  Variant (570)..(572): Xaa in position 570 to 572 is any amino acid
  Variant (575)..(575): Xaa in position 575 is any amino acid
  Variant (580)..(581): Xaa in position 580 to 581 is any amino acid
  Variant (584)..(584): Xaa in position 584 is any amino acid
  Variant (589)..(591): Xaa in position 589 to 591 is any amino acid
  Variant (594)..(594): Xaa in position 594 is any amino acid
  Variant (596)..(596): Xaa in position 596 is any amino acid
  Variant (598)..(599): Xaa in position 598 to 599 is any amino acid
  Variant (605)..(606): Xaa in position 605 to 606 is any amino acid
  Variant (608)..(613): Xaa in position 608 to 613 is any amino acid
  Variant (614)..(617): Xaa in position 614 to 617 is any or no amino acid
  Variant (619)..(625): Xaa in position 619 to 625 is any amino acid
  Variant (631)..(636): Xaa in position 631 to 636 is any amino acid
  Variant (638)..(642): Xaa in position 638 to 642 is any amino acid
  Variant (643)..(643): Xaa in position 643 is any or no amino acid
  Variant (645)..(647): Xaa in position 645 to 647 is any amino acid
  Variant (649)..(654): Xaa in position 649 to 654 is any amino acid
  Variant (656)..(670): Xaa in position 656 to 670 is any amino acid
  Variant (671)..(744): Xaa in position 671 to 744 is any or no amino acid
  Variant (747)..(749): Xaa in position 747 to 749 is any amino acid
  Variant (750)..(754): Xaa in position 750 to 754 is any or no amino acid
  Variant (756)..(768): Xaa in position 756 to 768 is any amino acid
  Variant (769)..(772): Xaa in position 769 to 772 is any or no amino acid
  Variant (774)..(776): Xaa in position 774 to 776 is any amino acid
  Variant (778)..(789): Xaa in position 778 to 789 is any amino acid
  Variant (790)..(816): Xaa in position 790 to 816 is any or no amino acid
  Variant (818)..(818): Xaa in position 818 is any amino acid
  Variant (821)..(823): Xaa in position 821 to 823 is any amino acid
  Variant (825)..(829): Xaa in position 825 to 829 is any amino acid
  Variant (831)..(845): Xaa in position 831 to 845 is any amino acid
YXXXXXXXXXXXXXXXXXXXXXXXXXXXXXXXXXXXXXXXXXXXXXXXXXXXXXXXXXXXXXXXXXXXXXXXXXXXXXXXXXXXXXXXXXXXXXXXXXXXXXXXXXXXXXXXXXXXXXXXXXXXXXXXXXXXXXXXXXXXXXXXXXXXXXXXXXXXXXXXXXXXXRXXXXXXXXXXXXXXGXXXXXXXXXXXXXXXXXXCXXXXXXXXXXXXXXXXXXXXXXXXXXXXXXXXXXXXXXXXXXXXXXXXXXXXXXXXXXXXXXXXXXXXXXQXXXXQEXXXXXPXGXXPXXXXXXXXXXXXXXXXXXXGXXXXXXGXXXXXXXXXXXXXXXXXXXXXXXXXXXXXXXXXXXXXXXXXXXXXXXXXXXXXXXXXXXXXXXXXXXXXXXXXXXXXXXXXXXXXXXXXXXXXXXXXXXXXXXXXXXXXXXSXAPXIXGXXXXKXXXXXXLXGGXXXXXXXXXXXXXXXXXXXXXXXXXXXXXXXXXXXRGXINXXXXGDPXXXKSQXLXXXXXXXPXXXXTXGXGSSXXGLTAXVXXDXXXXXXXXXEXGAXVLXDXGXXXIDEFDKMXXXDRXXXHEXMEQQXXSIXKAGIXXXLNXRXSXXAAANPXXGXXXXXXXXXXNXXXXXXXLSRFDXXXXXXDXXXXXXDXXXAXXXXXXHXXXXXXXXXXXXXXXXXXXXXXXXXXXXXXXXXXXXXXXXXXXXXXXXXXXXXXXXXXXXXXXXXXXXXXXXXXXXXXXXXXXXXXXXXYIXXXXXXXXPXXXXXXXXXXXXXXXXXYXXXRXXXXXXXXXXXXXXXXXXXXXXXXXXXXXXXXXXXXXXXRXLEXXXRXXXXXAXXXXXXXXXXXXXXXA

SEQ ID NO: 5714 - DNA, 1449 bp, Saccharomyces cerevisiae
  CDS (1)..(1449)
atgggcggctatttggcgatcgtgttcattccccaaactaacacgaagagcatgagagagaaaaaacaaaagtgcttgaaacaggtaagacgtttatcattgatatcaccaaagaaatatataatgccggattctatttttgaacagccctttgtttactgtggtgtttgccacagaagaacatcgcatggagatccattgaggctgacctcatgtgctcatatcctctgttcgcagcattctccattaacatcaaaggtgtgtcctatatgccgttcgagcgatatctccatcattaaccttgtggaatctaaacagctgcctaccgacattaggattttttttgagccactgcccccacttttggagtcgttatataatgtttcccaattccaactgaatgggctttcgaaacagtgtcaatactatcaaaatcattgtttaaagttgagagaaaaatgtgcaagacaacagcagctgctatatcaggccaaaatagagttggattctatggcgattcttaagaaaagaatacaggaattagagtcagttttgaatcataacaatgtttcttcgatgtcagttggtgtgctaccaacaagaaatagccatcaaaatcattaccagccccctccaaccgttgatctgacagttgatgataatagtttagaagaattcgaagccaaatcctttattaaaaagttgaaaaaaaactcttctttgagaaattcttcaaaaaataacaatggaactgtcactccctctacaagtggtcgtgtaaataaaaaccagcctctctttatggagacattgaataatcctaatagaaatagcattcctcctcctggaatgaacccaaacgcaaatagtaatctacctaatatttcgactattgcagaatcaaccaatctgaacagattttcgttctctcctgtgcgtgttgcaaaaggcttcgatggaaagttgccaaatcttgacatcctcacgaataatggctctgtatcttccaaaaatatatcaagattatcttcagcttctctccaaccctcttcgcctctatcttcatcatcaaataggcttattttaccaaatagtaacctcaaagaattgcatcattcaaatacacctttaacaagtacctcgacgcagtttccctcagctttagaaaaattaaaaataacaaggaagagaaataatactatcagcggttcgaatagaataacacacaacttgagctcacacgtaagaagcagtggtcttgccttttcatcttcatcgaactcattgcaacaaagtaaactgccgaaatcaaatatactaaagcggtccaattcaactcagcaactgactaatacacatttgaagagtgataatcatctgccacctcgctcaagtaatactgtgttgggtagtagcaagaaaaacaataagtttagaaggattaggtaa

SEQ ID NO: 5715 - protein, 482 aa, Saccharomyces cerevisiae
MGGYLAIVFIPQTNTKSMREKKQKCLKQVRRLSLISPKKYIMPDSIFEQPFVYCGVCHRRTSHGDPLRLTSCAHILCSQHSPLTSKVCPICRSSDISIINLVESKQLPTDIRIFFEPLPPLLESLYNVSQFQLNGLSKQCQYYQNHCLKLREKCARQQQLLYQAKIELDSMAILKKRIQELESVLNHNNVSSMSVGVLPTRNSHQNHYQPPPTVDLTVDDNSLEEFEAKSFIKKLKKNSSLRNSSKNNNGTVTPSTSGRVNKNQPLFMETLNNPNRNSIPPPGMNPNANSNLPNISTIAESTNLNRFSFSPVRVAKGFDGKLPNLDILTNNGSVSSKNISRLSSASLQPSSPLSSSSNRLILPNSNLKELHHSNTPLTSTSTQFPSALEKLKITRKRNNTISGSNRITHNLSSHVRSSGLAFSSSSNSLQQSKLPKSNILKRSNSTQQLTNTHLKSDNHLPPRSSNTVLGSSKKNNKFRRIR

SEQ ID NO: 5716 - DNA, 1053 bp, Candida glabrata CBS138
  CDS (1)..(1053)
atgcctgagaatcaatttagccagccttttgttcactatggggtatgccaccgaagacactcagtggaggatccactctggttgacgtcgtgtgcccatttactatgtcaggctcatttgacgcccacgaaagtgtgtggtgtctgcggtacacgagatatatcttgtcttcggttgaccaatgacaaaccactacctaatgaagtggatgcatacttccaacctatttctggtttagttgagaacatgtacaatgtatgccaatttcaatatgtaggtcttctcgatcagtgtaactattaccagaagatcagtattactctgaaggagaaatgcaacaggcaacagcaattgctttacaaagctaaacaagagttggataatattccgagattaaaaagaagaatagacgaattggaatcacttctgaaggaaggcaattatggtatcaagaaatctaaggataactggactcataccaagagatctctcccacagacagtcgacttgactatcgaaaatactgatcaggaagaagatcagaattttattcaaaaattgaagaataatacagggttgaggaaaattaccccaaaagttgcgccaaataatatttctgctgaaagcagttcacataaaatgtcaattacaccgggcatatttgccatggcagagtcgacacaattaatttcaaatcaaacaacaacctcttcagtaaacaacaaccaattaaaattcaaaaccaacatacatagaagcccaagctctaatatcatgactaaagattcacaacctagcaatcaaattatgccacaagtactcaataaattaactatgttgaaaagaaataacacggtttcaacatcaaatttagaaaaatctaatactcagatggcgactcatagatcatacttaggaacctacaatcaccctaattctacaatgctattgaacaggcgccgagcaaattcacagcaacaaccgaaatcaagtaaacaaagtaacttcgaaatgttacggcgagttccatcaagcaataaaaacggaagataa

SEQ ID NO: 5717 - protein, 350 aa, Candida glabrata CBS138
MPENQFSQPFVHYGVCHRRHSVEDPLWLTSCAHLLCQAHLTPTKVCGVCGTRDISCLRLTNDKPLPNEVDAYFQPISGLVENMYNVCQFQYVGLLDQCNYYQKISITLKEKCNRQQQLLYKAKQELDNIPRLKRRIDELESLLKEGNYGIKKSKDNWTHTKRSLPQTVDLTIENTDQEEDQNFIQKLKNNTGLRKITPKVAPNNISAESSSHKMSITPGIFAMAESTQLISNQTTTSSVNNNQLKFKTNIHRSPSSNIMTKDSQPSNQIMPQVLNKLTMLKRNNTVSTSNLEKSNTQMATHRSYLGTYNHPNSTMLLNRRRANSQQQPKSSKQSNFEMLRRVPSSNKNGR

SEQ ID NO: 5718 - DNA, 945 bp, Kluyveromyces lactis NRRL Y-1140
  CDS (1)..(945)
atgtctccgccagttgatttgaatcagatatgggtaaactgttcccaatgccataaaccgtataacaaccagcaaggaacaagcaatggaaagttctggctcacatcatgtgctcatatcctttgtgataagcattaccataatggaatgacggtttgtcccgtgtgcacgacgagtagaatatcagtacttccgttagatggtgatagttccaaactaccgacagaagtgcaatcgttctttaaaccctttgtatcacaactggaaccattatacacagtagctaatttccagtgggagtcaatggtgcaattatgtgaatactatcaagatatgtgtctgaagttacaggaaaagtgtaacagacaacgacagctgttgtaccaggcaaaggaagaattagacaagtttactgctttgaagaaggaattaagaatgaaggacaccaacagagacgtcatatcgatggttactagaaatgactccagaaatttaataaacgcaaaggatgggattgagcgtgataatcaagagtcgttcatcagtaaactacaaaactctcaccgattgaaaccttcacggacaacttcagatgatggaaacgaatctccaaatatttcacacgttcttgctgaatctacgtcaattggaagaacggcaccaatattggtaccgcattccccaacaacaccaatttcaatgaacaataaaagcggttctaacattaataacacgttcggcgccagatcaaactcacgacaaggagtcacgaaagcattaccgaatgcattggaaagattgaaattgaaaagaagtagcacttcaacgatatcatcaaggggaatattatcacatatgaggattaactcttctcaaactacaacgggattcccgtcgaggaataacaccacggcacaatcgagaaacaataaatttaagaaatga

SEQ ID NO: 5719 - protein, 314 aa, Kluyveromyces lactis NRRL Y-1140
MSPPVDLNQIWVNCSQCHKPYNNQQGTSNGKFWLTSCAHILCDKHYHNGMTVCPVCTTSRISVLPLDGDSSKLPTEVQSFFKPFVSQLEPLYTVANFQWESMVQLCEYYQDMCLKLQEKCNRQRQLLYQAKEELDKFTALKKELRMKDTNRDVISMVTRNDSRNLINAKDGIERDNQESFISKLQNSHRLKPSRTTSDDGNESPNISHVLAESTSIGRTAPILVPHSPTTPISMNNKSGSNINNTFGARSNSRQGVTKALPNALERLKLKRSSTSTISSRGILSHMRINSSQTTTGFPSRNNTTAQSRNNKFKK

SEQ ID NO: 5720 - DNA, 867 bp, Candida albicans SC5314
  CDS (1)..(867): transl_table=12
atgctacccgttgaactaaaaaactttttcattccgacaccacagcaaattgatttgttgacaagctctgggaaatttcagtattgctcattagttgacagaattaactattataggtccactatatccaaaatgaatgaaaagttgaaaaaacaaaaagagtttctatatgcagcaaaagaagaaataacccaactaagtaaatataaactccaggttcaagaattaactaacgaaatagatttacttaggaagcagctacaaagtacagctcgtccagacacttttgatctatcgaacgataatgaaaatgagaaaagtggagagtttgaaaacaatatttttacacgggagctgagtccgactcaaactgctctgcacacatttatcaataaggtccatcgagaatctttacagaaagtaataccaacttcaaaacctgatactgatgatagaaacggttcaacaagaagaagatctttttttgctgaatcaacgaaactaggagaaattaattcgaggtcaatttcatccagcaatgaatctagcaattcgctaaatagtttaaagagatttagttttgaaagtcccaaaaagaagtatttacaaaatccaataggcaaacgatctgccactagtcagcttgcaacccgaataacagctaacatgaaacttggcgtccctgtgagtgcatccaacgcactgtccagaagctatcaaaatggttatgttaacaaagtgtcgaaagatcccacattaacgagaactatgagaagagctagcgaggcatcaccgtactttaaagggctaaattacaagtataaaaacagcagtcatgaccatcatcaacaccagtataaacgctag

SEQ ID NO: 5721 - protein, 288 aa, Candida albicans SC5314
MLPVELKNFFIPTPQQIDLLTSSGKFQYCSLVDRINYYRSTISKMNEKLKKQKEFLYAAKEEITQLSKYKLQVQELTNEIDLLRKQLQSTARPDTFDLSNDNENEKSGEFENNIFTRESSPTQTASHTFINKVHRESLQKVIPTSKPDTDDRNGSTRRRSFFAESTKLGEINSRSISSSNESSNSLNSLKRFSFESPKKKYLQNPIGKRSATSQLATRITANMKLGVPVSASNASSRSYQNGYVNKVSKDPTLTRTMRRASEASPYFKGLNYKYKNSSHDHHQHQYKR

SEQ ID NO: 5722 - DNA, 22 bp, Artificial sequence
  primer
atgggcggctatttggcgatcg

SEQ ID NO: 5723 - DNA, 27 bp, Artificial sequence
  primer
ttacctaatccttctaaacttattgtt

SEQ ID NO: 5724 - protein, 199 aa, Artificial sequence
  consensus sequence
  Variant (3)..(8): Xaa in position 3 to 8 is any amino acid
  Variant (10)..(10): Xaa in position 10 is any amino acid
  Variant (12)..(24): Xaa in position 12 to 24 is any amino acid
  Variant (27)..(35): Xaa in position 27 to 35 is any amino acid
  Variant (38)..(45): Xaa in position 38 to 45 is any amino acid
  Variant (48)..(50): Xaa in position 48 to 50 is any amino acid
  Variant (52)..(54): Xaa in position 52 to 54 is any amino acid
  Variant (57)..(57): Xaa in position 57 is any amino acid
  Variant (60)..(60): Xaa in position 60 is any amino acid
  Variant (62)..(68): Xaa in position 62 to 68 is any amino acid
  Variant (70)..(107): Xaa in position 70 to 107 is any amino acid
  Variant (108)..(127): Xaa in position 108 to 127 is any or no amino acid
  Variant (130)..(130): Xaa in position 130 is any amino acid
  Variant (132)..(139): Xaa in position 132 to 139 is any amino acid
  Variant (140)..(161): Xaa in position 140 to 161 is any or no amino acid
  Variant (163)..(180): Xaa in position 163 to 180 is any amino acid
  Variant (181)..(195): Xaa in position 181 to 195 is any or no amino acid
LPXXXXXXFXPXXXXXXXXXXXXXFQXXXXXXXXXYYXXXXXXXXEKXXXQXXXLYXAKXEXXXXXXXKXXXXXXXXXXXXXXXXXXXXXXXXXXXXXXXXXXXXXXXXXXXXXXXXXXXXXXXXXXFIXKXXXXXXXXXXXXXXXXXXXXXXXXXXXXXXPXXXXXXXXXXXXXXXXXXXXXXXXXXXXXXXXXAEST

SEQ ID NO: 5725 - DNA, 813 bp, Saccharomyces cerevisiae
  CDS (1)..(813)
atggctatcgaaaatatatacattgccagacatggttacaggtcaaactggctaccaaagggaccatatccaccaccgcccaccggtattgataacgatgtcccgctttcggaacacggtgttgaacaggcacatgaactggcgaactatatctctaaattagatgtcaaaccagaaatgattttctcctccccattttaccgctgtttagaaactagtaaacccacagtggaggctttaaagattccattatatgtcgatcgtggtgtaggagaatggtataagcctgatagacccattatcccggagcctgctactcatgaagttatgagtaagttttttccaagcatgatctctccagactgggaacctagtattattcctagtaataagggtgaaacagaagaagatatttttgagaggtgccataaattctggcctgtctttattgacagagtggagagaaaatttccaaatgtaaagaccattatgatagttacccacgcagccactaaatccgctcttggtatgaacttgttgaaattctccagtgccaaagagcccattgataacaaaggcacctttataagaaatggaagttgtgctattgataaatttgagctggtgaaaggagaaaatgaaagtataccatttgaagagagagagtggaaacttacaatgaatggcaacacctcctttttaactaatggggaagaaatgaattggacgtttatgaatgcctttgaggctggttcagacgctgatatcaaagcgagaagagcagctgagagcggaaaactaaaaatggagtga

SEQ ID NO: 5726 - protein, 270 aa, Saccharomyces cerevisiae
MAIENIYIARHGYRSNWLPKGPYPPPPTGIDNDVPLSEHGVEQAHELANYISKLDVKPEMIFSSPFYRCLETSKPTVEALKIPLYVDRGVGEWYKPDRPIIPEPATHEVMSKFFPSMISPDWEPSIIPSNKGETEEDIFERCHKFWPVFIDRVERKFPNVKTIMIVTHAATKSALGMNLLKFSSAKEPIDNKGTFIRNGSCAIDKFELVKGENESIPFEEREWKLTMNGNTSFLTNGEEMNWTFMNAFEAGSDADIKARRAAESGKLKME

SEQ ID NO: 5727 - DNA, 1872 bp, Bos taurus
  CDS (1)..(1872)
atggcagcaggcgagacccagctctatgccaaagtcttcaataaactcaagggccgcagcaccccttccctcctggaccccctcctgggcatgggcttcccagcgcacaccgcgctcaaggcattggcagccactggaaggaagacagcagaggaggcgtcaaactggctacactgccattgcaatgacccttctctggacgaccccatcccccaggagtacgccctgttcctctgccccaccggtcccctgctggacaagcttcaagacttctggagagaaagcaggcggcagtgtgccaagaacagagcccacgaggtcttccctcatataacgctctgtgacttcttcacgtgcgaggaccagaaggtggagtatctatacgaggcactgaagagagctggggacaggaccctgcgcgcattcccctcggctgtgcctctggttctccattcttccattagctacctgggcttctttgtggacgacagccctgcagacatcatccgggaatttgctgtgatgttcgccacagaagcctccgtcttggcagactgcacggtgaagccttgcaccaagcagctgcatctcaccctggcccacaagttctaccctcaccaccagaggacgctggagcagctggccagagccatcaaccccagccacagctgccagtggacagccacgctctactcccgggacatgcgctttgtacactaccagaccctgcgggtcctattccagtacaaaccccagaacgtggatgagttgacgctcagccccggggactacatctttgtggaccccacgcagcaggaggaagccagcgagggctgggtgatcgggatctcgcagcggacgggctgccggggtttcctgccggagaactacacagagcgagccagcgagtgtgacacctgggtgagacacaggacatacaccttcagtgtaacccctgacctgagctccagaaaggacggcgaggccagcagcagacggaacggggaccccaacccaccatcctcgtccaggagcctcagcagcctgcagtccctacaggccacgatagtgaggagaagtgtcctggtggtacgccatggggagagggtggaccagatcttcgggaagtcctggctgcagcagtgtacaacacccgatggaagatattaccggccagacctgaacttccctcgcagcctgcccaaacggagccgtggcatcaaagactttgaaaacgatccaccattatcgtcttgtggaattttccagtccaggatggcaggggaagctctgctggacagcggcatcaggatcacctcagtcttcagctcccccgccctccgctgtttgcagacggccaaacatatactgggagagttcaaactggagaaaaaagttaagataagagtggaacctggcatctttgaatggaccaaatgggaggccggcaaaaccacccccaccctcatgaccctggaagagatgaaggaggcagatttcaacgtcagcctggattacaggcccgccttccccctcgcctctctcctgccagccgagagctatgatgattacgtgcacaggtgtgcagtgagcatggaacagatcgtcagcacctgcccacaggatggcgtcatcctggtcgtgggccacagctcggcgctggacacctgcactcgcccgctgcttgggctgccgccccgggactgcgcggacttcgcccagctcgtgagaaaggtcccatctctgggtatgtgcttctgcgaagaaaacaaagaggaaggaaaatgggagttggtgaacccacccgtgaagacgctgactcacggctccaactctgcgtttaactggaggaactggatccagggcaactga

SEQ ID NO: 5728 - protein, 623 aa, Bos taurus
MAAGETQLYAKVFNKLKGRSTPSLLDPLLGMGFPAHTALKALAATGRKTAEEASNWLHCHCNDPSLDDPIPQEYALFLCPTGPLLDKLQDFWRESRRQCAKNRAHEVFPHITLCDFFTCEDQKVEYLYEALKRAGDRTLRAFPSAVPLVLHSSISYLGFFVDDSPADIIREFAVMFATEASVLADCTVKPCTKQLHLTLAHKFYPHHQRTLEQLARAINPSHSCQWTATLYSRDMRFVHYQTLRVLFQYKPQNVDELTLSPGDYIFVDPTQQEEASEGWVIGISQRTGCRGFLPENYTERASECDTWVRHRTYTFSVTPDLSSRKDGEASSRRNGDPNPPSSSRSLSSLQSLQATIVRRSVLVVRHGERVDQIFGKSWLQQCTTPDGRYYRPDLNFPRSLPKRSRGIKDFENDPPLSSCGIFQSRMAGEALLDSGIRITSVFSSPALRCLQTAKHILGEFKLEKKVKIRVEPGIFEWTKWEAGKTTPTLMTLEEMKEADFNVSLDYRPAFPLASLLPAESYDDYVHRCAVSMEQIVSTCPQDGVILVVGHSSALDTCTRPLLGLPPRDCADFAQLVRKVPSLGMCFCEENKEEGKWELVNPPVKTLTHGSNSAFNWRNWIQGN

SEQ ID NO: 5729 - DNA, 639 bp, Aquifex aeolicus VF5
  CDS (1)..(639): transl_table=11
atgctcaagctcatagttgtaaggcatgcggaaagcgaatggaatcccataggacgctatcagggactcctcgatccggatttaactgaaaggggtgttgagcaggcaaggaggcttgcaaaggccctaaaaaaagaaaacattcaggttctcttctcctccccccttaaaagaacttttaaaaccgcaaaaattataggtgaggagataggacttgagcctattcccgaagaaagagtgatagagatagaccacgggaagtggtccggacttctggttgaagaagtgaaacaaaaatttccgaaagaatttgagaagtggttaaaagaacctcacagagtaaagtttgaaggcggagaatcccttttagacgtttttaaaagagttaaaaattttcttgaattcttactgaagaattacaacgagaagacggttgcagtagtatcccacacggttcctatacgatgtctttactgtgcggtgctggacattgacctttctaagttctggagttttgggtgtgacaacgcctcttactcggtggtatacttagacagtgaagggaggaacgtgattcaaaagctcaacattacgtgtcacttgggggatttgtatgttgaagcccataaagctctttag

SEQ ID NO: 5730 - protein, 212 aa, Aquifex aeolicus VF5
MLKLIVVRHAESEWNPIGRYQGLLDPDLTERGVEQARRLAKALKKENIQVLFSSPLKRTFKTAKIIGEEIGLEPIPEERVIEIDHGKWSGLLVEEVKQKFPKEFEKWLKEPHRVKFEGGESLLDVFKRVKNFLEFLLKNYNEKTVAVVSHTVPIRCLYCAVLDIDLSKFWSFGCDNASYSVVYLDSEGRNVIQKLNITCHLGDLYVEAHKAL

SEQ ID NO: 5731 - DNA, 606 bp, Thermotoga maritima MSB8
  CDS (1)..(606): transl_table=11
atgaaactctatctcataagacacggcgaaaccatctggaacgaaaagggtctgtggcagggagtcacagatgttcctctcaacgaaagaggaagagaacaggcaagaaagctggcaaacagcctgaaaagagtcgatgccatttactcgagtcccctcaaaagaagcctcgagacagcagaagagatcgccaggcgctttgaaaaagaaatcatcgtcgaagaagatctgagagaatgtgaaatatcactctggaacggtctcacagtggaagaggctatcagggagtatcctgtggagttcaagaagtggtcatcggatccaaattttggaatggaaggtttagaatccatgagaaatgtacagaatcgcgtagtgaaggcgatcatgaagatcgtctcacaggagaagttgaacggttcagagaacgtggtcatcgtatcacactctctgtctttgagagctttcatctgctggatcctcgggcttcctctttaccttcacagaaatttcaagctggacaacgcgtccctcagtgtggtggaaatagagagcaaaccgaggcttgttttgttgaacgatacgtgtcaccttaaggaatcttga

SEQ ID NO: 5732 - protein, 201 aa, Thermotoga maritima MSB8
MKLYLIRHGETIWNEKGLWQGVTDVPLNERGREQARKLANSLKRVDAIYSSPLKRSLETAEEIARRFEKEIIVEEDLRECEISLWNGLTVEEAIREYPVEFKKWSSDPNFGMEGLESMRNVQNRVVKAIMKIVSQEKLNGSENVVIVSHSLSLRAFICWILGLPLYLHRNFKLDNASLSVVEIESKPRLVLLNDTCHLKES

SEQ ID NO: 5733 - DNA, 639 bp, Synechocystis sp. PCC 6803
  CDS (1)..(639): transl_table=11
atgaccctcaatctctactttttgcgccacggcgaaaccacttctagccagacagggaccttttgtggccgcctggacattgacctcaccagccacggttaccagatggcccaccaatttgccgaagcctacaaggatgtgagctggacggctatttttgccagtcccctgcaccgcaccatggccactgccactcccctaagtaaattgattaatctccccattcaaaaacgggatggtctgaaggaaattgcctatggggaatgggaaggaaaaaccccggcggaagttaatcaacaattccatgacgattatgtgcgctggttagccgatccaggttggaatgctccttctgggggagaaaagggcattgatattgcccgccgtagctcggaggtgctagaagaaattgaacgaacttttaccacggggaatgtgttggtggtgtcccacaagtccaccatccgcattatgctctgtagcttgctgggcattgacattggccgttttcgagaccgcattggtatgcctgttgcggcggtgagtattgtcaccatgtccgaacatggtcctctgattgaagtcatgggcgatcgctcccacctcaaccaggacttgcgcgatcggtacggcacttaa

SEQ ID NO: 5734 - protein, 212 aa, Synechocystis sp. PCC 6803
MTLNLYFLRHGETTSSQTGTFCGRLDIDLTSHGYQMAHQFAEAYKDVSWTAIFASPLHRTMATATPLSKLINLPIQKRDGLKEIAYGEWEGKTPAEVNQQFHDDYVRWLADPGWNAPSGGEKGIDIARRSSEVLEEIERTFTTGNVLVVSHKSTIRIMLCSLLGIDIGRFRDRIGMPVAAVSIVTMSEHGPLIEVMGDRSHLNQDLRDRYGT

SEQ ID NO: 5735 - DNA, 648 bp, Nostoc sp. PCC 7120
  CDS (1)..(648): transl_table=11
atgagtcaaatagtctggatcgcaagacacgccaaccgccttgactttgttaaccccgattggtttctcaccgcagaacgacgctatgatccacccttgtctgatgatgggatggtacaagctcaacagctcgctcaacgtttgcgaggggaaaaaatcgctcatatttttgcttctccctttctgcgaacagtacaaacagctaacgccgtagcagagatcttggatttgcccataaatctagaaacgggtttgagtgaatggctcaatcctgcttggatgactgaagaaccagaaaaactatcaactccagccttagcagaattatttccccgaattgatcttggttacacagcacgcattgccgccaactatcctgaaacccacgaagaagtcagggcgcgttcgggacaaacagcccgatgtttagtaactgaatgttttccagataatattttgttggtagcacatggcgcttctgtgctgggggcggctatggggctagtaggagaaattgccaaaactgaagttaaagcttccttatgttccctagtcaaagttgtgcgttatggcccggattggttgctagaactaaaaggagacacttctcatttggctcaggtagaagaagttatccgatttgcttaa

SEQ ID NO: 5736 - protein, 215 aa, Nostoc sp. PCC 7120
MSQIVWIARHANRLDFVNPDWFLTAERRYDPPLSDDGMVQAQQLAQRLRGEKIAHIFASPFLRTVQTANAVAEILDLPINLETGLSEWLNPAWMTEEPEKLSTPALAELFPRIDLGYTARIAANYPETHEEVRARSGQTARCLVTECFPDNILLVAHGASVLGAAMGLVGEIAKTEVKASLCSLVKVVRYGPDWLLELKGDTSHLAQVEEVIRFA

SEQ ID NO: 5737 - DNA, 1407 bp, Thermosynechococcus elongatus BP-1
  CDS (1)..(1407): transl_table=11
atggcacagtgggatggccaagtttgttgtctgtcaatcgctaaggagaaacctctgagtacccgagtcattattgtccgccacggtgaaagcacgtttaatgtccaagagcgggtgcaaggtcacagtgatgcctcgttgctcacggagcggggtcgttggatggcagcccaggtgggtctagcgctgcggggtattcctattcgcaaaatttacaccagtcccctgaaacgggcacaggaaaccgcagaggttatccatgctcagctccaaaaccccgaactcaagccaccccatgcccttgatctcctcaaagagattgccctgccagcttgggaagatctcccctttgccgaagtgaaggcacagttcccagaggactatcgccgctggcaggaagccccagaaaccttgatgatgaaaatcaccacagaaagtggccaaacgaaggagtttttcccgctactggatctctacgatcgcgcgggcatggtcttggaaacgctgctagcggctcacgccaatgaaacgattgtcattgtgggtcacagtggcatgaaccgtgccctgatctgcacgggcctcggcttgggggtcaagggttacctgcggctccagcaggccaatggtggcattagtgtcttaaatttcagcaatggcctgcggcaacctgctcaactggaagcgctcaatctcactagccatcttaatgatccttttccacagccccgcttcaaggaacaaacgctgcgggtctttcttgtccgccacggtgaaacggactggaaccgcgaaggacgcttccaagggcaaattgatgtgcccctcaatgaaaatggccgtgcccaagcagcggcggtggctgagtttctcaaggatgtccccttccaccatgccgtgagcagtcccctgctgcgtcccaaggatacggccttggcgattttgcagtatcacccccatgtgcagctggagttagagccagcccttgcagagattagccatggggactgggagggcaagtttgaacctgaggtggaggcggcctaccccggtgaactggaacgttggcggacaacaccagccctagtgcaaatgcccaatggcgaaaacctcgagcaggtgcgcgatcgcgtggtcaaagcctgggaactctggctgaagcgctggaaaactaatgctcccactccccacaatgtcttggttgtggcccacgatgccaccaataaggtgttgctctgccacattgttggtcttggcattgaaaacttctggctctttaagcagggcaatggcagtgtcacggtgattgactatcccctcaaggggggtctgccgcgcttgcaggcagtgaatatcaccacccatttgggaggggtactggatcggacggcggcgggagcgctatag

SEQ ID NO: 5738 - protein, 468 aa, Thermosynechococcus elongatus BP-1
MAQWDGQVCCLSIAKEKPLSTRVIIVRHGESTFNVQERVQGHSDASLLTERGRWMAAQVGLALRGIPIRKIYTSPLKRAQETAEVIHAQLQNPELKPPHALDLLKEIALPAWEDLPFAEVKAQFPEDYRRWQEAPETLMMKITTESGQTKEFFPLLDLYDRAGMVLETLLAAHANETIVIVGHSGMNRALICTGLGLGVKGYLRLQQANGGISVLNFSNGLRQPAQLEALNLTSHLNDPFPQPRFKEQTLRVFLVRHGETDWNREGRFQGQIDVPLNENGRAQAAAVAEFLKDVPFHHAVSSPLLRPKDTALAILQYHPHVQLELEPALAEISHGDWEGKFEPEVEAAYPGELERWRTTPALVQMPNGENLEQVRDRVVKAWELWLKRWKTNAPTPHNVLVVAHDATNKVLLCHIVGLGIENFWLFKQGNGSVTVIDYPLKGGLPRLQAVNITTHLGGVLDRTAAGAL

SEQ ID NO: 5739 - DNA, 642 bp, Clostridium tetani E88
  CDS (1)..(642): transl_table=11
atggaaatgggtataacattatatataactaggcatggacaaactgagtggaacacagaaagaagaatgcaaggatggaatgattcacctttaacaaaattagggatggagcaggcaaagagattaggaaagcgattagataataataatatagatataatttattctagtccattaggaagggctattaaaacagcaaaaatagttagaggagaaagggatatacctattgtatgtgataatagattaaaagagattaaattaggaaaatgggaaggtatgaatcatgaccttatagacaattattataaagaagagatagacaacttttggaataatcctaaactatacaaatctataggaggagagacatttttacagcttagaaacagagttaaagattttttggaggagattctaaaaaagcataaagatgaaactattcttatagtaactcatgctataacattaaaaggtatcatgaactatatagaagatttaactatagataatttttggggagaaccacatataaatcctacaagtctgacaaaggtagagatagaagattcaaatagaagaatattattgaatgcagatatatcccatttagatgaagtgaaagaaataaagatagtatag

SEQ ID NO: 5740 - protein, 213 aa, Clostridium tetani E88
MEMGITLYITRHGQTEWNTERRMQGWNDSPLTKLGMEQAKRLGKRLDNNNIDIIYSSPLGRAIKTAKIVRGERDIPIVCDNRLKEIKLGKWEGMNHDLIDNYYKEEIDNFWNNPKLYKSIGGETFLQLRNRVKDFLEEILKKHKDETILIVTHAITLKGIMNYIEDLTIDNFWGEPHINPTSLTKVEIEDSNRRILLNADISHLDEVKEIKIV

SEQ ID NO: 5741 - DNA, 612 bp, Bacillus cereus ATCC 14579
  CDS (1)..(612): transl_table=11
atgaaaacaactatatatgtaacaaggcatggtgaaacagagtggaatgtagcgaagcgaatgcagggacggaaaaattctgctttaactgaaaatggtatagttcaggcgaaacaattagggaatcgaatgaaagatttaccaatccatgcgatctatagtagtccgagcgaaagaacgcttcatacggcagagttaataaagggggaacgtgatataccgattatagcggatgagcatttctatgaaatcaacatgggtatatgggaaggacaaacaatcgcggatatagaaaagcaatttccagaagaagtacatctgttttggaatgagccacatctttttcagtcaacatcaggcgaaaattttgaggccgtttatgaaagagtaattgaagggatgcagcttcttttagagaagcataaaggacaaaacatattgattgtttctcatgcggcagcagcaaaattacttgtagggcatttcgcgggaattgaaatagaaaatgtgtgggatgatccatttatgcatagtgccagtttgagcataatagaatttgaagagggtattggtaaagtgaaacaatttgcagatataagtcactttcaataa

SEQ ID NO: 5742 - protein, 203 aa, Bacillus cereus ATCC 14579
MKTTIYVTRHGETEWNVAKRMQGRKNSALTENGIVQAKQLGNRMKDLPIHAIYSSPSERTLHTAELIKGERDIPIIADEHFYEINMGIWEGQTIADIEKQFPEEVHLFWNEPHLFQSTSGENFEAVYERVIEGMQLLLEKHKGQNILIVSHAAAAKLLVGHFAGIEIENVWDDPFMHSASLSIIEFEEGIGKVKQFADISHFQ

SEQ ID NO: 5743 - DNA, 1329 bp, Prochlorococcus marinus subsp. marinus str. CCMP1375
  CDS (1)..(1329): transl_table=11
atgactttacgccttctattaatacgtcatggtttaagcagctacaaccttgagcatcgcatacaaggtcggaatgatctttcaacacttactactaaaggaacccttcaagcctcaaaagctggtgaatctcttagatcgttacatatccatgcggtctacacttctccattacaaagagcagcagatacggcaaaggaattgataaagaatcgtaatggagaactaattccaattttagacaatgatcttctagaagttgacttggaaccatggagcggtcttaccattgatgaagtaaaaaacaaattctctgacttatattcgacctggaaacaccatccaaaagaactcattcttcatagaaaaaatggtaatagctataagccaatcaaagaattaatggatcaagcagaaagattcttaaagaaaataatttctactcatcacccagacaagaatgaaactgtattagttgtaggtcataacgcaatacttcgttgcctcattttgaaaatgtttaaagaaccagctgaaggctttaggaggatcaaattagacaattcatctatatcagtattcaacataaatactgatatagaaaacaaagctgagtttcaagttgaatctcttaacagcacatcccatttaacacctcaaatacctccgaaaggtagtttcgctcgcattttccttgttcgccacggagaaaccaattggaacaaagaaggtaggtttcaagggcaaatagacatccctctaaatgagaatgggcaaaaacaagctcttgcagcaagtaacttcttaaaaaacgtgaaattcaatcaggcctttagcagctcaatgtctagacctatggaaacggcaaaaattattttaagaaatcatccaaccatagaaattaagcaacaagatgaacttgtagagataggtcatggattgtgggaagggaaactcgaagcagaaatcagttctgaatggggcgacttgctaaaaaggtggaaaaagtcaccagaaacagttcaaatgcctgaaggagaaacaataggagacgtatcatcgcgcgcaatgaactgctttagacacattgctcaaaggctatcacccaatgacacagcccttatcgttgctcatgatgcagtaaataaaaccatcttatgcaatcttctaggacttactaatgcagatatttggaaagtcaaacaaggcaatggtggcattaccattatagacctgactgaagagcaggaaccagatataatcacctgtctaaacatcacctctcatttaggagatgttgtagatagaacggcgcagggggctctctaa

SEQ ID NO: 5744 - protein, 442 aa, Prochlorococcus marinus subsp. marinus str. CCMP1375
MTLRLLLIRHGLSSYNLEHRIQGRNDLSTLTTKGTLQASKAGESLRSLHIHAVYTSPLQRAADTAKELIKNRNGELIPILDNDLLEVDLEPWSGLTIDEVKNKFSDLYSTWKHHPKELILHRKNGNSYKPIKELMDQAERFLKKIISTHHPDKNETVLVVGHNAILRCLILKMFKEPAEGFRRIKLDNSSISVFNINTDIENKAEFQVESLNSTSHLTPQIPPKGSFARIFLVRHGETNWNKEGRFQGQIDIPLNENGQKQALAASNFLKNVKFNQAFSSSMSRPMETAKIILRNHPTIEIKQQDELVEIGHGLWEGKLEAEISSEWGDLLKRWKKSPETVQMPEGETIGDVSSRAMNCFRHIAQRLSPNDTALIVAHDAVNKTILCNLLGLTNADIWKVKQGNGGITIIDLTEEQEPDIITCLNITSHLGDVVDRTAQGAL

SEQ ID NO: 5745 - DNA, 1317 bp, Porphyromonas gingivalis W83
  CDS (1)..(1317): transl_table=11
atggaagctcacaacctctttacgaatatcattattccctcgataatggctctaacagcggttattactgttgttatcaagattcaggaacactttatcctgctaagtagaaatacggcaaaacaatctaagaatgagaatctcataaataaagggttattgcctaaattttcccttggcaaaattttgttttataggcgattaaccatgaaaaaagcgataagcgcagccaaaaatgttgcaaggaatatagaagcctcagagtttgaaccaacaataattattggtataggacgaggtggatctatttttggatctttgatttcatataacttataccacaccccaatctttagtgtcgatcgagaatatgaatggctagaaaagagacatgataaaatgttatttgcttttgacattcctattcatttaacgcgtagagtattgctggttgcaggtgaagctcatactggaggaacgatggaggcttttactaggtatttgagaagtataggggtaggagaaataaaaacatgcgttttttataagcaaagtatatgtacacaacatatagatttctggggaatggaaggggagaataccatactaatgccttggcaaaacgcccaatccattcgagatagtttaagtaaagcgcaagcgaatcaattaaagaagatacaacgccaaagagattgtcctaaggtaatatatcttgtgcgccatgcagagactgaggaaaattcagatggagatcgttttataggttctacgaatgctatattaagtgaacatggcagaattcaagcggaacaagtcgctgattttatatcaaaaaaaggaaaaatcgatcttatttacactagtcctcttcttaggtgtttggaaacggctcaagtcatacaacaaaaggtccaatcacatttgctaaaaaatgatgatttgcgtgaaatggactatggcgtttgggaaggacttcaaagggaggaggtaaaggtgcaattccctgaattatatcgtaaatatgaagaagacccctttcataattatccgaaaaggggagagaatcctttcgatgtccaagaacgagtcagaagattttgggagagagagattctttcactaccaagcagcgtcaatcaagttgttatagtgacacataaaacaacaggtagaatattattgaataatgttatagagggaaaggaatcctcttttagggggagacagatggataatgcctcagttgcaaagatctctgtaaaactaggaattgtagaagtcgagtatgagaataatcgagtatttctctcttaa

SEQ ID NO: 5746 - protein, 438 aa, Porphyromonas gingivalis W83
MEAHNLFTNIIIPSIMALTAVITVVIKIQEHFILLSRNTAKQSKNENLINKGLLPKFSLGKILFYRRLTMKKAISAAKNVARNIEASEFEPTIIIGIGRGGSIFGSLISYNLYHTPIFSVDREYEWLEKRHDKMLFAFDIPIHLTRRVLLVAGEAHTGGTMEAFTRYLRSIGVGEIKTCVFYKQSICTQHIDFWGMEGENTILMPWQNAQSIRDSLSKAQANQLKKIQRQRDCPKVIYLVRHAETEENSDGDRFIGSTNAILSEHGRIQAEQVADFISKKGKIDLIYTSPLLRCLETAQVIQQKVQSHLLKNDDLREMDYGVWEGLQREEVKVQFPELYRKYEEDPFHNYPKRGENPFDVQERVRRFWEREILSLPSSVNQVVIVTHKTTGRILLNNVIEGKESSFRGRQMDNASVAKISVKLGIVEVEYENNRVFLS

SEQ ID NO: 5747 - DNA, 612 bp, Bacillus cereus ATCC 10987
  CDS (1)..(612): transl_table=11
gtgaagacaacggtatatgtaacaaggcatggtgaaacggaatggaatgtagcgaagcgaatgcaaggacggaaaaattctgctttaactgaaaatggtatactgcaagctaagcaattaggagagcgaatgaaagatttatctattcatgcgatctatagtagtccgagtgaaagaacccttcatactgcagagttaataaagggagaacgtgatataccaataatcgcggatgagcatttctatgaaattagcatgggtatatgggaaggacagaccattgatgatatagaaaggcaatacccagacgacatacagttattttggtatgaaccacatctttttcagtcaacatcaggagaaaattttgaggctgttcataaaagggtaattgaggggatgcagattcttttagaaaagcataaaggagaaagtatattaattgtttctcatgcggcagcggcaaagctacttgtaggacattttgcaggtattgaaatagaaaatgtgtgggatgatccatttatgcatagtgctagtttgagtattatagaatttgaagaagataaaggtgaagtgaagcaatttgcagatataagtcattttcagtaa

SEQ ID NO: 5748 - protein, 203 aa, Bacillus cereus ATCC 10987
MKTTVYVTRHGETEWNVAKRMQGRKNSALTENGILQAKQLGERMKDLSIHAIYSSPSERTLHTAELIKGERDIPIIADEHFYEISMGIWEGQTIDDIERQYPDDIQLFWYEPHLFQSTSGENFEAVHKRVIEGMQILLEKHKGESILIVSHAAAAKLLVGHFAGIEIENVWDDPFMHSASLSIIEFEEDKGEVKQFADISHFQ

SEQ ID NO: 5749 - DNA, 1173 bp, Eremothecium gossypii
  CDS (1)..(1173)
atgacaatcaagatgatatacgttgcaagacacggataccggtcaaactggctgccccatgggccctacccggagccgccgacgggcgtaaacagcgacgtaccattagcagagcacgggcttgaacaggcgcgcgagctggcgcactacctgctgtcggtggacaaccagcccgagctacttttctcgtcgccgtttttccgctgtctgcagactacggagcccatcgcagaagttatggagctgcccatccacatagagcgcgggatcggcgaatggtacaagccagaccgcgacgtaatcccggaaccggcgccgtttgaggtactggagaacttctttccgggcaaactcaacggagaatggggcgcgacggtggtgccgagcaacaagggcgagacggaaacggacatcttcgaccgctgccgcgagttctggccgcgattcattgcgagagtggagcagcagtatccggatgtggagaagctcatgttggtgacgcacgcagcgacgaagattgcgctagggatgagcctgctcggcttcagcagctgtcgcgagcctatcgacgaggacggaaccataatccgcagtggcgcgtgttcgctggacaagtacgagctactccaggaggaggaggatttgcccttcccgcagaggcactggaagatgactatgaacggcaacactgagtttctgagccgcggcgaggaaatgcactgggacttccgcagtggcttcgaagccggatcggacgcggaagtcaaggcacgcagcaccgccgcagccaccgcaacggactcggatgacgcagaggacacggagcacgtgtacgtctgcctcgatgtacccaaccacaactaccgcgagcgccacgagataagccatactgctacgctgcaatacgcaggccttgatagggaaagcccgctcgtgaaggtgggcgagaacatctatgagggcacgtggaagaaactaattggcacggagctggcctttcctagtgcagcgactacgaaacggaaaacggccgacggcgccgccgattccctccacgatgagaacgagaaatcgaaccatgatggatcgacagaacccccagaaaaggtgctctccgagcggatatatagaatcgtagaccacctcgagctaaatgaagtagaccatctttga

SEQ ID NO: 5750 - protein, 390 aa, Eremothecium gossypii
MTIKMIYVARHGYRSNWLPHGPYPEPPTGVNSDVPLAEHGLEQARELAHYLLSVDNQPELLFSSPFFRCLQTTEPIAEVMELPIHIERGIGEWYKPDRDVIPEPAPFEVLENFFPGKLNGEWGATVVPSNKGETETDIFDRCREFWPRFIARVEQQYPDVEKLMLVTHAATKIALGMSLLGFSSCREPIDEDGTIIRSGACSLDKYELLQEEEDLPFPQRHWKMTMNGNTEFLSRGEEMHWDFRSGFEAGSDAEVKARSTAAATATDSDDAEDTEHVYVCLDVPNHNYRERHEISHTATLQYAGLDRESPLVKVGENIYEGTWKKLIGTELAFPSAATTKRKTADGAADSLHDENEKSNHDGSTEPPEKVLSERIYRIVDHLELNEVDHL

SEQ ID NO: 5751 - DNA, 2880 bp, Neurospora crassa
  CDS (1)..(2880)
atgtcagccgatctctttgcggcctttggggcttcatctcacgatcaagattctcagtcaaatccggttaacaacagcagcgaccccttttccttcttgacatcaaacaacagcacctccttaccaccgccaaagcccccacaaccacagccacaacaacaaccagctcctgtctctataccatggccttcgataccgcctagccaaccccaaacatcaagtctatggggcgatctcggcacgttgggaggatcccaaggagggttccagagtttccaatccgcatcgccagctccagcacctccgaaacccgctgcgccggacgtggaggatgaggacggttggggagattttgaagttgccgccacccataacgcaagtttacaaagcccatctcctccggccagcaacgttggaccgccccaaattggtcgcgtcagaagccccacgcttgatctggtgtcgaataagctcgtcaatctcgacttgtcttcaactggctctcaaccatccgccaacaagcctgtacagaaacccgtgattaagcctatccgaaacgctgacccaagcgttttgttcgatgccgatgactttgagctccaggaggtagacggtgaggaagacgacgacgacgacgagttcggtgactttgaaggcacttcaagtcccgcgctcattgtcccagccgccggtcccggcacgaaagaacccaagaaacagccccctggccttttcctatcgggcggcaattcccagacgctgcatccagcagcgccaaagtctccgtatgcgtcgtcccacgctcggaaactcagcgatgtcaaggagctcaagatcaagacaccagtgacctcgggctttcctaaagaggtcaaggaccgagaagcgtccccggtcacagcctggccgtccggtactggtgatggtttcgggcatgagtgggataagttcgcagaccatgctgtcagtcacacaaagacactgacaaagacggctggtaataccaagacaccagcaaagaaaccagagctagaatcttcttttgactcagaatggaaggactgggaggaaacagagacagtccaaccacaggctgtcgggattgcttcccaaaccaccaactctgacaaacgtcctccgcctacgaacgtgcctccgccatctatcttgctctccatactgccccagctcctcgatctttccaaaacaactctgctcaagatcaagggtttgcctgcggccaagcagcatgctgttgcttccgaccctgccacaatgatatttctgcgcggttatctggccttggctactgtgacgggcaggatcatcgctggccgaaagcaaaggtggcaacgcgataaatttcttatgcagggcatgtccatctcagccgcaggaggcatgagaggaatgaagcttgccactgttgacaaatctcagtctgctagagacgatcacagtgctgtcgcggttctggatgtctgggcccagcaagagggaagtctgcgctctacagttacggcagctaatgccgcctcggataccaaactcaaggtccctcagctcaagctcgctctcccggtccatgtagccaagaacgtacccacggcaccgaaaccctgtgtgatatgcggcctcaaaagggatgaacgagttactggagttgactttgatgtcgaggatagtttcgatagcctctggattcccaactctactcgctggccgccaaacatcaacaccatgaaccatatgcgcgtatccggggcgagtaactatcaggcggccaaaaccatgacattggaggttatctacgtgacacgccacggtttccgctccaactggctggtcgaccataccaacggtagttactcgtccactctcaggtcccctacgggtatagccgcagacccagccctcacagcccacggcgtagatcaagccaaggagctgggccagcgtttgacggtagagccattcgtccgagcagtatcgacctctccatcatctttgccagaagaagccaaagagggcactcgccactgccagcgacagctgcgtgttcgaggagaaacaggaataggcgagtggtatggttcggcgcccttcgaacaccccgtacctgcgagccttgccacgctcgagtttcatttcccttgcctgctggaccgtgattatcagccggcagtagtaccgacacggatgggcgaaagtgtcgatgaactgcatgaccgcctggctgttaccttggagcggctaattgccgagtgtgatagggatggcatccgtgccgttcttctctgctcgcacgctgcgcccatcatcgctcttggtcgtgttttgactggcaatatgccggagaatatcgaggtcgaagactttcgagcctttacctgcggcctaagtgtgtttcggcgacgaaagggggcttcgtcaagagccgtcgggtctcgcacggccagtatgactgcaggcgcatctcggacccagacggtggcaaatcgcagcatcagcagcggcgtggacaacaccagcaacatcctcggcatcactcctggaatggcaaagcaaacccctaaagcaggtaccggtgatcttcaggatgcggagagtgatccacggcagcagggtcttcatgctcccgtagtctggaggggtggccgaggcgtaaagggtggttgggattgtgaactgaacagtgactgctcgcacctttctcagggagaggaacgaggatggcgcttcgcgggcgatgagtcctttaaggatgtccctaacaagagcatactggatgctggaatatcactgggcgtcgtggtggagggcaacaatgagagtggcaagtcgcgcgggaaatcttccactggaggctctcgtctctga

SEQ ID NO: 5752 - protein, 959 aa, Neurospora crassa
MSADLFAAFGASSHDQDSQSNPVNNSSDPFSFLTSNNSTSLPPPKPPQPQPQQQPAPVSIPWPSIPPSQPQTSSLWGDLGTLGGSQGGFQSFQSASPAPAPPKPAAPDVEDEDGWGDFEVAATHNASLQSPSPPASNVGPPQIGRVRSPTLDLVSNKLVNLDLSSTGSQPSANKPVQKPVIKPIRNADPSVLFDADDFELQEVDGEEDDDDDEFGDFEGTSSPALIVPAAGPGTKEPKKQPPGLFLSGGNSQTLHPAAPKSPYASSHARKLSDVKELKIKTPVTSGFPKEVKDREASPVTAWPSGTGDGFGHEWDKFADHAVSHTKTLTKTAGNTKTPAKKPELESSFDSEWKDWEETETVQPQAVGIASQTTNSDKRPPPTNVPPPSILLSILPQLLDLSKTTLLKIKGLPAAKQHAVASDPATMIFLRGYLALATVTGRIIAGRKQRWQRDKFLMQGMSISAAGGMRGMKLATVDKSQSARDDHSAVAVLDVWAQQEGSLRSTVTAANAASDTKLKVPQLKLALPVHVAKNVPTAPKPCVICGLKRDERVTGVDFDVEDSFDSLWIPNSTRWPPNINTMNHMRVSGASNYQAAKTMTLEVIYVTRHGFRSNWLVDHTNGSYSSTLRSPTGIAADPALTAHGVDQAKELGQRLTVEPFVRAVSTSPSSLPEEAKEGTRHCQRQLRVRGETGIGEWYGSAPFEHPVPASLATLEFHFPCLLDRDYQPAVVPTRMGESVDELHDRLAVTLERLIAECDRDGIRAVLLCSHAAPIIALGRVLTGNMPENIEVEDFRAFTCGLSVFRRRKGASSRAVGSRTASMTAGASRTQTVANRSISSGVDNTSNILGITPGMAKQTPKAGTGDLQDAESDPRQQGLHAPVVWRGGRGVKGGWDCELNSDCSHLSQGEERGWRFAGDESFKDVPNKSILDAGISLGVVVEGNNESGKSRGKSSTGGSRL

SEQ ID NO: 5753 - DNA, 1152 bp, Magnaporthe grisea 70-15
  CDS (1)..(1152)
atgatacaagatgggaagttgaacaaggaaggtcttgcgaccaaaacagagttcatcgtagcgaggccaccaggcgcgtgtgcccgctcccttttctcaacggttctggcgccgtcattcggaagtcgacgagccggcagagatactttgagccttgctggagatggcattggacaccatatacgtggtccgccacggggagagtactttgcaaatatcccgtcgcctactggtatcgccgtcgaccctgcccttacggcgtacggtgtcgaccagggcaaggagctgggccgtcatctgttggaccacgtgcgacccccaatcgagagggtctactcgagtccgttctaccgctgtctgcagaccatagagccgtttgtcagaagtaagctcgaggaggggacccaggagggcaaggccactgttgatggtaagcacaacgccagcgacctaaactctgcagccgatcgagttgacgcagccctaaattcatcatcaacagcgacagcatcatcaccaggaagttcctctgatgccaaggcgctaccgctaatcaagatccgcgctgaacctggattgggcgagtggtttggcacggcgcattttgaccacccagctccggccccggtggaggagctgtcaaccttatttcctgatatactagaccaaggctattcgcctgccttaactccgaccagccgtggagagtctatagagcagctccacgatagggtagctctcgccgtgctcgaggtgatcaagcgctgcgacgcagagggcgtccgttcggtcgtcctgtgcactcatgccgcagtcgtgatcgcgctaggcagggtccttacgggacatatgcccgccgacatcactgttgatgatttccacgcttacacctgcggccttagcgcttatcgaaggcgacaacaggctgcccctgttgctgtagatcagcagccctccgtgtcgccggcggcagggccagttgcctggagagacgggactggcgttggaggtggatgggactgtgagctgaacagcgattgcagcttcctgaccggagggagcgaacgcggatggaaattctctggagatgaatcctttggaggaatcaaccaaagcaatgttgaagcggacaagcgcacacctcgtttgtag

SEQ ID NO: 5754 - protein, 383 aa, Magnaporthe grisea 70-15
MIQDGKLNKEGLATKTEFIVARPPGACARSLFSTVLAPSFGSRRAGRDTLSLAGDGIGHHIRGPPRGEYFANIPSPTGIAVDPALTAYGVDQGKELGRHLLDHVRPPIERVYSSPFYRCLQTIEPFVRSKLEEGTQEGKATVDGKHNASDLNSAADRVDAALNSSSTATASSPGSSSDAKALPLIKIRAEPGLGEWFGTAHFDHPAPAPVEELSTLFPDILDQGYSPALTPTSRGESIEQLHDRVALAVLEVIKRCDAEGVRSVVLCTHAAVVIALGRVLTGHMPADITVDDFHAYTCGLSAYRRRQQAAPVAVDQQPSVSPAAGPVAWRDGTGVGGGWDCELNSDCSFLTGGSERGWKFSGDESFGGINQSNVEADKRTPRL

SEQ ID NO: 5755 - DNA, 885 bp, Gibberella zeae PH-1
  CDS (1)..(885)
atgtcactcgaggtcatctacgtcacacgccacggattccgatccggctggagtgttgaccctttgaccggcgtctacacggccaccatacgatcacccacaggaattcccgcagaccctgctctgacgtcttatggagtatcacaagcgaaggagatgggcaaacatctcatgaccctggagcctcctatcgatgtcgtgtactcaagtccttactatcgctgccttcagacaataacgccatttattgagctcaagcaacaacaattagaagaggaaccaggaacaacacatggctcggcgaccgccacaattcgcccagaacacgggttaggtgagttctttggggcagcgcctttcgatcatccaatcccagcctcgcataagcgactcaaagagctattcccagcctatgatgatagctacgtatctgccataaagccttctagaaaaggcgaaacgatcgaaaacctctatgggcgtgtagcagtggccatgcgaggcatcgttgagcgttgcgatgcagagggaaaacgtgcggtggtgctctgtacccatgcagccgttgtcatcgccttgggccgtgtcctcacagggcgtgtccccgaagctgtcgaagaagaagatttccacgcctttacgtgcggcctgagcacgtaccgccgccgtcgacaaggcacaggcacgcaagtgccaagcactgacgaatcccaacccttcataagcaaagccatccctgtcgggcttggggagtggcagtgcgaattggacagcgattgtagctttctgagctctggagaagagcgaggctggcggttttctggggatgaatctttccctgggactgggtccatgtcacaaggcggcgttgagtccaagctatag

SEQ ID NO: 5756 - protein, 294 aa, Gibberella zeae PH-1
MSLEVIYVTRHGFRSGWSVDPLTGVYTATIRSPTGIPADPALTSYGVSQAKEMGKHLMTLEPPIDVVYSSPYYRCLQTITPFIELKQQQLEEEPGTTHGSATATIRPEHGLGEFFGAAPFDHPIPASHKRLKELFPAYDDSYVSAIKPSRKGETIENLYGRVAVAMRGIVERCDAEGKRAVVLCTHAAVVIALGRVLTGRVPEAVEEEDFHAFTCGLSTYRRRRQGTGTQVPSTDESQPFISKAIPVGLGEWQCELDSDCSFLSSGEERGWRFSGDESFPGTGSMSQGGVESKL

SEQ ID NO: 5757 - DNA, 1101 bp, Aspergillus nidulans FGSC A4
  CDS (1)..(1101)
atgttgaacctggttttcttcgtagtagtctctcacccaaatcaccgccggcaccccactaatcaactccagcaccgattgaattggacaatcgactacagaaccggcacatacagctctcaatttcccacacccacagggaatccctccgacccaaccttgacctcccacggtgttcagcagtcgcatgagctcgcggctcatctcgttagcggggatgttatgccgaagccgttcagggtctattcaagtccgttttggaggtgcctgcagactattgagccggctgtgagggctttgaaaggcgcgaaggagatgtcgaagggtaacgaagtcggaggagagacgggagggattgacatgaatgcggagtttgaaattagagtggagaatgggcttggagaatggttcggctcaacaaccttcttccatcaccctacgcctccgtcgctctcaacactgctatcactcccgaagtccaacttcgaaaagagcgaaccgccattcactttggacaccacgcgcagcgtacccctcctatacacatccacccagggcgagtctattccccaactccacaatcgccttgcaacaactctagccggtataatccgtgaagtcgacgccgaagtcttcgagctcgaggcctctttaccccccgaacagagatcaagcaaagcaattcttatatgctcgcatgcggcgccgctgatcgctattgggcgcgtgctgacgggccatatgccggaggactcaagcgaggaagattttcatgtgtttacagcggggctgagtacgtttcggcggaggaggaatgaggctacgtataggcttggatatgttgcgcagaagagggagggtaaggcgctggcggaggggacgaggattacggatccaaccactacggctgtgcctgaatgggaaggagggaagggggtggggggtggctgggactgtgtggtgaacggggattgtagttttttgagcggtggtgcagagagaggctggcatttcaatggggaggagtcgtttgatacagggcccatggcagacacggcgagttcagcggaaggggagatgcggttggggaacaagttatag

SEQ ID NO: 5758 - protein, 366 aa, Aspergillus nidulans FGSC A4
MLNLVFFVVVSHPNHRRHPTNQLQHRLNWTIDYRTGTYSSQFPTPTGNPSDPTLTSHGVQQSHELAAHLVSGDVMPKPFRVYSSPFWRCLQTIEPAVRALKGAKEMSKGNEVGGETGGIDMNAEFEIRVENGLGEWFGSTTFFHHPTPPSLSTLLSLPKSNFEKSEPPFTLDTTRSVPLLYTSTQGESIPQLHNRLATTLAGIIREVDAEVFELEASLPPEQRSSKAILICSHAAPLIAIGRVLTGHMPEDSSEEDFHVFTAGLSTFRRRRNEATYRLGYVAQKREGKALAEGTRITDPTTTAVPEWEGGKGVGGGWDCVVNGDCSFLSGGAERGWHFNGEESFDTGPMADTASSAEGEMRLGNKL

SEQ ID NO: 5759 - DNA, 786 bp, Candida glabrata CBS138
  CDS (1)..(786)
atggctctgaagacaatatatgtggctagacatgggtacaggtcaaactggttacctgagggaccttaccctgcacctccaaccggcatagacagtgatgtaccgctagctgaacatggagtcgaccaagcgaagcagctggctgagtatatatcggcgacatgggacgaagagcgtaagcctcagatggtattcacgtctccattttaccgttgtgttcagaccagtgagcccgttgtgaaggcgctggacctgccacttatcattgaacgtggtcttggggaatggtacaaacccgacagaccggtgatccctgagccagccactgtggcacagctatcagagttgttccctgaggttactttcgacacccagtggggtgggcccacagtgataccgagcgggaaaggtgagactgagcaagagatctttgcacgcagtggagatttcctttcgaagtttcttgacaggatgcaaagggactatccagacatcgagcgtgtcttgtttgttacacacgccgcgactaagcaatgcattggtatgaagctgctaaacatcgaaaatgtcagagacagtatagacgaacaaggaaacgttctgcataacgccagctgttccattgattggttcgaatacaccgggaacaactggctcctgaagatgaatggtgagacctctttcttgaaagacggtgccgagatggactggaacttcacctatgggtttgaagccggctctgacgcagacatcaaagccagaagactacgtggagagatcaactag

SEQ ID NO: 5760 - protein, 261 aa, Candida glabrata CBS138
MALKTIYVARHGYRSNWLPEGPYPAPPTGIDSDVPLAEHGVDQAKQLAEYISATWDEERKPQMVFTSPFYRCVQTSEPVVKALDLPLIIERGLGEWYKPDRPVIPEPATVAQLSELFPEVTFDTQWGGPTVIPSGKGETEQEIFARSGDFLSKFLDRMQRDYPDIERVLFVTHAATKQCIGMKLLNIENVRDSIDEQGNVLHNASCSIDWFEYTGNNWLLKMNGETSFLKDGAEMDWNFTYGFEAGSDADIKARRLRGEIN

SEQ ID NO: 5761 - DNA, 1293 bp, Candida glabrata CBS138
  CDS (1)..(1293)
atggttgtgcgtacagtttatatcgcgagacatggctacagggcgaactggataataggtgctgaggttcccccacctccaaccggtatagctggcgatgttcagctggctcagcatggtatcaagcaagcccatgaattgggcagatttcttttaactttggatgatcaaccagagatgatattctcatccccattttacaggtgtttggaaacttcgactcccattgcagagctattggaagttcccgtctacattgaaagggggtttagtgaatggtacagaccagacaggcccgtgatccctgtgcccgctgataatgaactcctgtcgaagtatttccatgacacagtaagactagaatggcactcacagcctgcccctagtgagaaaggtgaaacagaggaagagctatacaaaaggtgccatgacgctcttaacaatttcataaaacaggtggaaaagaaattccctagtgtggaaacaattatgattgttacacatggtgctacaaagattgcattaggtctaaatctgttacaaaaaccagactgcaggtgcacaattgatgatacacatgaatatctgagatgtggaagttgctctctagataagtttgaactaccgagcaatgctaaagaaacctcgaatccagaagaagatattgacgttttggaggaaaccgagcctctgaagagaaattggatgtgtacattgaatggtcacacagagttcttatctcgaggcgaagaaatgaattgggggtttcatctaaacgtagaggctgggtcagatgctgatgtcaaaagccgtataacaacggaaactgccggtaaggaatccgtctatgtcagtgttgatatacctagcggcaactacaaaggtaagaacgttctcgataaaaaagctacacttcagtattctggtctagaagaacacgaacctctagttctcataaataacaaactttacgtgggtaagtgggaaaagctggtaggtactgaattagctttcccatcaactgcgacagtgaataaaaaaaatcttcgaggtggagaagatgatgagagttcgagtaagggcttgaatcatatattagatgaagatataattgctgatgaattcgataatattaagaaagaagaagatgacaaacttgcagaagatagcgacgattcctccattgagaaacaaaaaatacccgaagaaagaaatgaattagagaataaagttaccgagaaaatttatagaattaaagacagactggtattagaagaggtggaaataatataa

SEQ ID NO: 5762 - protein, 430 aa, Candida glabrata CBS138
MVVRTVYIARHGYRANWIIGAEVPPPPTGIAGDVQLAQHGIKQAHELGRFLLTLDDQPEMIFSSPFYRCLETSTPIAELLEVPVYIERGFSEWYRPDRPVIPVPADNELLSKYFHDTVRLEWHSQPAPSEKGETEEELYKRCHDALNNFIKQVEKKFPSVETIMIVTHGATKIALGLNLLQKPDCRCTIDDTHEYLRCGSCSLDKFELPSNAKETSNPEEDIDVLEETEPLKRNWMCTLNGHTEFLSRGEEMNWGFHLNVEAGSDADVKSRITTETAGKESVYVSVDIPSGNYKGKNVLDKKATLQYSGLEEHEPLVLINNKLYVGKWEKLVGTELAFPSTATVNKKNLRGGEDDESSSKGLNHILDEDIIADEFDNIKKEEDDKLAEDSDDSSIEKQKIPEERNELENKVTEKIYRIKDRLVLEEVEII

SEQ ID NO: 5763 - DNA, 1173 bp, Kluyveromyces lactis NRRL Y-1140
  CDS (1)..(1173)
atgacattaaaaacgatttacattgcaagacatggttatagatcgaattggctgcctacaccaccagcacacccggcaccacctaccggtgtaaatagcgatgttcctttagcttcacatggtgtagaccaagctaaagaactcgcgcactatttgatatctattgataaccaaccgcaaatgatattttcttctccgttataccgttgcttacagaccagtgaaccagctgcagatcttttagaacttctgatttatatcgatagaggtttgagtgaatggtacaagccagatagagatgtgattccagagccagctacttttgatatcttgaataacttctttgcaggtaagttgaaaagtgactggccaaatagcgttattcctagccttaaaggtgagactgaagaagatatcttcaagagatgcagtaaattttggcccatattcgttaaagaattggaaaaacagttccctgaagttgaaactattctgttagtaactcatgcagccactaagatcgcattgggtatgacgctgttgaagttccataatgtcagagagtctctagatgaagatggtactgtgataagagctggcagctgttctttggacaaatacgaacttttagacgatgacgtagatgaagatgaaaacggcgatgagtctgtattacccttcgaacaaagacaatggaaattaacaatgaacggtaacacggagtttttaagcgcaggagaagaaatgcactgggatttcaaatctggattcgaagccgggtctgacgaagatatcaaagctaggcgaaagaaacaattggaggaacgcgggactacagctaacagtgaaaaggtaactgatacaaattcaagtgaagaatatgaacacgtctacgttagccttgatgttgataatcgtaattatcgtgaacggaatacggtacaaaatcaagctacattacagcactccggtttagagactgataaacctttgataaaaattggtgataacgtttacgagggtacttggaagaaatctcttggtaccgagttagcatttgctaaagagttaggcaatgttgggtccaaagagagtgagcaagacgcaggtaaccctgagcgcgtttacagagtcacagatagtatagatcttaacccaattcaacctatgtaa

SEQ ID NO: 5764 - protein, 390 aa, Kluyveromyces lactis NRRL Y-1140
MTLKTIYIARHGYRSNWLPTPPAHPAPPTGVNSDVPLASHGVDQAKELAHYLISIDNQPQMIFSSPLYRCLQTSEPAADLLELLIYIDRGLSEWYKPDRDVIPEPATFDILNNFFAGKLKSDWPNSVIPSLKGETEEDIFKRCSKFWPIFVKELEKQFPEVETILLVTHAATKIALGMTLLKFHNVRESLDEDGTVIRAGSCSLDKYELLDDDVDEDENGDESVLPFEQRQWKLTMNGNTEFLSAGEEMHWDFKSGFEAGSDEDIKARRKKQLEERGTTANSEKVTDTNSSEEYEHVYVSLDVDNRNYRERNTVQNQATLQHSGLETDKPLIKIGDNVYEGTWKKSLGTELAFAKELGNVGSKESEQDAGNPERVYRVTDSIDLNPIQPM

SEQ ID NO: 5765 - DNA, 1329 bp, Debaryomyces hansenii CBS767
  CDS (1)..(1329)
atgacgttgaaaaccatatatattgccagacatgggtatagagcaaactggttgccgcctccacatcctccaaatcctactggtatcgatagtgacccgccattggcatcccacggaatcgatcaagctaaacaattagccggatatcttaactcattacctgccaaagagcaaccgcagtttatattatcgtctccattctacagatgtgttcaaactagtgagccaatttgtgatatgctttccgtgccattggtattggaacgtggtgttggtgaatggtataagaaagaccgtggtattgtccctgaaccagccaattacgacgtgttaaagccgttcttttcttgtttacgagatgccagtgaatgggatagggactcgactgttggtgttattccttcgttggacggtgaatcggaagaagatatttttgccagatgtgtgcaattctggaaagagttcatacctatttttgaagcgaagtatccagagatcaccactatattaatagtcactcatgcagctaccaagattgctctcggtatgtcgttacttaagttccacgacgtgtacgaagcaatcgataacgacaacacagtgttgagagcaggtgcatgctccttggataagtacgaaagaggaggtgatgattggtcgattaagatgaacgggaattgcgaattcttgttagatggtgaagaaatgaactggaacttccactcagcatttgaagctggttccgatgaagatattaaggcgagacgagcggaagccaaaagaaaggcagaagcgagcaacaccaaagacaagaatttttatgtaacaatagatgtaccaatgatcggtaattcgaacctttcacaatttgaagacgttaatcaaccggcttcccagtcgaagcaggattcgaaggaaaatataacctccaactcaaaacagaactatattaaatcatcatcacatcttcaagtcaccgatttgaacaacaaaactccattgattaaattgtctaatagtaacgtcaacactgataacgattctatcaataacctatcagtgatagatgggaatatctatcaaacgaattggacaaaactagtggggaccgaattggtttttgatgactacggtgaattaattggaagtgtaagagagcatttgaaatgcgatgaaaacataaagatcacgtccaagaatgaaaaggacaagaaggacacggatatagctgacgatgacagcgacgtcaaggttaaagatgaacaaacttctttcttgttaaaggccattaaatctgctaagagaaaagaagcagaagtggaagtgtaa

SEQ ID NO: 5766 - protein, 442 aa, Debaryomyces hansenii CBS767
MTLKTIYIARHGYRANWLPPPHPPNPTGIDSDPPLASHGIDQAKQLAGYLNSLPAKEQPQFILSSPFYRCVQTSEPICDMLSVPLVLERGVGEWYKKDRGIVPEPANYDVLKPFFSCLRDASEWDRDSTVGVIPSLDGESEEDIFARCVQFWKEFIPIFEAKYPEITTILIVTHAATKIALGMSLLKFHDVYEAIDNDNTVLRAGACSLDKYERGGDDWSIKMNGNCEFLLDGEEMNWNFHSAFEAGSDEDIKARRAEAKRKAEASNTKDKNFYVTIDVPMIGNSNLSQFEDVNQPASQSKQDSKENITSNSKQNYIKSSSHLQVTDLNNKTPLIKLSNSNVNTDNDSINNLSVIDGNIYQTNWTKLVGTELVFDDYGELIGSVREHLKCDENIKITSKNEKDKKDTDIADDDSDVKVKDEQTSFLLKAIKSAKRKEAEVEV

SEQ ID NO: 5767 - DNA, 1410 bp, Yarrowia lipolytica CLIB99
  CDS (1)..(1410)
atggtcaaacagatctttattgtgcgacacaccactcgtcaggacacggttcagagcaactgggccgaaacggctgaatatggatacaatcctccattggctgatctcggacactcgcaggccacagaggcgggtcgctacatccgttccttaatgcatcaacagcccacacgggtcatggtccacacgtcgccatttctacgatgtgtgcaaacagcagcccatattgcggaggaattgattggatgcaatcccaagattcgaatggacgcggctctaggcgaatggctgacgcccgactactttgccaactcgagccctcctccagacgacaaccatgccgacttggccaaccaggctgtgtctgcgctgcaacgacaaagtaagttacgactggtggagaacggatggaacattacctgtctcggagactcgggctccatgcgcgagttctggtcggaaatgcatctgcgattcgagcattatctcaaacgtctgaatggcttctactctaaacacaaccgcaagattgagacgctcatcatcgtcacccacggcgccggagtgtcttctctgctgacccatttctgcggcgagcccgtgctcagcgaaatccggctcggcagcatttctctcgtgtcacgcgacgaggaggctgacgaggccggctcgtttgccagtgccggcaacaattcaaaggactccgggtcccgatcacgtgcggggtccatcaccaactgggcgtggctgggccccgatcaggtggaggagaagtttagcattggctcttggcagctggacctcctgaacgttgcagccggcacgacaggtgcagctcacaacggcagtgttcctggcaggtccaatgttgatggcttggcgcccccgggcagcgacatgtccatgaagcgtcgaacctcttcgccagccatgtttatgctcaacaccactttcctcggctcggctcccccctcaacacgtacttcgcgagcctcttctcttttgcgacctagcggccctcctcagattttgtcggtgcccgaaggagtagttactggagacagcgcgtcgcaaaaggcttgggttgctgctactacagattctactagtgctgcggcttcttctgctgcggcttcttctgcgaccgcctctgctgccgtttcgtctcctgcagccgctcgcactagcggtgggtcgcagttgacgccttcggcttccgtgccggcaatgctcgacgttgaaagcggcagcagaagacaggagccgtctaccattagtggttctgcctctagagccccggagtcgtcagacgccccttctacgccgcccagcgagtctcccgaaggctcgcccaccacgtctcctcagttctcgtcgggcacgtggctgctaggctccaaccgttggtga

SEQ ID NO: 5768 - protein, 469 aa, Yarrowia lipolytica CLIB99
MVKQIFIVRHTTRQDTVQSNWAETAEYGYNPPLADLGHSQATEAGRYIRSLMHQQPTRVMVHTSPFLRCVQTAAHIAEELIGCNPKIRMDAALGEWLTPDYFANSSPPPDDNHADLANQAVSALQRQSKLRLVENGWNITCLGDSGSMREFWSEMHLRFEHYLKRLNGFYSKHNRKIETLIIVTHGAGVSSLLTHFCGEPVLSEIRLGSISLVSRDEEADEAGSFASAGNNSKDSGSRSRAGSITNWAWLGPDQVEEKFSIGSWQLDLLNVAAGTTGAAHNGSVPGRSNVDGLAPPGSDMSMKRRTSSPAMFMLNTTFLGSAPPSTRTSRASSLLRPSGPPQILSVPEGVVTGDSASQKAWVAATTDSTSAAASSAAASSATASAAVSSPAAARTSGGSQLTPSASVPAMLDVESGSRRQEPSTISGSASRAPESSDAPSTPPSESPEGSPTTSPQFSSGTWLLGSNRW

SEQ ID NO: 5769 - DNA, 1269 bp, Yarrowia lipolytica CLIB99
  CDS (1)..(1269)
atggtgaaaaccatctacatcacccgacacgggttccgagccaactggctgaccgaccagcccattcccccgtctcccaccggtatcgagagtgatcctgctcttgctgagaagggagttgtccaggccaaggagctaggtgaatatctcaaggacatcaagcctcccattcagcgtatctatgcttctcctttctacagatgtatcgagactgcgactccgaccgccgatcatcttgatcttgcgatctaccccgagggaggttgcggagaatggttcaagcgagagagaagctcgcaccccaagcctgcgagtaacgctgttctcaagggttttttcccccgagtcgacaagaattacaacagcctagtggttgctggagacgacggagaagatgaggctgaactgcacgagcgaaccaagcggtttctcaacgtgttgatcgagaagctcaacaaggaggagcccgaaatcgagactattctcattgtatctcacgctgctccccgaattgcgcttgggcgagccctagtgggtgacaattccttggacattcgaactggtgtgtgttccttggacaccttcgaggttgacaaagagggaggactctgtggagaatggaagttgaagtcctctgggcaggtggactacctgagtgagggagaagttatgcattggggctttgacgttcctttcgatcctggatcagaggaagatatcaaggcccgaaaggctgctgccgaggcttctgctgctgctgctgctgaaggcgaatccgacacagtagtgtctgttttcattcccctgaacgttcctcccatgtcccgcaaggccggggcttctagcaaggtgtcttccaacgcaccagttcagatctctggtctcactgaagacaggcccttcgttaagatcggtgacagtgcctacgagggtcaatggaccgagctggtgggctcggaaatgtacttcaatggtgctactggagaatacgttggcaagtctagggatcgaatcatgctgaagcccatgagactccatcataagcaggatgaggtgatgcttgagcccaagaagcgagcccatattcttgatcaagttcacgcgatcaacgaagagcgagccaagcaggctggagagactacctctggggctcctgttgactctgttgactctgtggatctcgaggttgctgctgctgctgtcactgcggcctctattcaggatcctgacactgctgcttcgctcgatgtcaccatggaggatgtttaa

SEQ ID NO: 5770 - protein, 422 aa, Yarrowia lipolytica CLIB99
MVKTIYITRHGFRANWLTDQPIPPSPTGIESDPALAEKGVVQAKELGEYLKDIKPPIQRIYASPFYRCIETATPTADHLDLAIYPEGGCGEWFKRERSSHPKPASNAVLKGFFPRVDKNYNSLVVAGDDGEDEAELHERTKRFLNVLIEKLNKEEPEIETILIVSHAAPRIALGRALVGDNSLDIRTGVCSLDTFEVDKEGGLCGEWKLKSSGQVDYLSEGEVMHWGFDVPFDPGSEEDIKARKAAAEASAAAAAEGESDTVVSVFIPLNVPPMSRKAGASSKVSSNAPVQISGLTEDRPFVKIGDSAYEGQWTELVGSEMYFNGATGEYVGKSRDRIMLKPMRLHHKQDEVMLEPKKRAHILDQVHAINEERAKQAGETTSGAPVDSVDSVDLEVAAAAVTAASIQDPDTAASLDVTMEDV

SEQ ID NO: 5771 - DNA, 1875 bp, Canis familiaris
  CDS (1)..(1875)
atggcagcgggggagactcagctctacgcaaaggtctccaacaagcacaagggccgcagcaccccctcactcctggacaccctgctgggaatgggcttcccggcacacaccgcgctgaaggcgttggcagccactggaagaaagacagcggaagaggcatcagattggctgcgctgtcatcgcaatgacccctctctggacgatcccatcccccaggagtacgctcttttcctctgccccacggggcccctgctggagaaactcgaagagttctggaaagacagcaagcgccagtgcgccaagaaccgggctcacgaggtcttcccgcacatcacgctctgtgacttcttcacgtgtgaagaccacaaggtggaatgtctgtatgaggctctaaagaaagctggagacaggatcctgggttccttccccccgacggtccctctggtcctctactcttccatcagctatctaggcttcttcgtgagcgacagccctgcggacgtcatccgggaattcgccatgatgttcgccacggaagcatctgtcttagcagactgcaccgtgaagccttgcaccaagcagctgcacctgaccctggcccacaagttctacccccaccaccagaggaccctggagcagctggccagagccatccacccaagcctcagctgccagtggactgccgcactttactcccgagacatgcgcttcgtgcactaccagaccctcagggccctcttccagtacaaacctcagaacgtggacgagctgacactaagtcccggcgactacatcttcgtggaccccactcagcaggaggaagccagcaagggctgggtgattgggatctcccagcggacgggctgccggggcttcctacccgagaactacacagagcaagccagcgagtctgacacctgggttaagcacaggacatacaccttcagcctggccatggacctgatctccagaaaggacggtgaggccagcggccggcgaaacggggaactccatgcttcacagatgccaaggggcattagcagcatccaggccttacaggccacgatagcgaggaggagcgttctggtggtgcgccacggggagagagtggatcaaatcttcgggaagtcgtggctacagcagtgctccactcctgacgggaaatactaccgaccagacctgaacttcccctacagtctgcccagaaggagcaacggtatcaaagattttgaaaatgaccctccgttatcatcgtgtgggattttccagtccaggatggcgggggaagcactactggacagtggcatcagagtcacctccgtcttcacctccccagccctccgctgtgtgcagacagccaagcacatcctggaagagctcaaactggagaaaaaaattaagataagagtggaacccggaatctttgagtggacaaagtgggagtccggcaaaaccaccccgaccctcatgaccctggatgagctgaaagaggcggatttcaacgtgagcacggattataggcctgcgtttcctctcgcctccctcctgccagccgagagctacgacgagtatgtggacaggtgcgcggtgagcgtacagcacatcatcagcacctgcccacgggacgtgggcgtcatcctgattgtgagccacggctcggcgctggactcctgcacgcgcccgctccttgggctgccgccccgggacagtggagacttcgcccagctagtgagaaagattccttctctgggcatgtgcttctgtgaagaaaataaagaggaaggcaaatgggaattggtgaaccctcccgtgaagacgctgacccacggctcgaactcggcgtttaactggcggaactggctggtgggccgctag

SEQ ID NO: 5772 - protein, 624 aa, Canis familiaris
MAAGETQLYAKVSNKHKGRSTPSLLDTLLGMGFPAHTALKALAATGRKTAEEASDWLRCHRNDPSLDDPIPQEYALFLCPTGPLLEKLEEFWKDSKRQCAKNRAHEVFPHITLCDFFTCEDHKVECLYEALKKAGDRILGSFPPTVPLVLYSSISYLGFFVSDSPADVIREFAMMFATEASVLADCTVKPCTKQLHLTLAHKFYPHHQRTLEQLARAIHPSLSCQWTAALYSRDMRFVHYQTLRALFQYKPQNVDELTLSPGDYIFVDPTQQEEASKGWVIGISQRTGCRGFLPENYTEQASESDTWVKHRTYTFSLAMDLISRKDGEASGRRNGELHASQMPRGISSIQALQATIARRSVLVVRHGERVDQIFGKSWLQQCSTPDGKYYRPDLNFPYSLPRRSNGIKDFENDPPLSSCGIFQSRMAGEALLDSGIRVTSVFTSPALRCVQTAKHILEELKLEKKIKIRVEPGIFEWTKWESGKTTPTLMTLDELKEADFNVSTDYRPAFPLASLLPAESYDEYVDRCAVSVQHIISTCPRDVGVILIVSHGSALDSCTRPLLGLPPRDSGDFAQLVRKIPSLGMCFCEENKEEGKWELVNPPVKTLTHGSNSAFNWRNWLVGR

SEQ ID NO: 5773 - DNA, 1086 bp, Cryptococcus neoformans var. neoformans JEC21
  CDS (1)..(1086)
atgctcaagtacatttacgtgtgtcgacatggcttccgctcgaactgggtggatcctagtataaagtctgggcctacgggtatgaaccgcgatcctcctctcgcagcccacggcctcgaccaagcggaatccctagcagcctttctctcctcgccatccagtaccagcccctaccccatccctgagatcgtattctcctcccctttctaccggtgcgttcacctcgaacacggtgtcggcgaatggtactcccccgtctaccccaacaccggccttcacccgcgcccttccctatcccacaccctttctccactcttccctccgggcagtatcaacccctcttacgaacccactctcttcccctctcgtaaaggtgaatctctggaagcgatccacgaaagagcagagatatttatcgatgcgtggacgaggcgggtagaaggcgaatggccggatgtcgagtgtgtagtgatctttgcgcatgctgctagtatcattgcgctcggaagagctttgacaggaaatcgatctctggaagtcatagcaggctgcgctaccacatccctctacgctcgtaaacccaccgcgtcctcttcctcgtcatcttcactcaaaccaaaccccggctcctcccaatacacagtcctctactccggcaggcacgattacctccccctcggtcttgaacgcgattggtcctttgccgatgtcgtcctcaccccggacggggaagttgtaggcgataacggggacggagatggacatctaggtgaagaatgggaagaagggttgagcgaggttggtaagcggtggttggaagatacgagatttgagagggagagggtgagggggaaagggcagattggggatacatccgggctcattcaacagaggattgtgtatttgttgcattgtaagatgattggagaaggtaaaaatgtatctcttaacgtaatcattgccgtcttctcatctcttcgtcgccattgtttcgagtttttgtggtggaggatacatagaaatcagctcatgattaagcccggtaggacaatacccgatgcaaggcttcatcgacgatcaccttga

SEQ ID NO: 5774 - protein, 361 aa, Cryptococcus neoformans var. neoformans JEC21
MLKYIYVCRHGFRSNWVDPSIKSGPTGMNRDPPLAAHGLDQAESLAAFLSSPSSTSPYPIPEIVFSSPFYRCVHLEHGVGEWYSPVYPNTGLHPRPSLSHTLSPLFPPGSINPSYEPTLFPSRKGESLEAIHERAEIFIDAWTRRVEGEWPDVECVVIFAHAASIIALGRALTGNRSLEVIAGCATTSLYARKPTASSSSSSSLKPNPGSSQYTVLYSGRHDYLPLGLERDWSFADVVLTPDGEVVGDNGDGDGHLGEEWEEGLSEVGKRWLEDTRFERERVRGKGQIGDTSGLIQQRIVYLLHCKMIGEGKNVSLNVIIAVFSSLRRHCFEFLWWRIHRNQLMIKPGRTIPDARLHRRSP

SEQ ID NO: 5775 - DNA, 678 bp, Dictyostelium discoideum
  CDS (1)..(678)
atgacagtttatttaacaagacatggtttaagagaggattggattaataaattatggagatctacagcattaagaccatcagatccacctttatcggcacgtggatttcatatagctaaagagttgggtattttcagtaaaactttaggattaaaacatattatatcatcaccaatggagagatgtattcaaacaagtacagcaatagctgatgaattagatttgccaattaaaattgattatggtgttattgaatgggttggttctgatccaagacctgatgatattttaaatccactttcaaatgaggaattaaaattaaaatatccaagaattgatttagattataaatcaacaacaaataatataccaacaaaagaatcaattgaagaattacatgaaagaacaaagatatcagttgatcaaatcattgaaaagtttaaagatgatggaccaatcattatcgtttctcatgccgctacaatgattgctttaggtagaggtattttaaatgataataatgcaccattaagatctggtgtttgtagtttatccaaatttaattttaatactacagaaaataaatgggaacttgaatatactggtaaatctgatttcatggaagatggagaacaatctcattggacttttaaacgtccagtaattgaaaaatcttaa

SEQ ID NO: 5776 - protein, 225 aa, Dictyostelium discoideum
MTVYLTRHGLREDWINKLWRSTALRPSDPPLSARGFHIAKELGIFSKTLGLKHIISSPMERCIQTSTAIADELDLPIKIDYGVIEWVGSDPRPDDILNPLSNEELKLKYPRIDLDYKSTTNNIPTKESIEELHERTKISVDQIIEKFKDDGPIIIVSHAATMIALGRGILNDNNAPLRSGVCSLSKFNFNTTENKWELEYTGKSDFMEDGEQSHWTFKRPVIEKS

SEQ ID NO: 5777 - DNA, 2082 bp, Entamoeba histolytica HM-1:IMSS
  CDS (1)..(2082)
atgtctgaactacttgatcttattccacaaaagaaaaagttattatgtcaagttccaatcatgaattgggataaagttatggagttagtcaaacaatatcatactgtagtcttacctgccttctacaaaagatttgatgaccaattccaatctgctaaagattatattgatcaatctaattctcaggaagaagaagctaaaaatgttactactattaaaatggagatgacatatcctggaaatccagtaattgacaatgtagaagaatgtctttctattgaattaattcatgacattgatctcttaaattggctagttagtgatattgatgctgaaattacaattacaaaagtagaaaatataaataatgttattactattagtggttcaataattgctaagaaatatggtactgatattgattttactattcattattctaggatgaaagaaggagaatgtaaacaacaaattattcttaatgaccaagtttatggttatgtatttccaattaagaaaaatgatggctctgaatattggacatattttggaactgcctataaaaatatgtgtaaagactttgactctattccattagaatcatcagatggagatatgagaattataccatttgttagaactatgaaattggtcagtgatgctattgatctttcttttgatgatgattttattgaacgatttaatgctaaacataattcaacactaccattagacaaacacatttataaaggatttagtggtaatattattacttgtaaggatggacttcttaaaccattacaaaacccaacagaaccaaaggttcttaaattccttcaaggaactgaattaaaaaaatttcttccagaatatcatggtaaagttgaaattaatgacactgtttttatttctatgggagatttaacagaaggatatactaatccaaaagttcttgatattaaacttggacaaacttgtactattagtaaaatggaacaacaaccatttggatttaaagttgttggaagtatttcagatccaaaaaatgcttgtttttcatgggatgatttatatagcacagttaaaaaatatttaaaagataataaagaaaatttctgtagatatgaagttcttccttctttaattaaacaacttaatgaacttcttactattgctaatacctttacaggtgtacaattcaaacaagtttcattaatgcttatttacgatgcaattgataacgcctcacaaaaaccaacaattcatcttcttgattttcaaaagagtgttattgatgaaaaggctggaattgatcattatttctgttttggtatttcatcgttaattaaattattacaatctgttcatgattattatacctcaagacattgtgttttcctttgtagacacggatttagattagattatacagatcttacttgggttccaaatgctaaatacccacatgatcctcctttgtcttcagaaggaattcaacaggctaaagatttagctaaacgtttaaaacatgagaatttagatattattgtaagttcaccattctacagagcaactcagactgctaaatttattgctgaagaattaggaattaaatatgttgttgaaccagcatttggtgaatttctttcaattaataatcgtaaagctgttcctgaccttgacccaactccattagaagaagacaatgcaatggatagaagctttactcctttaggaggagttctttctttagaaacttgggattctatgcaagaacgtgttcatacaagtttaaatgcaataacaaaaaaatatcatcgtgtagctattgtgtctcatcgttctactttccaagctttactctcagttattgttgggcataagttcaaatacccacttgattttgcttctgtcacttcaatggttccagctaaaggaagtactggatgggttattgatagaatcaatatgttctcacatctcaccgtatttactgaaagtccttattataacccaaattatgctgcaaagaattataatgatatgattattgatgataacggtgctgtccatgactcataa

SEQ ID NO: 5778 - protein, 693 aa, Entamoeba histolytica HM-1:IMSS
MSELLDLIPQKKKLLCQVPIMNWDKVMELVKQYHTVVLPAFYKRFDDQFQSAKDYIDQSNSQEEEAKNVTTIKMEMTYPGNPVIDNVEECLSIELIHDIDLLNWLVSDIDAEITITKVENINNVITISGSIIAKKYGTDIDFTIHYSRMKEGECKQQIILNDQVYGYVFPIKKNDGSEYWTYFGTAYKNMCKDFDSIPLESSDGDMRIIPFVRTMKLVSDAIDLSFDDDFIERFNAKHNSTLPLDKHIYKGFSGNIITCKDGLLKPLQNPTEPKVLKFLQGTELKKFLPEYHGKVEINDTVFISMGDLTEGYTNPKVLDIKLGQTCTISKMEQQPFGFKVVGSISDPKNACFSWDDLYSTVKKYLKDNKENFCRYEVLPSLIKQLNELLTIANTFTGVQFKQVSLMLIYDAIDNASQKPTIHLLDFQKSVIDEKAGIDHYFCFGISSLIKLLQSVHDYYTSRHCVFLCRHGFRLDYTDLTWVPNAKYPHDPPLSSEGIQQAKDLAKRLKHENLDIIVSSPFYRATQTAKFIAEELGIKYVVEPAFGEFLSINNRKAVPDLDPTPLEEDNAMDRSFTPLGGVLSLETWDSMQERVHTSLNAITKKYHRVAIVSHRSTFQALLSVIVGHKFKYPLDFASVTSMVPAKGSTGWVIDRINMFSHLTVFTESPYYNPNYAAKNYNDMIIDDNGAVHDS

SEQ ID NO: 5779 - DNA, 921 bp, Candida albicans SC5314
  CDS (1)..(921): transl_table=12
atgacgattgaaactatttatatcgcaagacacggttatagatccaattggttaccaccaccacacccaccaaatcctactggtattgacagtgacccggctttagcaccacatggtgttgaacaagcccaacagttagctgcctatcttacatcattacctacacatgaaaagcctgaatttattattgcttcacctttttatcgttgtatagaaacgtcgagacccattgccgaaatgttggacttgaagattgctttagaaagaggagttggtgaatggtttcgtaaaaatagagataccaaaccagttcccggtgattacacacaattgagaacatttttcgataaattattgatcgatgaagatacttggccaagagataacttaaatgttatacctaatattgaaggagaagattatgatgaaatctacgatcgtgccaaattgttttggaaaaagtttattcctgaatttgaaaagaaattccccgaaattaaaaatgtgttgatagttacacatgcagcaacgaaaattgctttaggatcagctttattacagttaaaatcagttactgatgttatagatgataatcaaactgtgttacgtgctggtgcatgttcattatccaaatttgttagagatggcgaagataaaaccaatcatactattcaatggaaaattgtcatgaatggtaattgtgaattcttgacacagggtgaagaaatgaactgggatttccgtcgtggtgttgaagccgggtcagctgaagatatagcgcaaagaaaggcagcagcagaagcagaagcaaaagcattgaagaaaaatgaacaaaccaaatccgatggtcccatcactgaatctgccactggggcagaaatagatgggaatgaagatgaatttgaagtacgtaaaacttga

SEQ ID NO: 5780 - protein, 306 aa, Candida albicans SC5314
MTIETIYIARHGYRSNWLPPPHPPNPTGIDSDPALAPHGVEQAQQLAAYLTSLPTHEKPEFIIASPFYRCIETSRPIAEMLDLKIALERGVGEWFRKNRDTKPVPGDYTQLRTFFDKLLIDEDTWPRDNLNVIPNIEGEDYDEIYDRAKLFWKKFIPEFEKKFPEIKNVLIVTHAATKIALGSALLQLKSVTDVIDDNQTVLRAGACSLSKFVRDGEDKTNHTIQWKIVMNGNCEFLTQGEEMNWDFRRGVEAGSAEDIAQRKAAAEAEAKALKKNEQTKSDGPITESATGAEIDGNEDEFEVRKT

SEQ ID NO: 5781 - DNA, 939 bp, Aspergillus fumigatus Af293
  CDS (1)..(939)
atgcccttggacacaatatatctaacgcgccatggtcaccgcctcaattggacgatcgactacaacacaggcgcatacagagcccagttcccaactccaaccgggaaccccgccgacccaaccctaacctcccatggcgtccgacaatcgcacgaattggccgcgcacatcgcaagcccagggttccagcccaagccgttccgcgtgtactgcagccccttctaccgctgtctacagacgatccagccaaccgtcgaggcgctaaaggcaaagcaacagcagcaacagcagcagcagcacgaggaaagtagcgacatcgacgcctgcgcggactttgacgtcagggtcgagaatgggataggagatacaagggaatggttcggcccaacctccttcttcgaacatccctcccccgccacaccgccaaccctccacacccacttccccagcatcctcccgtcggacccctcaaagcacaagccgcacctcatcccctcgccccgcggcgagaccatcgcccagctgcacaatcgcctcgccaccgcgctcgcaggcataatcgccgacgtggacgccgagatcgcggccctggaggagtcgcagcgccccgaccagcgcaccagcaaggcgctgcttatctgctcgcatgcggcgccgctgattgccatgggccgcgcgttgacgggcgcgatgccggacgatagttccacggaggacttctttgttttcacagcggggttgagtacgtttcggaggaggggaaacaaggttggcaccgctggggttggggtggaggcgttggctcccgggacgaagatcctgcgggctgagacgaaggtgccggattggcgcggtgggaagggcgtcgggggtggatgggactgtgtgaagaatggggactgtgggtttctcagttcgggagctgaaagaggctggtga

SEQ ID NO: 5782 - protein, 312 aa, Aspergillus fumigatus Af293
MPLDTIYLTRHGHRLNWTIDYNTGAYRAQFPTPTGNPADPTLTSHGVRQSHELAAHIASPGFQPKPFRVYCSPFYRCLQTIQPTVEALKAKQQQQQQQQHEESSDIDACADFDVRVENGIGDTREWFGPTSFFEHPSPATPPTLHTHFPSILPSDPSKHKPHLIPSPRGETIAQLHNRLATALAGIIADVDAEIAALEESQRPDQRTSKALLICSHAAPLIAMGRALTGAMPDDSSTEDFFVFTAGLSTFRRRGNKVGTAGVGVEALAPGTKILRAETKVPDWRGGKGVGGGWDCVKNGDCGFLSSGAERGW

SEQ ID NO: 5783 - DNA, 807 bp, Ustilago maydis 521
  CDS (1)..(807)
atgctcgacacgatctacatctgtcgacatggctttcgaatgtcttggattggtgccgagaactttcctaccaccgatcgaccacgtgatcccgtcctgactgctcatggtcaatcacaagcgcgacacctcgcatcctatctctcctccctgcctgcatctgagcaaccccaactgatcatcagctctccttactaccgatgtctccaaacctccctgccgactgcgtctgcactcaaattggagctggtagccgagccagggttagcagaatggtttcctacagcagcgacaaagacgggcgtccatccgtcgcctgcaagcgccgcctacatgaaggaattcgtaaccgagctctccttatcctggaaaccgatgctgtatccaagtcgcgacggtgaaaccatttcggaactacacgcaagagcacgtcgagtgctcgaccttattcaacaaagatgcggccagctgggtttgaaaagagtgctcatatgcagccatgctgcgacgatcatcgcgatgggaagagtgctactagatgatgatgcggatggcaagcggaccaagtttatcggcgcaggaacggcgacgttgagcaagtatacgagaacgcgcgagggaggggtgtggaaacaggagttgaatggggatgcgtctttcttgcccggtggtgtggagagagagtggcatttcggcatggtgccggacaacgtgaccgaacacggcatgggtcaaggctgggtggacccagaagctccgactgagaaggcaacagggcaaggccaggcactgtcgaccaagttgtag

SEQ ID NO: 5784 - protein, 268 aa, Ustilago maydis 521
MLDTIYICRHGFRMSWIGAENFPTTDRPRDPVLTAHGQSQARHLASYLSSLPASEQPQLIISSPYYRCLQTSLPTASALKLELVAEPGLAEWFPTAATKTGVHPSPASAAYMKEFVTELSLSWKPMLYPSRDGETISELHARARRVLDLIQQRCGQLGLKRVLICSHAATIIAMGRVLLDDDADGKRTKFIGAGTATLSKYTRTREGGVWKQELNGDASFLPGGVEREWHFGMVPDNVTEHGMGQGWVDPEAPTEKATGQGQALSTKL

SEQ ID NO: 5785 - DNA, 612 bp, Bacillus thuringiensis serovar konkukian str. 97-27
  CDS (1)..(612): transl_table=11
gtgaagacaacggtatatgtaacaaggcatggtgaaacggaatggaatgtagcgaagcgaatgcaagggcggaagaattctactttaactgaaaatggtatactgcaggctaagcaattaggagagcgaatgaaagatttatctatccatgcgatctatagtagtccgagtgaaagaacccttcatactgcagagttaataaagggcgaacgtgatataccgataatcgcggatgagcatttctatgaaattaacatgggtatatgggaaggacagacgattgatgatatagaaagacaatacccagacgacatacagttattttggaatgagccacatctttttcagtcaacatcgggtgaaaattttgaagctgttcataaaagggtaattgaggggatacagcttctattagaaaagcataaaggagaaagtatattaattgtctcccatgcggcgacggcaaaactacttgtaggacattttgcaggtattgaaatagaaaatgtatgggatgatccatttatgcatagtgctagtctaagtataatagaatttgaagatggtaaaggtgaagtgaagcaatttgcagatataagtcattttcaataa

SEQ ID NO: 5786 - protein, 203 aa, Bacillus thuringiensis serovar konkukian str. 97-27
MKTTVYVTRHGETEWNVAKRMQGRKNSTLTENGILQAKQLGERMKDLSIHAIYSSPSERTLHTAELIKGERDIPIIADEHFYEINMGIWEGQTIDDIERQYPDDIQLFWNEPHLFQSTSGENFEAVHKRVIEGIQLLLEKHKGESILIVSHAATAKLLVGHFAGIEIENVWDDPFMHSASLSIIEFEDGKGEVKQFADISHFQ

SEQ ID NO: 5787 - DNA, 612 bp, Bacillus cereus E33L
  CDS (1)..(612): transl_table=11
gtgaagacaacggtatatgtaacaaggcatggtgaaacggaatggaatgtagcgaagcgaatgcaaggacggaaaaattctgctttaactgaaaatggtatactgcaagctaagcaattaggagagcgaatgaaagatttatctattcatgcgatctatagtagtccgagtgaaagaacccttcatactgcagagttaataaagggagaacgtgatataccgataatcgcggatgcgcatttctatgaaattagcatgggtatatgggaaggacagacaattgatgatatagaaaggcaatacccaaacgacatacagttattttggtatgaaccacatctttttcagtcaacatcaggagaaaattttgaggctgttcataaaagggtaattgaggggatgcagattcttttagaaaagcataaaggagaaagtatattaattgtttctcatgcggcagcggcaaagctacttgtaggacattttgcaggtattgaaatagaaaatgtgtgggatgatccatttatgcatagtgctagtttgagtattatagaatttgaagaagataaaggtgaagtgaagcaatttgcagatataagtcattttcaataa

SEQ ID NO: 5788 - protein, 203 aa, Bacillus cereus E33L
MKTTVYVTRHGETEWNVAKRMQGRKNSALTENGILQAKQLGERMKDLSIHAIYSSPSERTLHTAELIKGERDIPIIADAHFYEISMGIWEGQTIDDIERQYPNDIQLFWYEPHLFQSTSGENFEAVHKRVIEGMQILLEKHKGESILIVSHAAAAKLLVGHFAGIEIENVWDDPFMHSASLSIIEFEEDKGEVKQFADISHFQ

SEQ ID NO: 5789 - DNA, 648 bp, Nostoc punctiforme PCC 73102
  CDS (1)..(648)
atgagtcaaatagtctggatagcaagacacgctaaccgcctcgatttcgtaaaccccgattggtttcttaccgccgaacggcgctacgatccacctttgtctgatgatggtatggtgcaggcacaacagttagctagacgattgaaaaaagaaaacattggtcatatttttgcttcccctttcctgcgaaccgtacaaacggcaaacgcagttgcagaattgctcaacttgccaattaaattggaaacaggtttgagtgaatggctaaatccagcttggatgacagaagaacctgaaagactctcaactccagcattagcaaaattattccccagaattgacaccagctatacttcgcgcatcgccgctaaatatcctgaaactcacgaaaaagtgcgagaacgttctgggcaaactgcgagatgtttagctactgagttcttcccagaggatatcctgctagtagcacatggggcatctgtgttggggggagcaatggggctagtgggggaaattgccaaaacagaagtcaaggcttctttatgttcgttggtaaaagtggtacgcgaagatccagaatggttcttagaactaacgggagatacttcccatttaacccacatagaagaagttattcgatttgcttaa

SEQ ID NO: 5790 - protein, 215 aa, Nostoc punctiforme PCC 73102
MSQIVWIARHANRLDFVNPDWFLTAERRYDPPLSDDGMVQAQQLARRLKKENIGHIFASPFLRTVQTANAVAELLNLPIKLETGLSEWLNPAWMTEEPERLSTPALAKLFPRIDTSYTSRIAAKYPETHEKVRERSGQTARCLATEFFPEDILLVAHGASVLGGAMGLVGEIAKTEVKASLCSLVKVVREDPEWFLELTGDTSHLTHIEEVIRFA

SEQ ID NO: 5791 - DNA, 639 bp, Anabaena variabilis ATCC 29413
  CDS (1)..(639)
atgacactcaatttatatttactgcgacatggagaaactacttttagtcaaagtggtaatttctgcggtaaaactgatgcagatttgacctctgaaggggtgcagatggcagaaagttttgctaaggtttatcaaaaattgaagtgggaagcggtttatgttagcccgatgaaacgcacaattgccacagccaagccattttgtgatgctattggtatggagatgcagttgcgtgacggacttagagaaggtagttacggcgaatgggaaactaagagtaaaacctttgcccaagagaattactcagaaaactatgtcaaatggttgacagaacccgcttggaatgcaccactaggtggcgaaacggcggtagatattgctaatcgttctatgcctgtaattgcggaaattcaggaaaaacatccccaaggcaatgttttagtagtttcccataaagccacgattcggattatgctttgcagtctactagggattgatttgggacgctatcgctatcgggtgaatattttggtcgcgtcggtaagtatggtaaaatttgacgttaatggccctttattagaaatattaggcgatcgccatcacatacccgatcatattcgctctcgtccgggaacataa

SEQ ID NO: 5792 - protein, 212 aa, Anabaena variabilis ATCC 29413
MTLNLYLLRHGETTFSQSGNFCGKTDADLTSEGVQMAESFAKVYQKLKWEAVYVSPMKRTIATAKPFCDAIGMEMQLRDGLREGSYGEWETKSKTFAQENYSENYVKWLTEPAWNAPLGGETAVDIANRSMPVIAEIQEKHPQGNVLVVSHKATIRIMLCSLLGIDLGRYRYRVNILVASVSMVKFDVNGPLLEILGDRHHIPDHIRSRPGT

SEQ ID NO: 5793 - DNA, 648 bp, Anabaena variabilis ATCC 29413
  CDS (1)..(648)
atgagtcaaatagtctggatcgcaagacacgccaaccgcctcgactttgttaaccccgactggtttctcaccgcagaaagacgttatgatccacccttgtctgatgatgggatggtacaagctaaacagcttgctcaacgtttacgagaggaaaagatcactcatatttttgcttctccttttctgcgaacagtacaaacagctaacgccgtagcagaggttttggatttgcccataaatctagaaacgggtttgagtgaatggcttaatcctgcttggatgactgaagaaccagaaaaactatcaactccagccttagcagaattatttccccgaattgatctcggttacacagcacgcattgcagccaactatcccgaaacccatgaagaagtcagggcgcgttcgggacaaacagcccgatgtttagtaactgaatgttttccagataatattttgttggtagcacatggggcttctgtgctgggggcggctatggggctagtaggagaaattgccaaaactgaagttaaagcttccttatgttccttagtcaaagttgtgcgttatggcccggattggttgctagaactaaaaggagacacttctcatttgactcaggtagaagaagttatccgatttgcataa

SEQ ID NO: 5794 - protein, 215 aa, Anabaena variabilis ATCC 29413
MSQIVWIARHANRLDFVNPDWFLTAERRYDPPLSDDGMVQAKQLAQRLREEKITHIFASPFLRTVQTANAVAEVLDLPINLETGLSEWLNPAWMTEEPEKLSTPALAELFPRIDLGYTARIAANYPETHEEVRARSGQTARCLVTECFPDNILLVAHGASVLGAAMGLVGEIAKTEVKASLCSLVKVVRYGPDWLLELKGDTSHLTQVEEVIRFA

SEQ ID NO: 5795 - DNA, 615 bp, Clostridium thermocellum ATCC 27405
  CDS (1)..(615): transl_table=11
atgaagatttatttaatccggcatggtgaaacagactggaataaaaaactgaagatacagggtcaggtcgatattccactgaaccagacaggaagaatgcaggcagagattgctgcaaaatatctggacggaattcaatttgatgcggttttctcaagcccgcttttgcgggccagggaaactgctaagataataattaaagatagaaaaatacccttttatatagatgacagattaaaagaaatttcttatggaattcgtgaaggacagtcattgcggcttatacatgctttcccctttttgagattgcatgcttattttaaaaaacctgagagctatattcccccaaaaggtggagagacaattcgggaattaaaagataggtgtcggtcctttcttgatgaaaggatagttcccatggaagaaatatataacaatgtattgatttccggacacggagcgcttatccgggcaatgatttccgtagttgtttctctgcctgattcctatttttggagtggaaaagaacagggaaattgtgcggtaactattatggaatgtaaaaacaaagaaataaagttaatagaagaagcaatagatacacaatcaaattga

SEQ ID NO: 5796 - protein, 204 aa, Clostridium thermocellum ATCC 27405
MKIYLIRHGETDWNKKLKIQGQVDIPLNQTGRMQAEIAAKYLDGIQFDAVFSSPLLRARETAKIIIKDRKIPFYIDDRLKEISYGIREGQSLRLIHAFPFLRLHAYFKKPESYIPPKGGETIRELKDRCRSFLDERIVPMEEIYNNVLISGHGALIRAMISVVVSLPDSYFWSGKEQGNCAVTIMECKNKEIKLIEEAIDTQSN

SEQ ID NO: 5797 - DNA, 645 bp, Crocosphaera watsonii WH 8501
  CDS (1)..(645): transl_table=11
atgtcctcttctccaactgtctggattgcacgtcatggaaaccgtcttgattttgttaaaccccactggtttaatactgcaaaaagacggtatgatcctcctttatcagaagatggttttgttcaggctaaacaattaggaaaacgcctacaaaaagaaaacattggacatatttttgcttctccttttttacggactatacaaaccgcttctgaagttgccaaaattcttgatcttcccataaagttagaagcaggaattggagaatggcataatccccattggatgagtgaaaatcccgaaatccaccccagagagttattagaaaaagattatccttatattgactggagttattcttcttatctagttcctaaatacccagaaatggaagttacaatgatgaaaagaatggcggaagttgctgaaaaagtagttagggattattcccaagaaattttattagttggtcatggagcttctgtgataggattaactgaaggattaaccaaagaaaccgctacctttaaagcttccttgtgttgtttagttaaattagtaaaaattaatgacaaatgggagatagaattagggggtgatacctctcatttaggtgaaaccgaaaatcaagtacgttttgtttag

SEQ ID NO: 5798 - protein, 214 aa, Crocosphaera watsonii WH 8501
MSSSPTVWIARHGNRLDFVKPHWFNTAKRRYDPPLSEDGFVQAKQLGKRLQKENIGHIFASPFLRTIQTASEVAKILDLPIKLEAGIGEWHNPHWMSENPEIHPRELLEKDYPYIDWSYSSYLVPKYPEMEVTMMKRMAEVAEKVVRDYSQEILLVGHGASVIGLTEGLTKETATFKASLCCLVKLVKINDKWEIELGGDTSHLGETENQVRFV

SEQ ID NO: 5799 - DNA, 648 bp, Trichodesmium erythraeum IMS101
  CDS (1)..(648): transl_table=11
atgtttcaacaaacagtctggatagcaagacacggaaaccgtatcgactttgttaaccctgaatggtttaacactgccaaaagaccatacgatccccatctttcagatgatggcgttgttcaagcacaacaactagcaaaacgtttaattggggaaaatatcacccaaatttttgcttctccctttttacgaactgtacaaactgccaatgaaatagcaaaagttcttgatttagccatcaaattagattggggtttatgtgaatggttaaatccaaaatggatgcctgctatgccagaaaccctgtctagagaaaatcttgcccaaacttatcctagaatcgacctttcttacgatagaggtactcccaaatatcccgaaacctggaaagattgtatgaaacgcacaggagaagtttctaagggtttggtgaaagagtttcctacagaaaatattttattggtggggcacggtgtctcagttattggtactgctgctggattagttggtgaaattgcggaaactgaactcaaggctcctctttgttgtttggtcaaaattgttttgcaagaagagcagtgggtaatggaattaagtggggatacttcccatctagataatagagaaactactgtcaggtttgtttag

SEQ ID NO: 5800 - protein, 215 aa, Trichodesmium erythraeum IMS101
MFQQTVWIARHGNRIDFVNPEWFNTAKRPYDPHLSDDGVVQAQQLAKRLIGENITQIFASPFLRTVQTANEIAKVLDLAIKLDWGLCEWLNPKWMPAMPETLSRENLAQTYPRIDLSYDRGTPKYPETWKDCMKRTGEVSKGLVKEFPTENILLVGHGVSVIGTAAGLVGEIAETELKAPLCCLVKIVLQEEQWVMELSGDTSHLDNRETTVRFV

SEQ ID NO: 5801 - DNA, 939 bp, Drosophila melanogaster
  CDS (1)..(939)
atgtcttcttcctccacctccatgtccaagcaaccggtggacgagatcttggtggaaccaccggcagcccagcctccgcgtccagatgacacacttagtgtacactcggaccactccttgcatcccggatcccttgacgcctcgcatgccaagaacagaaagatctacattatgcggcatggcgagcgagtcgactttacttttggaacatggattccatattgcttcgatgagtttggaaattacatgaggaaggatttaaacatgccgaagacgctgcctcgtcggaagaacagtccggagggctggcagaatgattctccgctgacaaatgtgggtgtctatcaggccaatcttattggtcaagctttgctggaggctcaagtgcagatcgaccatgtttactgttcgccctcgtatcgctgcatccagacttgcaccagtgcgcttgaggggctgaagcttacgggcaagcaaaaaatcaaactggagccgggcctgtttgagtggatggcctggtatccgagcggtgtacccgactggctgactaagaacgagctgaccgaggccaagttcgacgttgatttggattatgagccggtgcagccagcgtctgagctaactgctcgcctaaaggagtccaccgagcagttttatgaacgtaaccatgacgttatcctccagctattggagcagacaactggaaatattttggttgttgcccatgccaccacactggacacttgttcccgtcaactgaccggtggagttccacgcagcacgaacgaattgcgccaagtcatccacaagatcccctactgcagcctggcaacggtggaacaggtggacggcgtctggaagctggttgaacccgaatgtcttccggtgacgcactcaaagaatccgcggttcgagtggaacgccttgtcggccacctag

SEQ ID NO: 5802 - protein, 312 aa, Drosophila melanogaster
MSSSSTSMSKQPVDEILVEPPAAQPPRPDDTLSVHSDHSLHPGSLDASHAKNRKIYIMRHGERVDFTFGTWIPYCFDEFGNYMRKDLNMPKTLPRRKNSPEGWQNDSPLTNVGVYQANLIGQALLEAQVQIDHVYCSPSYRCIQTCTSALEGLKLTGKQKIKLEPGLFEWMAWYPSGVPDWLTKNELTEAKFDVDLDYEPVQPASELTARLKESTEQFYERNHDVILQLLEQTTGNILVVAHATTLDTCSRQLTGGVPRSTNELRQVIHKIPYCSLATVEQVDGVWKLVEPECLPVTHSKNPRFEWNALSAT

SEQ ID NO: 5803 - DNA, 1221 bp, Saccharomyces kluyveri
  CDS (1)..(1221)
atggctatcaagactatctacattgctagacacggttacagatcaaattggttgccaaaggggccttatccaccaccaccaacaggtgttaatagtgatgttcctttggcagaacatggtgtgaaacaagctaaagagctggcacattacatcatgtccatcgaaaatcaaccagaattaatcttttcatcgccattttttagatgtttacaaacgtccgaaccgatcagtgatttactagagcttccaatttatctagaaaggggtatcggtgaatggtacaaacctgatagagatgtcatcccagagcccgcttcttttgatattctgaataattttttccctggaaagctgaatcgtaattggacctcgtctgtaattccaagcaataaaggtgaaactgaacaagacatcttcgagagatgtagaactttctggcccattttcatcaaaaatgtcgaggaaacttttcctaatgttgagacaatattaatcgtgacccacgccgccaccaagatagccctaggaatgaatcttctcggattcgacaactgcagggatcccatcgacgacgaggggagcattattagatccgggagttgctccttagacaagtatgaactggttcacaacgatgaagatgatgatatcgatgctgaagaattaccctttgaagaaaggcactggaggattaccatgaacggtaacaccgagtttttaaccaaaggtgaagaaatgcattgggacttcaagtatgggtttgaagcaggatctgatgcagacataaaggcaagacaggctgcggctgcaagcagtggcgctgctgcaaacaagactttgccttcagaatcccaaaactctaccgaatacgaacatgtttacgtcagcgtggacatccccaatagcaactacagggagaagaacgaaatagaacctacagctacactacagtattctggcttggaaaccgaaacaccattgctcaaggttggagataaattgtacgaaggttcttggaaaaaactagttggtactgagttggcgttcccaaacgcagctacagtgaaaaagagagcgcaagaaaaggacaaccaaaatgaaagtgtcgatgagaacgaccatgaagaggaggtgcaagaaggtgaacgggatggtgcgatccaagagaaaatttatagaatcacagatcgcttggtgttgaacgatgtccatcgaatgtaa

SEQ ID NO: 5804 - protein, 406 aa, Saccharomyces kluyveri
MAIKTIYIARHGYRSNWLPKGPYPPPPTGVNSDVPLAEHGVKQAKELAHYIMSIENQPELIFSSPFFRCLQTSEPISDLLELPIYLERGIGEWYKPDRDVIPEPASFDILNNFFPGKLNRNWTSSVIPSNKGETEQDIFERCRTFWPIFIKNVEETFPNVETILIVTHAATKIALGMNLLGFDNCRDPIDDEGSIIRSGSCSLDKYELVHNDEDDDIDAEELPFEERHWRITMNGNTEFLTKGEEMHWDFKYGFEAGSDADIKARQAAAASSGAAANKTLPSESQNSTEYEHVYVSVDIPNSNYREKNEIEPTATLQYSGLETETPLLKVGDKLYEGSWKKLVGTELAFPNAATVKKRAQEKDNQNESVDENDHEEEVQEGERDGAIQEKIYRITDRLVLNDVHRM

SEQ ID NO: 5805 - DNA, 828 bp, Saccharomyces castellii
  CDS (1)..(828)
atggctcttcaaactatttacgtcgtaagacacggtttcagatctaattgggttactcaaggaccataccctgatcctccacttggtatcgaaaacgatgtgcccctagcagaacatggattagatcaagctaaggacgttgccaaatacattgctacgtttcctgaggataagaaaccacaactgatcatatcatccccattctatcgttgtatccaaactagtaaacctactgcggaattactacaattaccattgtacttagaacgtgggcttggtgaatggttcgtaccagaaagggaaaacatacctgttcctgccggtatcaaagatctggagaagttcttccctggcttgttaagcaatggttgggataattgtactgtcccaagtaataagggtgaaactgaggatgaaattttacagagatgttacaaattttgggctgcattttttaaacaagtggaagaaaaattccccaatgtaactaacgtaattttatttactcatgctgccacgaaagcagccttagggacaagtattttgggattgaagaatgttagagatcctatagatgataagggaactatcattagaagtggaagttgctcgatggacaggtatgaacgttctcatgatgacaagcacaagtggaaaatgaccatgaatgggaacgcgtcttatctgactaatggcgaagagatgaactggaactttcagaagagattcaaggctgccacggatgctgaaattaagatcagattagctgccaatgaggaaatcattaaggaaaagggtgccaaggcagctgctacagtattagactag

SEQ ID NO: 5806 - protein, 275 aa, Saccharomyces castellii
MALQTIYVVRHGFRSNWVTQGPYPDPPLGIENDVPLAEHGLDQAKDVAKYIATFPEDKKPQLIISSPFYRCIQTSKPTAELLQLPLYLERGLGEWFVPERENIPVPAGIKDLEKFFPGLLSNGWDNCTVPSNKGETEDEILQRCYKFWAAFFKQVEEKFPNVTNVILFTHAATKAALGTSILGLKNVRDPIDDKGTIIRSGSCSMDRYERSHDDKHKWKMTMNGNASYLTNGEEMNWNFQKRFKAATDAEIKIRLAANEEIIKEKGAKAAATVLD

SEQ ID NO: 5807 - DNA, 747 bp, Saccharomyces castellii
  CDS (1)..(747)
atgaccgtacaaaccatctacatcgccagacatggatacagatccaattggcttccagaaggaccatatccttccccaccaactggtatcgactccgatgttccattagctgagcatggtgtacatcaagcgaaagaactggctcattacttgctctccatcgataaccagcctgaattgattttttcctctccattctacagatgtgtacagacaagtaaaccaattgctggtcttctggaagttcctgtgcttgtagaacgaggcattggggaatggtacaaaccagatagacctgttatcccagttccagctactattgatgtcttgaacaatttttttaaacctatgattaacgaagaatgggagtcatgtttgatacctagtgataaaggtgagacagaagctgatatttttgatagatgcaagaggttttggccgcttttcatagccaaagtggagaaggaattcccaaatgtagagacaatattattagtgactcatgctgcaagtaaaatagcgttgggattgaatttattaggattgaaaacttgtagggacttcatagacgatgagggcaacacaatcagatgcggtagttgttcacttgataaatatgaattgatcaaaccaaagaagaactcggataataatgaaagtgacgaggaagatgctgaagatatcccattcgaaaaacgtaagtgggtcctgacaatgaatggtaatactgagttcttaagaggttag

SEQ ID NO: 5808 - protein, 248 aa, Saccharomyces castellii
MTVQTIYIARHGYRSNWLPEGPYPSPPTGIDSDVPLAEHGVHQAKELAHYLLSIDNQPELIFSSPFYRCVQTSKPIAGLLEVPVLVERGIGEWYKPDRPVIPVPATIDVLNNFFKPMINEEWESCLIPSDKGETEADIFDRCKRFWPLFIAKVEKEFPNVETILLVTHAASKIALGLNLLGLKTCRDFIDDEGNTIRCGSCSLDKYELIKPKKNSDNNESDEEDAEDIPFEKRKWVLTMNGNTEFLRG

SEQ ID NO: 5809 - DNA, 1227 bp, Saccharomyces exiguus
  CDS (1)..(1227)
atggtcgttaaaaatatttacattgcaagacacgcttactcaacttcctggctaccaaaggatgagcaacctttaagtagaacaggtataccgaatgatttacctctctctgatcatggtatcaatcaatctcaagaattggcacattatttattgtctgtagatactcagccagacatcattatcacttcgcctttttattcctgtgttgagacatctcaatgtattgcaaagttactggatattccagtatatctggataatggcttagggaactggtttagtaagaactcgaatagtgaaattacaaaacctgcagattttgatacattgaatagtctattccctgatgtcttgaaggattcagaacatagtacaaatgtggaacccttgagtgatggggagaccaaaaaagaattattcagtagatgtcataatttcgtcgatacaatgctgcagcagctaaataaagaacatccagatatcagtactattcttctgatgactcatgctcctgtgaagatcgctattggtttaaatctgttgaaactagaagactgtgataggacgatagatgaggatagtaatgtattgaaagcaagcgtatgttccttagatagattccaatccagtaggtttggtatggaagaggatgaagatgacgatgaggaagatgcgaatgaaacagttacaaatggtacacaaccgatgagtgatagatggatcatgacaatgaacaataacattgaatatttgagggatggtgaggagagaccctggtatttcaagaagaatattgacggcacagagaactgtaatgaaaatgaggatgtggaggaagatcaggaggaaactgaagttgtatatgtaagtgttgatttggatagtggtagttataaagagagcctaagtattgataagaatgcaatctttcaaaattctggattagaaagagaacatccattgatcagaataggcgatagattatatgagggtacgtggcagaaactattaggtacagagttggcatttccagattctgcatccattaatagaaaggataatggtttggcatcggagtccacagagacagctgataaggaaacagataatgtacgttctgttcgaaattcaaggagaaataagaatcgtaacgatactgctcatacggaaaagatatatagaatcacggacagattgaccctgcgtggtatagaaccaatataa

SEQ ID NO: 5810 - protein, 408 aa, Saccharomyces exiguus
MVVKNIYIARHAYSTSWLPKDEQPLSRTGIPNDLPLSDHGINQSQELAHYLLSVDTQPDIIITSPFYSCVETSQCIAKLLDIPVYLDNGLGNWFSKNSNSEITKPADFDTLNSLFPDVLKDSEHSTNVEPLSDGETKKELFSRCHNFVDTMLQQLNKEHPDISTILLMTHAPVKIAIGLNLLKLEDCDRTIDEDSNVLKASVCSLDRFQSSRFGMEEDEDDDEEDANETVTNGTQPMSDRWIMTMNNNIEYLRDGEERPWYFKKNIDGTENCNENEDVEEDQEETEVVYVSVDLDSGSYKESLSIDKNAIFQNSGLEREHPLIRIGDRLYEGTWQKLLGTELAFPDSASINRKDNGLASESTETADKETDNVRSVRNSRRNKNRNDTAHTEKIYRITDRLTLRGIEPI

SEQ ID NO: 5811 - DNA, 492 bp, Saccharomyces bayanus
  CDS (1)..(492)
atggtagtgaacacaatatacatcgcaaggcacggatatagatccaattggctccccgaaggcccgtaccctgacccgcttacaggaattgacagcgatgttcctttggcagaacatggcgttcaccaggctaaagaattggcgcattacctattatcgttggacaaccagccagaggcagttttcacttctccattttatagatgtcttcaaacaacacagccggtagctaaattgttagaaatacctgtttatttagaaagaggtattggtgaatggtataggccagacaggaaacctgtcattccagtgccggctggttatgagatattgagtagatttttcccaggtatcatcagctcagaatgggaatccactttaataccttgtgaaaagggagaaactgagcaggagatgtacgcaagatgtaagaccttttggcctttattcatcgagcatgtagaaaaagagtatccaaacgttgaatgttag

SEQ ID NO: 5812 - protein, 163 aa, Saccharomyces bayanus
MVVNTIYIARHGYRSNWLPEGPYPDPLTGIDSDVPLAEHGVHQAKELAHYLLSLDNQPEAVFTSPFYRCLQTTQPVAKLLEIPVYLERGIGEWYRPDRKPVIPVPAGYEILSRFFPGIISSEWESTLIPCEKGETEQEMYARCKTFWPLFIEHVEKEYPNVEC

SEQ ID NO: 5813 - DNA, 813 bp, Saccharomyces bayanus
  CDS (1)..(813)
atggctattgaaaatatatacatcgccagacatggttatagatccaattggttaccaaaggggccatatccaccacctcctactggcattgataacgatgttccactttcggagcatggtgtcgagcaggcgcatgaattagcaaattatatctctaaactggacgtcaaacccgagatgattttttgctctccattttatcgttgcctggaaacgagtagacccacagttgagtctctgaaaattccattatacatagatcgtggtgtgggagaatggtacaaacctgatagacccattatcccagaaccggcaactcatgaagtaatgagtaagtttttcccggccatgataaatccaaattgggaatccagtatcattcctagtaataaaggtgaaacagaagaagacatttttgaaaggtgtcataagttctggcccattttcatcgaaaaagtggaaagacggtttccagaaatcaagactattatgattgttacacatgcagccaccaaatcagctcttggtatgaatttattgaaattctccagcgctaaagagcccattgatgataaaggtacttttataagaaacggaagttgcgctattgacaaatttgaggtggtaaaagcagaaggtgaaaatctgccatttgaaaagagggtatggacaatcacaatgaatggtaatacgtcttttttaactaatggagaagaaatgaattggacgtttatgaatgcctttgaagccggttctgacgccgacattaaggcaagaagagcagcagaaagtagcaaattgaaaacggaataa

SEQ ID NO: 5814 - protein, 270 aa, Saccharomyces bayanus
MAIENIYIARHGYRSNWLPKGPYPPPPTGIDNDVPLSEHGVEQAHELANYISKLDVKPEMIFCSPFYRCLETSRPTVESLKIPLYIDRGVGEWYKPDRPIIPEPATHEVMSKFFPAMINPNWESSIIPSNKGETEEDIFERCHKFWPIFIEKVERRFPEIKTIMIVTHAATKSALGMNLLKFSSAKEPIDDKGTFIRNGSCAIDKFEVVKAEGENLPFEKRVWTITMNGNTSFLTNGEEMNWTFMNAFEAGSDADIKARRAAESSKLKTE

SEQ ID NO: 5815 - DNA, 1245 bp, Thermosynechococcus elongatus
  CDS (1)..(1245): transl_table=11
atggcagcccaggtgggtctagcgctgcggggtattcctattcgcaaaatttacaccagtcccctgaaacgggcacaggaaaccgcagaggttatccatgctcagctccaaaaccccgaactcaagccaccccatgcccttgatctcctcaaagagattgccctgccagcttgggaagatctcccctttgccgaagtgaaggcacagttcccagaggactatcgccgctggcaggaagccccagaaaccttgatgatgaaaatcaccacagaaagtggccaaacgaaggagtttttcccgctactggatctctacgatcgcgcgggcatggtcttggaaacgctgctagcggctcacgccaatgaaacgattgtcattgtgggtcacagtggcatgaaccgtgccctgatctgcacgggcctcggcttgggggtcaagggttacctgcggctccagcaggccagtggtggcattagtgtcttaaatttcagcaatggcctgcggcaacctgctcaactggaagcgctcaatctcactagccatcttaatgatccttttccacagccccgcttcaaggaacaaacgctgcgggtctttcttgtccgccacggtgaaacggactggaaccgcgaaggacgcttccaagggcaaattgatgtgcccctcaatgaaaatggccgtgcccaagcagcggcggtggctgagtttctcaaggatgtccccttccaccatgccgtgagcagtcccctgctgcgtcccaaggatacggccttggcgattttgcagtatcacccccatgtgcagctggagttagagccagcccttgcagagattagccatggggactgggagggcaagtttgaacctgaggtggaggcggcctaccccggtgaactggaacgttggcggacaacaccagccctagtgcaaatgcccaatggcgaaaacctcgagcaggtgcgcgatcgcgtggtcaaagcctgggaactctggctgaagcgctggaaaactaatgctcccactccccacaatgtcttggttgtggcccacgatgccaccaataaggtgttgctctgccacattgttggtcttggcattgaaaacttctggctctttaagcagggcaatggcagtgtcacggtgattgactatcccctcaaggggggtctgccgcgcttgcaggcagtgaatatcaccacccatttgggaggggtactggatcggacggcggcgggagcgctatag

SEQ ID NO: 5816 - protein, 414 aa, Thermosynechococcus elongatus
MAAQVGLALRGIPIRKIYTSPLKRAQETAEVIHAQLQNPELKPPHALDLLKEIALPAWEDLPFAEVKAQFPEDYRRWQEAPETLMMKITTESGQTKEFFPLLDLYDRAGMVLETLLAAHANETIVIVGHSGMNRALICTGLGLGVKGYLRLQQASGGISVLNFSNGLRQPAQLEALNLTSHLNDPFPQPRFKEQTLRVFLVRHGETDWNREGRFQGQIDVPLNENGRAQAAAVAEFLKDVPFHHAVSSPLLRPKDTALAILQYHPHVQLELEPALAEISHGDWEGKFEPEVEAAYPGELERWRTTPALVQMPNGENLEQVRDRVVKAWELWLKRWKTNAPTPHNVLVVAHDATNKVLLCHIVGLGIENFWLFKQGNGSVTVIDYPLKGGLPRLQAVNITTHLGGVLDRTAAGAL

SEQ ID NO: 5817 - DNA, 1308 bp, Saccharomyces cerevisiae
  CDS (1)..(1308)
atggtggtgaacacgatatatatcgcaaggcatggatacagatccaactggcttccggagggtccatatcctgacccacttacaggaattgatagcgatgttcctttagcagaacacggagtccagcaagccaaagagttggcccattaccttttgtccttggataatcaaccagaggccgccttcgcttctccattttatagatgtcttgagactgtacaaccgatagctaagctgttagaaatacctgtttatctagaaaggggtatcggggaatggtatagacctgatagaaaacctgttattccagtacctgctggatatgagatactaagcaaattttttccaggtgtcattagccaagaatgggactctacattaacaccaaatgaaaagggtgagacagaacaggagatgtatatgagattcaaaaaattttggcccttatttattgaacgtgtagaaaaggaatatccaaatgttgagtgcatactgttggtcacacacgctgcatctaagattgcccttggaatgagcttgctgggatacgataatcctcggatgtctttgaatgaaaatggtgataaaataagaagtggtagttgctcattagacaaatacgaaattcttaaaaaaagctacgatactatagatgaaactgatgatcaaacatcctttacctatataccatttagtgacagaaaatgggttttaacgatgaatgggaataccgagtttttgagtagtggtgaagaaatgaattggaattttgattgtgtggcagaagctggttcagatgctgatatcaaaaagagacaaatgacaaaaaaaaccagctcaccaataccagaagcagatgatcaaacggaagtagaaaccgtttatatcagtgttgatattcccagcggcaattacaaagagaggaccgagatagcaaagagcgcaattttacaatattccggtttagaaacagatgctccgttgtttagaatcggaaatagattgtatgagggaagctgggagagacttgttggcacggagcttgctttcccaaatgctgcacatgtacataaaaagacagccggtctactatcaccgactgaagagaatgaaacaacaaatgctggtcaaagtaaaggctcatcgactgccaacgacccaaacatacaaatacaagaagaagacgttggactaccggattcaactaacacaagtagagatcacacgggagataaagaagaggttcaatcagaaaagatttatagaataaaagagaggatagtgctaagcaatgtccgccctatgtaa

SEQ ID NO: 5818 - protein, 435 aa, Saccharomyces cerevisiae
MVVNTIYIARHGYRSNWLPEGPYPDPLTGIDSDVPLAEHGVQQAKELAHYLLSLDNQPEAAFASPFYRCLETVQPIAKLLEIPVYLERGIGEWYRPDRKPVIPVPAGYEILSKFFPGVISQEWDSTLTPNEKGETEQEMYMRFKKFWPLFIERVEKEYPNVECILLVTHAASKIALGMSLLGYDNPRMSLNENGDKIRSGSCSLDKYEILKKSYDTIDETDDQTSFTYIPFSDRKWVLTMNGNTEFLSSGEEMNWNFDCVAEAGSDADIKKRQMTKKTSSPIPEADDQTEVETVYISVDIPSGNYKERTEIAKSAILQYSGLETDAPLFRIGNRLYEGSWERLVGTELAFPNAAHVHKKTAGLLSPTEENETTNAGQSKGSSTANDPNIQIQEEDVGLPDSTNTSRDHTGDKEEVQSEKIYRIKERIVLSNVRPM

SEQ ID NO: 5819 - DNA, 26 bp, Artificial sequence
  primer
atggctatcgaaaatatatacattgc

SEQ ID NO: 5820 - DNA, 25 bp, Artificial sequence
  primer
tcactccatttttagttttccgctc

SEQ ID NO: 5821 - protein, 322 aa, Artificial sequence
  consensus sequence
  Variant (3)..(17): Xaa in position 3 to 17 is any amino acid
  Variant (18)..(48): Xaa in position 18 to 48 is any or no amino acid
  Variant (50)..(51): Xaa in position 50 to 51 is any amino acid
  Variant (53)..(55): Xaa in position 53 to 55 is any amino acid
  Variant (57)..(58): Xaa in position 57 to 58 is any amino acid
  Variant (61)..(75): Xaa in position 61 to 75 is any amino acid
  Variant (76)..(97): Xaa in position 76 to 97 is any or no amino acid
  Variant (100)..(101): Xaa in position 100 to 101 is any amino acid
  Variant (103)..(105): Xaa in position 103 to 105 is any amino acid
  Variant (107)..(107): Xaa in position 107 is any amino acid
  Variant (108)..(218): Xaa in position 108 to 218 is any or no amino acid
  Variant (220)..(255): Xaa in position 220 to 255 is any amino acid
  Variant (256)..(275): Xaa in position 256 to 275 is any or no amino acid
  Variant (277)..(305): Xaa in position 277 to 305 is any amino acid
  Variant (306)..(321): Xaa in position 306 to 321 is any or no amino acid
RHXXXXXXXXXXXXXXXXXXXXXXXXXXXXXXXXXXXXXXXXXXXXXXDXXLXXXGXXQAXXXXXXXXXXXXXXXXXXXXXXXXXXXXXXXXXXXXXSPXXRXXXTXXXXXXXXXXXXXXXXXXXXXXXXXXXXXXXXXXXXXXXXXXXXXXXXXXXXXXXXXXXXXXXXXXXXXXXXXXXXXXXXXXXXXXXXXXXXXXXXXXXXXXXXXXXXXXXXEXXXXXXXXXXXXXXXXXXXXXXXXXXXXXXXXXXXXXXXXXXXXXXXXXXXXXXXXEXXXXXXXXXXXXXXXXXXXXXXXXXXXXXXXXXXXXXXXXXXXXXH

SEQ ID NO: 5822 - DNA, 1044 bp, Saccharomyces cerevisiae
  CDS (1)..(1044)
atggtttctgtggagtttttacaggagttaccaaaatgtgagcatcacttgcatttggaaggtactctagaacctgacctattgttcccattagctaaaagaaacgatataattctacctgaaggttttcctaaatcggtcgaggaattaaacgaaaagtataagaagtttcgtgatctgcaggatttcttagattactattatattggtactaatgtcttgattagtgaacaagatttctttgatttggcgtgggcctattttaaaaaagttcacaaacaaggcttggtccatgctgaagtgttttacgaccctcagtcacatacatctaggggcatctccatagaaacagtcactaaaggtttccaaagagcttgtgacaaagccttctctgaatttggtattacatccaagctaattatgtgtctgttaagacacattgaaccagaggaatgtttgaaaactatcgaagaagctaccccatttattaaagatggtactatctctgccttaggattagattctgctgagaaaccatttcccccacatttatttgttgaatgttacggaaaggccgcctcattgaataaagatttaaaactaactgcacacgcaggtgaagaaggccccgctcaattcgtctcggatgctttagacttgttgcaagtaacaagaatcgatcacggtatcaacagtcaatacgacgaggagttattggataggttgtcgcgcgaccagaccatgctaactatttgtcctctctccaacgtgaagctacaagtagtccaatccgtttcagagttaccactacaaaagtttcttgacagagatgttccattttctttaaattctgatgaccccgcctattttggtggttatatcttagatgtctacactcaagtttcgaaagatttcccacactgggaccatgaaacatggggtcgtatcgctaagaacgccattaaaggttcatggtgtgacgataaaagaaagaacggtttgttaagtagagtggacgaagtagtcactaaatattcgcattag

SEQ ID NO: 5823 - protein, 347 aa, Saccharomyces cerevisiae
MVSVEFLQELPKCEHHLHLEGTLEPDLLFPLAKRNDIILPEGFPKSVEELNEKYKKFRDLQDFLDYYYIGTNVLISEQDFFDLAWAYFKKVHKQGLVHAEVFYDPQSHTSRGISIETVTKGFQRACDKAFSEFGITSKLIMCLLRHIEPEECLKTIEEATPFIKDGTISALGLDSAEKPFPPHLFVECYGKAASLNKDLKLTAHAGEEGPAQFVSDALDLLQVTRIDHGINSQYDEELLDRLSRDQTMLTICPLSNVKLQVVQSVSELPLQKFLDRDVPFSLNSDDPAYFGGYILDVYTQVSKDFPHWDHETWGRIAKNAIKGSWCDDKRKNGLLSRVDEVVTKYSH

SEQ ID NO: 5824 - DNA, 1092 bp, Homo sapiens
  CDS (1)..(1092)
atggcccagacgcccgccttcgacaagcccaaagtagaactgcatgtccacctagacggatccatcaagcctgaaaccatcttatactatggcaggaggagagggatcgccctcccagctaacacagcagaggggctgctgaacgtcattggcatggacaagccgctcacccttccagacttcctggccaagtttgactactacatgcctgctatcgcgggctgccgggaggctatcaaaaggatcgcctatgagtttgtagagatgaaggccaaagagggcgtggtgtatgtggaggtgcggtacagtccgcacctgctggccaactccaaagtggagccaatcccctggaaccaggctgaaggggacctcaccccagacgaggtggtggccctagtgggccagggcctgcaggagggggagcgagacttcggggtcaaggcccggtccatcctgtgctgcatgcgccaccagcccaactggtcccccaaggtggtggagctgtgtaagaagtaccagcagcagaccgtggtagccattgacctggctggagatgagaccatcccaggaagcagcctcttgcctggacatgtccaggcctaccaggaggctgtgaagagcggcattcaccgtactgtccacgccggggaggtgggctcggccgaagtagtaaaagaggctgtggacatactcaagacagagcggctgggacacggctaccacaccctggaagaccaggccctttataacaggctgcggcaggaaaacatgcacttcgagatctgcccctggtccagctacctcactggtgcctggaagccggacacggagcatgcagtcattcggctcaaaaatgaccaggctaactactcgctcaacacagatgacccgctcatcttcaagtccaccctggacactgattaccagatgaccaaacgggacatgggctttactgaagaggagtttaaaaggctgaacatcaatgcggccaaatctagtttcctcccagaagatgaaaagagggagcttctcgacctgctctataaagcctatgggatgccaccttcagcctctgcagggcagaacctctga

SEQ ID NO: 5825 - protein, 363 aa, Homo sapiens
MAQTPAFDKPKVELHVHLDGSIKPETILYYGRRRGIALPANTAEGLLNVIGMDKPLTLPDFLAKFDYYMPAIAGCREAIKRIAYEFVEMKAKEGVVYVEVRYSPHLLANSKVEPIPWNQAEGDLTPDEVVALVGQGLQEGERDFGVKARSILCCMRHQPNWSPKVVELCKKYQQQTVVAIDLAGDETIPGSSLLPGHVQAYQEAVKSGIHRTVHAGEVGSAEVVKEAVDILKTERLGHGYHTLEDQALYNRLRQENMHFEICPWSSYLTGAWKPDTEHAVIRLKNDQANYSLNTDDPLIFKSTLDTDYQMTKRDMGFTEEEFKRLNINAAKSSFLPEDEKRELLDLLYKAYGMPPSASAGQNL

SEQ ID NO: 5826 - DNA, 1074 bp, Gallus gallus
  CDS (1)..(1074)
atggagcgcggggtgcgcgtcttcggggagcccaaggtagaacttcacatccacctggatggagccattcggccagaaacaatcttacacttcggcaagaaaagaggggttccactccctggcagcactgtggatgaactcatgaagcacgtcagctaccaaacaccgctatcgcttaaactgtttctagagaaatttaatcactacatgcccgccattgcgggggaccgcgaggcggtgcggaggatcgcgtatgagctggtggagacgaaggcaaaggaaggcgtcgtctacgtggaggtgcgctacagccctcacctgctggccaactgccgcgtggagcccatcccctggggacaggctgagggagacctcactccagaggaagttgttaacctcgtaaatcagggactgcaggatggagaaaggaatttccgcatcaaagccaggtctattctatgctgcatgcgccatatgccaagttggtctccagaggtggtggagctgtgcaagaagtatcaaaacaactctgtggtggccatagacctggctggggatgagttgctgatggcttcttctgatcataaggcggcttatgaggaagcagaacgatgtggcatccatcgcactgtccatgctggggaggccgggccagctaccatgatcaaagaggctgtgtacctcctgaaggccgagcgcatcggccacggctaccacgtgctggaggaccccgagctgtacagggagctgctgagaaccaggatgcactttgaggtctgcccctggtccagctatctgactggagcatgtcttccggacttcaggaaacacccagtagtacagtttaagaaggatcaagctaattattctatcaacaccgatgaccccctcatcttcaattccaacattgacaaggattacggcatagtgaaagagtacatggacttcactgaggaggatttcaagagagtgaatatcaatgcagctcagtccagcttcttacctgagaaagaaaagcaggagcttcttaatacgctgtatgaagcctatgggatggtgcctgccacctcgtga

SEQ ID NO: 5827 - protein, 357 aa, Gallus gallus
MERGVRVFGEPKVELHIHLDGAIRPETILHFGKKRGVPLPGSTVDELMKHVSYQTPLSLKLFLEKFNHYMPAIAGDREAVRRIAYELVETKAKEGVVYVEVRYSPHLLANCRVEPIPWGQAEGDLTPEEVVNLVNQGLQDGERNFRIKARSILCCMRHMPSWSPEVVELCKKYQNNSVVAIDLAGDELLMASSDHKAAYEEAERCGIHRTVHAGEAGPATMIKEAVYLLKAERIGHGYHVLEDPELYRELLRTRMHFEVCPWSSYLTGACLPDFRKHPVVQFKKDQANYSINTDDPLIFNSNIDKDYGIVKEYMDFTEEDFKRVNINAAQSSFLPEKEKQELLNTLYEAYGMVPATS

SEQ ID NO: 5828 - DNA, 1077 bp, Xenopus tropicalis
  CDS (1)..(1077)
atggagagcaaggcttttaacaaaccaaaggtagagctccacgttcacctcgatggaagcatcaaaccagaaactataatacattttgccaaaaaaagacaaatcaaactccccgcagacacggtggaaggcctcctagagcacgtttcctacaaagaacctctaagtctgacggaatttctcagcaaattcaatcattacatgccggccattgcaggtgacagagaggctataaagagaatcgcctatgagtttgtggaaatgaaagccaaagaaggggtgatctatgtagaagtcagatacagcccccatttcctagctaactccaaagtggaacccattccatggggacagaaagaaggtgacattacgccggatgaagtggttgatctagttaaccagggattacggaaaggagagaaagcgttcaacatcaaagccaggtctattctatgctgcatgcgacacatgccaagttggtccacagaggtggtcgagctttgcaaaaagtaccaaaatgacactgttgttgccatagacttggctggggatgaatctctcaactgtgaatcgtacccggggcacaggaaggcgtatgaggaagcagtcaaatgtggaatccatcgaactgttcatgctggagaagttggaccttccagtgtagtgaaggaggctgtggaagtgctgaaggctgaaaggattgggcatggctaccacactactgaagacccaaatctatataaagagcttctggaaaagaatatgcactttgaggtgtgcccgtggtcgagctatctaactggcgcgtgtcacccagattttactaaacatccagccacacaatttagaaaagacaaagccaattactcactgaacacagacgaccctctgatatttggatctactctggacgttgattattcaattgcagcgaaacacatgggcttcacagaagaagagtttaagcgagtgaacatcaatgctgccaagtcaagctttctacctgaaagtgagaagaaagagctgctgtataaactatatgaagcctacggcatgatcctttccacaggactctga

SEQ ID NO: 5829 - protein, 358 aa, Xenopus tropicalis
MESKAFNKPKVELHVHLDGSIKPETIIHFAKKRQIKLPADTVEGLLEHVSYKEPLSLTEFLSKFNHYMPAIAGDREAIKRIAYEFVEMKAKEGVIYVEVRYSPHFLANSKVEPIPWGQKEGDITPDEVVDLVNQGLRKGEKAFNIKARSILCCMRHMPSWSTEVVELCKKYQNDTVVAIDLAGDESLNCESYPGHRKAYEEAVKCGIHRTVHAGEVGPSSVVKEAVEVLKAERIGHGYHTTEDPNLYKELLEKNMHFEVCPWSSYLTGACHPDFTKHPATQFRKDKANYSLNTDDPLIFGSTLDVDYSIAAKHMGFTEEEFKRVNINAAKSSFLPESEKKELLYKLYEAYGMILSTGL

SEQ ID NO: 5830 - DNA, 870 bp, Gallus gallus
  CDS (1)..(870)
atggcggcggagcgggagcggtgcttctaccgggagctgcccaaagtggaacttcatgctcatttgaatggctgtatcagttcttctactatgaagaaacttatggcccagaaaccataccttcagatccagaatggaatgactgtgattgacaaaggaaagaaaagaaccttagatgagtgctttcagatgtttcagatcatctatcagattacaacaaggactgaagatattttactgataactaaggatgttattaaagaatttgctgatgatggtgtcaaatatctggaattaaggagcactcctcgagaagaagagtccacaggtatgaccaaaaggatgtatgttgaaactgtacttgagggtataaagcagtgtaaagaagaaggcttggatatagatgtaagattattaatagcaataaatagaagaggtggcccagcagttgctaagcagactgttaaacttgctgaagaattccttctttccactgatggggttgtagtaggacttgacctcagtggtgatccaactgcagggcatggtcaagattttttggaacccctctcagaagcgaaaaaagcaggtctgaagctggctttgcatctttcagagattccaaatcaagaggaggagaccaaaattctcctgggcctgcctcctgacaggattggacatggaacatttctcaactctgcaacagctggctcagaagaattagtgccacttgttagacagaatcatatacctattgaactttgcatgacttcaaacatcaaaactcagacagtgccttcctgtgacaaacaccattttggatactggtacaacattggacaccctgcagtgctttgtgtaagtttttaa

SEQ ID NO: 5831 - protein, 289 aa, Gallus gallus
MAAERERCFYRELPKVELHAHLNGCISSSTMKKLMAQKPYLQIQNGMTVIDKGKKRTLDECFQMFQIIYQITTRTEDILLITKDVIKEFADDGVKYLELRSTPREEESTGMTKRMYVETVLEGIKQCKEEGLDIDVRLLIAINRRGGPAVAKQTVKLAEEFLLSTDGVVVGLDLSGDPTAGHGQDFLEPLSEAKKAGLKLALHLSEIPNQEEETKILLGLPPDRIGHGTFLNSATAGSEELVPLVRQNHIPIELCMTSNIKTQTVPSCDKHHFGYWYNIGHPAVLCVSF

SEQ ID NO: 5832 - DNA, 1059 bp, Mus musculus
  CDS (1)..(1059)
atggcccagacacccgcattcaacaaacccaaagtagagttacacgtccacctggatggagccatcaagccagaaaccatcttatactttggcaagaagagaggcatcgccctcccggcagatacagtggaggagctgcgcaacattatcggcatggacaagcccctctcgctcccaggcttcctggccaagtttgactactacatgcctgtgattgcgggctgcagagaggccatcaagaggatcgcctacgagtttgtggagatgaaggcaaaggagggcgtggtctatgtggaagtgcgctatagcccacacctgctggccaattccaaggtggacccaatgccctggaaccagactgaaggggacgtcacccctgatgacgttgtggatcttgtgaaccagggcctgcaggagggagagcaagcatttggcatcaaggtccggtccattctgtgctgcatgcgccaccagcccagctggtcccttgaggtgttggagctgtgtaagaagtacaatcagaagaccgtggtggctatggacttggctggggatgagaccattgaaggaagtagcctcttcccaggccacgtggaagcctatgagggcgcagtaaagaatggcattcatcggaccgtccacgctggcgaggtgggctctcctgaggttgtgcgtgaggctgtggacatcctcaagacagagagggtgggacatggttatcacaccatcgaggatgaagctctctacaacagactactgaaagaaaacatgcactttgaggtctgcccctggtccagctacctcacaggcgcctgggatcccaaaacgacgcatgcggttgttcgcttcaagaatgataaggccaactactcactcaacacagacgaccccctcatcttcaagtccaccctagacactgactaccagatgaccaagaaagacatgggcttcactgaggaggagttcaagcgactgaacatcaacgcagcgaagtcaagcttcctcccagaggaagagaagaaggaacttctggaacggctctacagagaataccaatag

SEQ ID NO: 5833 - protein, 352 aa, Mus musculus
MAQTPAFNKPKVELHVHLDGAIKPETILYFGKKRGIALPADTVEELRNIIGMDKPLSLPGFLAKFDYYMPVIAGCREAIKRIAYEFVEMKAKEGVVYVEVRYSPHLLANSKVDPMPWNQTEGDVTPDDVVDLVNQGLQEGEQAFGIKVRSILCCMRHQPSWSLEVLELCKKYNQKTVVAMDLAGDETIEGSSLFPGHVEAYEGAVKNGIHRTVHAGEVGSPEVVREAVDILKTERVGHGYHTIEDEALYNRLLKENMHFEVCPWSSYLTGAWDPKTTHAVVRFKNDKANYSLNTDDPLIFKSTLDTDYQMTKKDMGFTEEEFKRLNINAAKSSFLPEEEKKELLERLYREYQ

SEQ ID NO: 5834 - DNA, 1176 bp, Caenorhabditis elegans
  CDS (1)..(1176)
atgggtggcgtattctcaggagatcgtgtattcaatgactctaaagctatacacaatgtcgataaacaaatgcttcacaatcatgatccgacgttatcagtgagcactccggaagtcaccaccgaaatgcacgagcgtctcaacttcccgaaagtcgaacttcatttgcatcttgatggagccgtccgatttgatacactgatcgatctttctcaacaaaagggaataccactggctggagctaagactgtcgaggaactcaaaaaagttttagtgacccacgagccagcaaatctttcaaaggttctcgaagcgtttgaaatatttttgccggttattcgcggagacttggcagctattgaaagagttgcttatgaactttgtgaggatcagcataacaatggagttgtctattttgaaggaagatattcaccacatttgttgctttgtaatgattatccggaagtaaccgctgctcacgttgtcgccgctgttaagaaaggatttgatcgtggagagaaacagttcggaatcaaagctcgttcaattctttgctgtattcgtggactagacaaaaagttcccacaattgattctcgatttggcaactgacttgaaacaactcggagttgtcgcgattgatgttgctggatcagctcacggagccgatgaacagtacgagccagaagtcgttgctgctttccaagaagcacacaaacgaggaattcatagaactgttcatgctggagagtctggtggtccaaaggaagttattaaagctattgaagatatgtatgcagagagaattggacatggttatagagtaatgagagatgaagaaatgtatttggagcattttgtaaactcaaagaatgttcatttggaagcttgtccatattcatctgtaatgactggtgctgttccattggattggaagaatcatccaattgcacgatgggctaaagatgatgttaatttctctgtatctcgtgatgatccaacatgttttgataattcgatgctcagtgaattgacacttgttcataagcagatcggattggatgtacatcaactgtggaaagcgcaacttaacgctgcccgttcttgtttccttcctgaagacgaaaaagctgaacttgtaaaacgagttgaagctggagagccgccacgtccatga

SEQ ID NO: 5835 - protein, 391 aa, Caenorhabditis elegans
MGGVFSGDRVFNDSKAIHNVDKQMLHNHDPTLSVSTPEVTTEMHERLNFPKVELHLHLDGAVRFDTLIDLSQQKGIPLAGAKTVEELKKVLVTHEPANLSKVLEAFEIFLPVIRGDLAAIERVAYELCEDQHNNGVVYFEGRYSPHLLLCNDYPEVTAAHVVAAVKKGFDRGEKQFGIKARSILCCIRGLDKKFPQLILDLATDLKQLGVVAIDVAGSAHGADEQYEPEVVAAFQEAHKRGIHRTVHAGESGGPKEVIKAIEDMYAERIGHGYRVMRDEEMYLEHFVNSKNVHLEACPYSSVMTGAVPLDWKNHPIARWAKDDVNFSVSRDDPTCFDNSMLSELTLVHKQIGLDVHQLWKAQLNAARSCFLPEDEKAELVKRVEAGEPPRP

SEQ ID NO: 5836 - DNA, 1059 bp, Rattus norvegicus
  CDS (1)..(1059)
atggcccagacgcccgcattcaacaagcccaaagtagagctgcacgtccacctggatggagccatcaagccagaaaccatcttgtactatggcaagaagagaggaatcgacctcccggcagatacagtggagggactacgcaacattatcggcatggacaagcctctctcgctcccagacttcctggccaagttcgattactacatgcctgccatcgcgggctgcagggaggccatcaagagaatcgcctatgaatttgtggagatgaaggcaaaggaaggcgtggtgtacgtggaagttcgctacagcccacacctgctggccaactccaaagtggacccaatcccctggaaccaggccgaaggagacctcacccctgatgaggttgtggatcttgtaaaccagggcctgcaggagggagagcaagcattcggcatcaaggtccggtccatcttgtgctgcatgcgccaccagcccagctggtcccctgaggtgttggagctgtgtaagaagtaccatcagaagaccgtggtggctatggacttggctggggatgagaccattgaaggaagcagccttttcccgggccacgtggaagcctacgagggtgcagtgaaggatggcattcaccggactgtccatgctggagaggtgggctctgctgaggtggtgcgagaggctgtggacatactcaagacagagagagtggggcacggctaccacacaatagaggatgaagccctctacaacaggctactgaaagaaaacatgcactttgaggtctgcccctggtccagctacctcactggcgcctggaatcccaaaacgacgcatgcagttgttcgcttcaaagatgatcaggccaactactccctcaactcggacgaccccctcatcttcaagtccaccgtggacactgactaccagatggtgaaaaaagacatgggcttcactgaagaggagttcaagagactgaacatcaatgcggcgaagtcaagcttcctcccagaggacgagaagaaggaacttctggaacggctctacaaggaataccaatag

SEQ ID NO: 5837 - protein, 352 aa, Rattus norvegicus
MAQTPAFNKPKVELHVHLDGAIKPETILYYGKKRGIDLPADTVEGLRNIIGMDKPLSLPDFLAKFDYYMPAIAGCREAIKRIAYEFVEMKAKEGVVYVEVRYSPHLLANSKVDPIPWNQAEGDLTPDEVVDLVNQGLQEGEQAFGIKVRSILCCMRHQPSWSPEVLELCKKYHQKTVVAMDLAGDETIEGSSLFPGHVEAYEGAVKDGIHRTVHAGEVGSAEVVREAVDILKTERVGHGYHTIEDEALYNRLLKENMHFEVCPWSSYLTGAWNPKTTHAVVRFKDDQANYSLNSDDPLIFKSTVDTDYQMVKKDMGFTEEEFKRLNINAAKSSFLPEDEKKELLERLYKEYQ

SEQ ID NO: 5838 - DNA, 1020 bp, Schizosaccharomyces pombe 972h-
  CDS (1)..(1020)
atgactgatattgaaaggttcattgaaaagttaccaaaagctgaactacatctccatttagaagggaccttggaagctgaacttaagcttaagctatctcatcgaaataaaattccactaaaacagagtagcattgaggaaatcaaagagagctacaattttcatgatttggcatcatttttagaagtttactacgagggtgtagaattgttactacatgagcaagatttttatgatctttgttatcagtatctaagaaaagcagcatcacagaatgtagtatacgcggaaatgttttttgatccacaacttcatacaagaagagggatttcctttgaaacagtaattaaagggcttattcgtgctcgcgatgatgcaatgcgagattttcatatatactcgcagctgatcatgtgttttatcagggaaatgagctttgaaaatgcagaagagacattaaacgcttctttgccttacaaatccgaaatcattggtattggacttgattctaacgaggaaaataacccacccattaaatttctcaaagtgttccaaagggcaaggcagttaggatatcgactgacatgtcattgcgatttgcatcagaaaaatacgacaacccatattcgccaagctttagaggatattggtgttgaacggattgatcatggtattaatattttggatgatcccgaattaataaaacttgctcttgagcgaaatattcccttcaccgtatgccccttttcaaacgaaattgtataccctgggaaagctcagccagagatacgcataatgttggacacgggtctaaaagtcaccattaattctgatgatcctgcttatatgcattgcttttatattacggaaaatttcaacttggcacaaaagggggcatcccttacgaaaaaagagctagtacagatctgtagaaattcatttgaggcagcatggatatcagaagagaagcgaaatcactatttagaagcacttaacagttttgcatcagcttatgattaa

SEQ ID NO: 5839 - protein, 339 aa, Schizosaccharomyces pombe 972h-
MTDIERFIEKLPKAELHLHLEGTLEAELKLKLSHRNKIPLKQSSIEEIKESYNFHDLASFLEVYYEGVELLLHEQDFYDLCYQYLRKAASQNVVYAEMFFDPQLHTRRGISFETVIKGLIRARDDAMRDFHIYSQLIMCFIREMSFENAEETLNASLPYKSEIIGIGLDSNEENNPPIKFLKVFQRARQLGYRLTCHCDLHQKNTTTHIRQALEDIGVERIDHGINILDDPELIKLALERNIPFTVCPFSNEIVYPGKAQPEIRIMLDTGLKVTINSDDPAYMHCFYITENFNLAQKGASLTKKELVQICRNSFEAAWISEEKRNHYLEALNSFASAYD

SEQ ID NO: 5840 - DNA, 1104 bp, Schizosaccharomyces pombe 972h-
  CDS (1)..(1104)
atgagcaatctacctatttacaatttcattagaaagctgccaaaatgcgagcatcatgtgcatttagaaggttgtctttctccagatttggtatttcgtttagctaagaaaaacgggataactcttcctagtgatgatgctgcgtacacgactccgagtactttgttagccagctatgagcattttggatgcttagatgacttcttacgctattattacattgctgtgtctgtgttgattgaggcctctgattttgaagcactcgcctatgaatatttttctatcgctcattcacaaggagttcatcatgctgaggtctttttcgatccccaaacacatacgagccgagggatttcttacgatgttgtagttagtggattttcagcagcttgtgagcgcgcaaatagagactttggaatgtctactaatcttattatgtgctttctgcgtcacttgccttctgaagcagcccatgaaacttttgcggaggcccttaaaagaaacgactttgagaatggaattgttgcaggtgtaggtttagattcttctgaggttgattttccaccagaactgtttcaggaagtttataaattagcagccgaaaaaggaatccgcagaacaggacacgcaggtgaagaaggtgatccatcttatattcgttctggacttgataatcttagtttacaaaggattgatcatggtatccgtttagtagaagacaaagagttaatgaagcgagttgcagaagaaaatatcatgctcaccatgtgccctctttccaacttaaaacttcgttgtgtcaattctattgccgagttacctgtacgggaatttttggaagcgggcgttccattttctattaactgcgatgatccagcttattttggcggttacaccttggagaactattttgctatccaaaaacattttaacttaacagttaaggaatgggtttttattgctaatgctgctatcaacggcagttggatatcgggcaaaagaaaagaagaattactttcttctgttcaaaaatgtgttaaggagtatactgctgaaattcaacaacccaaaacccttgaaacagctgtggaagttcaagcttaa

SEQ ID NO: 5841 - protein, 367 aa, Schizosaccharomyces pombe 972h-
MSNLPIYNFIRKLPKCEHHVHLEGCLSPDLVFRLAKKNGITLPSDDAAYTTPSTLLASYEHFGCLDDFLRYYYIAVSVLIEASDFEALAYEYFSIAHSQGVHHAEVFFDPQTHTSRGISYDVVVSGFSAACERANRDFGMSTNLIMCFLRHLPSEAAHETFAEALKRNDFENGIVAGVGLDSSEVDFPPELFQEVYKLAAEKGIRRTGHAGEEGDPSYIRSGLDNLSLQRIDHGIRLVEDKELMKRVAEENIMLTMCPLSNLKLRCVNSIAELPVREFLEAGVPFSINCDDPAYFGGYTLENYFAIQKHFNLTVKEWVFIANAAINGSWISGKRKEELLSSVQKCVKEYTAEIQQPKTLETAVEVQA

SEQ ID NO: 5842 - DNA, 1104 bp, Plasmodium falciparum 3D7
  CDS (1)..(1104)
atgaattgtaagaatatggatacttcatatgagattattaattatttaacaaaggatgagcttgatatagatttatcatgtatggataagaaggaaagatataaaatatggaaacgacttcccaaatgcgaattacattgtcatttagatgtatgtttttctgttgatttttttttgaatgttattcgtaaatataatatacaaccaaatatgagtgatgaagaaattatcgattattatttattttccaaacctggtaaatcattagatgaatttgttgaaaaagctttaaggttaaccgatatatatattgattatactgttgttgaagatttagcaaaacatgctgtatttaacaaatataaagaaggtgttgttttaatggagtttcgttattctccttctttcatgtccttcaaacataatttagataaagatcttatccatgaagctattgttaaaggtcttaatgaagccgttgctttgttagaatataaaatacaagtaggattactttgtacaggtgatggtggcctttcacatgaaagaatgaaagaagctgctgaattctgtattaaacataaaaaagattttgttggttatgatcatgctggacatgaagttgaccttaaaccatttaaagatatctttgataatataagagaagaaggtatctccttatctgtacacgctggagaagatgtaagcataccaaatttaaattctctttatacagccatcaacttattacatgttaaaagaattggacatggtattagagtttcagaatctcaagaattaattgacttagtaaaagaaaaagacatcttgctagaagtctgtcctatatctaatgtattattaaacaatgtcaaatctatggacacacaccctattagaatgttgtatgatgctggtgtaaaagtgtcggtaaattctgatgatccaggaatgttcttaaccaacattacagataattatgaagaattatatacacacttaaattttacattggctgattttatgaaaatgaacctctgggctgtgcaaaaatcttttgtagacccagatataaaaaataaaattataagtaaatatttttaa

SEQ ID NO: 5843 - protein, 367 aa, Plasmodium falciparum 3D7
MNCKNMDTSYEIINYLTKDELDIDLSCMDKKERYKIWKRLPKCELHCHLDVCFSVDFFLNVIRKYNIQPNMSDEEIIDYYLFSKPGKSLDEFVEKALRLTDIYIDYTVVEDLAKHAVFNKYKEGVVLMEFRYSPSFMSFKHNLDKDLIHEAIVKGLNEAVALLEYKIQVGLLCTGDGGLSHERMKEAAEFCIKHKKDFVGYDHAGHEVDLKPFKDIFDNIREEGISLSVHAGEDVSIPNLNSLYTAINLLHVKRIGHGIRVSESQELIDLVKEKDILLEVCPISNVLLNNVKSMDTHPIRMLYDAGVKVSVNSDDPGMFLTNITDNYEELYTHLNFTLADFMKMNLWAVQKSFVDPDIKNKIISKYF

SEQ ID NO: 5844 - DNA, 1065 bp, Streptomyces avermitilis MA-4680
  CDS (1)..(1065): transl_table=11
atgaccgcgctcgacatcgacaccatccgccggctccccaaggccgtgctgcacgaccacctcgacggcggtctgcgccccgccaccctggtggagctggcacaggcggtcggccacacactgcccaccacggacccgcaggcgctggccgactggtactacgaggccgccaactccggtgacctggtgcgctacatagcgaccttcgagcacaccctcgccgtgatgcagacccgtgaaggcctgctgcgcaccgccgaggagtacgtcctggacctggccgccgacggtgtcgtctacggcgaggtgcgctacgcccccgagctgatgctgaagggcgggctgaccctgtccgaggtcgtcgagaccgtgcaggagggcctggcggcgggcatggccaaggcggcggccgcgggcaccccggtccgggtgggcacactgctgtgcgggatgcgtatgttcgaccgcacccgggagaccgccgacctggccgtcgccttccgcgacgcgggtgttgtcggcttcgacatcgcgggtgccgaggacggtttcccgcccgccgaccacctggacgccttcgagcacctgcgccgggagaacgtccccttcaccatccacgccggtgaggcgcacggtctgcccagcatccaccaggccctccaggtgtgcggcgcccagcgcatcggccacggcgtgcgcatcaccgaggacatcgtcgacggcaagctcggccggctcgcgggctgggtgcgcgatcgccgcgtcgccctggagatgtgcccgacctccaacctccagacgggcgccgccacgtcgatcgccgagcaccccatcacggccctgaaggacctcggcttccgcgtcaccctcaacaccgacaaccgtctggtgtcgggcacgacgatgacccgtgagatgtccctgctggtcgaggaggcgggctggagcacggacgatctgcgcacggtcacggtgaacgccctcaagagcgcgttcctccccttcgacgagcgcaacgccctcatccaggacgtagtgcttcccggctacgaggccgcgctctga

SEQ ID NO: 5845 - protein, 354 aa, Streptomyces avermitilis MA-4680
MTALDIDTIRRLPKAVLHDHLDGGLRPATLVELAQAVGHTLPTTDPQALADWYYEAANSGDLVRYIATFEHTLAVMQTREGLLRTAEEYVLDLAADGVVYGEVRYAPELMLKGGLTLSEVVETVQEGLAAGMAKAAAAGTPVRVGTLLCGMRMFDRTRETADLAVAFRDAGVVGFDIAGAEDGFPPADHLDAFEHLRRENVPFTIHAGEAHGLPSIHQALQVCGAQRIGHGVRITEDIVDGKLGRLAGWVRDRRVALEMCPTSNLQTGAATSIAEHPITALKDLGFRVTLNTDNRLVSGTTMTREMSLLVEEAGWSTDDLRTVTVNALKSAFLPFDERNALIQDVVLPGYEAAL

SEQ ID NO: 5846 - DNA, 1077 bp, Streptomyces avermitilis MA-4680
  CDS (1)..(1077): transl_table=11
ttgaccgagcacttcgacgcccgtggcacccgcgacgcccagaccgggcgcgacctgcactccttcatcgccggactgccgaaggccgaactgcacgtgcatcacgtcggctccgcctccccccgcatcgtctcggagctggccgcccgccaccccgactccagcgtgccgaccgaccccgaggccctggccgactacttcacgttcacggacttcgcccacttcatcaaggtgtacctgtccgtcgtcgacctcatccgaacccccgaggacgtccggctgctgacgtacgaggtcgcccgtgaactcgcccggcagcaggtgcggtacgccgagctgaccatcaccccgttctcctccacccggcgcggcatcgacgagcgcgcgttcatggacgccatcgaggacgcccgcaagtcggccgaggccgagttcgggaccgtactgcgctggtgcttcgacatccccggcgaggcgggcctggagtccgccgaggagacggtgcggctcgccaccgacgaccggctgcgccccgaggggctcgtctccttcgggctcggcggccccgagatcggcgtaccgcgcccgcagttcaagccgtacttcgaccgggcgatcgccgccgggctgcggtccgtgccgcacgccggtgagacgaccggacccgagacggtctgggacgccctcaccgacctgcgcgccgaacgcatcggacatggcaccagctccgcccaggacccgaagctgctcgcccacctcgccgagcaccgcatcccgctggaggtctgcccgacctccaacatcgcgacccgcgcggtccgcacgctcgacgagcaccccgtcaaggagttcgtccgggccggcgtcgtcgtcaccatcaactccgacgacccgccgatgttcggcaccgacctcaacaacgagtacgcgatcgccgcccgcctcctcgacctcgacgagcggggcctcgccggcctcgccaagaacagcgtcgaggcgtccttcctcgacgccgcgggcaaggcccggatcgccgccgagatcgacacgtacaccgcggcatggctcgcgccctga

SEQ ID NO: 5847 - protein, 358 aa, Streptomyces avermitilis MA-4680
MTEHFDARGTRDAQTGRDLHSFIAGLPKAELHVHHVGSASPRIVSELAARHPDSSVPTDPEALADYFTFTDFAHFIKVYLSVVDLIRTPEDVRLLTYEVARELARQQVRYAELTITPFSSTRRGIDERAFMDAIEDARKSAEAEFGTVLRWCFDIPGEAGLESAEETVRLATDDRLRPEGLVSFGLGGPEIGVPRPQFKPYFDRAIAAGLRSVPHAGETTGPETVWDALTDLRAERIGHGTSSAQDPKLLAHLAEHRIPLEVCPTSNIATRAVRTLDEHPVKEFVRAGVVVTINSDDPPMFGTDLNNEYAIAARLLDLDERGLAGLAKNSVEASFLDAAGKARIAAEIDTYTAAWLAP

SEQ ID NO: 5848 - DNA, 1215 bp, Streptomyces avermitilis MA-4680
  CDS (1)..(1215): transl_table=11
ttggatatcgacgcttcgtcgtgcccggagctctacgcgcgtagggcttatggtgcggaaatgacgagccagcaccagaacacccctagctcggaacagatccgccgggcgcccaaggtcctgctccacgatcacctcgacggggggctgcgccccggcacgatcgtcgaactcgcccgcgacgccgggtactccgggctccccgagaccgaccccgacaaactcggcatctggttccgcgaggccgccgactccggttcgctggagcggtatctggagaccttcgcccacacctgcgccgtcatgcagacccgtgcggcgctcgtgcgggtcgccgccgagtgcgccgaggacctcgccgcggacggggtcgtctacgccgaggtgcggtacgcgcccgagcagcacctggaggccgggctcagcctcgaagaggtcgtcgaggccgtcaacgagggcttccgggccggcgagcggcgggccaaggaggatggcaaccgcatccgggtcggcgcgctgctcaccgccatgcggcacgcggcccgcgccctggagatcgccgaactcgccaaccgctaccgggatgcgggcgtcgtcggattcgacatcgcgggcgccgaggcgggcttcccgcccacccggcacctcgacgcgttcgagtacctcaagcgcgagaacaaccacttcacgatccacgccggggaggccttcggtcttccgtcgatctggcaggccctccagtggtgcggcgccgaccggctcggtcacggcgtgcgcatcatcgacgacatccaggtgcgcgaggacggctcggtgaagctgggccgcctcgcctcgtatgtgcgcgacaagcgcatcccgctggagctgtgcccgagctccaacctccagacgggcgccgcgtcctcgtacgccgaccaccccatcgggctgctgcggcggctgcacttcagggccacggtgaacaccgacaaccggctgatgtcggggacgagtatgagccgcgaattcgagcaccttgtcgacgctttcggctacacgctcgatgacatggcctggttctccgtcaatgctatgaaatccgcattcattcctttcgatgaacgactggccatgatcaatgacgtcatcaagcctggatatgccgagctgaaatccgaatggctgttcaagcagacggcttccaccagcagttctgcggcatccgaggagtaa

SEQ ID NO: 5849 - protein, 404 aa, Streptomyces avermitilis MA-4680
MDIDASSCPELYARRAYGAEMTSQHQNTPSSEQIRRAPKVLLHDHLDGGLRPGTIVELARDAGYSGLPETDPDKLGIWFREAADSGSLERYLETFAHTCAVMQTRAALVRVAAECAEDLAADGVVYAEVRYAPEQHLEAGLSLEEVVEAVNEGFRAGERRAKEDGNRIRVGALLTAMRHAARALEIAELANRYRDAGVVGFDIAGAEAGFPPTRHLDAFEYLKRENNHFTIHAGEAFGLPSIWQALQWCGADRLGHGVRIIDDIQVREDGSVKLGRLASYVRDKRIPLELCPSSNLQTGAASSYADHPIGLLRRLHFRATVNTDNRLMSGTSMSREFEHLVDAFGYTLDDMAWFSVNAMKSAFIPFDERLAMINDVIKPGYAELKSEWLFKQTASTSSSAASEE

SEQ ID NO: 5850 - DNA, 1029 bp, Streptomyces avermitilis MA-4680
  CDS (1)..(1029): transl_table=11
atggagcacgtacgtgatgtctctgagttgccgaaggcccatctgcacctgcacttcaccggctcgatgcggccgagcaccctgctggagctggccgacaagtacggcgtccggctgcccgacgcgctgaccagcgcagagccgccgaagctgcgggccaccgacgagcggggctggttccgcttccagcggttgtacgacgcggcgcggtcgtgcctcagagagcccgaggacattcggcggctcgtgcgcgaggccgccgaggaggacatcaaggacggctccgggtggctggagatccaggtcgatccgacgtcgtacgcgccccgtctgggcggcctgatccccgcgatggaggtcatcctggacgcggtggactcggcggcgcgggagaccggtctgggcatgcgggtgctggtggcagcgaaccgcatgaagcatccactggacgcgcgcacgctggcccgcctcgccgtgcggtacgcggaccgcggcatcgtcggcttcgggctctccaacgacgagcggcggggcatggcgcgggacttcgaccgggccttcgcgatcgcgcgcgagggcggcctcctcgcggctccgcacggcggcgagctgaccggcccggcgtcggtcagggactgcctggacgacctggacgcctcgcggatcgggcacggagtgcgggcggccgaggacccgcggttgctgaagcggctcgcggaccggggcatcacctgcgaggtctgcccggcctccaacgtcgccctgggggtctacgagaagcccgaggacgtacccctgaggactttgttcgaagccggggtgccgatggcgctcggcgcggacgacccgctgctgttcggctcgcggctcgccgcccagtacgacatcgcgcgccgccaccacggcttcacggacgccgaactggccgagctggcccggcagtcggtgcggggttcggcggcgccggcggacgtcagccggaagctgctgtccgggatcgacgactggctgacgagcccggccgcctga

SEQ ID NO: 5851 - protein, 342 aa, Streptomyces avermitilis MA-4680
MEHVRDVSELPKAHLHLHFTGSMRPSTLLELADKYGVRLPDALTSAEPPKLRATDERGWFRFQRLYDAARSCLREPEDIRRLVREAAEEDIKDGSGWLEIQVDPTSYAPRLGGLIPAMEVILDAVDSAARETGLGMRVLVAANRMKHPLDARTLARLAVRYADRGIVGFGLSNDERRGMARDFDRAFAIAREGGLLAAPHGGELTGPASVRDCLDDLDASRIGHGVRAAEDPRLLKRLADRGITCEVCPASNVALGVYEKPEDVPLRTLFEAGVPMALGADDPLLFGSRLAAQYDIARRHHGFTDAELAELARQSVRGSAAPADVSRKLLSGIDDWLTSPAA

SEQ ID NO: 5852 - DNA, 1002 bp, Streptomyces avermitilis MA-4680
  CDS (1)..(1002): transl_table=11
atgcccctccccaaagctgaactgcacctccacatcgaaggcaccctggagcccgagctggccttcgcgctggccgcgcgcaacggtgtcccgctgccgtacgcgcacacggacgagctccgcaaggcgtatcagttcgacgaccttcagtcgttcctgaacctgtactacgagctcatggccgtgctgcggaccgagcaggacttcgaggacctcgcgaacgcgtatctcccgcgggccgccgcgcagggcgtgcggcacgcggagatcttcttcgacccgcaggcccacatcgcccggggggtggcgatggggaccgtcgtcgaggggctgtggcgcgccctcggcaggagtaccgagaaccacggggtctccacccagctgatcatgtgcttcctgcgggacgagtccgccgagtcggcgctcgagacgctggaggccgcgaagccctacctcgaccggatcatcggcatcggtctcgactccgccgaggtcgggcacccgccggccaagttccgcgaggtgtacgaggccgccgcggccctcggtctgcgccgcgtcgcgcacgccggggaggaggggccgcccgagtacatcaccgaggcgctggacgtgctgggtgtcgagcggatcgatcacggcctgcggtgcatggaggacgacgcgctcgtcgagcggctcgtccgggagcgggtgccgctgacgctgtgcccgctgtcgaacgtgcggctgcgcgccgtggacgtcctcgcggaacacccgctgcccgcgatgctggacgccgggctgctgtgcacggtcaactccgacgaccccgcgtacttcggcgggtacgtcgcggacaacttccacgctgtacgggacgcgctggggctggaccaggaacggatgcgggagttggcccgcaactcgttcgtcgcgtccttcctggagcacgacgaggagcggcgggcgcggtatctcgccgaggtcgaggcgtacgacttcccgggccggccgtag

SEQ ID NO: 5853 - protein, 333 aa, Streptomyces avermitilis MA-4680
MPLPKAELHLHIEGTLEPELAFALAARNGVPLPYAHTDELRKAYQFDDLQSFLNLYYELMAVLRTEQDFEDLANAYLPRAAAQGVRHAEIFFDPQAHIARGVAMGTVVEGLWRALGRSTENHGVSTQLIMCFLRDESAESALETLEAAKPYLDRIIGIGLDSAEVGHPPAKFREVYEAAAALGLRRVAHAGEEGPPEYITEALDVLGVERIDHGLRCMEDDALVERLVRERVPLTLCPLSNVRLRAVDVLAEHPLPAMLDAGLLCTVNSDDPAYFGGYVADNFHAVRDALGLDQERMRELARNSFVASFLEHDEERRARYLAEVEAYDFPGRP

SEQ ID NO: 5854 - DNA, 1050 bp, Caenorhabditis elegans
  CDS (1)..(1050)
atgcacgagcgtctcaacttcccgaaagtcgaacttcatttgcatcttgatggagccgtccgatttgatacactgatcgatctttctcaacaaaagggaataccactggctggagctaagactgtcgaggaactcaaaaaagttttagtgacccacgagccagcaaatctttcaaaggttctcgaagcgtttgaaatatttttgccggttattcgcggagacttggcagctattgaaagagttgcttatgaactttgtgaggatcagcataacaatggagttgtctattttgaaggaagatattcaccacatttgttgctttgtaatgattatccggaagtaaccgctgctcacgttgtcgccgctgttaagaaaggatttgatcgtggagagaaacagttcggaatcaaagctcgttcaattctttgctgtattcgtggactagacaaaaagttcccacaattgattctcgatttggcaactgacttgaaacaactcggagttgtcgcgattgatgttgctggatcagctcacggagccgatgaacagtacgagccagaagtcgttgctgctttccaagaagcacacaaacgaggaattcatagaactgttcatgctggagagtctggtggtccaaaggaagttattaaagctattgaagatatgtatgcagagagaattggacatggttatagagtaatgagagatgaagaaatgtatttggagcattttgtaaactcaaagaatgttcatttggaagcttgtccatattcatctgtaatgactggtgctgttccattggattggaagaatcatccaattgcacgatgggctaaagatgatgttaatttctctgtatctcgtgatgatccaacatgttttgataattcgatgctcagtgaattgacacttgttcataagcagatcggattggatgtacatcaactgtggaaagcgcaacttaacgctgcccgttcttgtttccttcctgaagacgaaaaagctgaacttgtaaaacgagttgaagctggagagccgccacgtccatga

SEQ ID NO: 5855 - protein, 349 aa, Caenorhabditis elegans
MHERLNFPKVELHLHLDGAVRFDTLIDLSQQKGIPLAGAKTVEELKKVLVTHEPANLSKVLEAFEIFLPVIRGDLAAIERVAYELCEDQHNNGVVYFEGRYSPHLLLCNDYPEVTAAHVVAAVKKGFDRGEKQFGIKARSILCCIRGLDKKFPQLILDLATDLKQLGVVAIDVAGSAHGADEQYEPEVVAAFQEAHKRGIHRTVHAGESGGPKEVIKAIEDMYAERIGHGYRVMRDEEMYLEHFVNSKNVHLEACPYSSVMTGAVPLDWKNHPIARWAKDDVNFSVSRDDPTCFDNSMLSELTLVHKQIGLDVHQLWKAQLNAARSCFLPEDEKAELVKRVEAGEPPRP

SEQ ID NO: 5856 - DNA, 1008 bp, Photorhabdus luminescens subsp. laumondii TTO1
  CDS (1)..(1008): transl_table=11
atgaattttaatcctgatttactgagaaaggtagaattacatacacatcttgattgtgggttgagttatcatttcgttaaaaaattcattcctgatattacccgtaagtcattttgtgaaaaatatattgccgctgaaaaatgtcatgatttaggtgattttttaaataagatcattccttcactggatttactacaaaaaagggacgtaatcgctgatgctgtagaagatcttttcatacaattaaaaagcgataatgtagtttatgctgaaattagatttgcacctttacttcatcttcgcttaggattaaatgaacgcgatattgtagaaattgttttggaagcaatgaaaaattattcaatcaaatatggtatagcagcaggtttaatattatgtacattgcggaatttttcagaagatcaaagtttgagaaccgcatatcttgtcaatgaatattctaattacggcgttgttgctctcgatcttgctgccgatgaggcaagatatccacttagtgcacatttgaatgcgtttagaatggtgttggaaaatggtggaaatattattgcgcatgcaggagaagcgaaaggggctgaaagtgtgcgcgagactattaataaattaaatatttctcgtataggtcatggtgttagaagtattgaagatcgagatgttattgaactccttatagagagaaatatacatttagaagtatgcccgacgtgtaatattatttgtgatatttatgatatttatgatatttatgatatctatgaaaatcatccagttaattttttaaaagaggttggtgtaaatattgggattaatacggatgcccggacagttgcaaatatcaccttatgtgaagaatatctgaggattaatcgatattttggttggcaatatagtgattttattgaaacaaatttgaatgcattacatgcttcattttccagtaatgaactgaaaagtcgattggaaaaggaaataatgagattatcgtag

SEQ ID NO: 5857 - protein, 335 aa, Photorhabdus luminescens subsp. laumondii TTO1
MNFNPDLLRKVELHTHLDCGLSYHFVKKFIPDITRKSFCEKYIAAEKCHDLGDFLNKIIPSLDLLQKRDVIADAVEDLFIQLKSDNVVYAEIRFAPLLHLRLGLNERDIVEIVLEAMKNYSIKYGIAAGLILCTLRNFSEDQSLRTAYLVNEYSNYGVVALDLAADEARYPLSAHLNAFRMVLENGGNIIAHAGEAKGAESVRETINKLNISRIGHGVRSIEDRDVIELLIERNIHLEVCPTCNIICDIYDIYDIYDIYENHPVNFLKEVGVNIGINTDARTVANITLCEEYLRINRYFGWQYSDFIETNLNALHASFSSNELKSRLEKEIMRLS

SEQ ID NO: 5858 - DNA, 1101 bp, Mycobacterium avium subsp. paratuberculosis K-10
  CDS (1)..(1101): transl_table=11
atgaccgcaccattggagctcgagcagatccgcaaggcgcccaaggctctgctgcacgatcacctcgacggcgggctgcgcccgtcgaccgtgctggacatcgccggacagaccggctacgacgggctgcccgccaccgacgtcgaggagctggcgacctggtttcgcacccgctcgcacagcggctcgctggagcgctacctggagccgttctcgcacaccgtggcggtgatgcagacccccgaggcgctgcaccgggtggcgtacgaatgcgtggaggacctggccgaggactcggtggtctacgccgagatccggttcgctcccgagctgcacatcaaccgcggcatgtccttcgacgagatcgtcgacgccgtgctggccgggttcgccgacggcgagaaggcttgtgcggcagcgggccggccgatcgtggtgcgactgttggtgactgccatgcggcacgcggcggtgtcccgggagatcgccgagctggcgatccggtggcgggacaagggagtggtcggtttcgacatcgccggcgccgaggccggcaacccgccgacccggcacctggaggcgttcgactacatgcgagatcacaacgcgcgcttcaccattcacgccggggaggcgttcggcctgccgtccatccacgaggccatcgcgttctgcggcgccgaccggctcggccacggggtgcggatcgtcgacgacatcgacgtgctggccgacggccccgacaagggcaaggtacggttgggcagactggcgaacatcttgcgggacaagcgaattccgttggaactgtgccccagctccaacgtgcagaccggggccgtcaaaagcatcgccgaccatccgttcgacctgctggcccgcacccggttccgggtgaccgtcaacaccgacaaccggctgatgagcgacacctacatgagccgcgagatgcaccggctggtccaggctttcggctacggatggagcgatctggaaaggttcaccatcaacgcgatgaagtccgccttcatcccgttcgacgagcggctggccattatcgacgaggtgatcaaaccccggtacgcggtgctgatcggctga

SEQ ID NO: 5859 - protein, 366 aa, Mycobacterium avium subsp. paratuberculosis K-10
MTAPLELEQIRKAPKALLHDHLDGGLRPSTVLDIAGQTGYDGLPATDVEELATWFRTRSHSGSLERYLEPFSHTVAVMQTPEALHRVAYECVEDLAEDSVVYAEIRFAPELHINRGMSFDEIVDAVLAGFADGEKACAAAGRPIVVRLLVTAMRHAAVSREIAELAIRWRDKGVVGFDIAGAEAGNPPTRHLEAFDYMRDHNARFTIHAGEAFGLPSIHEAIAFCGADRLGHGVRIVDDIDVLADGPDKGKVRLGRLANILRDKRIPLELCPSSNVQTGAVKSIADHPFDLLARTRFRVTVNTDNRLMSDTYMSREMHRLVQAFGYGWSDLERFTINAMKSAFIPFDERLAIIDEVIKPRYAVLIG

SEQ ID NO: 5860 - DNA, 1002 bp, Lactobacillus johnsonii NCC 533
  CDS (1)..(1002): transl_table=11
atgaaaaattttatcgatctccatctacatttagatggttctttgccataccctacggttaaaaaattaatgaaaattcacaacttttcaagtttaactgaagcacaactcaaagaaaagctatctgtctctaaaaattgcattgatttacaagagtatctaactaagttcgattttcctctactatttttgcaaactaagaaagatctagaaacagcgatttttgatcttttaaaaaatttgcgttctcaaggactagtctacacagaaattcgatttgctcctcagtttcacactcaaaaaaagctcactcaagaaggagcaattagatcctgcatttcaggactaaaaaaattttatcagtggcaagatgcgcaacaagacaattcctaccctctacatgcaaatttaattctttgtctcatgcgtttaccacatcgggaccaagaaaataatttaactgtcaagttggccgctaaatatagttcccaacatgttgttggacttgacttagctggtccagaaggtccgattcctaataaagcttttagttcattctttgaagacgcaaaagaaatgcatgttccatttacaattcacgcaggagaagcagctggccctgaatcaatgcaagaagcattagatttaggcactaaaagaattgggcatggaattcgctgtttagaaagtgagcaaatggttcaatatttagttgaccataatatcactcttgagtgttgtgccacttctaatctcaacaccaaaatttttaagaaaattgattcctatcctttaaaaactcttctttcaaaaaagataaaagcaacactaaattgcgacaatatgactgtttcaaatactaacttacctaaggaatttaaattacttgaatcaaaaaccggtcttactaaattagacgaacatcaattattattaaattctattaacgctgcttttgcttctgatcaagaaaagaatcgcttattgaccatatttagctaa

SEQ ID NO: 5861 - protein, 333 aa, Lactobacillus johnsonii NCC 533
MKNFIDLHLHLDGSLPYPTVKKLMKIHNFSSLTEAQLKEKLSVSKNCIDLQEYLTKFDFPLLFLQTKKDLETAIFDLLKNLRSQGLVYTEIRFAPQFHTQKKLTQEGAIRSCISGLKKFYQWQDAQQDNSYPLHANLILCLMRLPHRDQENNLTVKLAAKYSSQHVVGLDLAGPEGPIPNKAFSSFFEDAKEMHVPFTIHAGEAAGPESMQEALDLGTKRIGHGIRCLESEQMVQYLVDHNITLECCATSNLNTKIFKKIDSYPLKTLLSKKIKATLNCDNMTVSNTNLPKEFKLLESKTGLTKLDEHQLLLNSINAAFASDQEKNRLLTIFS

SEQ ID NO: 5862 - DNA, 1026 bp, Bdellovibrio bacteriovorus HD100
  CDS (1)..(1026): transl_table=11
atggaaaggctctattctcacaatattcgcgacatcctgaaagtggatctgcaccggcatttggactgctcagtgcgttggagcaccattctggaactggctccgcaagtcggtattccgctggcccccacctcccaggggcaaaaggatcagtttttgattacgggtcccatgaaagacctgggttcggtgctcaacaaattcatgaatgcacagaaagttctggccagcgaggaaatcctgacccgcgtcgcctatgaagcttgtgaggacgccttcaatgacggagtccgtcttcttgagttgcgttatgcgccgaccttcatcgccgacggccacaaatccctgactttcgaaaaaatccaccgctctttgctaaaaggcatcgaacaggcccgcaaacaattcccgatgctgatcggtctgatctgcatcgttcaaagaatcaagtcctttgaggttgcggaaaaagttgtggatttcgccattgaccataaagacagctttttggctctggatctggcggacaacgaggaaggctttgatccaaaggtctttgcaccgcttttccaaaaggccaaaaaagcgggtctgcgcatcactgtgcattccggcgaaactccgaacccagtttcagccaagtgggttcatgacagcattgagattttgggtgctgagcgcatcggtcatggcattcagatcatcaacgacccggcagtgctggagttggtgaaagaccgccgcattcctttggagatctgcccgatcagcaactatctgacccagtccttcccgacctacgaggaccaccccatccgcaaactgatgcaggccggagttctggtcaccatcaactcggatgaccccggtgtgtttgccacgacattgagtgatgactacgaagtccttcaccgcgtgcacggtttcagcaaagaggacttccacaagtgcaatcagatcgcgtttgatgcgagcttcattccagatattgaaaagaaccgcatcatgggggaattcttcggatga

SEQ ID NO: 5863 - protein, 341 aa, Bdellovibrio bacteriovorus HD100
MERLYSHNIRDILKVDLHRHLDCSVRWSTILELAPQVGIPLAPTSQGQKDQFLITGPMKDLGSVLNKFMNAQKVLASEEILTRVAYEACEDAFNDGVRLLELRYAPTFIADGHKSLTFEKIHRSLLKGIEQARKQFPMLIGLICIVQRIKSFEVAEKVVDFAIDHKDSFLALDLADNEEGFDPKVFAPLFQKAKKAGLRITVHSGETPNPVSAKWVHDSIEILGAERIGHGIQIINDPAVLELVKDRRIPLEICPISNYLTQSFPTYEDHPIRKLMQAGVLVTINSDDPGVFATTLSDDYEVLHRVHGFSKEDFHKCNQIAFDASFIPDIEKNRIMGEFFG

SEQ ID NO: 5864 - DNA, 1062 bp, Gibberella zeae PH-1
  CDS (1)..(1062)
atgtgcaaatctcgggttcacagcttcctccaggccctgccaaaggttgagcagcatctccacattgaaggcactctcgagccagagcttctcttcactctcgccgagaagaacggcatcgagcttccaaacgaccccgtatacgagtccgccgacaagctgcgggagcgctatggacggttcacatccctggatgatttcctccactactactacctcggaatgagcgtactcatcactgagaacgactttgagactctagcgtaccagtacttccagagagccgcaggcgagaatgtccggcatgctgagatcttctttgatccccaggcgcacattgcccggggtgtcagctacgacaccgtcgttgcaggtctcgtggctgccaagcaccgtgcccagaaggaattgggcatcaccgtcgagctgatcgtatgcatcctgcgccatctccctgtccccgaatcccacgctctcgttgacactctgcttgatcgcggccacttcaacgacggtactctgacaggcttcggaatggtgtccagtgaaaaggctttccctcccgagctattcaccgacgtgtatgcccgtgtcgcaaagaccggtactcacctcaccacccatgcgggcgaggaagcacccccctcgttcatcaccgcgtcactcgagcatctcaaggtctcgcgtattgaccacggcctcgcagcagcgcaggatccagagctcctcaagaagctggctgccaaccgtacccttttaactttctgcccctggtccaatgtggcactctgcaaccttcccgagttagccgacgcccctgtccgcgagttccttgacgccggggttctgttcagcgtcaacagcgatgaccctgcttactttggtgcttacgttcaggaggtgtactgccgcgtccaggacaccttcaacctctccgtcaaggactgggcgtggattgttcgtggtgccgtcgaggagagctggtgctccgaggagcgcaagaaggagattctaaaggagatggaacaggttctcgagaagtacaaggatttggatgcgtaa

SEQ ID NO: 5865 - protein, 353 aa, Gibberella zeae PH-1
MCKSRVHSFLQALPKVEQHLHIEGTLEPELLFTLAEKNGIELPNDPVYESADKLRERYGRFTSLDDFLHYYYLGMSVLITENDFETLAYQYFQRAAGENVRHAEIFFDPQAHIARGVSYDTVVAGLVAAKHRAQKELGITVELIVCILRHLPVPESHALVDTLLDRGHFNDGTLTGFGMVSSEKAFPPELFTDVYARVAKTGTHLTTHAGEEAPPSFITASLEHLKVSRIDHGLAAAQDPELLKKLAANRTLLTFCPWSNVALCNLPELADAPVREFLDAGVLFSVNSDDPAYFGAYVQEVYCRVQDTFNLSVKDWAWIVRGAVEESWCSEERKKEILKEMEQVLEKYKDLDA

SEQ ID NO: 5866 - DNA, 1095 bp, Aspergillus nidulans FGSC A4
  CDS (1)..(1095)
atgtgtcccccaaacactccttaccaatcccaatggcacgccttcctgcactccctcccaaagtgcgaacaccacgtacacctcgaaggctgtctcgagccgcctctgatcttttctatggcacgcaaaaataatgtatctctcccctctccgtcctcaaacccagcctatacctctgttgaaaccctcagcaagcggtatggacatttcagctcccttgacgacttcttgtctttctactttatagggatgacggtcctcaagacacagagcgactttgcagagcttgcgtggacgtacttcaagcgggcacacgcggagggcgttcaccataccgaggtgttttttgacccgcaggtgcatatggagcgggggttggagtacagagttattgttgatgggtatgtggacggttgtaagcgggcagagaaggagctgggaatctctacgaggttgattatgtgttttctgaaacatttgccgctggagtcggcacaacggctctacgatacagcgctaaacgagggtgatttggggctggatggcaggaatcccgtcattcatggccttggggcttcgagtagtgaagtcggaccgccgaaggatttgttcaggcctatttatctcggtgcaaaggagaagagcatcaacttgactgcgcatgcgggagaagagggagatgcttcttatattgctgcagcattggatatgggcgctacgcggattgaccatgggattcggcttggggaggacccagagctgatggagagagttgcgagggaggaggtgctgttgactgtttgtccggtatcgaacttgcaattgaagtgtgtcaagtctgtggctgaggtgccgattcgaaagttcctggacgctggagtgaggttcagcatcaacagcgacgacccagcgtactttggggcttatatcctggagtgctattgtgcggtgcaggaggcctttaacctgagcgtggcggactggaggcttattgcggaaaatggtgtcaaagggagttggattggggaggaaaggaagaacgagctgctgtggaggattgatgaatgtgtcaagaggtttgagggtgtcttatag

SEQ ID NO: 5867 - protein, 364 aa, Aspergillus nidulans FGSC A4
MCPPNTPYQSQWHAFLHSLPKCEHHVHLEGCLEPPLIFSMARKNNVSLPSPSSNPAYTSVETLSKRYGHFSSLDDFLSFYFIGMTVLKTQSDFAELAWTYFKRAHAEGVHHTEVFFDPQVHMERGLEYRVIVDGYVDGCKRAEKELGISTRLIMCFLKHLPLESAQRLYDTALNEGDLGLDGRNPVIHGLGASSSEVGPPKDLFRPIYLGAKEKSINLTAHAGEEGDASYIAAALDMGATRIDHGIRLGEDPELMERVAREEVLLTVCPVSNLQLKCVKSVAEVPIRKFLDAGVRFSINSDDPAYFGAYILECYCAVQEAFNLSVADWRLIAENGVKGSWIGEERKNELLWRIDECVKRFEGVL

SEQ ID NO: 5868 - DNA, 1044 bp, Candida glabrata CBS138
  CDS (1)..(1044)
atggtcccagaatcctttttgttagagttgccaaagtgtgaacaccacttgcatttggaaggtactttagagcctgatctattgttccccttggccaagagaaacaatattcagttgcctgatcacttccctcagaccccagaagaactagctgttcgttatactcaattcaaggacttgcaggacttcttggactactactacatcggtaccaatgtcttgttgaaagaggaagatttctttgaccttgcatgggcatatttcactaaggtctctaaacaaggtttggtgcatgctgaattgttctatgatccgcaatctcacaccactagaggtgtctctttggagacagtcaccagaggttttgaaagggcctgcaagaaggctcatgaagaattaggcattacatccaaactaatcatgtgtttgctaagacacttaccacctcaagattgtttgcaaacaatcgaggaagctgaacaattaatcaaatccggtgtcattcatggtctaggtttggactctgctgagaagcctttcccaccaagcttgtttgtcgaatgttatgagcgtgccgctaagattaaccctgaattgagactaacagcccatgccggtgaggaaggtactcatcaatttgtttctgatgctttggacctgttgaatgttactagaatcgatcacggtgtaaactccaagcaaagtgaggaattaatggctagactagcagaacaacaaactctgttgactgtttgtccattatccaacgttaaactacaagtggtacaatcagtgaaggagattccattgcaattgtttttggacaagaacatcgcattctccctaaactctgatgatccagcttactttggtggctacattcttgacaactactaccaagtcaacaaggacttcccagactgggacttcaaggtctgggaacgtattgccaagaacggtatcaacggttcctggtgtgaacaaaagagaaaggaggaactactggccaaggttgacgccgtggttgccaagtacaccaactaa

SEQ ID NO: 5869 - protein, 347 aa, Candida glabrata CBS138
MVPESFLLELPKCEHHLHLEGTLEPDLLFPLAKRNNIQLPDHFPQTPEELAVRYTQFKDLQDFLDYYYIGTNVLLKEEDFFDLAWAYFTKVSKQGLVHAELFYDPQSHTTRGVSLETVTRGFERACKKAHEELGITSKLIMCLLRHLPPQDCLQTIEEAEQLIKSGVIHGLGLDSAEKPFPPSLFVECYERAAKINPELRLTAHAGEEGTHQFVSDALDLLNVTRIDHGVNSKQSEELMARLAEQQTLLTVCPLSNVKLQVVQSVKEIPLQLFLDKNIAFSLNSDDPAYFGGYILDNYYQVNKDFPDWDFKVWERIAKNGINGSWCEQKRKEELLAKVDAVVAKYTN

SEQ ID NO: 5870 - DNA, 1068 bp, Kluyveromyces lactis NRRL Y-1140
  CDS (1)..(1068)
atggctaagtttgagtgtactgacgaggtgaccaatttcctgacagaattgcctaagtgcgaacaccatttgcatttggaaggtactctcgaaccagaattattgttccaattagttgaacgtaatggagtacagttacctggtacgtttcccaagaccgttaatgagttgcatgtgatttacaacaattttgctgatctccaggatttcttgaactattactacatcggttgcaacgttcttctcagtgaagacgatttctttgagttggcttggagttacttcaagagagtaagcactcaagggttgagacacgccgaggtgttttacgatccacaatctcacacgtccagaggcatttctttggaggttgttaccaaaggttttgaaagggcttgtgctaaggcccaggaagaatttaacattagtaccaagttaatcatgtgtttattgaggcactgtcctgtggaagaatgtatggatactgtgaaaagtgccaagagcttgattgaatcgggagtcattgacggtcttggtcttgattcgtcagaaagacctttccctccagaattgtttgttgaatgttatcaattggcgaagagttacaataaggagctgcaacttacagctcatgcaggtgaagaaggtgatccaagttttgttacaaacaccttggacttattggaaacaacaagaattgatcatggtgttagaagcattgaagatgctgaattaatcaagaggttggccgctcaaaaagttatgttaaccctttgtccattatccaatgttaagttacaagtggtaaaagatgtttcagagctaccattgcaggagttcttggataacgacgttcctttctccattaattctgatgatccagcttattttggagggtacatcttacagaactatctggaagtgtattccagatttggttggtctaaagcagtttgggctaagatcgccagacaaagtattgaaggctcatggtgtgatcctaagaggaaacaagaactactctctgaggtttcagaagttgtaaacaaatatgtaaacttaccttag

SEQ ID NO: 5871 - protein, 355 aa, Kluyveromyces lactis NRRL Y-1140
MAKFECTDEVTNFLTELPKCEHHLHLEGTLEPELLFQLVERNGVQLPGTFPKTVNELHVIYNNFADLQDFLNYYYIGCNVLLSEDDFFELAWSYFKRVSTQGLRHAEVFYDPQSHTSRGISLEVVTKGFERACAKAQEEFNISTKLIMCLLRHCPVEECMDTVKSAKSLIESGVIDGLGLDSSERPFPPELFVECYQLAKSYNKELQLTAHAGEEGDPSFVTNTLDLLETTRIDHGVRSIEDAELIKRLAAQKVMLTLCPLSNVKLQVVKDVSELPLQEFLDNDVPFSINSDDPAYFGGYILQNYLEVYSRFGWSKAVWAKIARQSIEGSWCDPKRKQELLSEVSEVVNKYVNLP

SEQ ID NO: 5872 - DNA, 1071 bp, Candida albicans SC5314
  CDS (1)..(1071): transl_table=12
atggctcaatacgaatgctcagaacatatggaaaatttccttagagaattacctaaatgtgaacatcacgttcatttggaaggtactttggaaccatcactattattcaaactagcaaaaagaaataatataactttgcctgagactttccctaaaacggttgaagaatgtaatgatagatacaacagatttgcagatttacaagatttcttagatcattattatattggaatgggtgttttgattactgaaaatgatttttacgatttagctatggattattttaccaaagctcattctgatggatgtcttcattcggaagttttcttcgatccacaaggtcatgttgaaagaaacatagatatcgatgttgttgttcaaggttttaatcgtgcatgtaaagatgctaataccaaatacggtaccaccaacaaattgatcatgtgtttattaagacatttacctgcggaaaatggattacaaactattcattcagcttctaaatattaccaagacggtattatccatggattaggattagattccagtgaaaaaccattcccaccaaatttattcactgaatgctatgcccatatcaaagataatttccctgaagttgggttaactgctcatgctggtgaagaaggagatcacacttttgtcagtgatgcattgaatttgttgaaagtttctagaattgatcatggtgtcaattctcaccaaagtgaagagttaatgcagagattagctgaacaaaaaactttactttcattgtgtccattatcaaatgttaaattgcaagtggttaaagatgttaaggagttaccaattgacaagtttttccaaatgaacgtaccattttcaatcaactctgatgatccagcctattttggtggatatattttagacaattataaagctgttcacacaagatttggattcaccaaagaccaatggaaaataattgctttaaatggtattaaaggttcatggtgtgacgatcaaagaaaaaatgaattaattagcttggttgaagaagtttataaaaaatacaatattgaaggttgctga

SEQ ID NO: 5873 - protein, 356 aa, Candida albicans SC5314
MAQYECSEHMENFLRELPKCEHHVHLEGTLEPSLLFKLAKRNNITLPETFPKTVEECNDRYNRFADLQDFLDHYYIGMGVLITENDFYDLAMDYFTKAHSDGCLHSEVFFDPQGHVERNIDIDVVVQGFNRACKDANTKYGTTNKLIMCLLRHLPAENGLQTIHSASKYYQDGIIHGLGLDSSEKPFPPNLFTECYAHIKDNFPEVGLTAHAGEEGDHTFVSDALNLLKVSRIDHGVNSHQSEELMQRLAEQKTLLSLCPLSNVKLQVVKDVKELPIDKFFQMNVPFSINSDDPAYFGGYILDNYKAVHTRFGFTKDQWKIIALNGIKGSWCDDQRKNELISLVEEVYKKYNIEGC

SEQ ID NO: 5874 - DNA, 1065 bp, Aspergillus fumigatus Af293
  CDS (1)..(1065)
atgtgtcaatcaccactgcacgatttcctgcatggcctgcccaagtgcgagcatcatgtccacctggaaggctgcgtcacacctgaattgatcttccaactggcagagaaaaacaatatacaactaccaaacccagcaacccacccagcctacgcctcagtcgaagcgctcagagcccgctacgctgagtttacatcgctaaacgacttcctcgacttctacttccatggcatgtccgtgctgcaccaccagtccgatttcgaggaactcgcctgggcgtatttccagaaagcacacgcggacggcgtgcaccacgccgaggtcttcttcgacccgcaggtccaccaggcccgcggcattgactacgagaccgtcgtctccggcttcacggctgggtgcaagcgagcagaaagggaactaggtctgtccacccggttgattctgtgctttgtgcgtcatttgccagtcgattccgccaccaagctgtatgagttggcgcttgccagcaaccatttcgagagtagggttgtgcatggtctcggctggtcatcgtccgaggttgggccgccgaaggacatgttccgcgagatttacgcttccgcgtcgggtaagggtatccgcttaacggcgcatgcgggcgaggagggcgatccgacgtatatcagtaccgcgttggagcttggggcccggcgtatcgaccatgggattcggctggtcgaggatccggagctgatggagagggtggctcgggaaggaattatgctgaccgtctgtccgttgtcgaacgtgcgacttcggtgcgttcagtcggtggaacaagtgcccattcggaagttcctggacgccggggtcaagttctcgatcaatagcgatgatccggcttactttggaggctatattctcgataactactgcgctgttcaggaggcgtttcagctttccatcctggagtggagggtcattgctgagaatagtgtcaatgagagttggattgatgaagcgaggaaagctgagctactcaagcgcattgatgaccatgtacagaaacatactgtcgttgcttga

SEQ ID NO: 5875 - protein, 354 aa, Aspergillus fumigatus Af293
MCQSPLHDFLHGLPKCEHHVHLEGCVTPELIFQLAEKNNIQLPNPATHPAYASVEALRARYAEFTSLNDFLDFYFHGMSVLHHQSDFEELAWAYFQKAHADGVHHAEVFFDPQVHQARGIDYETVVSGFTAGCKRAERELGLSTRLILCFVRHLPVDSATKLYELALASNHFESRVVHGLGWSSSEVGPPKDMFREIYASASGKGIRLTAHAGEEGDPTYISTALELGARRIDHGIRLVEDPELMERVAREGIMLTVCPLSNVRLRCVQSVEQVPIRKFLDAGVKFSINSDDPAYFGGYILDNYCAVQEAFQLSILEWRVIAENSVNESWIDEARKAELLKRIDDHVQKHTVVA

SEQ ID NO: 5876 - DNA, 1329 bp, Leptospira interrogans serovar Copenhageni str. Fiocruz L1-130
  CDS (1)..(1329): transl_table=11
gtggctttaacttttcaagagattttagatagaattcggatcatcgatcgagacgtgaccgaactgaaccgtttgaagtctagacttcctgcggaccgaccttattcttcttctttacaaatttcttttgataaacaaatcaacgaactcttaaacgaaagagtcggtctcatggaacttgaggtcctagatccgccttcttggatcttaggagttcctacaactgggatttctcaggaaactccggttccactcaaaggcctttttccgtccggagatctttctaaggaaaaaccggacgatcaagacgtaattaatttcctacgagaacttcctaaaacggaaattcatctccaccttgaggcgtgtgttaataaggacacgatgaaaagattgatggctaaaaatggaattaatgtaacggatgaagagtttgaagctaaattcaattttaaggatttaaacagtttcattcaggtattcttttttattcagtcgcttgttaaagaaccttctgatttctcattttttatagaaagtctcgcggaatacatgagagcgaataacatcctttatacggaagttttttttgcaccttctaagtttattcagaacggtctcgattttgaagaaatgatcgattttttagtcaatcgaattcgagaagaaaaagaaaacgacggtatcgtcatacgtctattagttgatgtttccagatcctttgggccagaaaatgcgatgaaaaatctagatcgggttctaaaactgagacatccggaagtgattggaattggtcttggaggcgcggaacttatgggacccgccagggattatcaaggggtttttcaaaaagcgagggaagcggggctcagagtggtggcgcattccggagaagacgatggtccttgggcaatttgggaggcggtggaacttctcaaagcggagaggattggacacggaacttctgcgatccaagatcccgagttagtaaaatatcttagggagaatcatattccaatcgagatttgtgtgacgtctaacgtatttactggtaaatacgttagaaaagaacaaaaccatccagttcgttattattacgatcagggtcttcctcttagtatcaatacggacgatcctgagatattcaatgtaaatcttacatacgaatattataaactttggagattcttagatttctctttggatgagatcgtagatttgatccgtcaaggtgtttttgcttccttccatcccaataaagaatctctctgggccgaaatggaaaaaaacattcatctcgtaaaaacaagatacggtctaaaaagataa

SEQ ID NO: 5877 - protein, 442 aa, Leptospira interrogans serovar Copenhageni str. Fiocruz L1-130
MALTFQEILDRIRIIDRDVTELNRLKSRLPADRPYSSSLQISFDKQINELLNERVGLMELEVLDPPSWILGVPTTGISQETPVPLKGLFPSGDLSKEKPDDQDVINFLRELPKTEIHLHLEACVNKDTMKRLMAKNGINVTDEEFEAKFNFKDLNSFIQVFFFIQSLVKEPSDFSFFIESLAEYMRANNILYTEVFFAPSKFIQNGLDFEEMIDFLVNRIREEKENDGIVIRLLVDVSRSFGPENAMKNLDRVLKLRHPEVIGIGLGGAELMGPARDYQGVFQKAREAGLRVVAHSGEDDGPWAIWEAVELLKAERIGHGTSAIQDPELVKYLRENHIPIEICVTSNVFTGKYVRKEQNHPVRYYYDQGLPLSINTDDPEIFNVNLTYEYYKLWRFLDFSLDEIVDLIRQGVFASFHPNKESLWAEMEKNIHLVKTRYGLKR

SEQ ID NO: 5878 - DNA, 999 bp, Acinetobacter sp. ADP1
  CDS (1)..(999): transl_table=11
atgaatcaatcagaacttattcgtgccttgcctaaagctgaattgcacgtacatatcgaaggtacatttgagcctgaacttatgtttgagattgcgcagcgtaatcatatcgatattccttataaatctgtagaggaaattaaaaaagcttataattttcataatttacagtcatttttagatatctattatgcaggggctaatgttctgatcaatgagcaggatttttatgatcttgcgtgggcttactttaaaaaatgtgccgaagatcgtgtggtacatacagagatgttctttgatccacaaacccataccgagcgcggtgtttcatttgaaattgtgcttaatggtttgaagcgagcatgtaaagatgcaaaggagcatttaggcattagctcacatttgatcatgtgctttttgcgtcatttaagcgaagaagatgcatttaaaacgcttgaacaggcgttaccttacaaagctgatattattgcagttggacttgattccagcgaagttggtcatccgccttcaaagtttgctcgggtatttgaaaaagcacgtgaagaaggctttttggttgtggcacacgctggtgaagaagggccgcctgaatacgtatgggaagcattagatttactgaaggtgaatcgtattgatcatggggtacgttcagaagaagatcctgctttaatgcaaagattgattcaggaaaaaatgcctctaaccgtgtgtcctttaagcaatttgaaactttgtgttgtaaacgatatgaaagaacacaatattcgtcgtttgcttaatcagggggtacatgtgacagtaaattctgatgatccttcttactttgggggatatatgaacgataactttgtggcaattcaagctgctttagatttatcaaatgaagagttgaaaaaactggccattaattcttttgaagcttcatttattgatgaagaagagaaacaaaactggattgaagaaatcaaccagatttaa

SEQ ID NO: 5879 - protein, 332 aa, Acinetobacter sp. ADP1
MNQSELIRALPKAELHVHIEGTFEPELMFEIAQRNHIDIPYKSVEEIKKAYNFHNLQSFLDIYYAGANVLINEQDFYDLAWAYFKKCAEDRVVHTEMFFDPQTHTERGVSFEIVLNGLKRACKDAKEHLGISSHLIMCFLRHLSEEDAFKTLEQALPYKADIIAVGLDSSEVGHPPSKFARVFEKAREEGFLVVAHAGEEGPPEYVWEALDLLKVNRIDHGVRSEEDPALMQRLIQEKMPLTVCPLSNLKLCVVNDMKEHNIRRLLNQGVHVTVNSDDPSYFGGYMNDNFVAIQAALDLSNEELKKLAINSFEASFIDEEEKQNWIEEINQI

SEQ ID NO: 5880 - DNA, 1005 bp, Mesoplasma florum L1
  CDS (1)..(1005): transl_table=4
atgaaaaatattgaaaatatgccaaaaattgaattacatgtacatatagaagggactttagaagctaaaacagttttagctaaaattgaacaaaagcaattaaattttgatcctatgtacttagaaaaattatcaaagccacccgtttttactagtttgtctgattttttaaaagactactataaaaatatggctgtcttagagaatcaacaagacttttttgatttagcttgaaatcatttgaaaaatgcaaaaaaacaaaatgttatctatactgagattttctttgatccacaacctcacattaaacgaggcattcatttagatgatgttatagatggtttgtatcaagctttagaaaaagcagaaaaagaacttgatttaaaagcaaagttaattatgtgttttttgaaagatgaaagcgttgatgaagctttaaatattttagatatgtcaaaacttgctattgaaaataaaaaaattgttggaataggttttgattctaatgaaattgaaaactgagcagccatttttaaaccagttgttgataaagcaaggaatctaggcttaaatgtaacaacacatgctgctgaaaatagttttgaacaagacccaattgaggttataaatattttaaaccctgatagaattgatcatggattatatattcataaaagtttagaagcattaaaattagttaaagaaaaagaaatacatttatcattatgtcctttgcctaatttttactcaaaagcttgacttgacccaaaaacatttcctattcaagttttcttagacaatgatatttctttttcaataaattctgatgaccctgcatattttggacctacaactttgaatgataactatcttttagttaatcaaaataataaaatatctgaagaaaaatgaaaaaatctattattaaaaacattaaattcaacattcactaatactgaagaaaaagaatatttaaaagaaaaaatagaaaactacttcaaataa

SEQ ID NO: 5881 - protein, 334 aa, Mesoplasma florum L1
MKNIENMPKIELHVHIEGTLEAKTVLAKIEQKQLNFDPMYLEKLSKPPVFTSLSDFLKDYYKNMAVLENQQDFFDLAWNHLKNAKKQNVIYTEIFFDPQPHIKRGIHLDDVIDGLYQALEKAEKELDLKAKLIMCFLKDESVDEALNILDMSKLAIENKKIVGIGFDSNEIENWAAIFKPVVDKARNLGLNVTTHAAENSFEQDPIEVINILNPDRIDHGLYIHKSLEALKLVKEKEIHLSLCPLPNFYSKAWLDPKTFPIQVFLDNDISFSINSDDPAYFGPTTLNDNYLLVNQNNKISEEKWKNLLLKTLNSTFTNTEEKEYLKEKIENYFK

SEQ ID NO: 5882 - DNA, 1026 bp, Propionibacterium acnes KPA171202
  CDS (1)..(1026): transl_table=11
atggattcggccgaagcgatgaacctccccaaagtcgtgctgcacgatcatctggatggtgggctacgtccggcgacagttttagaactcgccgcgcagcgaggccggcccgtgcctgcacaaacccccgaggacctcgcaacctggttttttgagtcagccgattccggctctttggcccgttatctcgacgccttcaccgaaactatcgccctcatgcaggatgctgattccctccggcgcgtcgcacgggaattcgtggtagatatggccactgacggcgttatttacgccgaagctcgatgggctccccaacagcatttaacaggtgggttgtccgctgcggaggccgtcgaggcagtccaggttggcttagtagacgggatggaatctgcatcgctgtcgggcacgacgatcatcgcccgccaaattctgtgcctcatgaggcatctcgacgtccccgaggacgtggtagatcttgccgtcaaccatgctccgggggtcgttggcgtcgacgttgctgggccagaggatggttttccgctagctccgtttaccaacgcgctcacgcgcgtccaagcggccggaatccacctcaccgttcatgccggcgaagctgctgggccggagtctattctcgacgcccttaatcatggggcagagcgtctcggacatggggtgcggatcattgaagaccgcgacgaatccgggtggggtccgacagcccagcaggtgttgtcgaatcaggtgccgttggaggtctgcccaacgtcgaacacccagaccggcatctgccgcaaggttgccgagcatccgctatcgacgctgtggtctaccggatttaacatcacggtgagctgtgataaccgcctcatgagccgtacgacgacgtctcgagagatatcgctggtctcccaggcactctgctggaaccgcgacgacgccctggctgcccagcgcaatgcgctgcaagcagccttctgttcccaggacgataagcagtctctcgttcccctgctggtctga

SEQ ID NO: 5883 - protein, 341 aa, Propionibacterium acnes KPA171202
MDSAEAMNLPKVVLHDHLDGGLRPATVLELAAQRGRPVPAQTPEDLATWFFESADSGSLARYLDAFTETIALMQDADSLRRVAREFVVDMATDGVIYAEARWAPQQHLTGGLSAAEAVEAVQVGLVDGMESASLSGTTIIARQILCLMRHLDVPEDVVDLAVNHAPGVVGVDVAGPEDGFPLAPFTNALTRVQAAGIHLTVHAGEAAGPESILDALNHGAERLGHGVRIIEDRDESGWGPTAQQVLSNQVPLEVCPTSNTQTGICRKVAEHPLSTLWSTGFNITVSCDNRLMSRTTTSREISLVSQALCWNRDDALAAQRNALQAAFCSQDDKQSLVPLLV

SEQ ID NO: 5884 - DNA, 1125 bp, Leifsonia xyli subsp. xyli str. CTCB07
  CDS (1)..(1125): transl_table=11
ttgagaggtatgagcgagaacgagacgtacgcgctgcccgacggcaccgatatccaggccctgccgaaagtgtcgctgcacgaccacctggacggcggcctgcgcccggtgaccgttctggagctggccgacgcagccggcgtcgacctcccggccggcgatgccaattccctgggccgctggttcgtcgagaagtcgaattcgggctccctggtcgagtacctcaagacgttcgatctgacgaccgccgtcatgcagacccgcgagagcctcatccgcgtcgcgcgcgagttcgtgcaggatctcggggcagacggggtcgtttacggcgaggtgcgctgggcgccggagcagcatctgggccgcgggctcagcctcgacgagacggtcgaagccgtgcaggagggaattgagcagggcatccaggatgtgtacgcgaccggcgcgcgcatccgcgtcggccagctggtgtccgcgatgcgccacaccgatcgcagtctcgagatcgctgacctggcggtgcggcaccgcgatgacggcgtggtcgggttcgacatcgccggtcccgaggcgggcttcccgccctcgaaccaccgcgccgcgttcgactacctggccgcccagttcttcccgacctcggtgcatgcgggcgaggcggacggtctcggcagcatccggagcgcgctgttcgatggccgcgcgctgcggctcgggcacggcgtgcgccttgccgaggatatcacgatcgaacgccaggacgacgagaacacctatgtgacgctcgggacgctctcgcagtgggtcaaggatcgcgagatcgccctggagacgagcccgagctcgaacctgcagaccggggccatcgcggcctggggcgacggcatcctggaccacccgttcgacttgctctaccagctcggctttcgggtgctggtgaacaccgacaatcggctgatgagcggcacgacgctgacccgcgagctgagcgtcctggccgatgccttcgcctatgaccgcaccgacctcgaaatcttccagctgaacgcggcggcggcggccttcctcccccttgaggagcgtgaggagctggccgggatcgtcacagcgggtttcgagggttcctga

SEQ ID NO: 5885 - protein, 374 aa, Leifsonia xyli subsp. xyli str. CTCB07
MRGMSENETYALPDGTDIQALPKVSLHDHLDGGLRPVTVLELADAAGVDLPAGDANSLGRWFVEKSNSGSLVEYLKTFDLTTAVMQTRESLIRVAREFVQDLGADGVVYGEVRWAPEQHLGRGLSLDETVEAVQEGIEQGIQDVYATGARIRVGQLVSAMRHTDRSLEIADLAVRHRDDGVVGFDIAGPEAGFPPSNHRAAFDYLAAQFFPTSVHAGEADGLGSIRSALFDGRALRLGHGVRLAEDITIERQDDENTYVTLGTLSQWVKDREIALETSPSSNLQTGAIAAWGDGILDHPFDLLYQLGFRVLVNTDNRLMSGTTLTRELSVLADAFAYDRTDLEIFQLNAAAAAFLPLEEREELAGIVTAGFEGS

SEQ ID NO: 5886 - DNA, 1005 bp, Yersinia pseudotuberculosis IP 32953
  CDS (1)..(1005): transl_table=11
atgattgatcctcgccttcctctgaccgacattcatcgccaccttgatggcaatatccgagcgcaaaccattttggacttgggtcaacaatttaatttgaatttaccggccaatgagcttgatacgctgagaccacacgtacaaatcaccaagaccgagccagatttggtcagtttcctacaaaagttggattggggcgttgcagttctcggatcactggatgcctgtcgccgagtggcttatgagaatgtcgaagacgcagcacatgctggtttacattatgctgaactccgcttttccccgttttatatggcgatgaaacaccaactaccgattaccggtgttgtcgaagcggttattgatggcattgcgtctggttgtcgcgattttaatattgatatccgtttgatcggcattctcagccgcaccttcggtgaacaagcgtgtttgcaagaacttgatagcttgctggcccatcgcgaagggataaccgcgctggatttagccggtgacgagttaggttttcccggttctctgttccgccgccattttaatcgagcgagggatgcgggcctacgtattaccgtccatgcgggtgaagcggccggtccggagagtatctggcaagctattcgtgaactgggtgctgaacgtatcggccacggcgttaaagccgtcgaagaccgtaagttgatggactatctggcagaacacaaaataggtatcgaatcctgcctgacctccaatatccaaaccagcactgtagtctctctggcaacccatccattagcaaccttcctacgccatggcatcgtggcatcaattaacactgatgacccggcggttcagggcattgaaattgccaatgaataccttgtcgctgcaccggctgcggggctaacgccgcatgaaatccgccaagcacaagcgaatggcctggaaatggcatttatcagcgaacaagaaaagcaggcactgcgggataaagtattccctatttcctga

SEQ ID NO: 5887 - protein, 334 aa, Yersinia pseudotuberculosis IP 32953
MIDPRLPLTDIHRHLDGNIRAQTILDLGQQFNLNLPANELDTLRPHVQITKTEPDLVSFLQKLDWGVAVLGSLDACRRVAYENVEDAAHAGLHYAELRFSPFYMAMKHQLPITGVVEAVIDGIASGCRDFNIDIRLIGILSRTFGEQACLQELDSLLAHREGITALDLAGDELGFPGSLFRRHFNRARDAGLRITVHAGEAAGPESIWQAIRELGAERIGHGVKAVEDRKLMDYLAEHKIGIESCLTSNIQTSTVVSLATHPLATFLRHGIVASINTDDPAVQGIEIANEYLVAAPAAGLTPHEIRQAQANGLEMAFISEQEKQALRDKVFPIS

SEQ ID NO: 5888 - DNA, 981 bp, Legionella pneumophila subsp. pneumophila str. Philadelphia 1
  CDS (1)..(981): transl_table=11
atgaatttaaaaaaggcagaattacacgtacatctagaaggaactatttccccagaactcgccaaaaaactagcaaaaagaaatcaattaactctccctaatggtcttattgcaccagatgaaaaaagttacttatcaaaagactttctcgattttcttaaggtttatgatacgctggcatccgtaattaaaaatccacaagattattatgatattacctttgattatcttaaatcgaacgctcaagaacatgctatctacattgaaatgatgtactctccggaccatgccgagcaatccagtggaattccttcaaaagagcatttagcagcaattcaacaggctattgatgatgctaaaagtcaatttgatattgttggacgtattattatcactgcagtacgccattttggcgtagaagcatgcgaacgcgtcgcaaaacaggcttctatagataaatttccttgtgtaacaggatttggattaggaggagatgaagcaaaatttcctcctcaattgtttaccaaagcttatcagatagcagcagactccggattggaatgcaccgttcatgccggcgaatttgattcagccaaaggaatggaagaagcaatgaaaactctgccaattaaaagaattgggcatggggttcgagtgattgactcacctgacattatggccatggttaaagaccagggtattgcattggaagtgtgcccaaccagtaacatatttttgggattattcaaagacatgaatagccacccttttccaaagctttatgaagcagggattaaagtcagtattaattccgatgatcctccttttatgagcactacacttgctcaagaatacaaaagagttcaaaaagcttatggctataacaatgacacaatgaataatattacgcgtatggctattgaagctgcttttgttgatgaaaaaacccggaaagaacttttaacaaaattagaacaataa

SEQ ID NO: 5889 - protein, 326 aa, Legionella pneumophila subsp. pneumophila str. Philadelphia 1
MNLKKAELHVHLEGTISPELAKKLAKRNQLTLPNGLIAPDEKSYLSKDFLDFLKVYDTLASVIKNPQDYYDITFDYLKSNAQEHAIYIEMMYSPDHAEQSSGIPSKEHLAAIQQAIDDAKSQFDIVGRIIITAVRHFGVEACERVAKQASIDKFPCVTGFGLGGDEAKFPPQLFTKAYQIAADSGLECTVHAGEFDSAKGMEEAMKTLPIKRIGHGVRVIDSPDIMAMVKDQGIALEVCPTSNIFLGLFKDMNSHPFPKLYEAGIKVSINSDDPPFMSTTLAQEYKRVQKAYGYNNDTMNNITRMAIEAAFVDEKTRKELLTKLEQ

SEQ ID NO: 5890 - DNA, 1026 bp, Burkholderia mallei ATCC 23344
  CDS (1)..(1026): transl_table=11
atgaccccgacattcaaagacaagatcgcccgtgcgccgaaggccgagctgcacatccacatcgaaggctcgctcgagcccgagctgatcttcgagctcgcgcagcgcaacggcgtgaagctcgcgtacgaatggatcgacgcgctgcgcgccgcgtacgcgttcaccgatctgcagtcgttcctcgacatctattacgccggcgcgagcgtgctcctcaccgagcaggatttctacgacatgacggccgcatacgtcgagcgcgcgctcgccgatcacgtcgtgcacgcggagatcttcttcgatccgcagacgcacaccgagcgcggcgtgccgatcgagacggtcgtcgccggcatcgatcgcgcgctcgccgacgcggaaaaacgcggcttctcgagcaagctgatcctctgcttcctgcgccacctgtccgaggaaagcgcgctcgcgacgttcgacgcggcgctgccgctcttcgatcgctatgcgcggcgcctgatcggcgtggggctcgattcgtccgagcgcggcaatccgccgtcgaagttcgcgcgcgtgttcgcgaaggcgcgagagcagggcctgaagctcgtcgcgcacgcgggcgaggaaggcccgcccgaatacgtgacgcaggcgctcgacgtgctgaagatcgaccgcgtcgatcacggcgtgcgcagcgccgaggacgcggcgctcgtcgcgcgccttgccggcgagaagatcgcgctcaccgtctgcccgctgtcgaacctgaagctctgcgtgttcgacgacctgacgaagcacacgctgaagacgctgctcgatcgcggcgtcgcggtgacgatcaattccgacgacccggcgtatttcggcggctacgtcaacgaaaactacttcgcgaccgtcgacgcgctgcagcttggcgaggccgacgtctacacggtgatcaggaacggcttcgaagcgtcgttcgtgagcgccgacgaacgcgcggcgctgatcgcgaagctcgacgcgcactggcacgcggcctga

SEQ ID NO: 5891 - protein, 341 aa, Burkholderia mallei ATCC 23344
MTPTFKDKIARAPKAELHIHIEGSLEPELIFELAQRNGVKLAYEWIDALRAAYAFTDLQSFLDIYYAGASVLLTEQDFYDMTAAYVERALADHVVHAEIFFDPQTHTERGVPIETVVAGIDRALADAEKRGFSSKLILCFLRHLSEESALATFDAALPLFDRYARRLIGVGLDSSERGNPPSKFARVFAKAREQGLKLVAHAGEEGPPEYVTQALDVLKIDRVDHGVRSAEDAALVARLAGEKIALTVCPLSNLKLCVFDDLTKHTLKTLLDRGVAVTINSDDPAYFGGYVNENYFATVDALQLGEADVYTVIRNGFEASFVSADERAALIAKLDAHWHAA

SEQ ID NO: 5892 - DNA, 1026 bp, Burkholderia pseudomallei K96243
  CDS (1)..(1026): transl_table=11
atgaccccgacattcaaagacaagatcgcccgtgcgccgaaggccgagctgcacatccacatcgaaggctcgctcgagcccgagctgatcttcgagctcgcgcagcgcaacggcgtgaagctcgcgtacgaatcgatcgacgcgctgcgcgccgcgtacgcgttcaccgatctgcagtcgttcctcgacatctattacgccggcgcgagcgtgctcctcaccgagcaggatttctacgacatgacggccgcatacgtcgagcgcgcgctcgccgatcacgtcgtgcacgcggagatcttcttcgatccgcagacgcacaccgagcgcggcgtgccgatcgagacggtcgtcgccggcatcgatcgcgcgctcgccgacgcggaaaaacgcggcttctcgagcaagctgatcctctgcttcctgcgccacctgtccgaggaaagcgcgctcgcgacgttcgacgcggcgctgccgctcttcgatcgctatgcgcggcgcctgatcggcgtggggctcgattcgtccgagcgcggcaatccgccgtcgaagttcgcgcgcgtgttcgcgaaggcgcgagagcggggcctgaagctcgtcgcgcacgcgggcgaggaaggcccgcccgaatacgtgacgcaggcgctcgacgtgctgaagatcgaccgcgtcgatcacggcgtgcgcagcgccgaggacgcggcgctcgtcgcgcgccttgccggcgagaagatcgcgctcaccgtctgcccgctgtcgaacctgaagctctgcgtgttcgacgacctgacgaagcacacgctgaagacgctgctcgatcgcggcgtcgcggtgacgatcaattccgacgacccggcgtatttcggcggctacgtcaacgaaaactacttcgcgaccgtcgacgcgctgcagcttggcgaggccgacgtctacacggtgatcaggaacggcttcgaagcgtcgttcgtgagcgccgacgaacgcgcggcgctgatcgcgaagctcgacgcgcactggcacgcggcctga

SEQ ID NO: 5893 - protein, 341 aa, Burkholderia pseudomallei K96243
MTPTFKDKIARAPKAELHIHIEGSLEPELIFELAQRNGVKLAYESIDALRAAYAFTDLQSFLDIYYAGASVLLTEQDFYDMTAAYVERALADHVVHAEIFFDPQTHTERGVPIETVVAGIDRALADAEKRGFSSKLILCFLRHLSEESALATFDAALPLFDRYARRLIGVGLDSSERGNPPSKFARVFAKARERGLKLVAHAGEEGPPEYVTQALDVLKIDRVDHGVRSAEDAALVARLAGEKIALTVCPLSNLKLCVFDDLTKHTLKTLLDRGVAVTINSDDPAYFGGYVNENYFATVDALQLGEADVYTVIRNGFEASFVSADERAALIAKLDAHWHAA

SEQ ID NO: 5894 - DNA, 1098 bp, Nocardia farcinica IFM 10152
  CDS (1)..(1098): transl_table=11
atgacaggaccgacgccgctgaccctcgcctcgatccgccgagcacccaaggccctgctgcacgaccacctcgacggtggcctgcggcccgcgacggtgctcgaactggccgccgagtgcggctacgacgaattacccgccgacaccgaggccgagctggcggcctggttccgggaggccgccgacagcggctcgctggaacggtatctggagaccttcgcccacaccgtggccgtcatgcagacccccgaggggctgcgccgggtcgcccgggaatgcgtcctcgatctcgccgccgacggtgtggtctacgccgaggtgcgttacgcgcccgagcagcacctggaacgcgggctcagcctcgacgaggtggtcgagcacaccctggcgggcttccgcgagggggagcgggcggccgcggccgccggccagccgatcgtggtgacctgtctgctcaccgccatgcggcacgccgcgcgttcccgcgagatcgccgaactcgcggtgcgctggcgcgatcgcggggtcggcggtttcgacatcgccggggccgaggccggatacccgcccacccggcacctggacgcgttcgagtacatgcgcgccaacagcgcgcacttcaccatccacgccggtgaggccttcgggctgccgtcgatccacgaggcactggccttctgcggctgcgaccgcctcgggcacggcgtgcggatcaccgacgacatccgggtcggtgattcggtggccgacgccgaactcggcctggtcgcccggtacgtgcgcgacaagcggatcccgctcgagctgtgcccgtcgtccaacgtgcagaccggcgcggtgccctcgctggacaagcatccgttcgacctgctggcccggctgcgcttccgcgtcaccgtcaacaccgacaaccggctgatgagcgacaccagcatgagtcaggagatgcacaagctggtgcagaccttcggctacggctggagcgacctggaacggttcacgatcaacgccatgaagtcggcgttcatcccgttcccggaacggttgcgcatcatcgacgacatcatcaagcccggctacgccgtgctgatcggctga

SEQ ID NO: 5895 - protein, 365 aa, Nocardia farcinica IFM 10152
MTGPTPLTLASIRRAPKALLHDHLDGGLRPATVLELAAECGYDELPADTEAELAAWFREAADSGSLERYLETFAHTVAVMQTPEGLRRVARECVLDLAADGVVYAEVRYAPEQHLERGLSLDEVVEHTLAGFREGERAAAAAGQPIVVTCLLTAMRHAARSREIAELAVRWRDRGVGGFDIAGAEAGYPPTRHLDAFEYMRANSAHFTIHAGEAFGLPSIHEALAFCGCDRLGHGVRITDDIRVGDSVADAELGLVARYVRDKRIPLELCPSSNVQTGAVPSLDKHPFDLLARLRFRVTVNTDNRLMSDTSMSQEMHKLVQTFGYGWSDLERFTINAMKSAFIPFPERLRIIDDIIKPGYAVLIG

SEQ ID NO: 5896 - DNA, 981 bp, Legionella pneumophila str. Lens
  CDS (1)..(981): transl_table=11
atgaatttaaaaaaggcagaattgcacgtacatctagaaggaactatttccccggaactcgccaaaaaactagcaaaaagaaatcaattaactctccctaatggtcttattgcaccagatgaaaaaagttacttatcaagagactttctcgattttcttaaggtttatgatacgctggcatccgtaattaaaaatccacaagattattatgatattacctttgattatcttaaatcaaacgctcaagaacatgctatctacattgaaatgatgtactctccggaccatgccgagcaatccagtggaattccttcaaaagagcatttagcagcaattcaacaagcaattgatgatgctaaaagtcaatttgatattgttggacgtattattattactgctgtacgccattttggcgtagaagcatgcgaacgcgttgcaaagcaagcttcaatagataagtttccttgtgtaacgggatttggactaggtggggatgaggcaaaatttcctcctcaattatttaccaaagcttatcagatagcagcagactccggattggaatgcaccgttcatgccggcgaatttgattcagccaaaggaatggaagaagcaatgaaaactctgccaattaaaagaattggacatggagttcgagtgattgactcacctgacattatggccatggttaaagaccagggtattgcattagaagtgtgcccaaccagtaacatatttttgggattattcaaagacatgaatagccacccttttccaaagctttatgaagcagggattaaagtcagtattaattccgatgatcctccttttatgagtactacacttgctcaagagtacaaaagagttcaaaaagcttatggttataacaatgacacaatgaataatattacgcgtatggctattgaagctgcttttgttgatgaaaaaacccggaaggaacttttaacaaaattagaacaataa

SEQ ID NO: 5897 - protein, 326 aa, Legionella pneumophila str. Lens
MNLKKAELHVHLEGTISPELAKKLAKRNQLTLPNGLIAPDEKSYLSRDFLDFLKVYDTLASVIKNPQDYYDITFDYLKSNAQEHAIYIEMMYSPDHAEQSSGIPSKEHLAAIQQAIDDAKSQFDIVGRIIITAVRHFGVEACERVAKQASIDKFPCVTGFGLGGDEAKFPPQLFTKAYQIAADSGLECTVHAGEFDSAKGMEEAMKTLPIKRIGHGVRVIDSPDIMAMVKDQGIALEVCPTSNIFLGLFKDMNSHPFPKLYEAGIKVSINSDDPPFMSTTLAQEYKRVQKAYGYNNDTMNNITRMAIEAAFVDEKTRKELLTKLEQ

SEQ ID NO: 5898 - DNA, 1053 bp, Photobacterium profundum SS9
  CDS (1)..(1053): transl_table=11
ttgttctttgcgtatacttacacaccagtttttatcgggacaccaataattatgattacgaagcagcttccccttaccgaccttcaccgccatttggatggtaatatccgcatccaaaccattttagacttaggtcagaaatttggaatggccttgcctgcaacggatctagaagggttacgccctcatgtgcagatcgttgaaacagagccaagcttagtggctttcctctctaagctcgattggggtgtagctgttcttggtgaccttgaagcatgtcgacgtgttgcctacgaaaacgttgaagatacgctgaatgcacagattgattacgccgaactacgtttttcgccgtattacatggcaatgaaacataacctaccgatcgctggtgtcgtggaagccgtcgttgatggtgtcgcagcaggctgtcgagatttcggtattcaagctaacttaatcggtatccttagccgtacttttggtcaagaggcttgtcagcaagagcttgacggattgcttacgcaaaaagataagttagtggcaattgatctggctggggatgaattaggccaacctggcgatcgctttatcaaacatttcactcaagtacgtgatgccggcctacgtgttacggttcatgcaggtgaagcagcaggacctgaaagtatgtggcaagctattcaagagcttggtgcagtgcgtatcggtcacggagttaaagcggtacatgatccaaaactgatggattatctagcagcgaacaaaattggtattgaatcttgcctaacatcaaacattcaaacgagtaccgttgaatcatttgcctctcaccctgttaagcagtttttagaacatggtattttggcgtgtctaaataccgatgatcctgcggtcgaaggtatcgagcttcctcacgaatatgaagtagcagcaccgaaagtgggtctgactcaagagcaaattcgtcaggcgcaaattaacggcctagaactggctttcttatctgatgctgaaaaacaacagctaaaagataaagccgctcaacgctaa

SEQ ID NO: 5899 - protein, 350 aa, Photobacterium profundum SS9
MFFAYTYTPVFIGTPIIMITKQLPLTDLHRHLDGNIRIQTILDLGQKFGMALPATDLEGLRPHVQIVETEPSLVAFLSKLDWGVAVLGDLEACRRVAYENVEDTLNAQIDYAELRFSPYYMAMKHNLPIAGVVEAVVDGVAAGCRDFGIQANLIGILSRTFGQEACQQELDGLLTQKDKLVAIDLAGDELGQPGDRFIKHFTQVRDAGLRVTVHAGEAAGPESMWQAIQELGAVRIGHGVKAVHDPKLMDYLAANKIGIESCLTSNIQTSTVESFASHPVKQFLEHGILACLNTDDPAVEGIELPHEYEVAAPKVGLTQEQIRQAQINGLELAFLSDAEKQQLKDKAAQR

SEQ ID NO: 5900 - DNA, 1035 bp, Photobacterium profundum SS9
  CDS (1)..(1035): transl_table=11
atgaaaggaaataatatggatggattcataaagacgttacctaaggttgagctgcatttacacatcgaagggaccctagagccagaactcatgtttgcgttagctaagcgcaatagcattgatttaccctatgagactgttgctcaagtacaagcagcctatgattttgatgatctacaatcttttctcgatctttattatcagggggctcaagttttgttacacgagcaagatttttatgatttgacgtgggcttacttaaaaaggtgtaaggcggatcacgttattcatactgagatcttttttgacccccaaacgcacactgcccgtggtgttccttttgatgccgttattaacggaataactcgtgcgttagaggatggccaagaacaacttaatatcagtagccacacaattatgtgttttctacgtcatttaagcgaagaagatgcgattgaaacccttcaacaagcattgccatataaagataaaatcattggtgttggtttagattcatctgagcaaggtcatccacctgaaaaattcaagcgtgtttttgaacaagcgaaagaacttggctttttaacggttgcacacgcgggtgaagaaggacccgcaagcaatatttgggatgggttagacatgttgcacatttctcgtgtcgatcacggagtgaggtgcattgaagatgaatctttagtacagcatttagtgaaaaagcaaataccactcactgtctgtccgttatcgaatgtaaagctcaaagtgtttgatcatatgcgtgatcacaatattgtcgagttattgcgcaaaggattatgtgtgacggtaaattctgatgatcctgcttattttggtggttatatggtagataacttccttgctgtcgcgcatgctcttaacccatcaaaacgtgaactggctaagtttaccgagaatgcaatcgaagcaagctttctcacattggaagagaaaactgcctataaagaaatgctgcaacattatattgataagcaattaaagcccattttatga

SEQ ID NO: 5901 - protein, 344 aa, Photobacterium profundum SS9
MKGNNMDGFIKTLPKVELHLHIEGTLEPELMFALAKRNSIDLPYETVAQVQAAYDFDDLQSFLDLYYQGAQVLLHEQDFYDLTWAYLKRCKADHVIHTEIFFDPQTHTARGVPFDAVINGITRALEDGQEQLNISSHTIMCFLRHLSEEDAIETLQQALPYKDKIIGVGLDSSEQGHPPEKFKRVFEQAKELGFLTVAHAGEEGPASNIWDGLDMLHISRVDHGVRCIEDESLVQHLVKKQIPLTVCPLSNVKLKVFDHMRDHNIVELLRKGLCVTVNSDDPAYFGGYMVDNFLAVAHALNPSKRELAKFTENAIEASFLTLEEKTAYKEMLQHYIDKQLKPIL

SEQ ID NO: 5902 - DNA, 1005 bp, Photobacterium profundum SS9
  CDS (1)..(1005): transl_table=11
atgaaagattttattaatggattaccaaaagttgagcttcaccttcatatagaaggatcgctagagcctgaacttatgtttgagttagctaaacgtaatcaggtacagattcccttccagtcaccacaagaagttcacgatgcgtaccaattccataatcttcaatcgtttcttgatatttattatcagggggcaaacgtactgattcatgaacaagatttctttgatcttacctgggcgtatttactacgctgtaaagaagataacgttgtacataccgaaattttctttgatcctcaaactcataccgatcgtggtatcgcttttgatacagtagtaagcggaatacaccgtgcccttgaagaggctaacaaagtgctgggtatttcgagcaagttaattatgtgtttcctgcgccatctagatgaaacggctgcgttggcaacgcttgaacaagctataccgcacaaagataagatcatcggtgtgggtttggattcttcagagcaaggtcacccaccagagaaattcgctaaggtgttccaaaaggcattgaatgaaggatttttaactgtggcacatgctggtgaagaggggccagcacagaatattcatgatgcactcagtatgctgggtattacgcgtattgatcatggtattcgttgtgtggaagatgaagtattagtcgcacagttgattgaagaccgtacaccactaacggtatgcccattatcgaacattaagttaaaggtattcgagaaaatggaacagcacaatattgtcgatttattacgtaaaggcatgtgtgtaacaattaactctgatgaccccgcgtattttggtggctatatgaatgcgaattttcatgcggtggcgaatgcacactcaatgacaaagaatgaggttgcacagtttacattaaatggtatcgaagctagtttcattttggatgatgaaaaagcccgtttagtcgtgctggtggatacgtacatgatgaaagggtaa

SEQ ID NO: 5903 - protein, 334 aa, Photobacterium profundum SS9
MKDFINGLPKVELHLHIEGSLEPELMFELAKRNQVQIPFQSPQEVHDAYQFHNLQSFLDIYYQGANVLIHEQDFFDLTWAYLLRCKEDNVVHTEIFFDPQTHTDRGIAFDTVVSGIHRALEEANKVLGISSKLIMCFLRHLDETAALATLEQAIPHKDKIIGVGLDSSEQGHPPEKFAKVFQKALNEGFLTVAHAGEEGPAQNIHDALSMLGITRIDHGIRCVEDEVLVAQLIEDRTPLTVCPLSNIKLKVFEKMEQHNIVDLLRKGMCVTINSDDPAYFGGYMNANFHAVANAHSMTKNEVAQFTLNGIEASFILDDEKARLVVLVDTYMMKG

SEQ ID NO: 5904 - DNA, 1011 bp, Streptococcus thermophilus LMG 18311
  CDS (1)..(1011): transl_table=11
atgactgctattgactttcataagttggctaaaatagaattgcactgccatttggacggttctttatctttaagtaccattcgtcacctagctgagttggcacagattgatttgcctgaggatgatgaggagctcaaacagcacgtgacagcgccggttacctgtgagagtctcctagaatatttagagtcctttgattatattcgccccttactacaaactaatgaggctttaactattgctgcttatgatgttgccaaacaagctgctttagaaaatgttatctatattgaagtgagattcgcaccagaattgtcgatggataagggattgactgtcactgagacaattgatgctgtttgtcaaggattacgtcaagctcaagaagaatttggtattattgctaaggcactggtttgtggcatgcgccaatcagatcaatcattaacagctcgtattcttgatgaagctaatcaagtcagagatagtgactttgttggttttgatttcgctggagatgagcttaattatggacctgcagctattaaacctcttattgaacaagtcaaaagttacaaccgtcctatgacctttcatgctggtgagtgtggctgtccggcttttcttgctgagtcaattgctatgggaattaagcgtaatggtcatgcgactatcctggctcaagaaccagaacttttggatgaatttgtcaaaaacggtgtgacgggtgagttatgcttaacaagtaatctacagaccaaggcagcagtgactgttaatgattttccataccttaaaatgaaagcagcaggtgctaatattacgattaatacagacaatcgtacggtttctgatacaaatttaactaaggaatacgaactctatcacaagtattttgatagcacagttcaagatttctatgcacataataagacagcgattgaagcttcctttgctagtgatgaagagaaagaagaactccttgcacgattagctaaagcctattcataa

SEQ ID NO: 5905 - protein, 336 aa, Streptococcus thermophilus LMG 18311
MTAIDFHKLAKIELHCHLDGSLSLSTIRHLAELAQIDLPEDDEELKQHVTAPVTCESLLEYLESFDYIRPLLQTNEALTIAAYDVAKQAALENVIYIEVRFAPELSMDKGLTVTETIDAVCQGLRQAQEEFGIIAKALVCGMRQSDQSLTARILDEANQVRDSDFVGFDFAGDELNYGPAAIKPLIEQVKSYNRPMTFHAGECGCPAFLAESIAMGIKRNGHATILAQEPELLDEFVKNGVTGELCLTSNLQTKAAVTVNDFPYLKMKAAGANITINTDNRTVSDTNLTKEYELYHKYFDSTVQDFYAHNKTAIEASFASDEEKEELLARLAKAYS

SEQ ID NO: 5906 - DNA, 888 bp, Streptococcus thermophilus CNRZ1066
  CDS (1)..(888): transl_table=11
atgaggagctcaaacagcaccgtgacagcgccggttacctgtgagagtctcctagaatatttagagtcctttgattatattcgccccttactacaaactaatgaggctttaactattgctgcttatgatgttgccaaacaagctgctttagaaaatgttatctatattgaagtgagattcgcaccagaattgtcgatggataagggattgactgtcactgagacaattgatgctgtttgtcaaggattacgtcaagctcaagaagaatttggtattattgctaaggcactggtttgtggcatgcgccaatcagatcaatcattaacagctcgtattcttgatgaagctaatcaagtcagagatagtgactttgttggttttgatttcgctggagatgagcttaattatggacctgcagctattaaacctcttattgaacaagtcaaaagttacaaccgtcctatgacctttcatgctggtgagtgtggctgtccggcttttcttgctgagtcaattgctatgggaattaagcgtaatggtcatgcgactatcctggctcaagaaccagaacttttggatgaatttgtcaaaaacggtgtgacgggtgagttatgcttaacaagtaatctacagaccaaggcagcagtgactgttaatgattttccataccttaaaatgaaagcagcaggtgctaacattacgattaatacagacaatcgtacggtttctgatacaaatttaactaaggaatacgaactctatcacaagtattttgatagcacagttcaagatttctatgcacataataagacagcgattgaagcttcctttgctagtgatgaagagaaagaagaactccttgcacgattagctaaagcctattcataa

SEQ ID NO: 5907 - protein, 295 aa, Streptococcus thermophilus CNRZ1066
MRSSNSTVTAPVTCESLLEYLESFDYIRPLLQTNEALTIAAYDVAKQAALENVIYIEVRFAPELSMDKGLTVTETIDAVCQGLRQAQEEFGIIAKALVCGMRQSDQSLTARILDEANQVRDSDFVGFDFAGDELNYGPAAIKPLIEQVKSYNRPMTFHAGECGCPAFLAESIAMGIKRNGHATILAQEPELLDEFVKNGVTGELCLTSNLQTKAAVTVNDFPYLKMKAAGANITINTDNRTVSDTNLTKEYELYHKYFDSTVQDFYAHNKTAIEASFASDEEKEELLARLAKAYS

SEQ ID NO: 5908 - DNA, 1233 bp, Idiomarina loihiensis L2TR
  CDS (1)..(1233): transl_table=11
atgcaatattcccccgaatttatcaaagccattcctaaagctgacttacacttgcaccttgatggcagccttcgtgccagcagcttaattgatatggctaagcgcgctgatatcgaacttccgagctataccgaagaaggcctgtttgatctggtgtttaaatcgcattacaacaatttgggtgaatacctaaatgggtttcagtatacctgtgccgctttgcgtgatttggaaaacctggaacaagcttcttatgaattagccgtcgataatcaaaacgaaggggtgaattacattgaggtacgctttgctcctcagctactcatggacccgggtaaaggggttacttttgacaccataatgcacgtagtaaacgacggccttttgcgcgcaaagaaagagtacaacaaccgcgcagacgttaaaaacggcgataagccaccatttgactacggcattatcaactgcgccatgcggatgtttggtaaaaaagggttctccccttattacacacaaatgttccagttaatgcgcgattttgaacctatgcaggttattaaaacggctgcaatggatttggttcgcgccagcgttcgtatgcgtgacgaagaaggtatgccaattgtcggactggatattgccggtcaggaaattggctacccggcaggtgagttcaaagaagtatacgaatacgcacacgaaaactttctgctgaaaaccgtgcacgcaggagaagcttacggtgctgagagcatttttgaagccttgaccaagtgccatgccgaccgcttaggtcatggttattcgttattctctcctgaaatgactcaggatccgtctattgaagaccctaaagcttatggtgaaagcctggcctcttatattgctgaccgtcgtattgccgttgaagtttgcctgaccagtaacctgcaaactaacccggatattggcgacattaaaaaccacaatttccagcatatgctggataaccgcttagctaccattatttgtaccgataaccgtttggtttctcgtaccacggtcagcaacgaatatcagttagctgtggataattttgatatttctctgaagcgcctgaaggacattgtcgcctacggctttaagaagaacttcttcccgggtcgctatgtagaaaagcgtgattacgctaagcaaaacctggagtatttcgacaaggtggttaagcagtttgggctaagcgacgccagctaa

SEQ ID NO: 5909 - protein, 410 aa, Idiomarina loihiensis L2TR
MQYSPEFIKAIPKADLHLHLDGSLRASSLIDMAKRADIELPSYTEEGLFDLVFKSHYNNLGEYLNGFQYTCAALRDLENLEQASYELAVDNQNEGVNYIEVRFAPQLLMDPGKGVTFDTIMHVVNDGLLRAKKEYNNRADVKNGDKPPFDYGIINCAMRMFGKKGFSPYYTQMFQLMRDFEPMQVIKTAAMDLVRASVRMRDEEGMPIVGLDIAGQEIGYPAGEFKEVYEYAHENFLLKTVHAGEAYGAESIFEALTKCHADRLGHGYSLFSPEMTQDPSIEDPKAYGESLASYIADRRIAVEVCLTSNLQTNPDIGDIKNHNFQHMLDNRLATIICTDNRLVSRTTVSNEYQLAVDNFDISLKRLKDIVAYGFKKNFFPGRYVEKRDYAKQNLEYFDKVVKQFGLSDAS

SEQ ID NO: 5910 - DNA, 1014 bp, Zymomonas mobilis subsp. mobilis ZM4
  CDS (1)..(1014): transl_table=11
atgaataatcttataaaatttatagcggctttgccgaaggcagagttgcatctgcatattgagggaagccttgaacctgaattgatgtttgaattggccaagcggaataaggttaccttaccttttcctgatgttgaatccgtaaaagctgcatataatttcaacaacttacaagagtttcttgatatttattatcaaggaaccaatgttttaaaaactgaagaagatttctgtgatttggcgatggcctatttctatcgggcgcatcgcgacaatgtccttcatagtgaaatcttttttgatccccagagccatacagagcgcggtattcctttcaatgttgtcatgaatggtttgctggcagctattaccaaagccgaagccgaattaggcatgtcggttcagctgattatgtgtttcctgcggcatctggatgaggaatcggcctttgcaactttgcggatggctgaacccttcctcgacaagattgccggcgtcggtcttgattcttctgaagtcggtaatccgccttcaaaattccgccatgtttttgccgaagcccgtcaaaaaggattgaagctggttgcacatgccggtgaagaaggcgatgcttcctatatcaaagaggctttggacatcctgaacattgatcggatcgatcatggcaaccggattaccgaagatcgtttgctgatgacgcgggcagcgcgttcggccattgccttgacgatttgtccgctttcaaatcagaaattacaggttgtgcctgaccttcgcaatcatccgttaccctatctgttgcgccaagggcttcgagttactataaactcggacgatcccgcctattttgggggatatgtaaatgataattacaaagccttggctgaatattgcggcctaaaagcggctgatttcgttgaaattgccagaaacagttttctcggatcatttcttccggatcaaaccgtcgcagcttatctggatgttctggataaatatgtagattctttttaa

SEQ ID NO: 5911 - protein, 337 aa, Zymomonas mobilis subsp. mobilis ZM4
MNNLIKFIAALPKAELHLHIEGSLEPELMFELAKRNKVTLPFPDVESVKAAYNFNNLQEFLDIYYQGTNVLKTEEDFCDLAMAYFYRAHRDNVLHSEIFFDPQSHTERGIPFNVVMNGLLAAITKAEAELGMSVQLIMCFLRHLDEESAFATLRMAEPFLDKIAGVGLDSSEVGNPPSKFRHVFAEARQKGLKLVAHAGEEGDASYIKEALDILNIDRIDHGNRITEDRLLMTRAARSAIALTICPLSNQKLQVVPDLRNHPLPYLLRQGLRVTINSDDPAYFGGYVNDNYKALAEYCGLKAADFVEIARNSFLGSFLPDQTVAAYLDVLDKYVDSF

SEQ ID NO: 5912 - DNA, 1002 bp, Silicibacter pomeroyi DSS-3
  CDS (1)..(1002): transl_table=11
gtgagcgaagaacatcccccggtcgccgacctgcccaaggtcgaattgcacctgcaccacgaaggcgccgcaccgcccgccctgatccggcaactggcgcatgagaaaaagatcgacctgcgcggcatcttcaagccggacgggtcctatgatttccgcgatttcgcccatttcctcagcgtttacgaggctgcctcttcggtgttgaccggccccgaggaattccgccgcctgacctgggcgatcctggaacaaagcgccgagaacggggtggtctattccgagaccttcctgagccccgacttctgcggcggcggcgatgtcgccgcctggcgcgattacctggccgccatccgtgacgcggcggacgaggccgaggcgaaactgggcattaccctgcgcggcgtcgtcacctgtgtgcgccatttcggccccgatcaggccaggcgcgccgcccgctgcgccgccgagacggcgggcgactggatcgtggggttcggcatgggcggcaacgagggcgtgggcaaacagggcgactattcctggtccttcgactgcgcccgcgaggcggggctgaggctcaccacccatgcgggcgagtttggcgggccggacagcgtgcgcgacgcggtgcgtgtgctgggggtcgagcgcatcggccatggcgtgcgcgccatcgaggacgccgatctggtgcatgaactggccgaccggggcatcacgctcgaggtctgccccggctcgaacgtggtgctgggcctttatccctcgtttgcagcgcatcccatcgcgcggctgcgtgacgcgggtgtccgcgtcaccatatccaccgacgatccgccgtttttccataccacgatgcggcgggagtatgagatgctggccaaagcctttggctggggggcagaggatttcgccgacctgaacgccaccgcgctcagagcggcattctgtgatgaagacacccggagccgggtcgctaagagactggagacatcatga

SEQ ID NO: 5913 - protein, 333 aa, Silicibacter pomeroyi DSS-3
MSEEHPPVADLPKVELHLHHEGAAPPALIRQLAHEKKIDLRGIFKPDGSYDFRDFAHFLSVYEAASSVLTGPEEFRRLTWAILEQSAENGVVYSETFLSPDFCGGGDVAAWRDYLAAIRDAADEAEAKLGITLRGVVTCVRHFGPDQARRAARCAAETAGDWIVGFGMGGNEGVGKQGDYSWSFDCAREAGLRLTTHAGEFGGPDSVRDAVRVLGVERIGHGVRAIEDADLVHELADRGITLEVCPGSNVVLGLYPSFAAHPIARLRDAGVRVTISTDDPPFFHTTMRREYEMLAKAFGWGAEDFADLNATALRAAFCDEDTRSRVAKRLETS

SEQ ID NO: 5914 - DNA, 945 bp, Francisella tularensis subsp. tularensis SCHU S4
  CDS (1)..(945): transl_table=11
atgctcaatgaaaaacttctattaagacctaaagctgaacttcatctacatatagaaggtactatagaaccagaaatgatgtttcaattagctcaaagaaataatgttaagcttaaatataattcaataaaagagattagcaaagcttatgtatttaataatcttcaaaattttttagatttatattatcaaggtgtgtctgtattaattacagaacaagatttttatgacataacttattcttatttggtgaaagcacataaagataatgtaacacatacagaaatatttatagatcctcaagtacactctgagcgaggaatatctttatcagtaatatttaatggagttactcaagctatcagagaagctgaaaaaaactttggtataaaaactagtgtaatagtgtgttttttacttcatttatcacaagatcatgctctaagatattttgagaaattaatggattttcatgacaggtttataggtataggtttagatggctatgagttcggaaatccaccttctaagtttaaaaaactcttcgaaatagccaaaaaagaaggattatatttaactacacatgtttcagaacctgttgagtatatttgggaagctatagatgttctaggtgttaatagaatagatcatggtaactcgattctagaagatgaaacattaattcaaagagttataaaagataacatacctttgacaatgtgtccattatctgataagttcttaaagactaatagcaatttatctagccgtcctgtaggtatacttcttgagaaaggtgttaaagtcactattaactcagatgatccagcatatttttcaggttatattaatgaaaactataggcaaatatctcaagctctaaaattatcagaagatcaaattattaagcttattaacaatagtttagagtctaagtttatttga

SEQ ID NO: 5915 - protein, 314 aa, Francisella tularensis subsp. tularensis SCHU S4
MLNEKLLLRPKAELHLHIEGTIEPEMMFQLAQRNNVKLKYNSIKEISKAYVFNNLQNFLDLYYQGVSVLITEQDFYDITYSYLVKAHKDNVTHTEIFIDPQVHSERGISLSVIFNGVTQAIREAEKNFGIKTSVIVCFLLHLSQDHALRYFEKLMDFHDRFIGIGLDGYEFGNPPSKFKKLFEIAKKEGLYLTTHVSEPVEYIWEAIDVLGVNRIDHGNSILEDETLIQRVIKDNIPLTMCPLSDKFLKTNSNLSSRPVGILLEKGVKVTINSDDPAYFSGYINENYRQISQALKLSEDQIIKLINNSLESKFI

SEQ ID NO: 5916 - DNA, 1002 bp, Lactobacillus acidophilus NCFM
  CDS (1)..(1002): transl_table=11
atgagaaaatttatcgatttacaccttcacctagatggttcagttcctgtttctactgtaaagaaactaatgcaagaacatgatttgcctattccaacggatcaagaactgcgccaagaattgtcagttgattctagttgcaaaagtttagatcaatttttagaaaaatttgctttacctaataaattaatgcagacaagacatgaccttgaaacgatcgtttatgatcttctaactgaattaaaagcacaaggtttggtttacgcagaaattcgttttgctccgcagcttcatactaaagaaggtttaacgcaagaagatgcaattaaggcagccatcagtggtttaaataaatttttgtatgatcaaaaagaaaaaaatgactcacctgaattgcacgcaggcttaattttatgcttaatgcgattttctaataatcaaaaagaaaatatagaaacagttgagcttgccaaaaaattcttaaataaaggcgtagttgggcttgatctagctggtgctgaaggtcctattcctaatattaagtacaaatcattctttaatcaggctcaacaacttggtgtaccttatacaatccatgctggtgaagcagatggtcctgattcgatccgtcaagcactagcaatgggcgctaaaagaattggtcatggtattcgctgcacagaagatacccaattgactcaggaattaatcgatcaacaaatcgtactagaatgttgtgccacttccaatatgaatactaaggcatttgatcaaatcgattcctatccgattaagaaattgcttcataaagggatgaaagttacacttaattccgatgatatgacggtttctgatactaatttactccatgaatacaaagtgcttgaaaaacgaactgatttaacacctgaagaagaaacaacgctttatctcaacgcagttgacgctgcatttacgacacctgatgaaaaaattagattacgagcatttttgcagaaataa

SEQ ID NO: 5917 - protein, 333 aa, Lactobacillus acidophilus NCFM
MRKFIDLHLHLDGSVPVSTVKKLMQEHDLPIPTDQELRQELSVDSSCKSLDQFLEKFALPNKLMQTRHDLETIVYDLLTELKAQGLVYAEIRFAPQLHTKEGLTQEDAIKAAISGLNKFLYDQKEKNDSPELHAGLILCLMRFSNNQKENIETVELAKKFLNKGVVGLDLAGAEGPIPNIKYKSFFNQAQQLGVPYTIHAGEADGPDSIRQALAMGAKRIGHGIRCTEDTQLTQELIDQQIVLECCATSNMNTKAFDQIDSYPIKKLLHKGMKVTLNSDDMTVSDTNLLHEYKVLEKRTDLTPEEETTLYLNAVDAAFTTPDEKIRLRAFLQK

SEQ ID NO: 5918 - DNA, 693 bp, Vibrio fischeri ES114
  CDS (1)..(693): transl_table=11
atggcaatgaaacacaatttacctattgctggtgttgttgaagcggttgttgatggtgtagaagcgggttgtcgtgattttggtattaaggctaacttaatcggtattatgagtcgtacctttggtcaagatgcttgccaacaagaattagatggcctactgactcaaaaacacaaattagttgcaatcgatcttgctggtgatgagttaggtcaaccaggtgacctttttgtaaatcactttaaacaagtgaaagacgcagatcttcgtgtcactgtacacgcaggtgaagcagcgggtgctgcaagtatgtggcaagcaattaatgagcttggcgcagtacgaattggtcatggtgttaaagccattgaagatccaaaactgatggaatacctagctaaaaacaacattggtattgagtcttgcttaacctctaacattcaaacaagtacggttgcttcatttgaatctcacccaattaagacattcttagattacggtgttaaagtttgtcttaatacagatgacccagcggttgaaggcattgaattacctcatgagtacgaagtcgctgcaccaaaagttggcttaacgccagagcaacttaaacaaattcaaattaatggtttagatctggctttcttatctgattcagagaaacaagctctacgtgagatggcagctaagcgctaa

SEQ ID NO: 5919 - protein, 230 aa, Vibrio fischeri ES114
MAMKHNLPIAGVVEAVVDGVEAGCRDFGIKANLIGIMSRTFGQDACQQELDGLLTQKHKLVAIDLAGDELGQPGDLFVNHFKQVKDADLRVTVHAGEAAGAASMWQAINELGAVRIGHGVKAIEDPKLMEYLAKNNIGIESCLTSNIQTSTVASFESHPIKTFLDYGVKVCLNTDDPAVEGIELPHEYEVAAPKVGLTPEQLKQIQINGLDLAFLSDSEKQALREMAAKR

SEQ ID NO: 5920 - DNA, 1014 bp, Salmonella enterica subsp. enterica serovar Choleraesuis str
  CDS (1)..(1014): transl_table=11
ttgagtgcgcccatgattgatattacgcttcctttgactgacatccaccgccaccttgatggcaacattcgcgcccaaacaattctggatcttggtcggcagttcaacatcgcccttcccgccaaaacgctggaagcgctgattccgcatgtccaagtcacctcaaccgaacccgatttagtgagctttctcactaagctcgattggggggtaaaagtcctggcatcgcttgacgcctgccgccgtgtggcctttgaaaatattgaagatgccgcacgtaacggcctgcattacgtcgagcttcgcttttcgcccggctatatggcgatggcgcatcagttaccgatcgcaggcgtggttgaagccgttatcgacggcgtacgcgacggctgtaacacgtttggcgtcgaggcgcgactcattggcattatgagccgtaccttcggcgaggcggcatgtttacaggagcttgatgcgctgctggcgcacagagagaaaatcaccgcgctggatttagccggtgatgagctgggctttcccggcagtctgtttttgtcacactttaatcgggcgcgcgatgcgggctggcatattaccgttcacgcaggcgaagccgcagggccggaaagtatctggcaggcgattcgcgaactgggggccgaacgtatcggacatggcgtaaaagctgtcgaagatcgcgcgttaatggattttcttgcacagcagcgtatcggtattgaatcctgtctgacctcgaatattcagaccagtaccgtcgcatcgctggcagatcatccgctcaaaaccttccttgagcatggcgttctcgccagtcttaatacggacgatccggctgttcagggcgtagatattatccatgaatatcacgtcgccgcgccagcggcaggattgagccgcgaacagattcgccaggcgcagattaacggtctggaaatcgcctttctgagcgatggcgaaaaacgtgcgctgcgcgaaaaagtggccgcggcgtaa

SEQ ID NO: 5921 - protein, 337 aa, Salmonella enterica subsp. enterica serovar Choleraesuis str
MSAPMIDITLPLTDIHRHLDGNIRAQTILDLGRQFNIALPAKTLEALIPHVQVTSTEPDLVSFLTKLDWGVKVLASLDACRRVAFENIEDAARNGLHYVELRFSPGYMAMAHQLPIAGVVEAVIDGVRDGCNTFGVEARLIGIMSRTFGEAACLQELDALLAHREKITALDLAGDELGFPGSLFLSHFNRARDAGWHITVHAGEAAGPESIWQAIRELGAERIGHGVKAVEDRALMDFLAQQRIGIESCLTSNIQTSTVASLADHPLKTFLEHGVLASLNTDDPAVQGVDIIHEYHVAAPAAGLSREQIRQAQINGLEIAFLSDGEKRALREKVAAA

SEQ ID NO: 5922 - DNA, 954 bp, Pseudomonas syringae pv. syringae B728a
  CDS (1)..(954): transl_table=11
atgtacgactggttgaacgccctgcccaaggcagaactgcacttgcacctcgaaggctcgctggaacccgagttgctgttcgccctggccgagcgcaacaggattgccctgccgtgggatgacgtcgaaaccctgcgcaaggcatatgccttcaacaacctgcaggaattcctcgacctgtattaccggggcgcggacgtattgcgcaccgagcaggacttctacgacctgacctgggcctacctgctgcgctgcaaggcacagaacgttgtccacaccgaaccgttcttcgatccgcaaacccacaccgaccgtggcatcccgttcgaagtggtactggccgggattaccggtgcgctgaaagacggcaagtcgaagctgggcgtcgacagcggcctgatcctgagcttcctgcgtcacctgtcccaggaagaggccgaaaaaaccctcgatcaggcgctgccgttccgtgatgcgttcgtcgccgtgggcctcgacagctcggaaatgggtcacccgccaagcaagttccagcgtgtgttcgatcgcgcgcgcaacgagggcttcctgaccgtggcccacgccggagaagaaggtccgccggaatacatctgggaagcactggacctgctgaagatccagcgcatcgaccacggtgtgcgcgccatcgaagacgagcggctgatgcagcgcatcatcgacgaacagatcccgctgaccgtctgcccgctgtccaacaccaagctttgcgtgttcgacgacatggcccagcacaacatcctcgacatgctcgagcgcggcgtgaaggtcaccgtcaattcggacgacccggcctacttcggtggctacgtgaccgagaacttccacgcgctgtacacccacctgggcatgaccgaagatcaggccaaacgcctggcgcaaaacagcctggatgcacgactggtcaagccctag

SEQ ID NO: 5923 - protein, 317 aa, Pseudomonas syringae pv. syringae B728a
MYDWLNALPKAELHLHLEGSLEPELLFALAERNRIALPWDDVETLRKAYAFNNLQEFLDLYYRGADVLRTEQDFYDLTWAYLLRCKAQNVVHTEPFFDPQTHTDRGIPFEVVLAGITGALKDGKSKLGVDSGLILSFLRHLSQEEAEKTLDQALPFRDAFVAVGLDSSEMGHPPSKFQRVFDRARNEGFLTVAHAGEEGPPEYIWEALDLLKIQRIDHGVRAIEDERLMQRIIDEQIPLTVCPLSNTKLCVFDDMAQHNILDMLERGVKVTVNSDDPAYFGGYVTENFHALYTHLGMTEDQAKRLAQNSLDARLVKP

SEQ ID NO: 5924 - DNA, 1320 bp, Corynebacterium jeikeium K411
  CDS (1)..(1320): transl_table=11
atgattgactctgacatcatcgcgtcccttcccaaagtagagctccacgatcacctcgacggcggcgtccgcccggccaccctagtcgagctcgccgaggaaatcggctacgagctgcccaccaccgacccggcagagttggaaaagtggttctacgaggcggctaactccggcgacctgccgacctacctcaccacttttgatcacaccaccgcagtcatgcagaccgccgaggggctggtgcgcatcacccgcgaggcagttgaggacctggccgctgataacgtctgctacgccgagctgcgttatgcaccggagcagcaccaggccgatggcctctcccttcagcaggtcgtcgaggccaccgtgcaaggtgtgaaggagggcgagcgcctggttgccgagcgcggcgggcgcatccacgtgcgcctgatcctgtgcgctatgcgccacgcggatcgttccgaagagatcgcccagctcacggtggacaactatggcgagcacacccccggcgagggctacgtggtgggcttcgacatcgccggcgccgaggatggcttcccgccatcgaagcacgccgcggcgttcgacctgctgcgcaagaacctcattcctttcaccattcacgccggtgaggccgccggtgtggactctcttcgtgacgccctagcgcagggtgcccgacgtatcggccacggagtgcgagtgtacgaggactttaatgccaccatgagcggcatcgagctgggccaggtcgcccgcttcatgcgcgaccagcgcattgcgctggagatttgcccgacctccaacactcagacgggaatctgcgacgacgtggcggaccacccgtttggcttgctgtacgagatgggcttcttctgcaccgtgaacacggataatcgcctggtttccggcaccacgatgacccgcgagttcgagctgctggctgagcactgcgacttggaactgtggcagttgctggagcttactagcaacgccctgcaggtggcgtactgcgacgaggggttgcgcgaggacctcgagcgtaacgtgatctacccggcctacgccgaggtcggcaacaatcttccggacgaggccttggacgcaagcgacgcagagggagccgagttttccagcggcatgcaacgcctgcacggccacggtcagtcgcacggcgcaggtgctgcggcgggggcgggccagcaagatattgagctatccatggagaacctcaaggcagagctggaggagctgggcctcagcctcgatgatgaggaaagcgacggcgaagcggacggccaaacctccagctaa

SEQ ID NO: 5925 - protein, 439 aa, Corynebacterium jeikeium K411
MIDSDIIASLPKVELHDHLDGGVRPATLVELAEEIGYELPTTDPAELEKWFYEAANSGDLPTYLTTFDHTTAVMQTAEGLVRITREAVEDLAADNVCYAELRYAPEQHQADGLSLQQVVEATVQGVKEGERLVAERGGRIHVRLILCAMRHADRSEEIAQLTVDNYGEHTPGEGYVVGFDIAGAEDGFPPSKHAAAFDLLRKNLIPFTIHAGEAAGVDSLRDALAQGARRIGHGVRVYEDFNATMSGIELGQVARFMRDQRIALEICPTSNTQTGICDDVADHPFGLLYEMGFFCTVNTDNRLVSGTTMTREFELLAEHCDLELWQLLELTSNALQVAYCDEGLREDLERNVIYPAYAEVGNNLPDEALDASDAEGAEFSSGMQRLHGHGQSHGAGAAAGAGQQDIELSMENLKAELEELGLSLDDEESDGEADGQTSS

SEQ ID NO: 5926 - DNA, 954 bp, Pseudomonas fluorescens Pf-5
  CDS (1)..(954): transl_table=11
atgtatgactggctgaacgccttgcccaaggccgagttgcacctgcacctggaaggttccctggaaccggaactgctgttcgccctggccgaacgcaacaagatcgccctgccctggagcgacgtcgagaccctgcgcaaggcctacgccttcaacaacctgcaggaattcctcgacctgtactaccagggcgccgacgtgctgcgcacctcccaggacttctacgacctgacctgggcctacctgctgcgctgcaaagaacagaacgtgatccacaccgaacccttcttcgacccgcagacccacaccgaccgtggcgtgccgttcgaagtggtgctcaacggcatcgccagcgcactcaaagatggcgagcagcaactgggcatcaccagcggcctgatcctcagtttcctgcgccacttgagcgaagaagaggcgcagaagaccctcgaccaggcgctgccgtttcgcgatgcattcgtcgccgtgggcctggacagttcggaaatgggccacccgccgagcaagttccagcgggtattcgaccgcgcgcgcagcgaaggcttcctgaccgtcgcccacgccggtgaagaaggcccgccggagtacatctgggaagccctggacctgttgaagatccagcgcatcgaccacggtgtacgtgccttcgaagacgagcggctgatgcagcggatcatcgacgagcagatcccgctgactgtgtgcccgctgtccaacaccaagctctgcgtgttcgaccacatgtcccagcacaacatcctgcaaatgctcgagcgcggggtgaaggtcacggtcaactccgatgacccggcctacttcggcggctacgtcaccgagaacttccacgccctgcacaccgacctgggcatgacccaggaccaggcccggcgcctggcgcagaacagcctggatgcacggctggtcaagccgtaa

SEQ ID NO: 5927 - protein, 317 aa, Pseudomonas fluorescens Pf-5
MYDWLNALPKAELHLHLEGSLEPELLFALAERNKIALPWSDVETLRKAYAFNNLQEFLDLYYQGADVLRTSQDFYDLTWAYLLRCKEQNVIHTEPFFDPQTHTDRGVPFEVVLNGIASALKDGEQQLGITSGLILSFLRHLSEEEAQKTLDQALPFRDAFVAVGLDSSEMGHPPSKFQRVFDRARSEGFLTVAHAGEEGPPEYIWEALDLLKIQRIDHGVRAFEDERLMQRIIDEQIPLTVCPLSNTKLCVFDHMSQHNILQMLERGVKVTVNSDDPAYFGGYVTENFHALHTDLGMTQDQARRLAQNSLDARLVKP

SEQ ID NO: 5928 - DNA, 1011 bp, Colwellia psychrerythraea 34H
  CDS (1)..(1011): transl_table=11
atgaataaatttatccagtctttacctaaagtagaactccacctccatattgaaggaacgcttgagcctgaattaatgcttgaattagcacagcgcaatagtataaatattcctttcaattcagttgaagaaataagagatgcttacaatttccataacctacaatcatttttagatatttacttccaaggggcagatgtactggtccatgaacaagacttttttgatctgacatgggcttatttactccgctgccaagaagataatgtgctgcacacagagatattttttgacccccaagcacatacagaacgcggcatcttattcgatacggtagtaaatggtattgatcgtgcacttaataaaggtgtgagtgaattagggatcaccagcaagctaattatgtgtttcttacgccatttagatgaagaatcagcttttaaaacgttaacacaagcacaagctcacaaagataaaattatcggagtagggttagactccacagaaattggcaatcctgcgaataagttcgagcgagtatttaaacaagccattgaacaaggattcttaactgtcgcccacgcaggtgaagaaggacctgcagataatattagtgaggcgctaagcttactgaaaattactcgcattgatcacggcgtgcgttgttcagaagatgcgagcctagtaaagcagcttgtcagtgaacgtattcctcttaccgtttgcccactatctaatattaaactaaaagtttttgaccgtatggaacagcacaatattgtcacgctactgcgtcaaggggtttgtgtcacaattaattctgacgacccggcctattttggtggttatatgacagataattttgtagcggtaaataatgcacacccgatgaataaagctgaaattgctcaatttacttttaacgccattgaagccagctttgtttcaccaagtgaacaagaacggctaagacaagtgacacagaaatatatagcgttacatcaagagtga

SEQ ID NO: 5929 - protein, 336 aa, Colwellia psychrerythraea 34H
MNKFIQSLPKVELHLHIEGTLEPELMLELAQRNSINIPFNSVEEIRDAYNFHNLQSFLDIYFQGADVLVHEQDFFDLTWAYLLRCQEDNVLHTEIFFDPQAHTERGILFDTVVNGIDRALNKGVSELGITSKLIMCFLRHLDEESAFKTLTQAQAHKDKIIGVGLDSTEIGNPANKFERVFKQAIEQGFLTVAHAGEEGPADNISEALSLLKITRIDHGVRCSEDASLVKQLVSERIPLTVCPLSNIKLKVFDRMEQHNIVTLLRQGVCVTINSDDPAYFGGYMTDNFVAVNNAHPMNKAEIAQFTFNAIEASFVSPSEQERLRQVTQKYIALHQE

SEQ ID NO: 5930 - DNA, 996 bp, Colwellia psychrerythraea 34H
  CDS (1)..(996): transl_table=11
atgtttaataatcaacttcccctcgtcgatttacatcgtcatttagatggaaacatacgcccaaaaactatttggcagttagcacaacaaaataatattaaattacctgaagacaactttgaggcatttatccctcacgtgcaaatcactgacagtgaagctgacctgcttgcctttttgaaaaagcttgattggggtgttggtgtgctaaaatccctagatgatgtagtacgtatcggttttgagaatgtggaagatgcttataacgctaatattgattatgctgaattaaggttttctccctattacatcgccatgacgcacaacttaccaatagagggtgtggtagaagcaattattgagggggtaaatcagggtagaaaaaaatttaccactaaaattaatttaatgggcattttaagtcgtacctttggtgttgaacactgccaaagtgaactcaatgccctgctcgcttataaagatgatttagttgcagttgacctcgcgggcgatgagtacaattttccaggcagcctttttgaaagtcactttaaacaagtaaacgatgcaggccttaatgttagtgtccatgccggtgaagccgccgggcctgaaagtgtttggcatgctataaaaacactgggtgcaacgcgcattggtcatggtgtggcttgtgctaaggatcaagaattaatggactacatgcgagaaaataaaataagcatagagtcttgccttacttcaaactaccaaacaggaacgattaaagatttggcagtacatccagtaaaaacatttttagcaaacgatcttacagtttgcttaaatactgacgaccctgccgttgaaaatatcgagctcgctggcgaatttcaagtagcacgcgaagtacttggactcaatacagatcaaatcacccaattacaacgaaatgcggtgcaaatgagctttttatctgagcaagaaaagacagcactgctcaacattaaacaataa

SEQ ID NO: 5931 - protein, 331 aa, Colwellia psychrerythraea 34H
MFNNQLPLVDLHRHLDGNIRPKTIWQLAQQNNIKLPEDNFEAFIPHVQITDSEADLLAFLKKLDWGVGVLKSLDDVVRIGFENVEDAYNANIDYAELRFSPYYIAMTHNLPIEGVVEAIIEGVNQGRKKFTTKINLMGILSRTFGVEHCQSELNALLAYKDDLVAVDLAGDEYNFPGSLFESHFKQVNDAGLNVSVHAGEAAGPESVWHAIKTLGATRIGHGVACAKDQELMDYMRENKISIESCLTSNYQTGTIKDLAVHPVKTFLANDLTVCLNTDDPAVENIELAGEFQVAREVLGLNTDQITQLQRNAVQMSFLSEQEKTALLNIKQ

SEQ ID NO: 5932 - DNA, 954 bp, Pseudomonas syringae pv. phaseolicola 1448A
  CDS (1)..(954): transl_table=11
atgtacgactggttgaacgccctgcccaaggcagaactgcacttgcacctcgaaggttcgctggaacccgagttgctgttcgccctggcagagcgcaacaaaattgccctgccgtggaatgacgtcgaaaccctgcgcaaggcctatgccttcaacaacctgcaggaattccttgatttgtattaccgcggtgcggacgctttgcgcacagagcaggatttctacgacctgacctgggcttacctgctgcgctgcaaggaacagaacgttatccacaccgaaccgttcttcgatccgcaaacccacactgaccggggcatcccgtttgaagtggtgctggccgggattaccggtgcgctgaaagacggcaagtcgaagctgggtgtcgacagcggcctgatcctgagtttcctgcgtcacctgtcccaggaagaagccgaaaaaaccctcgatcaggcgctgccgttccgtgatgcgttcgtcgccgtgggtctcgacagttccgagatgggccacccgccgagcaagttccagcgcgtatttgatcgcgcccgcagcgagggcttcctgacggtcgcccacgccggggaagaaggcccgccggaatacatctgggaagcactggacctgctgaaaatccagcgcatcgaccacggtgtacgcgccatcgaagacgagcgactgatgcagcgcatcatcgacgaacaaatcccgctgaccgtctgcccgctgtccaacaccaagctctgcgtgttcgacgacatggcccagcacaacatcctcgacatgctcgagcgcggcgtgaaagtcaccgtcaactcggacgacccggcctacttcggtggctacgtgaccgagaacttccatgcgctgtacacgcatctgggcatgactgaagatcaggcaaaacgtctggcacaaaacagcctggatgcacgcctggtaaagccctaa

SEQ ID NO: 5933 - protein, 317 aa, Pseudomonas syringae pv. phaseolicola 1448A
MYDWLNALPKAELHLHLEGSLEPELLFALAERNKIALPWNDVETLRKAYAFNNLQEFLDLYYRGADALRTEQDFYDLTWAYLLRCKEQNVIHTEPFFDPQTHTDRGIPFEVVLAGITGALKDGKSKLGVDSGLILSFLRHLSQEEAEKTLDQALPFRDAFVAVGLDSSEMGHPPSKFQRVFDRARSEGFLTVAHAGEEGPPEYIWEALDLLKIQRIDHGVRAIEDERLMQRIIDEQIPLTVCPLSNTKLCVFDDMAQHNILDMLERGVKVTVNSDDPAYFGGYVTENFHALYTHLGMTEDQAKRLAQNSLDARLVKP

SEQ ID NO: 5934 - DNA, 1104 bp, Thermobifida fusca YX
  CDS (1)..(1104): transl_table=11
atggatgctaagccgaccctggaacagatccgccgcgcccccaaagtgctgctgcacgaccacctcgacggcgggctgcggccgcagacgatcgtcgaactcgctgatgctgccggctataccgacttgccgaccgacgacccggaagagctgggcgcctggtttgtggcggcggccaattcggggagcctcgaacgctacctggagacttttcggcacacggtcgcggtgatgcagacccgggaagcgttggagcgggtcgccgccgaatgcgtggaggacttggcagcagacgggatcgtctacgccgaggtccgttacgccccagaacagcatctgcgcggcgggctgcgcctggaagaggtggtggaagccgtccaggcagggttcgcggagggagtccggcgggtggcgcaccgcggcgcggtgatccaggtgcggacgctgctgaccgcgatgcggcaggcggcgcgctcccgggagatcgccgagcttgtggtgcgctaccgggacgagggcgtggtggggttcgaccttgccgggcccgaagcgggctttccccccagtcggcacgtggacgcgtgcacgtacctgcggcagcagaacgcgtatttgacgatccacgcgggggaggcgtccggcctgccgtcgatctgggaggcgctgcagtggtgcggtgcggaccggataggccatggggtgcgcgtcgtcgaggacattgaggcggcggacgagcacctgcacggggcacggctggggcggctcgcctcctatgtgcgggacaagcagatcccgctcgagatctgcccgagttcgaatgtgcagaccggggcggctccttcgttggaagcccacccgatccatctgctgcaccggctgcggttccgggtcacggtcaacaccgataaccggttgttgggaggaattacgctatctgacgagtttgccgcgctggtggacacgttcggttacgggtgggatgacttggagagtttcacggtgaacgcgatgaagtcggctttcgcgtcgttcgatgagcggttggtgctggtcaacggccggatcaagccggggtttgcgcagctcaagtggggcgggcggtga

SEQ ID NO: 5935 - protein, 367 aa, Thermobifida fusca YX
MDAKPTLEQIRRAPKVLLHDHLDGGLRPQTIVELADAAGYTDLPTDDPEELGAWFVAAANSGSLERYLETFRHTVAVMQTREALERVAAECVEDLAADGIVYAEVRYAPEQHLRGGLRLEEVVEAVQAGFAEGVRRVAHRGAVIQVRTLLTAMRQAARSREIAELVVRYRDEGVVGFDLAGPEAGFPPSRHVDACTYLRQQNAYLTIHAGEASGLPSIWEALQWCGADRIGHGVRVVEDIEAADEHLHGARLGRLASYVRDKQIPLEICPSSNVQTGAAPSLEAHPIHLLHRLRFRVTVNTDNRLLGGITLSDEFAALVDTFGYGWDDLESFTVNAMKSAFASFDERLVLVNGRIKPGFAQLKWGGR

SEQ ID NO: 5936 - DNA, 1029 bp, Thermobifida fusca YX
  CDS (1)..(1029): transl_table=11
atgagacgtcccatcgaacaacttcccaaagcccacctccacctgcacttcaccggttcgatgcggcattccaccctgatcgagctggcagccaagcacggggtgcacctgccgcacgcgctggtcgaggagtggccgccgaagctgcgtgccaccgacgaacggggctggttccgcttccagcggctctacgacatcgcccgttcggtgctgcaaacccccgacgacctgtaccggctgctgcgggagaccgccgaggacgagcgggctgccggtgccggctggctggagatccaggtggatcccagcgggtatgcgtcccgtttcggtggtctgaccgccacgctcgagttgatcctggacgccgcgcaggttgcggaggcggcgaccggggtggggatcggggtgatggtggcggccaaccggaccaagcatccgctggacgccaagaccctggcccggctggcggtccagtacgcgggccgcggggtcgtgtctttcgggttgaacaatgacgagcggcgcgggcgggccctggatttcgagggcgcgttccggattgcgcgccgggccgacctgctgctggcgccgcacggcggggagttgagcgggccgcggagtgtgcgcgagtgcctggacatgctgcaggccgaccgcatcgggcacggggtgcgcgcggtcgaagaccctgtcctggtggagcggctggccgcgcaggaggtgaccctcgaagtgtgtccgacctcgaacgtcagtctcggggtggtcgacgagctcgaggaggtcccgcttcgccggttgttcgacgcgggggtgccggtcgcgctcggcgccgacgacccgctgctgttcggtccccggctggccgagcagtaccacatcgcccgggaggtcttcggcttctctgatgcggagctggccgaactggcccggatgtcgatccgcgcgtccggtgccccggaggcgcggaagaaggagatgctcgccggagtggacgcctggctggcagccccgcccgcccgctcctag

SEQ ID NO: 5937 - protein, 342 aa, Thermobifida fusca YX
MRRPIEQLPKAHLHLHFTGSMRHSTLIELAAKHGVHLPHALVEEWPPKLRATDERGWFRFQRLYDIARSVLQTPDDLYRLLRETAEDERAAGAGWLEIQVDPSGYASRFGGLTATLELILDAAQVAEAATGVGIGVMVAANRTKHPLDAKTLARLAVQYAGRGVVSFGLNNDERRGRALDFEGAFRIARRADLLLAPHGGELSGPRSVRECLDMLQADRIGHGVRAVEDPVLVERLAAQEVTLEVCPTSNVSLGVVDELEEVPLRRLFDAGVPVALGADDPLLFGPRLAEQYHIAREVFGFSDAELAELARMSIRASGAPEARKKEMLAGVDAWLAAPPARS

SEQ ID NO: 5938 - DNA, 1056 bp, Ralstonia eutropha JMP134
  CDS (1)..(1056): transl_table=11
atgaccatcgatgccgcgctggcggacaagatccgccgtactcccaaggcagaactgcacgtgcatatcgaaggcacgctcgaacccgagctgatcttccggctggcccagcgcaaccacgtgaacctgccctaccccagcgtcgaggctctgcgcgcggcctatgcgttcaccgacctgcagtcgttcctggacatctactacgccggtgccagtgtgctgctgaccgaagaggatttcttcgacatgaccatggactacgtcaagcgcgccgtcgccgacaatgtccgccatgccgagatcttcttcgatccgcagacccatacggctcgcggcgtgccaatcggcaccgtgatcgacggcatttccgatgcactggcccaggcgcgcaccgaatatgatttctcgagcagcctgatcctctgcttcctgcgccatttgtcggaagaagacgcgttcgccacgctggaagccgcgctgccgtaccgggaccgctttgtcggcgtcgggctggattcgtcggagaagggcaacccgcccgaaaagtttgcacgcgtattcactcgtgcccgcgaactcggcctgcacctggtggcccatgccggcgaggaaggccccgcccagtacgtcaccgatgcgctggacatcctcaaggtcgaacgtatcgatcacggcgtacgttcgatcgacgatgccgcgctgatcgagcgcctggcgcgcgaacgcgtggcgctgaccgtgtgcccgctttcgaaccagaagctcaaggtgcatccggacctgagcgagcatccgctcaagcgcatgctcgatgccggcgttgcgatcacgctgcattcggacgacccggcctacttcggcggctacatgaacgccaactgggaagccacgttcgcagcgctgccgctcgacgccgccgatgcgcacaagctggcgcgcaatagttttgaagcggccttcctgcccccgatgcagaaggccgagttcctggcggaggtcgaccacttctggtcggccacgccgacgtccccgcctgccacggcccccgcggcctga

SEQ ID NO: 5939 - protein, 351 aa, Ralstonia eutropha JMP134
MTIDAALADKIRRTPKAELHVHIEGTLEPELIFRLAQRNHVNLPYPSVEALRAAYAFTDLQSFLDIYYAGASVLLTEEDFFDMTMDYVKRAVADNVRHAEIFFDPQTHTARGVPIGTVIDGISDALAQARTEYDFSSSLILCFLRHLSEEDAFATLEAALPYRDRFVGVGLDSSEKGNPPEKFARVFTRARELGLHLVAHAGEEGPAQYVTDALDILKVERIDHGVRSIDDAALIERLARERVALTVCPLSNQKLKVHPDLSEHPLKRMLDAGVAITLHSDDPAYFGGYMNANWEATFAALPLDAADAHKLARNSFEAAFLPPMQKAEFLAEVDHFWSATPTSPPATAPAA

SEQ ID NO: 5940 - DNA, 975 bp, Staphylococcus saprophyticus subsp. saprophyticus ATCC 15305
  CDS (1)..(975): transl_table=11
atgaataagtccatagaagaaattgccaaggttgaattacattgtcacctagacggttcaacaagtgtagaattgattagacaacttgcagatgaacaaggtgttaacttagatgaatcaaaattatttgtcagtagtcagtgtgatagtttagatgactatttacagtgtttcgatgaaatattaaaagtacttcagacaaaagatagtttgaaacgtgcggttgtagatgttgccaagcaagcatataacgataatgtgaaatatattgaaattcgtttcgcaccattatttcatatggatcaagggttaacgatgacagaggtgttggaagcagtagagttaggtgttaatgaagcggttaatacattagggataggcgttaatttgttagtatgtgcgatgcgacaacatcatactgaacaaaaccaaacactttttgattttattcatcaacatcatcatgaagcaatttgtggcattgactttgcaggtcctgaagtaggatttcctactgaagcgattgaagatacaataaaatatggcttagataaaggtttcaatcttacgttacacgctggagagtgcggttgtatgcataatgtgatagaaggtattaaattaggctcgaaacgtattggacatggtgttgctataaatcaagataaacaatcattgcagtttgttaaagaaaatgacgtactcttagagatgtgtccaaaaagtaatattcaaaccaaggccattacagggttagaagcattaaatttaccttatttgctagaacaagatataccttttttaattaatacagataatagaaccgttacacagacatcattaaatgaagaatatactttacttatagaaaatgaaatgatgacattagaacaagtcaaatatattaatgaaagagcagtagactatgcatttttaagtgacgaagagagaaagcagttacacttaaaaatgtaa

SEQ ID NO: 5941 - protein, 324 aa, Staphylococcus saprophyticus subsp. saprophyticus ATCC 15305
MNKSIEEIAKVELHCHLDGSTSVELIRQLADEQGVNLDESKLFVSSQCDSLDDYLQCFDEILKVLQTKDSLKRAVVDVAKQAYNDNVKYIEIRFAPLFHMDQGLTMTEVLEAVELGVNEAVNTLGIGVNLLVCAMRQHHTEQNQTLFDFIHQHHHEAICGIDFAGPEVGFPTEAIEDTIKYGLDKGFNLTLHAGECGCMHNVIEGIKLGSKRIGHGVAINQDKQSLQFVKENDVLLEMCPKSNIQTKAITGLEALNLPYLLEQDIPFLINTDNRTVTQTSLNEEYTLLIENEMMTLEQVKYINERAVDYAFLSDEERKQLHLKM

SEQ ID NO: 5942 - DNA, 1002 bp, Shigella sonnei Ss046
  CDS (1)..(1002): transl_table=11
atgattgataccaccctgccattaactgatatccatcgccaccttgatggcaacattcgtccccagaccattcttgaacttggccgccagtataatatctcgcttcctgcacaatccctggaaacactgattccccacgttcaggtcattgccaacgaacccgatctggtgagctttctgaccaaacttgactggggcgttaaagttctcgcctctcttgatgcctgccgccgcgtggcatttgaaaacattgaagatgcagcccgtaacggcctgcactatgtcgagctgcgtttttcaccaggctacatggcaatggcacatcagctgcctgtagcgggtgttgtcgaagcggtgatcgatggcgtacgtgaaggttgccgcacctttggtgtgcaggcgaagcttatcggcattatgagccgaaccttcggcgaagccgcctgtcagcaagagctggaggcctttttagcccaccgtgaccagattaccgcacttgatttagctggtgatgaacttggattcccgggaagtctgttcctttctcacttcaaccgcgcgcgtgatgcgggctggcatattaccgtccatgcaggcgaagctgccgggccggaaagcatctggcaggcgattcgtgaactgggtgcggagcgtattggacatggcgtaaaagccattgaagatcgggcgctgatggattttctcgccgagcaacaaattggtattgaatcctgtctgacctccaatattcagaccagcaccgtagcagagctggctgcacatccgctgaaaacgttccttgagcatggcattcgtgccagcattaacactgacgatcccggcgtacagggagtggatatcattcacgaatataccgttgccgcgccagctgctgggttatcccgtgagcaaatccgccaggcacagattaatggtctggaaatggctttcctcagcgcagaggaaaaacgcgcactgcgagaaaaagtcgccgcgaagtaa

SEQ ID NO: 5943 - protein, 333 aa, Shigella sonnei Ss046
MIDTTLPLTDIHRHLDGNIRPQTILELGRQYNISLPAQSLETLIPHVQVIANEPDLVSFLTKLDWGVKVLASLDACRRVAFENIEDAARNGLHYVELRFSPGYMAMAHQLPVAGVVEAVIDGVREGCRTFGVQAKLIGIMSRTFGEAACQQELEAFLAHRDQITALDLAGDELGFPGSLFLSHFNRARDAGWHITVHAGEAAGPESIWQAIRELGAERIGHGVKAIEDRALMDFLAEQQIGIESCLTSNIQTSTVAELAAHPLKTFLEHGIRASINTDDPGVQGVDIIHEYTVAAPAAGLSREQIRQAQINGLEMAFLSAEEKRALREKVAAK

SEQ ID NO: 5944 - DNA, 1005 bp, Rhodospirillum rubrum
  CDS (1)..(1005)
atggccgtcgatcccgctttcctccacgccctgcccaaggtggagcttcacctgcatatcgaaggcagcctggaacccgagatgatggtcgccctggccgaacgcaacggcctccgcctgccctacgcctcggtcgaggcggtgcgcgcggcctatgatttccagaacctgcaggatttccttgatctgtattaccagggtatggcggtgctgcggaccgagcgggatttcgaggatctggcgatggcctatttccagcgcgccgccgcccagaatgttctgcatgccgagattttcttcgatccccagggccatacggcgcgcggcgtcgccctggaggcggtgatcgccgggctgaccagcgcccgcaagcgcgccgaggccgaattgggggtgagttcggaactgatcttgtcgttcctacgccatctgagcgaggaggaggccttcgccacccttgaagaagccttgccccaccgcgatcagttcatcggcgtcggccttgatagctcggaagtcggccatccgccggccaaattcgcccgggtcttcgcccgggcgcgggccgagggcctgcggctggtcgcccatgccggcgaggaaggcccgcccgattacgtgcgcgaggccctggacctgctggccatcgaccgcctggaccacggcaaccgggcgctggaggacgaggcgctgatcgagcgtctgatcgccgagggcatggccctgacggtttgccccttgagcaacctcaagctccgcgtcgtcgatgatctcggcgcccatccgctcaaggccatgctcgagcgcgggctgaaggccacgatcaattccgacgatccgtcgtatttcggcggctatatgcttgagaacatggccgccgtcgccgaggccctggccctggaaacccaccacctgcgcaccctgaccgccaacgccatcgacgcctccttcgcctcccccgcccgcaaggccgagatgcacgcgcgcttggccgcggtaaactga

SEQ ID NO: 5945 - protein, 334 aa, Rhodospirillum rubrum
MAVDPAFLHALPKVELHLHIEGSLEPEMMVALAERNGLRLPYASVEAVRAAYDFQNLQDFLDLYYQGMAVLRTERDFEDLAMAYFQRAAAQNVLHAEIFFDPQGHTARGVALEAVIAGLTSARKRAEAELGVSSELILSFLRHLSEEEAFATLEEALPHRDQFIGVGLDSSEVGHPPAKFARVFARARAEGLRLVAHAGEEGPPDYVREALDLLAIDRLDHGNRALEDEALIERLIAEGMALTVCPLSNLKLRVVDDLGAHPLKAMLERGLKATINSDDPSYFGGYMLENMAAVAEALALETHHLRTLTANAIDASFASPARKAEMHARLAAVN

SEQ ID NO: 5946 - DNA, 1059 bp, Mus musculus
  CDS (1)..(1059)
atggcccagacacccgcattcaacaaacccaaagtagagttacacgtccacctggatggagccatcaagccagaaaccatcttatactttggcaagaagagaggcatcgccctcccggcagatacagtggaggagctgcgcaacattatcggcatggacaagcccctctcgctcccaggcttcctggccaagtttgactactacatgcctgtgattgcgggctgcagagaggccatcaagaggatcgcctacgagtttgtggagatgaaggcaaaggagggcgtggtctatgtggaagtgcgctatagcccacacctgctggccaattccaaggtggacccaatgccctggaaccagactgaaggggacgtcacccctgatgacgttgtggatcttgtgaaccagggcctgcaggagggagagcaagcatttggcatcaaggtccggtccattctgtgctgcatgcgccaccagcccagctggtcccttgaggtgttggagctgtgtaagaagtacaatcagaagaccgtggtggctatggacttggctggggatgtgaccattgaaggaagtagcctcttcccaggccacgtggaagcctatgagggcgcagtaaagaatggcattcatcggaccgtccacgctggcgaggtgggctctcctgaggttgtgcgtgaggctgtggacatcctcaagacagagagggtgggacatggttatcacaccatcgaggatgaagctctctacaacagactactgaaagaaaacatgcactttgaggtctgcccctggtccagctacctcacaggcgcctgggatcccaaaacgacgcatgcggttgttcgcttcaagaatgataaggccaactactcactcaacacagacgaccccctcatcttcaagtccaccctagacactgactaccagatgaccaagaaagacatgggcttcactgaggaggagttcaagcgactgaacatcaacgcagcgaagtcaagcttcctcccagaggaagagaagaaggaacttctggaacggctctacagagaataccaatag

SEQ ID NO: 5947 - protein, 352 aa, Mus musculus
MAQTPAFNKPKVELHVHLDGAIKPETILYFGKKRGIALPADTVEELRNIIGMDKPLSLPGFLAKFDYYMPVIAGCREAIKRIAYEFVEMKAKEGVVYVEVRYSPHLLANSKVDPMPWNQTEGDVTPDDVVDLVNQGLQEGEQAFGIKVRSILCCMRHQPSWSLEVLELCKKYNQKTVVAMDLAGDVTIEGSSLFPGHVEAYEGAVKNGIHRTVHAGEVGSPEVVREAVDILKTERVGHGYHTIEDEALYNRLLKENMHFEVCPWSSYLTGAWDPKTTHAVVRFKNDKANYSLNTDDPLIFKSTLDTDYQMTKKDMGFTEEEFKRLNINAAKSSFLPEEEKKELLERLYREYQ

SEQ ID NO: 5948 - DNA, 1089 bp, Leishmania donovani
  CDS (1)..(1089)
atggctgatgcgacccttcttcatcgcctcatagaggctttgccaaaggcagagctgcacgtgcacattgagggaacactgagcccagaactgctctttgagcttgcgaagaggaatggggtgcagattccgtacaagacggtggaggaggtccgcgcggcctataactttactgatctgcagtcgtttctggacctctattatgaaggcatgtctgtcctcatcaccgaggacgattttgcggacctggcatacgcctacacgcgtgtgatgcacgagagtcgcgttactcacgccgagccctttttcgatcctcaaggtcacctctgccgcggcattacatttcgcgttctctacgacgggctcatgaaggggtttcgccgcggtgaggccgagtttggagtcagtgtagcgctcatctttagcttccttcgtcatctctccgaggaggagtgctttgcactcgtgcgcgatgacatgcaccccgacaacggtcagtacatccgtgagttattcgcagcgaaggcgtttgtagcggtggggctggactcttcagaattggacaacccgccggagaagttcgcgcggctctaccgctactgccacgaagagctgaaggtgccgttccttgtggcgcacgcgggtgaggaaggtccaccggggtacatgcgggatgcgatgagcatgctggcagtggaccgcatcgaccacggtgtggccgcgcgtctggaccaggcgctgtgcaaggatctgcgtgagaagcgaattccactgactgtgtgcccgacgtcgaacgtagccctcaaggtcttccaggatcgcgcgacgtgcggggcggtggtgatggacctcgttttgacagaggggctttgcatcaccatcaactcagatgatccggcctactttggcggcgacatccgagagagtttccgcattctcgccgagacgggccgactcaccccggccacgctgaagcagctcgtgctcaactcgttctgcagcagcttcatcgccgaagatcgcaagcgcgcgtacgaggagagggtggagaaggtgttcaaggacgtgtgcggggggacgtatgagtga

SEQ ID NO: 5949 - protein, 362 aa, Leishmania donovani
MADATLLHRLIEALPKAELHVHIEGTLSPELLFELAKRNGVQIPYKTVEEVRAAYNFTDLQSFLDLYYEGMSVLITEDDFADLAYAYTRVMHESRVTHAEPFFDPQGHLCRGITFRVLYDGLMKGFRRGEAEFGVSVALIFSFLRHLSEEECFALVRDDMHPDNGQYIRELFAAKAFVAVGLDSSELDNPPEKFARLYRYCHEELKVPFLVAHAGEEGPPGYMRDAMSMLAVDRIDHGVAARLDQALCKDLREKRIPLTVCPTSNVALKVFQDRATCGAVVMDLVLTEGLCITINSDDPAYFGGDIRESFRILAETGRLTPATLKQLVLNSFCSSFIAEDRKRAYEERVEKVFKDVCGGTYE

SEQ ID NO: 5950 - DNA, 1044 bp, Xenopus laevis
  CDS (1)..(1044)
atggctggagagggagcgctgcagttttatcgagacctccctaaagtggaacttcatgcgcatctgaatggttctataagtacagctaccatgaagaagctgatggcccgcaaaccacatctagatatccagcatggaatgactatgattgacaaagggcagaaaaggacacttgaagagtgttttcagatgtttaaaataatacaccaaatcacagataccgctgaagatattttattggtaacaaaagatgtcattaaagaatttgctgccgacggtgtgaagtatttagagttgcgaagtacacctagagatactcccgctggtttaacaaaacaggcctatgtggagactgtgcttgagggcataaagcagtgtaaggaagaaggtgtggatatagatgttagattcttgttggctatcgatagaagagggggacccacagctgcaaaggaaactgttaagcttgcagaagatttcttctgttcaagcaatgaactggttctaggtttggacctcagtggtgacccaactgtgggacatggaagagacttcatggaacctttaaacaaagccagacaatctggcctcaagttggctcttcatttatcagagattcccagtcaaacagaagagacagaactccttctgggactgcccccagatcggatcggacacggcacatttcttactacctcagctcacattgttgagattgtgaaaaaacagcatatacctctagaactatgcattacctcaaatatcaaaggacaaacagtttcctcatacaacgagcaccattttggattttggtataatctgcatcacccatttgtgctttgtacagatgataaaggagtctttgcgactgatctttcagtggagtatgagattgctgctaagacatttaacttgactccacaccacgtatgggatctgtcctatcaagccattgattacacctttgcatcagcagacgtcaaagcaaacttgaaggagaagtggctgctgctaaagccagatgtgttcagacatgcactttaa

SEQ ID NO: 5951 - protein, 347 aa, Xenopus laevis
MAGEGALQFYRDLPKVELHAHLNGSISTATMKKLMARKPHLDIQHGMTMIDKGQKRTLEECFQMFKIIHQITDTAEDILLVTKDVIKEFAADGVKYLELRSTPRDTPAGLTKQAYVETVLEGIKQCKEEGVDIDVRFLLAIDRRGGPTAAKETVKLAEDFFCSSNELVLGLDLSGDPTVGHGRDFMEPLNKARQSGLKLALHLSEIPSQTEETELLLGLPPDRIGHGTFLTTSAHIVEIVKKQHIPLELCITSNIKGQTVSSYNEHHFGFWYNLHHPFVLCTDDKGVFATDLSVEYEIAAKTFNLTPHHVWDLSYQAIDYTFASADVKANLKEKWLLLKPDVFRHAL

SEQ ID NO: 5952 - DNA, 1047 bp, Brachydanio rerio
  CDS (1)..(1047)
atggataccgaagcggatctcttttatcgccagctgcccaaagtggagctgcacgcgcatctcaatggttcggtgagttttgaaaccatggagaagctgataaagcgaaaaccgcatctaaacatcgagcacagcatgacggccatccgccgcggacagcgccgcacactggacgagtgttttcaagtgtttaaagtgattcatcagctggttgattcagaagaggacattctaatggttgcaaaatcagtcattcaagagtttgcggcagatggagtaaaatacttggagttgcgtagcacaccacgagaagtgactgaaacaggtctcagtaaacaaagatacattgaaactgtgctggaagcgatacggcaatgtaaacaggagggtgttgacattgatgtcaggtttctggtggctgtagaccgcagacatgggcctgaggttgccatgcaaacagtgaagctggcagaagactttctgctgtccagtgatgggacagtagttggacttgatcttagtggagacccaaccgttggtcatggaaaagatttgctcgctgcacttcagaaagccaagaattgtggtctaaagctggcactacatctttcagaggttccttctcagatagatgagacagagttgttgttgaacctgcctcctgacagaatcggccatggaaccttcctgcatcctgatgtcggcgggtcagacagtcttgttgacaaagtctgcaaacaaaatattcccattgagatttgtttgacctctaatgtgaaaggtcaaaccgtgccttcatatgacaagcatcacttcaagtactggtataatcgaggacatccgtgtgttctctgcacggatgataagggcgtcttttgcacagatctttctcaggagtatcaactggccgcctccacctttggtttgacaaaagaagctgtgtggattctttcccagcaggccattggttacacgttcgcccctgagccaatcaaacagcgactggagaagacatgggcggagctcaaacagcagattctccaatga

SEQ ID NO: 5953 - protein, 348 aa, Brachydanio rerio
MDTEADLFYRQLPKVELHAHLNGSVSFETMEKLIKRKPHLNIEHSMTAIRRGQRRTLDECFQVFKVIHQLVDSEEDILMVAKSVIQEFAADGVKYLELRSTPREVTETGLSKQRYIETVLEAIRQCKQEGVDIDVRFLVAVDRRHGPEVAMQTVKLAEDFLLSSDGTVVGLDLSGDPTVGHGKDLLAALQKAKNCGLKLALHLSEVPSQIDETELLLNLPPDRIGHGTFLHPDVGGSDSLVDKVCKQNIPIEICLTSNVKGQTVPSYDKHHFKYWYNRGHPCVLCTDDKGVFCTDLSQEYQLAASTFGLTKEAVWILSQQAIGYTFAPEPIKQRLEKTWAELKQQILQ

SEQ ID NO: 5954 - DNA, 1333 bp, Schistosoma japonicum
  CDS (9)..(1067)
tttcagttatgtggctacctttggatttgtttgggattaacttgcatgtccatctagatggttccattaggccagaaacgttgtttgagttatcaaatgataaaatatccaaacctcagtttaaaaccttggaagagctcaaagacaagttaacgcctaaaaagccacacagtttaaaagacttcctgaaagcttttgagataataataccattaattgctggtaagaaagaggttttggcgcgtatatgtgaagaattcgtagaagattgtgtacaacgtggtggtttatgttatgcggaaacaagatattgtccatttttactggccgactctagacttaatgcagaagaagttctgaaaacaattcttgattcgcttaacagagctagtaaaaagcacggcattgaagttcgttccattttatccatcatgagacatatgcctgagacagcttcagaaacattagaattggccaaaaattatcaaccacatggagttgttgcaatcgacgttgcaggcgatgattcagttttgaaatcgcaacgtttaccgaatgaaatagttcaaacatttgaagaagctaaaaaggctggtattcatcgtacggttcatgttggtgaaaatagtccagcaagtagtgtatatgaagcagtcaatattctacacgctgaacgtattggtcatgggtatcatatactagatgatgaaaaggcttataaatctttacttcaagcaggtgtacatttcgaggtatgcccatcatcgagttttgttacgggttctgttgactctaaaattttaaataaccatcctctacatcgtttcattgaagataaagctaacttctctattaataccgatgatccaacattaacagagagatgggatttacaagaagcacaatattgtttagaaacattaggtataaaacctagccaattaataaatgctaattataatgctgcaatctcagcatttcttactacttctgaaaaagaaatcttaatttcccatataaatattagatcaagaaatagaataatcaaaattcactccaaaacataattgccagcttttgtttagaaaatgatgaattgaaacaaaacaaaaatcaaattaatgtccaattataaaataatcttggaatttattttacatagtaactaatctatgtttgaaatgcttaagttgataacctcattcattagaattagtgaataaattcttgtttcttttatgaaaaatttctctattgtgaatttaacttttgttttattgaattgattttctattcccgggacattcccctatatagctgttttgttctgggt

SEQ ID NO: 5955 - protein, 352 aa, Schistosoma japonicum
MWLPLDLFGINLHVHLDGSIRPETLFELSNDKISKPQFKTLEELKDKLTPKKPHSLKDFLKAFEIIIPLIAGKKEVLARICEEFVEDCVQRGGLCYAETRYCPFLLADSRLNAEEVLKTILDSLNRASKKHGIEVRSILSIMRHMPETASETLELAKNYQPHGVVAIDVAGDDSVLKSQRLPNEIVQTFEEAKKAGIHRTVHVGENSPASSVYEAVNILHAERIGHGYHILDDEKAYKSLLQAGVHFEVCPSSSFVTGSVDSKILNNHPLHRFIEDKANFSINTDDPTLTERWDLQEAQYCLETLGIKPSQLINANYNAAISAFLTTSEKEILISHINIRSRNRIIKIHSKT

SEQ ID NO: 5956 - DNA, 1077 bp, Xenopus laevis
  CDS (1)..(1077)
atggagacaataagcagccccttcaacaagcccaaggtgcagctccacattcaccttgatgctgccataaggccagaaaccgttttctactttgccaaaaaaaagcaaatgcatctgccaggaatagaaagcattgaagatctcaagaagaaggttgtttgcaatcaagcaggaagcctgacggagtttctttccaagtttgagatcttcatgccccctgtagtaggtgaccgagaagcagtgaaaagaattgcatatgaatttgttgagacggaagccaaacaaggagtcatttactgtgaagtccgatacagccctcagctttttgcaaactgcaaagtggatcctattccatggggacaagaagaaggtgacctcactccagatgaagtggtagaacttgttaaccaaggactcaaggaaggagaaaaggatttcaacatcaaagtcaaatcaattttatgctgcctacgccacatgccaagttggtcggttgacgtggtggagctgtgtaagaaatatcacaaagacggtgtagtcggaatcgatctggcgggagacgaaggtttgaagggtgagacgttcccagggcacctgaaagctttccaggaggctgtaagatgtggaattcacagaactgtacatgctggcgaggccgggccaccttcagtggtcaaagaggctgtagagatgctgaaagcggagagaattgggcacggataccacaccatacacgacccagacctgtacaagaggttattagacaaggacatgcattttgagatgtgcccctattgcagttacataactggagcctgtgacccggatttcacaaaacatcccttaatccaatttaagaaagacagagcaaattactcattgagtagtgatggaccgctccctaccggcaggacccttgaatacgattatgttcttgcacaaaagttcatgggatttacagaaaaggattttatgcgtgcgaacattaatgctgcccgttcctgtttccttccagaggaggagaagaaggagctgttagagagattatacactgcctatgggatgactagtctgtaa

SEQ ID NO: 5957 - protein, 358 aa, Xenopus laevis
METISSPFNKPKVQLHIHLDAAIRPETVFYFAKKKQMHLPGIESIEDLKKKVVCNQAGSLTEFLSKFEIFMPPVVGDREAVKRIAYEFVETEAKQGVIYCEVRYSPQLFANCKVDPIPWGQEEGDLTPDEVVELVNQGLKEGEKDFNIKVKSILCCLRHMPSWSVDVVELCKKYHKDGVVGIDLAGDEGLKGETFPGHLKAFQEAVRCGIHRTVHAGEAGPPSVVKEAVEMLKAERIGHGYHTIHDPDLYKRLLDKDMHFEMCPYCSYITGACDPDFTKHPLIQFKKDRANYSLSSDGPLPTGRTLEYDYVLAQKFMGFTEKDFMRANINAARSCFLPEEEKKELLERLYTAYGMTSL

SEQ ID NO: 5958 - DNA, 1077 bp, Xenopus laevis
  CDS (1)..(1077)
atggagagcaaggcttttaataaaccaaaggtggaacttcatgttcacctcgatggaagcatcaaaccagaaactataatacattttgcaaaaaaaagacaaatcaaactccccgcagacacggtggaaggcctcctagagcacgtttcttacaaagaacctctgagtctgaccgaattcctccaaaaattcaatcattacatgccggcaattgcaggtgacagagaagctataaagagaatcgcctatgaatttgtggaaatgaaagccaaagaaggggtgatttatgtagaagtcagatacagcccccatttcctagctaactccaaagtggatcccattccatggggccagaaagaaggtgacattacgcccgatgaagtggttgatctggttaaccagggattacggaagggagagaaaacgttcaacatcaaagccaggtctattctatgctgcatgcgacacatgccaaattggtcctcggaggtgattgaactctgcaaaaagtaccaaaatgatactgttgttgccatagacttggccggggatgaatctctcaactgtgagtcgtaccccgggcacaggaaggcgtatgaggaggcagtcaaatgtggaatccatcgaactgttcatgctggagaagtgggacctcccagtgtggtgaaggaggctgtggaggtgctaaaggctgaaaggattggacatggctaccacactactgaagacccaaatctatataaagagcttttggaaaataatatgcactttgaggtgtgtccgtggtcaagctatctaactagcgcgtgtcacccagattttaccaaacacccggccacacaatttaggaaagacaaagccaacttctcactgaacacagatgaccctttgatatttggatctactctggacgttgattattcaattgcagtgcaacacatgggcttcactgaagacgagtttaagcgagtgaacatcaatgctgccaaatcaagctttctaccagacaatgagaagaaggagctgctgtataaactgtatgaagcctacggcatgatcctatccacaggactctga

SEQ ID NO: 5959 - protein, 358 aa, Xenopus laevis
MESKAFNKPKVELHVHLDGSIKPETIIHFAKKRQIKLPADTVEGLLEHVSYKEPLSLTEFLQKFNHYMPAIAGDREAIKRIAYEFVEMKAKEGVIYVEVRYSPHFLANSKVDPIPWGQKEGDITPDEVVDLVNQGLRKGEKTFNIKARSILCCMRHMPNWSSEVIELCKKYQNDTVVAIDLAGDESLNCESYPGHRKAYEEAVKCGIHRTVHAGEVGPPSVVKEAVEVLKAERIGHGYHTTEDPNLYKELLENNMHFEVCPWSSYLTSACHPDFTKHPATQFRKDKANFSLNTDDPLIFGSTLDVDYSIAVQHMGFTEDEFKRVNINAAKSSFLPDNEKKELLYKLYEAYGMILSTGL

SEQ ID NO: 5960 - DNA, 1041 bp, Trichinella spiralis
  CDS (1)..(1041)
atgaagaattttccaaaggttgaacttcacgtacatctggacggtgctattcgacattctactattgtggatattgctaagcaaaaaaacattggcctcccatcgatggaagttgaaaagcttcgagaattcgtggtgacacaggaaccgatgagcctggacagaatgttgaaagactttgaaatttttacgccagtgttgataggtgatccagatgcaatcgagcgtgttgcttatgaattttgtgaaactcaaaagaaaaacaatgttttgtacacagaagtccgttatagtccgcatttgctttccaacacagcgaagaattcatactggcctgatgtgggtccgtacaaaggaaaaggagaagtgacgccagaaaaagtagtaatggctgtcaatgaagggttgcgcaaaggacaacgtgattttggcatccaagttcgctcgttgctttgctgcatcgtctgctacccttcttggtctgaagaagtggtacatatgtgtgaaaaattcaaaaaagatggcgttgtcggaattgatcaagctggctatgtccatttcccacacgaagcgaaaatttttcaaatggcaaaaagtcgaggaatacaccgaaccgtgcatgccggggaagttggcactgctgataatgttaagcaggctattgaacaattgcaagtagaacgtattggccatggatatagagttttacaagatgaatctatttatgagttggctaaaaatggtggttatcattttgaattatgcccactgtccagtgtcgtgtctggttcagtggtttcagactggtcaacacatcctgcgagaagatttttgaaagatcaactgaacttctccatcaacacagacgatccgactattttggacaacagcatgtgcagtgaatttgaaatatgcaaagaaaaactgggatttactgaaacagatctgcatgttgcgacttgcaatgcagcacgatcatcatttttggaaattgatgaaaaagagcaactgctcagcaatataaagaaacaatggttttaa

SEQ ID NO: 5961 - protein, 346 aa, Trichinella spiralis
MKNFPKVELHVHLDGAIRHSTIVDIAKQKNIGLPSMEVEKLREFVVTQEPMSLDRMLKDFEIFTPVLIGDPDAIERVAYEFCETQKKNNVLYTEVRYSPHLLSNTAKNSYWPDVGPYKGKGEVTPEKVVMAVNEGLRKGQRDFGIQVRSLLCCIVCYPSWSEEVVHMCEKFKKDGVVGIDQAGYVHFPHEAKIFQMAKSRGIHRTVHAGEVGTADNVKQAIEQLQVERIGHGYRVLQDESIYELAKNGGYHFELCPLSSVVSGSVVSDWSTHPARRFLKDQLNFSINTDDPTILDNSMCSEFEICKEKLGFTETDLHVATCNAARSSFLEIDEKEQLLSNIKKQWF

SEQ ID NO: 5962 - DNA, 852 bp, Lactobacillus helveticus
  CDS (1)..(852): transl_table=11
atggaattcctggagaagtttgcttttcccgttcatttaatgcaaacggcagctgatctacaactgatcgtttttagtctgctaaaaaatttaaagaaacaaggactggtttacgtcgaaattcgttttgcgccccagcttcatactgagcaaggtttgactcaagaggaagtagtgcgcgcagcgattgccggcttaaaccagttttttaattggcaaaaagataatccgactgatcaaccagaactacatgcaaatttattgctgtgtctaatgcggcttaaggataattatgagcaaaacttagaaaccgttgaaacggccaagcatttcctaaaccgcggcgtcagtggactagatctagccggagctgaaacgcccgcattttccatcagcaattatgcttctttatttagtctggctagtagagaaagtatccccttcaccattcatgcaggtgaagctatgggacccgaatccatttatcaagcgctagatttaggagccaagcggatcggtcacggcattcgctgcgttgaggacaagcagctagtagcagacattatccaaaataggatcacgctagaatgttgcgccacttcgaatctgaacaccaaggctttcagccagatcgaccactaccctgtcaaaaaattgctgcatcagggagtcaacgtcacgcttaacaccgatgacatgaccatttctaatatcgacctacctcatgaatacaaattattagaggataaaactggtttaactagtagcgatgaaaaacagctctatttaaacgcagttaatgccgcattttgttcagaacaagaaaaaagtcgtttattatctttaatctaa

SEQ ID NO: 5963 - protein, 283 aa, Lactobacillus helveticus
MEFLEKFAFPVHLMQTAADLQLIVFSLLKNLKKQGLVYVEIRFAPQLHTEQGLTQEEVVRAAIAGLNQFFNWQKDNPTDQPELHANLLLCLMRLKDNYEQNLETVETAKHFLNRGVSGLDLAGAETPAFSISNYASLFSLASRESIPFTIHAGEAMGPESIYQALDLGAKRIGHGIRCVEDKQLVADIIQNRITLECCATSNLNTKAFSQIDHYPVKKLLHQGVNVTLNTDDMTISNIDLPHEYKLLEDKTGLTSSDEKQLYLNAVNAAFCSEQEKSRLLSLI

SEQ ID NO: 5964 - DNA, 1485 bp, Glossina morsitans morsitans
  CDS (1)..(1485)
atgaatatcttaatactgtcagctctttcgataatacttgcatttctgccgccatctttagcggaagtgaacaaagcttatcaagatgagcgcaataaaattctacaagaggaagagaaacttcgtctcggttatgacgtgatattgcaaggcgatgaagaaaaagccgaccaaatatttttgagacttaagcaaaaggagttacaagatggctttgaaaatgtcgaaaaaaatttgccaggcatgcattactacaaagccaagcctttattggacgaaagtaaagtctatcaattgattcgaaaaatgcctaaaggagctttattgaatgttcatccgcccggcgctgttacctcaaaatggatattgaataatattttaaataaagacaatctccgaaagtgtacaaacgaaaatggtgttcaactgttaacattccgtaagaaattcgacggttgtaaatccgaatctgttcaggtcagtaaaggcgaagctaaagaggattggtttaatttgtataccccaacacctgaagtgacttttaaatcaagcgaagcagcatttaatcaactgtgtgatatgtttgatcgaattgatgatgctttaaattatttaccaatgcttaaggatcactatcggcaattccttgaagagttgtacgcagacaaagtcctatacactgaagttcgcgtaaaattctctgagccatacgacgacacaagcaaaaagtacagtttggatgacgtggttaaagaaatagaaaatgtggtgaatgattttaaaaaaacacatcctgactttataggacttaaaataatttttgctatactccgccatggcaaagaagacgaaatacgtaaaaactttgacttgtataaaaacctacgttccaaattccccaacactataattggtcttgattttgttggctgggaggataaaggccttgccttgcagccattcgctgatgactttacaagtgccacaagagatggttcaaaacttttccttcatgccggcgagaccaaccaacttggttcgaccgatcagaatttagtggatgccttgttactgaacactacacgcattggtcacggttacgctttggcaaaacatccatatctgatgagggacgtaaaagagaaagacattgcagttgaactttgcccagtgtcgaatcaagtaaacagtttcgttgaagatctaagaaatcatcccggtgccatattaatgtcggaaaacgtaccagtagttttaggcaatgattcgcccggtttcatggatttcgatggcttaaatcctgattattattacgctattatgagtttgactccttaccaagccggcctgaagactcttaaacgattagttgagaataccataaaatatgcccagctaaacagtcaagagaagacacaagctgaaaccctattaaaggcaaaatggaatgaattcatcaaggaaatcttgaaagaaggagaataa

SEQ ID NO: 5965 - protein, 494 aa, Glossina morsitans morsitans
MNILILSALSIILAFLPPSLAEVNKAYQDERNKILQEEEKLRLGYDVILQGDEEKADQIFLRLKQKELQDGFENVEKNLPGMHYYKAKPLLDESKVYQLIRKMPKGALLNVHPPGAVTSKWILNNILNKDNLRKCTNENGVQLLTFRKKFDGCKSESVQVSKGEAKEDWFNLYTPTPEVTFKSSEAAFNQLCDMFDRIDDALNYLPMLKDHYRQFLEELYADKVLYTEVRVKFSEPYDDTSKKYSLDDVVKEIENVVNDFKKTHPDFIGLKIIFAILRHGKEDEIRKNFDLYKNLRSKFPNTIIGLDFVGWEDKGLALQPFADDFTSATRDGSKLFLHAGETNQLGSTDQNLVDALLLNTTRIGHGYALAKHPYLMRDVKEKDIAVELCPVSNQVNSFVEDLRNHPGAILMSENVPVVLGNDSPGFMDFDGLNPDYYYAIMSLTPYQAGLKTLKRLVENTIKYAQLNSQEKTQAETLLKAKWNEFIKEILKEGE

SEQ ID NO: 5966 - DNA, 1402 bp, Bos taurus
  CDS (1)..(1092)
atggcccagacgcccgccttcaacaagcccaaagtagaactgcatgtccacctggatggagccatcaagcccgaaaccatcttatattatggcaggaagaggggcatcgccctccccgccgacacgccagaggagctacagaacatcatcggcatggacaagccacttagcctcccagagttcctggccaagttcgactactacatgcctgccattgcgggctgccgggaggctgtcaaaaggattgcctacgagtttgtggagatgaaggccaaggacggcgtggtgtatgtggaggtgcgctacagcccacacctgctggccaactccaaggtggagccgatcccctggaaccaggctgaaggggacctcaccccggatgaggtggtgtcactggtgaaccagggcctgcaggagggggagcgggacttcggcgtgaaggtgcggtccatcctgtgctgcatgcgccaccagcccagctggtcctctgaggtggtggagctgtgtaagaagtaccgagagcagaccgtggtggccattgacctggctggagatgagaccattgaaggcagcagcctcttccctggacatgtgaaggcctatgcggaggccgtgaagagcggcgtccaccgcacggtccacgccggggaagtgggctcggccaatgtggtgaaagaggccgtggacacactcaagaccgagaggctggggcatggctaccacaccctggaggatgccaccctttacaacaggctgcggcaggaaaacatgcacttcgaggtctgcccctggtccagctacctcaccggcgcctggaagcccgacacggaacacccggttgttcggttcaaaaacgaccaggttaactactcgctcaacacggatgacccgctcatcttcaagtccacgctggacacggattaccagatgaccaagaatgaaatgggcttcaccgaagaggagtttaagagactgaacatcaatgcggccaagtccagtttcctccctgaagatgagaagaaggagcttcttgatctgctctataaggcctacgggatgccctctccggcctctgcagagcagtgtctgtgaaggtgtcgtggctacctctccgagtcctggccctgtggatggagccttcacagccccagggtcaagcgacacgcttacctttactccttccaggaagactgtgatttccagaatcatctaccaatgattgtgaagcccacgtgcctctttccgtacacacatatacctcggcagggccgtggctctcctctgattgtgtgcctgggccaggatcagggcctagggcaggctgaatccaaattcctcctcctctggtgacttgtgctgaaaatctggtgctcaataaagaagccaatggctggggccgtgc

SEQ ID NO: 5967 - protein, 363 aa, Bos taurus
MAQTPAFNKPKVELHVHLDGAIKPETILYYGRKRGIALPADTPEELQNIIGMDKPLSLPEFLAKFDYYMPAIAGCREAVKRIAYEFVEMKAKDGVVYVEVRYSPHLLANSKVEPIPWNQAEGDLTPDEVVSLVNQGLQEGERDFGVKVRSILCCMRHQPSWSSEVVELCKKYREQTVVAIDLAGDETIEGSSLFPGHVKAYAEAVKSGVHRTVHAGEVGSANVVKEAVDTLKTERLGHGYHTLEDATLYNRLRQENMHFEVCPWSSYLTGAWKPDTEHPVVRFKNDQVNYSLNTDDPLIFKSTLDTDYQMTKNEMGFTEEEFKRLNINAAKSSFLPEDEKKELLDLLYKAYGMPSPASAEQCL

SEQ ID NO: 5968 - DNA, 1566 bp, Homo sapiens
  CDS (129)..(1220)
ggcccgttaagaagagcgtggccggccgcggccaccgctggccccagggaaagccgagcggccaccgagccggcagagacccaccgagcggcggcggagggagcagcgccggggcgcacgagggcaccatggcccagacgcccgccttcgacaagcccaaagtagaactgcatgtccacctagacggatccatcaagcctgaaaccatcttatactatggcaggaggagagggatcgccctcccagctaacacagcagaggggctgctgaacgtcattggcatggacaagccgctcacccttccagacttcctggccaagtttgactactacatgcctgctatcgcgggctgccgggaggctatcaaaaggatcgcctatgagtttgtagagatgaaggccaaagagggcgtggtgtatgtggaggtgcggtacagtccgcacctgctggccaactccaaagtggagccaatcccctggaaccaggctgaaggggacctcaccccagacgaggtggtggccctagtgggccagggcctgcaggagggggagcgagacttcggggtcaaggcccggtccatcctgtgctgcatgcgccaccagcccaactggtcccccaaggtggtggagctgtgtaagaagtaccagcagcagaccgtggtagccattgacctggctggagatgagaccatcccaggaagcagcctcttgcctggacatgtccaggcctaccaggaggctgtgaagagcggcattcaccgtactgtccacgccggggaggtgggctcggccgaagtagtaaaagaggctgtggacatactcaagacagagcggctgggacacggctaccacaccctggaagaccaggccctttataacaggctgcggcaggaaaacatgcacttcgagatctgcccctggtccagctacctcactggtgcctggaagccggacacggagcatgcagtcattcggctcaaaaatgaccaggctaactactcgctcaacacagatgacccgctcatcttcaagtccaccctggacactgattaccagatgaccaaacgggacatgggctttactgaagaggagtttaaaaggctgaacatcaatgcggccaaatctagtttcctcccagaagatgaaaagagggagcttctcgacctgctctataaagcctatgggatgccaccttcagcctctgcagggcagaacctctgaagacgccactcctccaagccttcaccctgtggagtcaccccaactctgtggggctgagcaacatttttacatttattccttccaagaagaccatgatctcaatagtcagttactgatgctcctgaaccctatgtgtccatttctgcacacacgtatacctcggcatggccgcgtcacttctctgattatgtgccctggccagggaccagcgcccttgcacatgggcatggttgaatctgaaaccctccttctgtggcaacttgtactgaaaatctggtgctcaataaagaagcccatggctggtggcatgcaaaaaaaaaaaaaaaaaaaaaaaaaaaaaaaaaaa

SEQ ID NO: 5969 - protein, 363 aa, Homo sapiens; identical to SEQ ID NO: 5825

SEQ ID NO: 5970 - DNA, 1627 bp, Mus musculus
  CDS (88)..(1146)
ggagagccatcgggaagcgaccctgccagcgagccaacgcagacccagagagcttcggcggagagaaccgggaacacgctcggaaccatggcccagacacccgcattcaacaaacccaaagtagagttacacgtccacctggatggagccatcaagccagaaaccatcttatactttggcaagaagagaggcatcgccctcccggcagatacagtggaggagctgcgcaacattatcggcatggacaagcccctctcgctcccaggcttcctggccaagtttgactactacatgcctgtgattgcgggctgcagagaggccatcaagaggatcgcctacgagtttgtggagatgaaggcaaaggagggcgtggtctatgtggaagtgcgctatagcccacacctgctggccaattccaaggtggacccaatgccctggaaccagactgaaggggacgtcacccctgatgacgttgtggatcttgtgaaccagggcctgcaggagggagagcaagcatttggcatcaaggtccggtccattctgtgctgcatgcgccaccagcccagctggtcccttgaggtgttggagctgtgtaagaagtacaatcagaagaccgtggtggctatggacttggctggggatgagaccattgaaggaagtagcctcttcccaggccacgtggaagcctatgagggcgcagtaaagaatggcattcatcggaccgtccacgctggcgaggtgggctctcctgaggttgtgcgtgaggctgtggacatcctcaagacagagagggtgggacatggttatcacaccatcgaggatgaagctctctacaacagactactgaaagaaaacatgcactttgaggtctgcccctggtccagctacctcacaggcgcctgggatcccaaaacgacgcatgcggttgttcgcttcaagaatgataaggccaactactcactcaacacagacgaccccctcatcttcaagtccaccctagacactgactaccagatgaccaagaaagacatgggcttcactgaggaggagttcaagcgactgaacatcaacgcagcgaagtcaagcttcctcccagaggaagagaagaaggaacttctggaacggctctacagagaataccaatagccaccacagactgacgggcgggtcccctgaagatggcaaggccacttctctgagcctcatcctgtggataaagtctttacaactctgacatattgaccttcattccttccagaccttggagaggccaggtctgtcctctgattggatatcctggctaggtcccaggggacttgacaatcatgcacatgaattgaaaaccttccttctaaagctaaaattatggtgttcaataaagcagctggtgactggtatcttgcagcacatggtgaatatggtctcggggctgctggctaggatgctaagaaaggaggagccctgggccctacgctgagtgtcaggctggggagccagggtctctttcctgcagaagcgattctttcccagaggggctgttggagcagatgctcctgaactctccgcccctttaaccagtcctttggatttatttttattatttttaaatatttaattatgtttatgt

SEQ ID NO: 5971 - protein, 352 aa, Mus musculus; identical to SEQ ID NO: 5833

SEQ ID NO: 5972 - DNA, 1417 bp, Rattus norvegicus
  CDS (77)..(1135)
ggaagtgaccctgccaccgagccaacgcggacccagagagcttcagcggagggagtcggagcgcacgctcagcaccatggcccagacgcccgcattcaacaagcccaaagtagagctgcacgtccacctggatggagccatcaagccagaaaccatcttgtactatggcaagaagagaggaatcgacctcccggcagatacagtggagggactacgcaacattatcggcatggacaagcctctctcgctcccagacttcctggccaagttcgattactacatgcctgccatcgcgggctgcagggaggccatcaagagaatcgcctatgaatttgtggagatgaaggcaaaggaaggcgtggtgtacgtggaagttcgctacagcccacacctgctggccaactccaaagtggacccaatcccctggaaccaggccgaaggagacctcacccctgatgaggttgtggatcttgtaaaccagggcctgcaggagggagagcaagcattcggcatcaaggtccggtccatcttgtgctgcatgcgccaccagcccagctggtcccctgaggtgttggagctgtgtaagaagtaccatcagaagaccgtggtggctatggacttggctggggatgagaccattgaaggaagcagccttttcccgggccacgtggaagcctacgagggtgcagtgaaggatggcattcaccggactgtccatgctggagaggtgggctctgctgaggtggtgcgagaggctgtggacatactcaagacagagagagtggggcacggctaccacacaatagaggatgaagccctctacaacaggctactgaaagaaaacatgcactttgaggtctgcccctggtccagctacctcactggcgcctggaatcccaaaacgacgcatgcagttgttcgcttcaaagatgatcaggccaactactccctcaactcggacgaccccctcatcttcaagtccaccgtggacactgactaccagatggtgaaaaaagacatgggcttcactgaagaggagttcaagagactgaacatcaatgcggcgaagtcaagcttcctcccagaggacgagaagaaggaacttctggaacggctctacaaggaataccaatagccaccacaggctgatgggcaggccccctgaagatggcaaggccgcttctccgagcctcatcctgtgaatggagtctttacaactctgacatactgaccttccttccttccttccttcaagaccttgaagtggccaggtctgtcctctgattggatgtcttggctaggcccagggaccttgacaatcatgggcatgaatgtgaaaccttcctttctaaagctaaaaatacggtgttcaataaagcagctggtgactgggaaaaaaaaaaaaaaaaaaaaaaaa

SEQ ID NO: 5973 - protein, 352 aa, Rattus norvegicus; identical to SEQ ID NO: 5837

SEQ ID NO: 5974 - DNA, 1164 bp, Streptomyces coelicolor
  CDS (1)..(1164): transl_table=11
gtgagaccggcctacgatgatccccgaacgaccgatcagccgatcacccgtgcccgaccgccgccccgcgcggcccgcgggcgccgccttggggaggaacccttgaccgagcacctcgtcgaccccgacgtcccgcgcgacctgcacgccttcatcgccggactgccgaaggccgaactgcacgtccaccacgtcggctccgcctccccgcgcatcgtctccgaactggccgcgcgccacgccgactccaaggtccccaccgaccccgaggccctggtcgactacttcacgttcacggacttcgcgcacttcatcgacgtgtacctgtccgtggtcgacctgatccgcaccccggaggacgtccggctgctgacctacgaggtggcccgggacatggcccggcagcaggtgcggtacgccgagctgaccatcacgccgttctcctccacccggcgcggcatcgacgagggcgccttcatggacgcgatcgaggacgcccgcaaggcggccgaggcggaattcgggaccgtgctgcgctggtgcttcgacatcccgggcgaggccggcctggagtccgccgaggagacggcccggctcgccaccgacgaccggctgcgcccggagggcctggtctccttcgggctcggcggacccgagatcggggtggcccgcccgcagttcaagccgtacttcgaccgcgcgatcgccgcgggactgcactcggtgccgcacgccggcgagacgaccggcccgcagaccgtgtgggaggccctcatcgacctgcgcgccgaacgcatcgggcacggcaccagctccgcccaggacccgaagctcctcgcccacctcgccgagcgccgcatcccgctggaggtgtgcccgacctcgaacatcgccacccgcgcggtgcgcaccctggacgagcacccgatcaaggagttcgtgcgcgccggcgtcccggtgacgatcaactccgacgacccgccgatgttcggcaccgacctcaacaacgagtacgccgtcgccgcccgcctcctcggcctcgacgagcgcggcctcgccgacctcgcgaagaacggggtcgaggcctccttcctcgacgcgccgggcaaggcccgcatcgccgacgagatcgacacgtacaccgccgcctggctcgcctcctga

SEQ ID NO: 5975 - protein, 387 aa, Streptomyces coelicolor
MRPAYDDPRTTDQPITRARPPPRAARGRRLGEEPLTEHLVDPDVPRDLHAFIAGLPKAELHVHHVGSASPRIVSELAARHADSKVPTDPEALVDYFTFTDFAHFIDVYLSVVDLIRTPEDVRLLTYEVARDMARQQVRYAELTITPFSSTRRGIDEGAFMDAIEDARKAAEAEFGTVLRWCFDIPGEAGLESAEETARLATDDRLRPEGLVSFGLGGPEIGVARPQFKPYFDRAIAAGLHSVPHAGETTGPQTVWEALIDLRAERIGHGTSSAQDPKLLAHLAERRIPLEVCPTSNIATRAVRTLDEHPIKEFVRAGVPVTINSDDPPMFGTDLNNEYAVAARLLGLDERGLADLAKNGVEASFLDAPGKARIADEIDTYTAAWLAS

SEQ ID NO: 5976 - DNA, 1005 bp, Vibrio parahaemolyticus
  CDS (1)..(1005): transl_table=11
atgataactaagaatcttcctctaactgatttgcaccgccaccttgacggtaacattcgtactaagactatccttgagcttggccaaaaatttggcattgctctgccagcgtacgatattgagtctctcactccacacgttcaaattgtcgaagcggaaccatctcttgttgctttcctttccaagcttgactggggcgtagcagtactgggcgatcttgacgcttgtcgtcgcgttgcttatgaaaacgttgaagatgcgctaaacgcacaaattgattacgccgaactgcgtttctcaccatactacatggcaatgaaacacaaactgccagtcgctggcgtggttgaagcggttgtcgatggcgtacaagcaggcatgcgagactttggcatcaaagcgaaccttatcggtatcatgagccgtacatttggcacagatgcatgtcagcaagaactggatgccattctaagccagaaagaccacatcgtagcagtagaccttgcaggtgatgagcttggccaaccgggcgagcgctttgtctctcacttcaaacaagtgcgtgatgcaggcctaaacgtgacagttcacgctggtgaagcggcgggcgctgaaagcatgtggcaagccattcaagagctaggtgcaacgcgtatcggccacggtgtgaaagcgattcacgatccaaaactgatggattacctagcggaaaaccgtatcggtatcgaatcgtgcctaacgtcgaacttccaaaccagtacggtcgattctctagcaaatcacccactgaaacagttcctagaccacggcgttctagcgtgtctaaatacggatgatcctgcggtagaaggtattgagttaccttacgaatacgaagtggcggcgccagcagccggcctgagccaagagcagattcgccaagcgcaaatcaatggccttgagcttgctttcatttctgatgcagaaaaagcagaactgaaagaaaaagttaaagatcgcgtttaa

SEQ ID NO: 5977 - protein, 334 aa, Vibrio parahaemolyticus
MITKNLPLTDLHRHLDGNIRTKTILELGQKFGIALPAYDIESLTPHVQIVEAEPSLVAFLSKLDWGVAVLGDLDACRRVAYENVEDALNAQIDYAELRFSPYYMAMKHKLPVAGVVEAVVDGVQAGMRDFGIKANLIGIMSRTFGTDACQQELDAILSQKDHIVAVDLAGDELGQPGERFVSHFKQVRDAGLNVTVHAGEAAGAESMWQAIQELGATRIGHGVKAIHDPKLMDYLAENRIGIESCLTSNFQTSTVDSLANHPLKQFLDHGVLACLNTDDPAVEGIELPYEYEVAAPAAGLSQEQIRQAQINGLELAFISDAEKAELKEKVKDRV

SEQ ID NO: 5978 - DNA, 1080 bp, Streptomyces coelicolor
  CDS (1)..(1080): transl_table=11
atgtcatctacgcgcatagacaccgagaccctccgccgcctccccaaggcggtcctgcacgaccacctcgacggcggcctgcgtcccgccaccgtcgtcgagctggcgcggagcgtcggccacaccctgcccaccaccgaccccgacgagctggccgcctggtactacgaggccgccaactccggcgacctggtgcgctacatcgccaccttcgagcacaccctcgccgtgatgcagaaccgcgaggggctgctgcgcgccgccgaggagtacgtcctggacctcgccgccgacggcgtcgtctacggcgaggtccgctacgcccccgagctgaacaccaggggcggactgtcgatgagggaggtcgtggagaccgtccaggagggtctcgccaccggcatggccaaggcggccgccgccgggacgccggtccgggtcggcaccctgctctgcggcatgcggatgttcgaccgggtccgcgaggccgccgacctcgccgtcgccttccgggacgcaggggtcgtcggcttcgacatcgccggggccgaggacggcttcccgcccgccgaccacctcgacgccttcgagcacctgcgtcgcgagaacgtgcccttcaccatccacgccggggaggcgcacgggctgcccagcatccaccaggccctccaggtgtgcggcgcccagcgcatcggccacggcgtgcgcatcaccgacgacatcccggacctcgcggcgggcaagctcggccggctcgccgcctgggtgcgcgaccggcgcatcgccctggagatgtgcccgacctccaacctccagaccggtgccgcgacctcgatcgccgagcacccgatcaccgcgctcaaggacctcggcttccgcgtcaccctcaacaccgacaaccgcctcgtgtccggcacgacgatgacccgcgagatgtccctgctggtcgagcaggcgggctggagcgtcgaggacctgcgcacggtcacggtgaacgccctgaagagcgccttcgtccccttcgacgagcgcaccgccctcatcgaggacgtggtcctgccggcctacgcctccgtgctctga

SEQ ID NO: 5979 - protein, 359 aa, Streptomyces coelicolor
MSSTRIDTETLRRLPKAVLHDHLDGGLRPATVVELARSVGHTLPTTDPDELAAWYYEAANSGDLVRYIATFEHTLAVMQNREGLLRAAEEYVLDLAADGVVYGEVRYAPELNTRGGLSMREVVETVQEGLATGMAKAAAAGTPVRVGTLLCGMRMFDRVREAADLAVAFRDAGVVGFDIAGAEDGFPPADHLDAFEHLRRENVPFTIHAGEAHGLPSIHQALQVCGAQRIGHGVRITDDIPDLAAGKLGRLAAWVRDRRIALEMCPTSNLQTGAATSIAEHPITALKDLGFRVTLNTDNRLVSGTTMTREMSLLVEQAGWSVEDLRTVTVNALKSAFVPFDERTALIEDVVLPAYASVL

SEQ ID NO: 5980 - DNA, 1014 bp, Vibrio parahaemolyticus
  CDS (1)..(1014): transl_table=11
atgaacgcatttattcaaggtcttccaaaagtagagctgcacttacatatcgaaggttcactcgaaccagaactcatgtttaaacttgccaagcgcaatggcatagatattccttattcgtcaccaagcgaattgagagaggcataccaatttgaagatctgcaatcttttctcgacctctattatcaaggcgcaaatgttttacgcacagagcaagatttttatgacctaacatgggaatacttggagcattgcaaagcagacaatgtgattcataccgagatattcttcgacccgcaaactcacactgaacgtggcattgacttcgacaccgtactcaacggcatttctagagcgctgacagatggccgcgaaaaattaggcatcacatcgcagatcatcgcttgtttccttcgtcatttgtcagaagaaagcgcgatggaaacactgcaatctgttttaaagcatcgcgataaaatcattggtgtggggctagattcatcagaaaaaggccatccaccagctaagtttttacgtgtcttccagcaagcgaaagaggcaggcttgcttaccgtggcacatgccggagaagaaggaccagcgcaaaatattaccgacgcgattgaaatgttggaagtgagccgcgttgatcacggcgttcgctgcgtagaagatgaagctctagtgggatctctaattgaaaccaaaatgccactgaccgtttgcccgctgtctaacatcaaactttgcgtgtttgatgaaatgggacaacacaacatcgtagaacttctgcgtaaaggcgtggcggtaaccattaactctgatgaccccgtttactttggtggctacatgaccgataacttccttgcagtgaatcaagcacatcccatgatcaaagaagaactggcgaaattcacgctcaacgctatcgatgcaagcttcatcgacaacgagttgaaggctcaatatcgtcataaagtcgaacaatatgttgcacaacattcatcgatgtaa

SEQ ID NO: 5981 - protein, 337 aa, Vibrio parahaemolyticus
MNAFIQGLPKVELHLHIEGSLEPELMFKLAKRNGIDIPYSSPSELREAYQFEDLQSFLDLYYQGANVLRTEQDFYDLTWEYLEHCKADNVIHTEIFFDPQTHTERGIDFDTVLNGISRALTDGREKLGITSQIIACFLRHLSEESAMETLQSVLKHRDKIIGVGLDSSEKGHPPAKFLRVFQQAKEAGLLTVAHAGEEGPAQNITDAIEMLEVSRVDHGVRCVEDEALVGSLIETKMPLTVCPLSNIKLCVFDEMGQHNIVELLRKGVAVTINSDDPVYFGGYMTDNFLAVNQAHPMIKEELAKFTLNAIDASFIDNELKAQYRHKVEQYVAQHSSM

SEQ ID NO: 5982 - DNA, 1023 bp, Streptomyces coelicolor
  CDS (1)..(1023): transl_table=11
gtgaaacggccgtacgatgctctgatgcccctgcccaaagctgaactgcacctccacatcgaaggcaccctggaaccggagctggccttcgcgctggccgcccgcaacggcgtgtccctgccgtacgcggacgaggacgccctgcgcgaggcgtaccgcttcgccgacctccagtccttcctgaacctgtactacgaactgatggccgtcctgcgcaccgagcgggacttcgaggacctcgccgacgcctacctcgcccgcgccgccgcccagggcgtccggcacgccgagatcttcttcgacccgcaggcccacctcgcccggggcgtggagatgggcacggtcgtagaagggctgtggcgggcactgggcgccagccgtgagaaccacggcgtctccacccggctgatcctctgcttcctgcgcgacgagtccgccgagtcggcgatgcggacgctggacgcggcggggccctacctcgaccgcatcaccggcgtaggcctcgactccgccgaggtcggccacccgccggtcaagttccgcgaggtgtacgaggccgccgccgccctcggcctgcgccgggtcgcgcacgccggcgaggagggcccgcccgcgtacgtcgtcgaggccctggacgtcctcggcgtggagcggatcgaccacgggctgcgctcggtggaggacccggcgctggtcgagcggctggtgcgcgagcgcgtcccgctcactctgtgcccgctgtccaacgtgcgtctgcgcacggtcgacaccctcgccgaccacccgctgcccgcgatgctcgacgcgggcctgatgtgcacggtgaactccgacgacccggcctacttcggcggctacgcgggcgacaacttcgacgccgtgcgccaggccctcggcctgaccggggagcggctgcgggagctggcccgcaactccttcctcgcctccttcctggaggacgacgaggaactgcgggcgcggtacctcgcggaggtcgaggcgtaccggttccccgccgcgtag

SEQ ID NO: 5983 - protein, 340 aa, Streptomyces coelicolor
MKRPYDALMPLPKAELHLHIEGTLEPELAFALAARNGVSLPYADEDALREAYRFADLQSFLNLYYELMAVLRTERDFEDLADAYLARAAAQGVRHAEIFFDPQAHLARGVEMGTVVEGLWRALGASRENHGVSTRLILCFLRDESAESAMRTLDAAGPYLDRITGVGLDSAEVGHPPVKFREVYEAAAALGLRRVAHAGEEGPPAYVVEALDVLGVERIDHGLRSVEDPALVERLVRERVPLTLCPLSNVRLRTVDTLADHPLPAMLDAGLMCTVNSDDPAYFGGYAGDNFDAVRQALGLTGERLRELARNSFLASFLEDDEELRARYLAEVEAYRFPAA

SEQ ID NO: 5984 - DNA, 1032 bp, Streptomyces coelicolor
  CDS (1)..(1032): transl_table=11
atggagcgtgtacgtgatgtctctgaactgcccaaggcccatctccacctgcacttcaccgggtcgatgcggcccaccaccctgctggagctggccgacaagcacggggtgcggctgcccgagacgctgaccgaggccctgggccgcggggagtcgccgaagctgcgggcgacggacgagcggggctggttccgcttccaacggctgtacgacgcggcgcggtcgtgcctgcagacgccggaggacatccagcggctggtgcgggaggccgcggaggaggacctgcgggacgggtcagggtggctggagatccaggtcgatccgacgtcgtacgcgcctcggctgggcgggctgattccggcgctggagatcatcctggacgcggtggagacgaccgtgcgggacaccgggatcgggatgcgggtgctggtcgccgcgaaccggatgaagcatccgctggacgcgcggacgctggcgcggctggcggtgcggtacgcggagcggggcgtggtcgggttcgggctgtcgaacgacgaacggcgcgggatggcgcgggacttcgaccgggcgttcgcgatcgcgcgggacggggggctgctgagcgcgccgcacgggggtgagctgaccggtccggcgtcggtgcgggactgcctggacgacctggaggcggaccggatcgggcacggcgtgcgggcggcggaggatccccggctgctgaagcggctggcggaccggcaggtgacgtgcgaggtgtgcccggcgtcgaacgtcgcgctgggcgtgtacgagaagccggaggacgtgccgctgcggaggctgttcgaggcgggggtgccgatggcgctgggcgcggacgatccgctgctgttcgggtcgcggctggccgcccagtacgagatcgcgcgcgagcaccacgggttcacggacgcggagctggcggagctggcgcgtcagtcggtgcgggggtcggcggcgccggaggaggtgaaggggaagctgttggcgggggtggacgactggcttgtggcgtag

SEQ ID NO: 5985 - protein, 343 aa, Streptomyces coelicolor
MERVRDVSELPKAHLHLHFTGSMRPTTLLELADKHGVRLPETLTEALGRGESPKLRATDERGWFRFQRLYDAARSCLQTPEDIQRLVREAAEEDLRDGSGWLEIQVDPTSYAPRLGGLIPALEIILDAVETTVRDTGIGMRVLVAANRMKHPLDARTLARLAVRYAERGVVGFGLSNDERRGMARDFDRAFAIARDGGLLSAPHGGELTGPASVRDCLDDLEADRIGHGVRAAEDPRLLKRLADRQVTCEVCPASNVALGVYEKPEDVPLRRLFEAGVPMALGADDPLLFGSRLAAQYEIAREHHGFTDAELAELARQSVRGSAAPEEVKGKLLAGVDDWLVA

SEQ ID NO: 5986 - DNA, 1191 bp, Streptomyces coelicolor
  CDS (1)..(1191): transl_table=11
atgacgagccgaagcaccgagaagagcgccgcggcgaaccccgcggcggtctcgaagacaccgtcgccggaccggatccgccgggcaccgaaggtattgctgcacgaccacctcgacggcggtctgcggccgggcacgatcgtggaactcgcccgcgagacgggctacggggaccttcccgaaaccgacgccgacctgctcggcacctggttccggcaggccgccgactccgggtccctggagcggtacctggagaccttctcccacaccgtcggcgtcatgcagacccgcgacgccctggtccgggtcgccgccgagtgcgccgaggacctcgccgaggacggcgtcgtctacgccgaggtgcggtacgcgcccgagcagcacctggagaaggggctgaccctcgaagaggtcgtcgaggccgtcaacgagggattccgggagggcgaacgtcgcgcccgggacaacggccaccgcatccgggtcggcgccctgctcaccgccatgcggcacgccgcccgctccctggagatcgccgaactcgccaaccggtaccgcgatctcggcgtggtcggcttcgacatcgcgggcgccgaggccggctacccgcccacccggcacctggacgccttcgagtacctgaagcgggagaacaaccacttcaccatccacgcgggcgaggccttcgggctgccgtccatctggcaggcgctgcaatggtgcggcgccgaccggctcgggcacggggtgcgcatcatcgacgacatccaggtccacgaggacggctcggtcaagctcgggcggctcgcctcctacgtccgcgacaagcggatcccgctggagctgtgccccagctccaacctccagaccggcgccgccgactcctacgccgagcaccccatcgggctgctgcgccggctgcacttccgggccaccgtcaacaccgacaaccggctgatgtcccacaccagcatgagccgggaattcgagcacctggtcgaggcattcggctacacgctcgacgacatgcagtggttctccgtcaatgcgatgaaatcagcgttcattcctttcgatgaacgactggccatgatcaatgacgtcatcaagcccggatatgccgagctgaaatccgaatggctgttccagcagacggcttcgaccagcggttcttcggaatccgacggctga

SEQ ID NO: 5987 - protein, 396 aa, Streptomyces coelicolor
MTSRSTEKSAAANPAAVSKTPSPDRIRRAPKVLLHDHLDGGLRPGTIVELARETGYGDLPETDADLLGTWFRQAADSGSLERYLETFSHTVGVMQTRDALVRVAAECAEDLAEDGVVYAEVRYAPEQHLEKGLTLEEVVEAVNEGFREGERRARDNGHRIRVGALLTAMRHAARSLEIAELANRYRDLGVVGFDIAGAEAGYPPTRHLDAFEYLKRENNHFTIHAGEAFGLPSIWQALQWCGADRLGHGVRIIDDIQVHEDGSVKLGRLASYVRDKRIPLELCPSSNLQTGAADSYAEHPIGLLRRLHFRATVNTDNRLMSHTSMSREFEHLVEAFGYTLDDMQWFSVNAMKSAFIPFDERLAMINDVIKPGYAELKSEWLFQQTASTSGSSESDG

SEQ ID NO: 5988 - DNA, 954 bp, Bordetella bronchiseptica
  CDS (1)..(954): transl_table=11
atgtacgactggctcaatgccctgcccaaagccgaactgcacctgcacctggaaggcacgctggaacccggactgatgttcgaactggcccggcgcaatggcgtggcgctgccgtggccggacgtcgaatcgctgcggcgggcgtacgactacgacaacctgcaggaattcctcgacctgtactaccgcggcgccgaggtgttgcgcaccgaacaggatttctacgacctgacctgggcctacctgctcaagtgccgcgagcagaacgtggtgcacaccgagccgttcttcgacccgcagacgcacaccgatcgcggcatcgcgttcgagacggtcctggccggcattacccaggcgctggaagacggccgtacgcagctgggcatccagggcggcctgatcctcagcttcctgcgccacctgcccgaagaggcggccatgcgcacgctggagcaggcgctgccgtatcgcgacgccttcatcgcggtggggctggacagcagcgagcgcggctttccgccgcggctgttccagcgggtgttcgagcgcgcgcgcgccgcagggctgcccgcggtggcgcatgccggcgaggaagggccgcccgaatacatctgggaagcgctcgacctgctgcaagtgcggcgcatcgatcatggcgtgcgcgcggccgaggacgagcggctgatcgaacggctgatcgatacccagataccgctgacggtgtgtccgctgtcgaacacgcggctgcgcgtgttcgacagcatggccgagcacaacatcctcgaactgctcgagcgcggcgtcaaagtcacggtgaactcggacgacccggcgtatttcggcggctacatcaccgagaacttccatgccctgcatgaacacctgggcatgacgcaggaccaggcgcgccggctggcggccaacagcatggacgcgcgcctggcgggcggttag

SEQ ID NO: 5989 - protein, 317 aa, Bordetella bronchiseptica
MYDWLNALPKAELHLHLEGTLEPGLMFELARRNGVALPWPDVESLRRAYDYDNLQEFLDLYYRGAEVLRTEQDFYDLTWAYLLKCREQNVVHTEPFFDPQTHTDRGIAFETVLAGITQALEDGRTQLGIQGGLILSFLRHLPEEAAMRTLEQALPYRDAFIAVGLDSSERGFPPRLFQRVFERARAAGLPAVAHAGEEGPPEYIWEALDLLQVRRIDHGVRAAEDERLIERLIDTQIPLTVCPLSNTRLRVFDSMAEHNILELLERGVKVTVNSDDPAYFGGYITENFHALHEHLGMTQDQARRLAANSMDARLAGG

SEQ ID NO: 5990 - DNA, 1035 bp, Caulobacter crescentus
  CDS (1)..(1035): transl_table=11
atgaccgacgcttccttcgccccatccgcctccgccgagtttgtcaggggcctgcccaaggccgagctgcacatgcatatcgagggcagcctcgaacctgagctgatgttcgagctcgcccagcgcaacgggatcaccctgcccttcgcctcggtcgaagagatccgcgcggcctacgacttctcgaacctgcaggacttcctggacatctattaccagggcgcgggcgtgctgatcaccgaagccgacttcaaggacctggcgctcgcctacttccagcgcctggcggccgatggcggcgcccacgccgagatcttctttgatccgcagacccataccgatcgcgggatcgccttcgacacggtgatgaacggcctactggccggcatggacgaggccgagaagacgctgggcgtcacctccaagctgatcctgtgcttcctgcgccacctctccgaagaggccgcgttcgagacgctggaacaggccaagccatggctcgccaagctggcgggcgtgggcctggacagctccgaggtgggccacccgccggccaagttcgcccgcgttcttcaggcctcgcgggatctgggcctgaaggtcgtcgcccacgccggtgaggaaggcccgccggcctatgtctgggaggccatcgacctcgtaaaggtcgaccgcatcgaccacggcaaccgggcgctggaggacgaggccctgaccgcgcgcctcgtcaaggacgggatcaccctgacggtctgcccgctgtcgaacctgaagctttgcggcgtgcccagcctggacgttcacccgctcaagcggatgctggacctgggcctgaaggcgaccgtcaactccgacgacccggcctatttcggcggctatctgctggagaactacctggccaccgccgacgccgtgggcctgacccgcgatgacatcgtcaccctggccaagaacagcttcgccggctcgttcctgaccgacgccgagaaggcccagcggatcgcggcggtcgaggcctacgcggccgctcactga

SEQ ID NO: 5991 - protein, 344 aa, Caulobacter crescentus
MTDASFAPSASAEFVRGLPKAELHMHIEGSLEPELMFELAQRNGITLPFASVEEIRAAYDFSNLQDFLDIYYQGAGVLITEADFKDLALAYFQRLAADGGAHAEIFFDPQTHTDRGIAFDTVMNGLLAGMDEAEKTLGVTSKLILCFLRHLSEEAAFETLEQAKPWLAKLAGVGLDSSEVGHPPAKFARVLQASRDLGLKVVAHAGEEGPPAYVWEAIDLVKVDRIDHGNRALEDEALTARLVKDGITLTVCPLSNLKLCGVPSLDVHPLKRMLDLGLKATVNSDDPAYFGGYLLENYLATADAVGLTRDDIVTLAKNSFAGSFLTDAEKAQRIAAVEAYAAAH

SEQ ID NO: 5992 - DNA, 1005 bp, Clostridium acetobutylicum
  CDS (1)..(1005): transl_table=11
atgaatataaaagaacaaattataaatttacctaaggttgaacttcactgtcacttggatggaagtttaagaccagaaactgtactcgacttgtgtttaaaagaaaacataaatataccatacgaaaatcctgaagattttaagtcctctttaaaaatttctaagaactgtagctctttaaaggaatatttagaaaaattctattttccaattagggtaatgcaaaaaaaagaaaatatatatagagttactatggaacttcttgaggattcaaaaaaagatggtattgaatataccgaaataagatttgcaccttttcagcacacggaacaagatttaaatgaaaatgatgttgtagaagcagctctagaagcattacaagatggcgaaagtaaactgggtatacactcaaatctaattctttgctctcttaggcatgatcctgtagaacgttcaatagatcttgttaatcttgctaacagctataatgagggtgtttgtgctgtggatttggctggaaacgaaagtgattttccaccagaactacataaggaagctttcgacttagcatatgataacggtattaaaataactatacatgctggagaaaccggaatagctgaaaacatattaaaatctataaaacttctccatgcagatagaataggtcatggaatttttgcctataaaagtgaagaaattttgcaatatgttatcgaaaatcaagttccactggaaatgtgtcctaaaagcaatgtagatactaaagcagtaaaaaattataaaaatcatccttttaaaaagtattttgatttaggagttaaagtaacattaaatacagataacagaaccgtatcaaacgtttcgctagttgatgaatatttaaatttagcaaatatttttgatttcgggattgaagaaattaaaaccgttataagaaatggcataagtgcatcttttgccactgaagagtttaaagttaaccttttaaaaaaattagattaa

SEQ ID NO: 5993 - protein, 334 aa, Clostridium acetobutylicum
MNIKEQIINLPKVELHCHLDGSLRPETVLDLCLKENINIPYENPEDFKSSLKISKNCSSLKEYLEKFYFPIRVMQKKENIYRVTMELLEDSKKDGIEYTEIRFAPFQHTEQDLNENDVVEAALEALQDGESKLGIHSNLILCSLRHDPVERSIDLVNLANSYNEGVCAVDLAGNESDFPPELHKEAFDLAYDNGIKITIHAGETGIAENILKSIKLLHADRIGHGIFAYKSEEILQYVIENQVPLEMCPKSNVDTKAVKNYKNHPFKKYFDLGVKVTLNTDNRTVSNVSLVDEYLNLANIFDFGIEEIKTVIRNGISASFATEEFKVNLLKKLD

SEQ ID NO: 5994 - DNA, 999 bp, Clostridium perfringens
  CDS (1)..(999): transl_table=11
atgaacttattaaatttaccaaagatagaattacattgtcatctagatggatccttaagagtggagactgctattgaattagctaaaaaagaaggagttaagctagatagctatgaatatgataaggtaaaagaattactagttattcctaaagaatgcaattcattagaagattatttaaatagatttgctcttccagtaaaactgttacaaagagctgagaacttagaaagagttgcctttgaacttatggaagatgcaagcaaggaaaatgtgaagtacatagaaataagatttgctccattattgcatttagaaaaggggatgactcaaaaagaagtaatagagagtgtaataaagggaatacgaaaagctgaagagctttatgacataaaaggtaatttaatattatcttgtttaagacatcattctatagatagtgtatatgaggtaattgaagaggggaaaaacttcataggaaaaggtgttgttgccatagacttagctggtggtgaattagaaggttttgttaaaccttatgaagaagtaatgaaattagcaagagaatcaggttttagagttacaatacacgctggtgaaactgggtatggtaaaaatgttagagatgccatagagcttctaggtgcagagagaataggtcatggattatttatatttaatgatgaagaggcttataatttagtaaaagaaaaaggcgtaacattagaaatgtgccctaagagtaatatagacacaaagggtgtgaataaatatgaggatcatcctatttataaatatcataaagataatataagagttaatttaagtacagataacagaacagtttctaatataaatcttactgaagaatttgaaaatgtacataagacatttaatatagattttgaagattataaaaagatttatttaaatagtgtggaagcttccttctgttcagaagagttaaaggaaaaattaaaattatccataattatataa

SEQ ID NO: 5995 - protein, 332 aa, Clostridium perfringens
MNLLNLPKIELHCHLDGSLRVETAIELAKKEGVKLDSYEYDKVKELLVIPKECNSLEDYLNRFALPVKLLQRAENLERVAFELMEDASKENVKYIEIRFAPLLHLEKGMTQKEVIESVIKGIRKAEELYDIKGNLILSCLRHHSIDSVYEVIEEGKNFIGKGVVAIDLAGGELEGFVKPYEEVMKLARESGFRVTIHAGETGYGKNVRDAIELLGAERIGHGLFIFNDEEAYNLVKEKGVTLEMCPKSNIDTKGVNKYEDHPIYKYHKDNIRVNLSTDNRTVSNINLTEEFENVHKTFNIDFEDYKKIYLNSVEASFCSEELKEKLKLSIII

SEQ ID NO: 5996 - DNA, 1002 bp, Escherichia coli O157
  CDS (1)..(1002): transl_table=11
atgattgataccaccctgccattaactgatatccatcgccaccttgatggcaacattcgtccccagaccattcttgaacttggccgccagtataatatctcgcttcctgcacaatccctggaaacactgattccccacgttcaggtcattgccaacgaacccgatctggtgagctttctgaccaaacttgactggggcgttaaagttctcgcctctcttgatgcttgtcgccgcgtggcatttgaaaacattgaagatgcagcccgtaacggcctgcactatgtcgagctgcgtttttcaccaggctacatggcaatggcacatcagctgcctgttgcaggtgttgttgaagcggtgatcgatggcgtacgtgaaggttgccgcacctttggtgtgcaggcgaagcttatcggcattatgagccgaaccttcggcgaagccgcctgtcagcaagagctggaggcctttttagcccaccgtgaccagattaccgcacttgatttagccggtgatgaacttggtttcccgggaagtctgtttctttctcacttcaaccgcgcgcgtgatgcgggctggcatattaccgtccatgcaggcgaagctgccgggccggaaagcatctggcaggcgattcgtgaactgggggcagagcgcattggacatggcgtaaaagccattgaagatcgggcgctgatggattttctcgccgagcaacaaattggtattgaatcctgtctgacctccaatattcagaccagcaccgtggcagagctggctgcacatccgctgaaaacgttccttgagcatggcattcgtgccagcattaacactgacgatcccggcgtacagggagtggatatcattcacgaatataccgttgccgcgccagctgctgggttatcccgcgagcaaatccgccaggcacagattaatggtctggaaatggctttcctcaacgcagaggaaaaacgcgcactgcgagaaaaagtcgcagcgaagtaa

SEQ ID NO: 5997 - protein, 333 aa, Escherichia coli O157
MIDTTLPLTDIHRHLDGNIRPQTILELGRQYNISLPAQSLETLIPHVQVIANEPDLVSFLTKLDWGVKVLASLDACRRVAFENIEDAARNGLHYVELRFSPGYMAMAHQLPVAGVVEAVIDGVREGCRTFGVQAKLIGIMSRTFGEAACQQELEAFLAHRDQITALDLAGDELGFPGSLFLSHFNRARDAGWHITVHAGEAAGPESIWQAIRELGAERIGHGVKAIEDRALMDFLAEQQIGIESCLTSNIQTSTVAELAAHPLKTFLEHGIRASINTDDPGVQGVDIIHEYTVAAPAAGLSREQIRQAQINGLEMAFLNAEEKRALREKVAAK

SEQ ID NO: 5998 - DNA, 1002 bp, Escherichia coli O6
  CDS (1)..(1002): transl_table=11
atgattgataccaccctgccattaactgatatccatcgccaccttgatggcaacattcgtccccagaccattcttgaacttggccgccagtataatatctcgcttcctgcacaatccctggaaacactgattccccacgttcaggtcattgccaacgaacccgatctggtgagctttctgactaaacttgactggggcgttaaagttctcgcctctcttgatgcctgccgccgcgtggcatttgaaaacattgaagatgcagcccgtaacggcctgcactatgtcgagctgcgtttttcaccaggctacatggcaatggcacatcagctgcctgtagcgggtgttgtcgaagcggtgatcgatggcgtacgtgaaggttgccgcacctttggtgtgcaggcgaagcttatcggtattatgagccggaccttcggcgaagccgcctgtcagcaagagctggaggcctttttagcccaccgtgaccagattaccgcacttgatttagccggtgatgaacttggtttcccgggaagtctgttcctttctcatttcaaccgcgcgcgtgatgcgggctggcatattaccgtccatgcaggcgaagctgccggaccggaaagcatctggcaggcgattcgtgaactgggggcggagcgtattggacatggcgtaaaagccattgaagatcgggcgctgatggattttctcgccgagcaacaaattggtattgaatcctgtctgacctccaatattcagaccagcaccgtggcggatctggctgcacatccgctgaaaacgttccttgagcatggcattcgtgccagcattaacactgacgatccaggcgtgcagggagtggatatcattcacgaatataccgttgccgcgccagctgctgggttatcccgcgagcaaatccgccaggcacagattaatggtctggaaatggctttcctcagcgcagaggaaaaacgcgcactgcgagaaaaagtcgccgcgaagtaa

SEQ ID NO: 5999 - protein, 333 aa, Escherichia coli O6
MIDTTLPLTDIHRHLDGNIRPQTILELGRQYNISLPAQSLETLIPHVQVIANEPDLVSFLTKLDWGVKVLASLDACRRVAFENIEDAARNGLHYVELRFSPGYMAMAHQLPVAGVVEAVIDGVREGCRTFGVQAKLIGIMSRTFGEAACQQELEAFLAHRDQITALDLAGDELGFPGSLFLSHFNRARDAGWHITVHAGEAAGPESIWQAIRELGAERIGHGVKAIEDRALMDFLAEQQIGIESCLTSNIQTSTVADLAAHPLKTFLEHGIRASINTDDPGVQGVDIIHEYTVAAPAAGLSREQIRQAQINGLEMAFLSAEEKRALREKVAAK

SEQ ID NO: 6000 - DNA, 1002 bp, Escherichia coli
  CDS (1)..(1002): transl_table=11
atgattgataccaccctgccattaactgatatccatcgccaccttgatggcaacattcgtccccagaccattcttgaacttggccgccagtataatatctcgcttcctgcacaatccctggaaacactgattccccacgttcaggtcattgccaacgaacccgatctggtgagctttctgaccaaacttgactggggcgttaaagttctcgcctctcttgatgcctgtcgccgcgtggcatttgaaaacattgaagatgcagcccgtcacggcctgcactatgtcgagctgcgtttttcaccaggctacatggcaatggcacatcagctgcctgtagcgggtgttgtcgaagcggtgatcgatggcgtacgtgaaggttgccgcacctttggtgtgcaggcgaagcttatcggcattatgagccggaccttcggcgaagccgcctgtcagcaagagctggaggcctttttagcccaccgtgaccagattaccgcacttgatttagccggtgatgaacttggtttcccgggaagtctgttcctttctcacttcaaccgcgcgcgtgatgcgggctggcatattaccgtccatgcaggcgaagctgccgggccggaaagcatctggcaggcgattcgtgaactgggtgcggagcgtattggacatggcgtaaaagccattgaagatcgggcgctgatggattttctcgccgagcaacaaattggtattgaatcctgtctgacctccaatattcagaccagcaccgtagcagagctggctgcacatccgctgaaaacgttccttgagcatggcattcgtgccagcattaacactgacgatcccggcgtacagggagtggatatcattcacgaatataccgttgccgcgccagctgctgggttatcccgcgagcaaatccgccaggcacagattaatggtctggaaatggctttcctcagcgctgaggaaaaacgcgcactgcgagaaaaagtcgccgcgaagtaa

SEQ ID NO: 6001 - protein, 333 aa, Escherichia coli
MIDTTLPLTDIHRHLDGNIRPQTILELGRQYNISLPAQSLETLIPHVQVIANEPDLVSFLTKLDWGVKVLASLDACRRVAFENIEDAARHGLHYVELRFSPGYMAMAHQLPVAGVVEAVIDGVREGCRTFGVQAKLIGIMSRTFGEAACQQELEAFLAHRDQITALDLAGDELGFPGSLFLSHFNRARDAGWHITVHAGEAAGPESIWQAIRELGAERIGHGVKAIEDRALMDFLAEQQIGIESCLTSNIQTSTVAELAAHPLKTFLEHGIRASINTDDPGVQGVDIIHEYTVAAPAAGLSREQIRQAQINGLEMAFLSAEEKRALREKVAAK

SEQ ID NO: 6002 - DNA, 1014 bp, Enterococcus faecalis
  CDS (1)..(1014): transl_table=11
atggaagaatcccgtgtccgtcaattaccaaaaatcgagctgcactgtcacttagatgggtcgattcgaccaaccactttacgcaccattgctgaaaaacaaaacattccattaccccaagacgaacaagccttgaaagagttagtggttgcccctgaaaaatgcaccgatttgaatgattatttaactcggttcgacttcgtgctcacctgtctacaaacagctgaggctttgcaagcagcggcgtatgacgtgattagccaagctgccgaagatggcgtggcttacatagaggtgcgttttgcgccttcccaacatacagaaaaaggcttacggttacctgaaatcgtgactgctgttttaactggcttaaaacaaggcgaagaagattttggtgtaaaaagcaatgcactgttatgcggcatgcggcatgaccaacaacaagccatagaaaaaatcgttcacttagcgcatgatttcagagagacaggcgttgtcggctttgatttagctggcaatgaagtcgatttccctccatacacatttgaagacgtattagctttagccaaccaattgtcaattccattaacactccacgctggggaatgcggctgtggcaaaaatgtcgctgatgctgtcactttaggtgctactcggattggtcacggtattgctttgaaagatacacccgaatatttggcgctcttaaaagaaaaaaaggttcttttagaaatgtgtccaactagcaacttccaaacaggaaccgtcaaaacattggctgaatacccttttcaacaatttatagaggctggcttagccgtctgcatcaataccgataatcgaactgtttcagatactacgttaacgaaagaattcatgaaattggccacttggtatcaattaagttatgacgaaatgaagcaactcactaaaaatgcgcttgcaggtgcttttttatcgccagacgaaaaaaaactgttgaaccaaaaaattgatcaagcgtatctattctaa

SEQ ID NO: 6003 - protein, 337 aa, Enterococcus faecalis
MEESRVRQLPKIELHCHLDGSIRPTTLRTIAEKQNIPLPQDEQALKELVVAPEKCTDLNDYLTRFDFVLTCLQTAEALQAAAYDVISQAAEDGVAYIEVRFAPSQHTEKGLRLPEIVTAVLTGLKQGEEDFGVKSNALLCGMRHDQQQAIEKIVHLAHDFRETGVVGFDLAGNEVDFPPYTFEDVLALANQLSIPLTLHAGECGCGKNVADAVTLGATRIGHGIALKDTPEYLALLKEKKVLLEMCPTSNFQTGTVKTLAEYPFQQFIEAGLAVCINTDNRTVSDTTLTKEFMKLATWYQLSYDEMKQLTKNALAGAFLSPDEKKLLNQKIDQAYLF

SEQ ID NO: 6004 - DNA, 1035 bp, Haemophilus ducreyi
  CDS (1)..(1035): transl_table=11
atggttttaggcttagcacaatatggtgtgattgatttacacttacatttagatggttctttatcacctgcgtggatgattgaatgggctaaaaaacaagcggttaatttacccgcgagtacagctgaagcattaactgcttatgtatcagtcccacaagattgcagtgatttaaatgagtatttacgttgttttgacttgccactttctttattgcaaacaccagaagcattgagctcagccgttacggatttaattcaacgtttagatcaagatggtttagtctatgcagaaattcgttttgctccacaactacatacacaacgatcaatgtcacaagaagatgcggttaaagccgcattacgtggcttacaagcgggcttggctagcacaagtttgtttaaagcaaatttgattttatgttgtatgcgtgcggcagataatagatcagcaaatttagaaacaatttgcttggctaaacagtatttaactaaatatgaagctggcgtggtcgcgattgatttagccggtgcagaaggattgtttgctactcaacattttcagcaagagtttgattttgctaatcaacgtggtgtgccatttaccattcatgcaggcgaagctgccggtccagaaagtgtccaacaagcgctagattttggcgctactcgcattggtcacgggattcgggctattgaaagcgaaacggtaatgaagcaattaattgataaaagaacgccgctagaaatgtgtccttgcagtaatttgcaaactaaaacagtcgcacaattagcagactacccattacgtacttttttaatgcgtggcgtagtagccactttaaatactgataatatgaccgtttcacaaacctgtattcagcaagaataccgtttattggctgaacaatatcagctgtcaatctcagaagcaaaacagctactattaaatagtatagcggccgcttttttatcaaatgaagataaaaaagccttgttagcgcatattcaacaacgttaccctcagctcatttaa

SEQ ID NO: 6005 - protein, 344 aa, Haemophilus ducreyi
MVLGLAQYGVIDLHLHLDGSLSPAWMIEWAKKQAVNLPASTAEALTAYVSVPQDCSDLNEYLRCFDLPLSLLQTPEALSSAVTDLIQRLDQDGLVYAEIRFAPQLHTQRSMSQEDAVKAALRGLQAGLASTSLFKANLILCCMRAADNRSANLETICLAKQYLTKYEAGVVAIDLAGAEGLFATQHFQQEFDFANQRGVPFTIHAGEAAGPESVQQALDFGATRIGHGIRAIESETVMKQLIDKRTPLEMCPCSNLQTKTVAQLADYPLRTFLMRGVVATLNTDNMTVSQTCIQQEYRLLAEQYQLSISEAKQLLLNSIAAAFLSNEDKKALLAHIQQRYPQLI

SEQ ID NO: 6006 - DNA, 1059 bp, Lactococcus lactis subsp
  CDS (1)..(1059): transl_table=11
atgaaaaagaaaagggagaaactcgtgcttaaatcagaaattattgctcaaatgccaaaagttgaacttcattgccatcttgatggttcgcttagcttgtcagtcattaaagaactcgctaaaaatgctggaattcatatgacaatgtccgatgaggaaattttagaaaaggcacaagccccagaaaatacaaaaaatttgctagaatacctgcaacgttttgatttcgtcttaccacttttgcaaacttataagaatttagagttggctgcttatgatgttgtcagacaggcagcaaatgataatattaaatatattgaaatccgttttgctccaagtcaacatctcttagaaaatctaacccttgaagaagcagtagaggctgtcatcgccggcctttctcgtgcagaaaatgattttgatataagagcaaatgcactcgtttgtggattaaaacaagaaccaattcaaaaattacaaaaactgctgccactttttgataagattcctgatgaacatcttgtcggatttgatatggcgggtgatgaattaaattatccacaggaaaaatttgtagatttgattcatgatataaaaattaagggtgtcaatgtgacgcttcatgctggagaatgtccagcatgtgagaaaaatattttagattcaattgcaatgggggcaagtcgcattggacatggaattatgactaaaaatctgtccgaagccgaacaaaaaatgatgattgaaaaacaaattgttttagaaatggctccgactagcaattttcaaacaaaagcggtgacagagcttgcgcaatatccttttaaagaactttatgacaaaggaatacacgtgacattaaataccgataatcgaatggtttcggctacaaatttaagcaaagaatatgagaaaatctcagcttggtacccagatttttctctttctgattttgaaaaaataaatcattacgcaattgatggcgcctttattggtcaagaagaaaaagaagaacttcatcaaagatttaccaaagaatacaaaaaaatctctgaataa

SEQ ID NO: 6007 - protein, 352 aa, Lactococcus lactis subsp
MKKKREKLVLKSEIIAQMPKVELHCHLDGSLSLSVIKELAKNAGIHMTMSDEEILEKAQAPENTKNLLEYLQRFDFVLPLLQTYKNLELAAYDVVRQAANDNIKYIEIRFAPSQHLLENLTLEEAVEAVIAGLSRAENDFDIRANALVCGLKQEPIQKLQKLLPLFDKIPDEHLVGFDMAGDELNYPQEKFVDLIHDIKIKGVNVTLHAGECPACEKNILDSIAMGASRIGHGIMTKNLSEAEQKMMIEKQIVLEMAPTSNFQTKAVTELAQYPFKELYDKGIHVTLNTDNRMVSATNLSKEYEKISAWYPDFSLSDFEKINHYAIDGAFIGQEEKEELHQRFTKEYKKISE

SEQ ID NO: 6008 - DNA, 1098 bp, Mycobacterium bovis
  CDS (1)..(1098): transl_table=11
atgaccgctgcgccgaccctgcagacgatcaggctagcccccaaggcgttgctgcacgatcacctcgacggcgggctgcggccggccaccgtgctggacattgccgggcaggtcggatacgacgacctgccggcaactgacgtcgacgcgctggcaagttggtttcgcacccagtcgcacagcggctcgctggagcgctacctggaaccgttttcgcacacggtggcggtgatgcagactcccgaggccttgtatcgggtcgccttcgaatgcgcgcaagacctggccgccgattcggtggtctatgccgaggtgcggttcgcgccggagctgcacatcagctgcgggctgtcgttcgacgacgtcgtcgacaccgttctgacgggcttcgccgccggcgagaaggcgtgtgccgccgatggtcaacccatcaccgtccgctgtctggtcaccgcgatgcggcacgccgcaatgtcccgggagatcgcagagttggcgatccggttccgggacaagggagttgtcggattcgacatcgccggcgcggaggccggccacccgccaacccggcacttggatgcattcgagtacatgcgtgatcacaacgcgcgcttcacgattcatgccggtgaggcgttcgggttgccgtccatccacgaggcgatcgccttctgcggtgccgaccggctgggtcacggggtgcggatcgtcgacgacatcgacgtggatgccgacggcggtttccagttgggtcggctggcagctatcctgcgggacaagcgaattccgctggagctgtgccccagctccaacgtgcagaccggcgcggtcgcaagcatcgccgagcatccgttcgacctactggctcgggcccggttccgggtgaccgtcaataccgacaaccggctgatgagcgacacctcgatgagcctcgaaatgcatcgtttggtagaggctttcggttatggctggagcgacctggcgcgcttcaccgtcaatgcgatgaaatccgcgttcattccgttcgaccagcggctggcgataatcgacgaagtgatcaagccgcggttcgcggcgctcatgggtcacagcgagtaa

SEQ ID NO: 6009 - protein, 365 aa, Mycobacterium bovis
MTAAPTLQTIRLAPKALLHDHLDGGLRPATVLDIAGQVGYDDLPATDVDALASWFRTQSHSGSLERYLEPFSHTVAVMQTPEALYRVAFECAQDLAADSVVYAEVRFAPELHISCGLSFDDVVDTVLTGFAAGEKACAADGQPITVRCLVTAMRHAAMSREIAELAIRFRDKGVVGFDIAGAEAGHPPTRHLDAFEYMRDHNARFTIHAGEAFGLPSIHEAIAFCGADRLGHGVRIVDDIDVDADGGFQLGRLAAILRDKRIPLELCPSSNVQTGAVASIAEHPFDLLARARFRVTVNTDNRLMSDTSMSLEMHRLVEAFGYGWSDLARFTVNAMKSAFIPFDQRLAIIDEVIKPRFAALMGHSE

SEQ ID NO: 6010 - DNA, 1089 bp, Mycobacterium leprae
  CDS (1)..(1089)
atgaatacgccattgcacctagaaaacatcaagcaagcgccgaaggccctgctgcatgaccaccttgacggtgggctgcgcccagcgaccgtgttggatattgccggccaggtcggctatgataggctccccgctaccgacgttgagtcgctagagacatggtttcgcactgcttcgcacagcggctcgttggagcgctacctggagccgttttctcataccgtggccgtgatgcagacaccagaggcgttgcaccgcgtcgcttatgagtgcgtggaagacctcgccgctgattcggtggtctacgccgaagtccggttcgctccggagctgcacatcgacgaggggttgtcgtttgatgaggtcctcgcaagcgtgctggcgggttttgctgacggtgaaagggcttgtgccgccgagggcaatgccatcacagtgcgctgcttggtcacagcgatgcggcacgcggcaatgtcgcgggagatcgccgagctagcgatccggttccgggacaaaggagtcgtcggattcgacatcgctggtgctgaggctgggcaccctccgactcggcacctcgacgcttttgagtacatgcgtagtaataatgcgcgcttcactattcatgcgggtgaggcgttcgggctgccatctatccacgaggcgatcgcgttctgcggagctgaccggctgggccacggggtgcggatcgtcgacgacatcgacgttgatcctggtggtggcatccggttgggtcccctggcctcgatcctgcgggacaagcgaataccgctggagctgtgccccagctcgaacctgcaaaccggcgcggtggcaagcatcaccgagcacccgtttgatctgctggcctgggcacgtttccgggtgacagtcaacaccgacaaccggcttatgagcgacacgtcgatgagcctggagatgcaccgcttggtggaggcgttcggctacggttggggtgatctcgaacgtttcaccatcaatgctatgaagtcggcgtttattccgttcgatcaacggttagcaataatcgatgaggttatcaagcctcggttcgccgtgctggtcggatag

SEQ ID NO: 6011 - protein, 362 aa, Mycobacterium leprae
MNTPLHLENIKQAPKALLHDHLDGGLRPATVLDIAGQVGYDRLPATDVESLETWFRTASHSGSLERYLEPFSHTVAVMQTPEALHRVAYECVEDLAADSVVYAEVRFAPELHIDEGLSFDEVLASVLAGFADGERACAAEGNAITVRCLVTAMRHAAMSREIAELAIRFRDKGVVGFDIAGAEAGHPPTRHLDAFEYMRSNNARFTIHAGEAFGLPSIHEAIAFCGADRLGHGVRIVDDIDVDPGGGIRLGPLASILRDKRIPLELCPSSNLQTGAVASITEHPFDLLAWARFRVTVNTDNRLMSDTSMSLEMHRLVEAFGYGWGDLERFTINAMKSAFIPFDQRLAIIDEVIKPRFAVLVG

SEQ ID NO: 6012 - DNA, 1002 bp, Photorhabdus luminescens subsp
  CDS (1)..(1002): transl_table=11
gtgattgacataaaactcccactgacagatttacaccgccatctcgatggaaatatccggccggagactatcttagatcttgccaaccagcataatattcagcttccagcaaatgatctggaatcactactcccccacgtacaaattattgaaaatgaaccgagcttagtcagttttttacaaaaacttgattggggagtggcagtactagctgatttggacgcttgtcgtcgtattgctattgaaaatgttgaagatgccatcaatactgggctcgactatgctgaattacgtttttccccttattacatggcgatgaaccacaaattgccggttgaaggggtcgttgaggcaattattgatggtatccgttctgcccgtcaaaataacgatatcgacatccgtcttattggaattttaagcagaacttttggtgaacaagcctgtactcaggaattaactagcctgctagctcaccagcaacatattactgcattggatctcgcgggtgacgagttaggttttcccggccatcttttccaatctcattttaccaaagcccgtgatgctggatggcatataactatccatgccggcgaagccgctggcgctgaaagtatttggcaagccattagggaattaggagccacgcgtattggtcatggggtaaaagccattactgatcccgtattgatggattatttggttgaaaaccgtattggtattgaaacctgtttaacctcaaaccttcaaaccagcaccgtcaattctttattggaccatccactcaaacaattcctggaaaaagatattcttgcttccattaataccgatgatccagccgttgaaggcatcgacatccgccatgaatatgaaattgccgcccctgccgcgggtttatctattgctcaaattcgtcaggctcagataaatgggctggaaactgcttttatcagtgatacagaaaaacaggcattacgcatgaaagcagcaaatcgttaa

SEQ ID NO: 6013 - protein, 333 aa, Photorhabdus luminescens subsp
MIDIKLPLTDLHRHLDGNIRPETILDLANQHNIQLPANDLESLLPHVQIIENEPSLVSFLQKLDWGVAVLADLDACRRIAIENVEDAINTGLDYAELRFSPYYMAMNHKLPVEGVVEAIIDGIRSARQNNDIDIRLIGILSRTFGEQACTQELTSLLAHQQHITALDLAGDELGFPGHLFQSHFTKARDAGWHITIHAGEAAGAESIWQAIRELGATRIGHGVKAITDPVLMDYLVENRIGIETCLTSNLQTSTVNSLLDHPLKQFLEKDILASINTDDPAVEGIDIRHEYEIAAPAAGLSIAQIRQAQINGLETAFISDTEKQALRMKAANR

SEQ ID NO: 6014 - DNA, 951 bp, Pseudomonas aeruginosa
  CDS (1)..(951): transl_table=11
atgtacgaatggctcaacgccttgcccaaggccgaactgcacctgcacctggaaggtaccctggagccggagctgctgttcgccctcgccgagcgcaaccgcatcgccctgccctggaacgacgtcgagaccctgcgcaaggcctacgccttcaacaacctgcaggaattcctcgacctctactacgccggcgccgacgtgctgcgcaccgagcaggacttctacgacctgacctgggcctacctgcagaagtgcaaggcgcagaacgtcgtccacgtcgagccgttcttcgacccgcagacccacaccgatcgcggcattcccttcgaggtggtgctcgccggcatccgcgccgcgctacgggacggcgagaagctgctgggcatccgccatgggctgatcctcagcttcctccgccacctcagcgaggaacaggcgcagaaaaccctcgaccaggcgctgccgttccgcgacgccttcatcgccgtcggcctcgacagctcggaagtagggcatccgccgagcaagttccagcgggtcttcgaccgggcccgcagcgaaggcttcctcaccgtcgcccatgccggcgaggaggggccgcccgagtacatatgggaagccctcgacctgctcaaggtcgagcgcatcgaccacggcgtacgcgccttcgaggacgagcggctgatgcggcggctgatcgacgaacagatcccgctgaccgtctgcccgctgtccaacaccaagctctgcgtgttcgacgacatgagccagcacaccatcctcgacatgctcgaacgcggcgtgaaggtgacggtgaactccgatgacccggcctacttcggcggctatgtcaccgagaacttccatgccttgcagcagagcctgggaatgaccgaggagcaggccaggcgcctggcgcagaacagcctggatgcgcgcctggtgaagtga

SEQ ID NO: 6015 - protein, 316 aa, Pseudomonas aeruginosa
MYEWLNALPKAELHLHLEGTLEPELLFALAERNRIALPWNDVETLRKAYAFNNLQEFLDLYYAGADVLRTEQDFYDLTWAYLQKCKAQNVVHVEPFFDPQTHTDRGIPFEVVLAGIRAALRDGEKLLGIRHGLILSFLRHLSEEQAQKTLDQALPFRDAFIAVGLDSSEVGHPPSKFQRVFDRARSEGFLTVAHAGEEGPPEYIWEALDLLKVERIDHGVRAFEDERLMRRLIDEQIPLTVCPLSNTKLCVFDDMSQHTILDMLERGVKVTVNSDDPAYFGGYVTENFHALQQSLGMTEEQARRLAQNSLDARLVK

SEQ ID NO: 6016 - DNA, 948 bp, Pseudomonas putida
  CDS (1)..(948): transl_table=11
atgtatgactggttgaacgccctgcccaaggccgaactgcacctgcacctggaaggctcactggagccagagttgctgttcgccctggccgagcgcaacaagatcgccttgccctgggccgatgtggagaccttgcgcggtgcctatgccttcaacaacctgcaggagttcctcgacctgtattaccagggcgcggatgtgctgcgcaccgagcaggacttctacgacctgacctgggcctacctgcaacgctgcaaggcccagaacgtgatccacaccgaacccttcttcgacccgcagacccacaccgaccgcggcattgctttcgaagtggtgctcaacggcatcagccaggcgctcaaggatggccgcgaacaactgggcatcagcagcggcctgatcctcagcttcctgcgccacctcagcgaggatgaagcgcaaaagaccctcgatcaggcattgccgttccgcgatgcgttcattgccgtaggcctggacagctcggagatgggccacccacccagcaagttccagcgggtgttcgaccgcgcccgtagcgaaggcttcgtcgccgttgcccatgctggcgaagaaggcccgcccgagtacatctgggaagccctcgacctgctgaagatcaaacgtatcgaccatggcgtgcgcgccatcgaggacgagcgcctgatgcagcgcatcatcgacgagcagatcccgctcacggtgtgcccgctgtccaacaccaagctctgcgtgttcgaccatatgagccagcacaacatcctcgacatgctcgagcgtggtgtgaaagtcaccgtcaactcggacgacccggcctacttcggtggctacgtcacggagaacttccacgctctgcatacccacttgggcatgaccgaagaccaggcacgtcgcctggcgcagaacagcctggacgcacggctggtttga

SEQ ID NO: 6017 - protein, 315 aa, Pseudomonas putida
MYDWLNALPKAELHLHLEGSLEPELLFALAERNKIALPWADVETLRGAYAFNNLQEFLDLYYQGADVLRTEQDFYDLTWAYLQRCKAQNVIHTEPFFDPQTHTDRGIAFEVVLNGISQALKDGREQLGISSGLILSFLRHLSEDEAQKTLDQALPFRDAFIAVGLDSSEMGHPPSKFQRVFDRARSEGFVAVAHAGEEGPPEYIWEALDLLKIKRIDHGVRAIEDERLMQRIIDEQIPLTVCPLSNTKLCVFDHMSQHNILDMLERGVKVTVNSDDPAYFGGYVTENFHALHTHLGMTEDQARRLAQNSLDARLV

SEQ ID NO: 6018 - DNA, 1038 bp, Ralstonia solanacearum
  CDS (1)..(1038): transl_table=11
atgccgatctcgcccgccctcgcagaacgcatcgccaccagcccgaaagccgagctgcacatccacatcgaaggctcgctcgaaccggaactgatgttcgcgctggccgagcgcaacggcgtcaagctgccctacgcctcggtcgacgaagtgcgcgccgcctatgccttcaacgatctgcagtcgttcctggacctgtactacgccggcgccagcgtactgctgaccgagcaggacttctacgacatgaccgccgcctatgtggcgcgcgccgtggccgacaacgtgcgccacgccgagatcttcttcgacccgcagacgcacaccgcgcgcgacgtgccgatgcacgtggtgatcggcggcatcgtccgcgcgctggacgacgccgagcgcgcgcacggcttctccagccgcctgattctctgcttcctgcgccacctgagcgaggccgacgccttcgacacgctggaagcggccctgccctacatccaggacccggccaaccgcatcatcggcgtggggctggattcgtcggagcgcggcaatccgcccgagaagttcgcgcgcgtgttcgcccgctgcaaggcactgggcctgcgcctcgtggcccacgccggcgaggaaggcccggcgcagtacgtgatcgacgcgctcgacatcctccaggtggagcgcatcgaccacggcgtgcgcgccatcgacgatgccgccctggtcaagcgcctggccgccagccgcgtcgccctgacggtgtgcccgctgtcgaacgaaaagctcaaggtctaccccgacctgcgcgaccactcgctcaagcagctgctggacgccggctgcgcggtcacgctgcattcggacgaccccgcctacttcggcggctacatgaacaccaactggctcgccaccttcaacgccctcggcctgtccgccgccgatgcgcacacgctcgcgcgcaacagcttcgaggcgtcgttcctgcccgagcaggacaaagccctgtggctgaacgccgtcgatatccactggcgagcccatacctga

SEQ ID NO: 6019 - protein, 345 aa, Ralstonia solanacearum
MPISPALAERIATSPKAELHIHIEGSLEPELMFALAERNGVKLPYASVDEVRAAYAFNDLQSFLDLYYAGASVLLTEQDFYDMTAAYVARAVADNVRHAEIFFDPQTHTARDVPMHVVIGGIVRALDDAERAHGFSSRLILCFLRHLSEADAFDTLEAALPYIQDPANRIIGVGLDSSERGNPPEKFARVFARCKALGLRLVAHAGEEGPAQYVIDALDILQVERIDHGVRAIDDAALVKRLAASRVALTVCPLSNEKLKVYPDLRDHSLKQLLDAGCAVTLHSDDPAYFGGYMNTNWLATFNALGLSAADAHTLARNSFEASFLPEQDKALWLNAVDIHWRAHT

SEQ ID NO: 6020 - DNA, 975 bp, Rhizobium loti
  CDS (1)..(975): transl_table=11
atgcctttgaaagcggaactgcactgccacattgaaggggcagcggcgcccgaactcgtcatccgccaggcgcagaaatacggcaaggacaccgcgccctatatccaaaacggttccttcgtctggcacgattttacgtcctttctcgcggcttacgatttttccgccgaactgttccgcaccgaagaggattacgcccggctggccgatcactacctgaccagccttgcccgcgatggcgccatctattccgaagtcttcacctcgccggaccatgcgacgaaagccgggctctcgcccaaggcctataccgatgcgctgggcgaaggcatgctgcgcgccaaggccaagaccggcatagagggccgcatgatcgtcaccggcgtgcgccatgtcggcgtggaatcgatcgaacgggcggcgcgcttcgcggcgcgctgcggcaatccgctggtcactggcttcggcgttgccggcgacgagcgcgtgggtgagatggaggactatgtcagggctttcgagatcgcgcgagaggccgggctcggcatcaccatccatgccggcgaactgacgggctgggagactgtccaggcggcgcttgaccatatccgcccctcgcgcatcggccacggcgtgcgcgccatcgagaacccggaccttgtccgccgcatcgccgacgaaggcatcgttctggagtgctgccccggctccaacatcgcgctcaaggtgttcgacagttttgccgaccatccgctcccggccttgcaggccgccggctgcaaggtgacgctcaactccgacgacccgccctatttctggacctcgctgaagcgcgaatacgatatcgcggcggagcattttgcgatgaacgaaaaggcgcttgccgccgtcaccagaaccgccatcgaagccgcctttgtcgacaggaagaccaaggcggcacttcttgcccggctgaacggcgcggcgcgctga

SEQ ID NO: 6021 - protein, 324 aa, Rhizobium loti
MPLKAELHCHIEGAAAPELVIRQAQKYGKDTAPYIQNGSFVWHDFTSFLAAYDFSAELFRTEEDYARLADHYLTSLARDGAIYSEVFTSPDHATKAGLSPKAYTDALGEGMLRAKAKTGIEGRMIVTGVRHVGVESIERAARFAARCGNPLVTGFGVAGDERVGEMEDYVRAFEIAREAGLGITIHAGELTGWETVQAALDHIRPSRIGHGVRAIENPDLVRRIADEGIVLECCPGSNIALKVFDSFADHPLPALQAAGCKVTLNSDDPPYFWTSLKREYDIAAEHFAMNEKALAAVTRTAIEAAFVDRKTKAALLARLNGAAR

SEQ ID NO: 6022 - DNA, 975 bp, Rhizobium meliloti
  CDS (1)..(975): transl_table=11
ttgaccgctcatctgaagaaagccgaactgcattgccatatcgaaggcgcgacgccgccggaactggcgctgagacaggcccgcaaatacggcgtcgacaccagcgcgatcatccgcgacagggcctatgtctgggaggatttcaccagtttcgtaaggtgttacgacgccgtcgcctcgctttttcgcaccgagggtgattatgcgcttctcgccgagacctatctgacggagcttgccaaagcgggtacgatctacagcgagatcatcgtctcgcccgaccacggcgtaacgatcggactcggcgccgatgcctatatcgagggcctcgccgccggcatggaggcggcgagggtgaagaccggcatcgaatcccgcatgctgatcaccggcatccgccatctcggtcccgactcggtcatcaggaccgccgaatatgcagcgatgcgccggcatccgctcgtgaccggcttcaatctggccggcgaggagcgcatgcacagcgtcgcggaattctcccgcgccttcgacatcgtccgcgatgccggcctcggcctgaccatccacgccggcgagctttccggcgcattcagcgtgcgcgatgcgctggaccatgtccgcccggcccgcatcagccacggggtccgggcgatcgaggacggcgatctcgtgaagcgccttgccgacgagggcgtcgtgctcgaagtctgcccgggctcgaatgtcgcgcttcaggtgttcccggacttcgcctcgcatccgctgcggcggctttacgaagccggcgtccgcgtgacgctcaattccgacgatcctcccttcttccacacgtcgctcgcgcaggaatacgagatcgccttccacgcgatgggcttctcggacagcgagatcgaccggatgacgaagaccgcgattgaagccgccttcgtggacgagccgacgcgagagaagttgctggctgcgttacatgtctag

SEQ ID NO: 6023 - protein, 324 aa, Rhizobium meliloti
MTAHLKKAELHCHIEGATPPELALRQARKYGVDTSAIIRDRAYVWEDFTSFVRCYDAVASLFRTEGDYALLAETYLTELAKAGTIYSEIIVSPDHGVTIGLGADAYIEGLAAGMEAARVKTGIESRMLITGIRHLGPDSVIRTAEYAAMRRHPLVTGFNLAGEERMHSVAEFSRAFDIVRDAGLGLTIHAGELSGAFSVRDALDHVRPARISHGVRAIEDGDLVKRLADEGVVLEVCPGSNVALQVFPDFASHPLRRLYEAGVRVTLNSDDPPFFHTSLAQEYEIAFHAMGFSDSEIDRMTKTAIEAAFVDEPTREKLLAALHV

SEQ ID NO: 6024 - DNA, 1002 bp, Salmonella typhi
  CDS (1)..(1002): transl_table=11
atgattgatattacgcttcctttgactgacatccaccgccaccttgatggcaacattcgcgcccaaacaattctggatcttggtcggcagttcaacatcgcccttcccgcccaaacgctggaaacgctgattccgcatgtccaggtcacctcaaccgaacccgatttagtaagctttctcactaaactcgattggggggtaaaagtcctggcatcgcttgacgcctgccgccgtgtggcctttgaaaatattgaagatgcggcacgtaacggcctgcattacgtcgagcttcgcttttcgcccggctatatggcgatggcgcatcagttaccgatcgcaggcgtggttgaagccgttatcgacggtgtacgcgacggctgtaacacgtttggcgtcgaggcacgactcattggcattatgagccgtaccttcggcgaggcggcatgtttacaggagcttgatgcgctgctggcgcacagagagaaaatcaccgcgctggatttagccggtgatgagcttggctttcccggcagtctgtttttgtcgcactttaatcgggcgcgcgatgcgggctggcatattaccgttcacgctggcgaagccgcagggccggaaagtatctggcaggcgattcgcgaactgggggccgagcgtatcggacatggcgtaaaagctgtcgaagatcgcgcgttaatggattttcttgcacagcagcgtatcggtattgaatcctgtctgacctcgaatattcagaccagtaccgtcgcatcgctggcggatcatccactaaaaaccttccttgagcatggcgttctcgccagtcttaatacggacgatccggctgttcagggcgtagatattatccatgaatatcacgtcgccgcgccagcggcaggattgagccgcgaacagattcgccaggcgcagattaacggtctggaaatcgcctttctgagcgatagcgaaaaacgtgcgctacgcgaaaaagtggccgcggcgtaa

SEQ ID NO: 6025 - protein, 333 aa, Salmonella typhi
MIDITLPLTDIHRHLDGNIRAQTILDLGRQFNIALPAQTLETLIPHVQVTSTEPDLVSFLTKLDWGVKVLASLDACRRVAFENIEDAARNGLHYVELRFSPGYMAMAHQLPIAGVVEAVIDGVRDGCNTFGVEARLIGIMSRTFGEAACLQELDALLAHREKITALDLAGDELGFPGSLFLSHFNRARDAGWHITVHAGEAAGPESIWQAIRELGAERIGHGVKAVEDRALMDFLAQQRIGIESCLTSNIQTSTVASLADHPLKTFLEHGVLASLNTDDPAVQGVDIIHEYHVAAPAAGLSREQIRQAQINGLEIAFLSDSEKRALREKVAAA

SEQ ID NO: 6026 - DNA, 1002 bp, Salmonella typhimurium
  CDS (1)..(1002): transl_table=11
atgattgatattacgcttcctttgactgacatccaccgccaccttgatggcaacattcgcgcccaaacaattctggatcttggtcggcagttcaacatcgcccttcccgcccaaacgctggaaacgctgattccgcatgtccaggtcacctcaaccgaacccgatttagtaagctttctcactaaactcgattggggggtaaaagtcctggcatcgcttgacgcctgccgccgtgtggcctttgaaaatattgaagatgcggcacgtaacggcctgcattacgtcgagcttcgcttttcgcccggctatatggcgatggcgcatcagttaccaatcgcaggcgtggttgaagccgttatcgacggcgtacgcgacggctgtaacacgtttggcgtcgaggcacgactcattggcattatgagccgtaccttcggcgaggcggcatgtttacaggagcttgatgcgctgctggcgcacagagagaacatcaccgcgctggatttagccggtgatgagctgggctttcccggcagtctgtttttgtcgcactttaatcgggcgcgcgatgcgggctggcatatcaccgttcacgctggcgaagccgcagggccggaaagtatctggcaggcgattcgcgaactgggggccgaacgtatcggacatggcgtaaaagctgtcgaagatcgcgcgttaatggattttcttgcacagcagcgtatcggtattgaatcctgtctgacctcgaatattcagaccagtaccgtcgcatcgctggcggatcatccactcaaaaccttccttgagcatggcgttctcgccagtcttaatacggacgatccggctgttcagggcgtagatattatccatgaatatcacgtcgccgcgccagcggcaggattgagccgcgaacagattcgccaggcgcagattaacggtctggaaatcgcctttctgagcgatagcgaaaaacgtgcgctgcgcgaaaaagtggccgaggcgtaa

SEQ ID NO: 6027 - protein, 333 aa, Salmonella typhimurium
MIDITLPLTDIHRHLDGNIRAQTILDLGRQFNIALPAQTLETLIPHVQVTSTEPDLVSFLTKLDWGVKVLASLDACRRVAFENIEDAARNGLHYVELRFSPGYMAMAHQLPIAGVVEAVIDGVRDGCNTFGVEARLIGIMSRTFGEAACLQELDALLAHRENITALDLAGDELGFPGSLFLSHFNRARDAGWHITVHAGEAAGPESIWQAIRELGAERIGHGVKAVEDRALMDFLAQQRIGIESCLTSNIQTSTVASLADHPLKTFLEHGVLASLNTDDPAVQGVDIIHEYHVAAPAAGLSREQIRQAQINGLEIAFLSDSEKRALREKVAEA

SEQ ID NO: 6028 - DNA, 996 bp, Shewanella oneidensis
  CDS (1)..(996): transl_table=11
atgatcaatacatccattccattggtggatttgcatcgtcacttagatggtaacgtgcgagtgaacaccatttgggagctcggacaccaacacggcattgctttacctgccgattctttagagactctcgcgccgtttgtacaaattcaggggaaagaaaccagcctagttgccttcttaaaaaagcttgattggatggtggcagttctggctgatttagatgccgtcaaacgtatcgcttatgaaaacgtggccgatgcggcgttatctggccttgattatgcggagctgcgttttagcccatattacatggcgatgaaccataagctaccgattgaaggcgtggttgaagcggttatcgatggggttaaagccggtctgaaagattaccaagttaacattaatcttatcgggattatgtcgcgctccttcggccaacccgcttgcactcaggagcttgaaggtttgctcgcccataaacaacatttggttgcaatggacttagccggcgatgagttaggtttccctggcgaattatttaatgagcactttaagcgagtgcgtgacgcgggattagctatcactgcccatgcgggagaggcggcgggttcacaaagtatgtggcaggcgattcaggagctgggggcgacacgtatcggccatggggtgaatgcgattcacgatcctaagctgatggaatatctggctaaacaccgtattggtatagaatcttgcccaaccagcaacttgcatacttcgacagtgtcctcctatgctgaacatcctttcagaacctttatggatgccggtgtgttgataggccttaataccgatgatccgggcgtaagtgcgattgatatcaagcatgagtaccgcattgccaagtttgaactgggattaagcgatgctgaactggctcaagtacagcgcaacggggtagaaatggcatttttatcagagagcgaacgcaaggcgctgtatgcggctaaagcatag

SEQ ID NO: 6029 - protein, 331 aa, Shewanella oneidensis
MINTSIPLVDLHRHLDGNVRVNTIWELGHQHGIALPADSLETLAPFVQIQGKETSLVAFLKKLDWMVAVLADLDAVKRIAYENVADAALSGLDYAELRFSPYYMAMNHKLPIEGVVEAVIDGVKAGLKDYQVNINLIGIMSRSFGQPACTQELEGLLAHKQHLVAMDLAGDELGFPGELFNEHFKRVRDAGLAITAHAGEAAGSQSMWQAIQELGATRIGHGVNAIHDPKLMEYLAKHRIGIESCPTSNLHTSTVSSYAEHPFRTFMDAGVLIGLNTDDPGVSAIDIKHEYRIAKFELGLSDAELAQVQRNGVEMAFLSESERKALYAAKA

SEQ ID NO: 6030 - DNA, 1002 bp, Shigella flexneri
  CDS (1)..(1002): transl_table=11
atgattgataccaccctgccattaactgatatccatcgccaccttgatggcaacattcgtccccagaccattcttgaacttggccgccagtataatatctcgcttcctgcacaatcccttgaaacactgattccccacgttcaggtcattgccaacgaacccgatctggtgagctttctgaccaaacttgactggggcgttaaagttctcgcctctcttgatgcctgccgccgcgtggcatttgaaaacattgaagatgcagcccgtaacggcctgcgctatgtcgagctgcgtttttcaccaggctacatggcaatggcacataagctgcctgtagcgggtgttgtcgaagcggtgatcgatggcgtacgtgaaggttgccgcacctttggtgtgcaggcgaagcttatcggcattatgagccgaaccttcggcgaagccgcctgtcagcaagagctggaggcctttttagcccaccgtgaccagattaccgcacttgatttagctggtgatgaacttggattcccgggaagtctgttcctttctcacttcaaccgcgcgcgtgatgcgggctggcatattaccgtccatgcaggcgaagctgccgggccggaaagcatctggcaggcgattcgtgaactgggtgcggagcgtattggacatggcgtaaaagccattgaagatcgggcgctgatggattttctcgccgagcaacaaattggtattgaatcctgtctgacctccaatattcagaccagcaccgtagcagagctggctgcacatccgctgaaaacgttccttgagcatggcattcgtgccagcattaacactgacgatcccggcgtacagggagtggatatcattcacgaatataccgttgccgcgccagctgctgggttatcccgtgagcaaatccgccaggcacagattaatggtctggaaatggctttcctcagcgcagaggaaaaacgcgcactgcgagaaaaagtcgccgcgaagtaa

SEQ ID NO: 6031 - protein, 333 aa, Shigella flexneri
MIDTTLPLTDIHRHLDGNIRPQTILELGRQYNISLPAQSLETLIPHVQVIANEPDLVSFLTKLDWGVKVLASLDACRRVAFENIEDAARNGLRYVELRFSPGYMAMAHKLPVAGVVEAVIDGVREGCRTFGVQAKLIGIMSRTFGEAACQQELEAFLAHRDQITALDLAGDELGFPGSLFLSHFNRARDAGWHITVHAGEAAGPESIWQAIRELGAERIGHGVKAIEDRALMDFLAEQQIGIESCLTSNIQTSTVAELAAHPLKTFLEHGIRASINTDDPGVQGVDIIHEYTVAAPAAGLSREQIRQAQINGLEMAFLSAEEKRALREKVAAK

SEQ ID NO: 6032 - DNA, 1050 bp, Streptococcus mutans
  CDS (1)..(1050): transl_table=11
atgatagatagcaatagaaagtggagtctgataatgaaaaatactttacataatttagtaaagaccgaattacattgccatttggatgggtctctatcatttgagactattcgagaattagctgaaatggcgaatatagcgctgcctgaatcagatagtgaacttgcaaaattggtcactgttcctgaggattctgagaccttgcttgattatttaaaaacttttgactttattcgaccactgttacagacacaaaaagcgcttagtttagcagcttatgatgtggccaagcaggctgctgctgaacatgtgctttatattgaaattcgctttgctcccgaattatctatggataagggattgagtgctgttcaggtagttgaggcggttgaaaaaggtctgcaaaaggctcaaagggattttaatattgttgccaaggttttaatttgtgggatgagacagtcctcaaaacagttgacaaaagagatttttcgtcaaattaaccaagccaaaagtttagaatttgcaggctttgactttgcaggaaatgaacatgattttccgccacaagaaatagcagatctcattcgttttacgcaaagattggatcgtcctatgacttttcatgctggtgaatgtggctgtcctagccatattgcccaatcaattgccttaggaatcaaacgtttggggcatgtcacagctatccatgaccatccggaattgatagcagactttgttgagaataaagtgacagcagaactttgcctaaccagtaaccttcaaactaaggcagccaaatctctagcggaatttccctatcaagagctctatgaagctggtgctaagataacaattaacacggataaccgtactgtctccaataccaatttaacgaaggaatatcagttatttgtggattatttcggaaccagtttggcagatttttatcactttaatcaaaatgcgattgaggcatcttttgcctctgaagctgaaaaggcagaacttttggctgaactgaaaaaggcctatggacagactgattaa

SEQ ID NO: 6033 - protein, 349 aa, Streptococcus mutans
MIDSNRKWSLIMKNTLHNLVKTELHCHLDGSLSFETIRELAEMANIALPESDSELAKLVTVPEDSETLLDYLKTFDFIRPLLQTQKALSLAAYDVAKQAAAEHVLYIEIRFAPELSMDKGLSAVQVVEAVEKGLQKAQRDFNIVAKVLICGMRQSSKQLTKEIFRQINQAKSLEFAGFDFAGNEHDFPPQEIADLIRFTQRLDRPMTFHAGECGCPSHIAQSIALGIKRLGHVTAIHDHPELIADFVENKVTAELCLTSNLQTKAAKSLAEFPYQELYEAGAKITINTDNRTVSNTNLTKEYQLFVDYFGTSLADFYHFNQNAIEASFASEAEKAELLAELKKAYGQTD

SEQ ID NO: 6034 - DNA, 1020 bp, Streptomyces virginiae
  CDS (1)..(1020): transl_table=11
atggagcacgcacgcgatctcacgcttctgcccaaggcccacctccacctgcacttcaccgggtcgatgcggccatcgaccctgctggagctcgccgacaagtacggcgtgcgccttcccgacgccctgacggccggggagccgcccaagctccgcgccaccgacgagcgcggctggttccgcttccagcggctctacgacgccgcccgctcctgcctgcgcgaacccgacgacatccggcgcttggtccgcgaggccgcggaggaggacgtacgggacggcagcggctggctggagatccaggtggatcccacctcctacgcccccctgctcggcggaatgatcccggccgtggagatcatcctggacgccgtggacgcggcctcccgcgagaccggcctcggcatgcgggtcctcatcgccgcgaaccgcatgaagcaccccctcgacgcccgcaccctcgcccgcctcgccgtccgctacgccgaccgcggcatcgtcggcttcggcctctccaacgacgagcgccgcggcatggcccgtgacttcgaccgggccttcgccatcgcccgcgagggcggcctcctcgccgccccgcacggcggcgagctcaccggcccgtcctccgtccgcgactgcctcgacgacctgcacgcctcccgcatcgggcacggggtgcgggccgcggaggatccccggctgctcaagcggctcgccgaccggcagatcacgtgcgaggtctgcccggcctccaacgtggccctcggggtctacgagcggcccgaggacgtcccgctgcgcaccctgttcgaggccggggtccccatggcgctgggcgccgacgacccgctgctcttcgggtcccggctcgcggcccagtacgagatcgcgcgccgccaccacgccttcacggacacggagctcgccgagctggcccgccagtcggtgcgcggcagcgcggcgcccgacgacgtacaggccaagctgctggcggggatcgaccactggctcaccgggtga

SEQ ID NO: 6035 - protein, 339 aa, Streptomyces virginiae
MEHARDLTLLPKAHLHLHFTGSMRPSTLLELADKYGVRLPDALTAGEPPKLRATDERGWFRFQRLYDAARSCLREPDDIRRLVREAAEEDVRDGSGWLEIQVDPTSYAPLLGGMIPAVEIILDAVDAASRETGLGMRVLIAANRMKHPLDARTLARLAVRYADRGIVGFGLSNDERRGMARDFDRAFAIAREGGLLAAPHGGELTGPSSVRDCLDDLHASRIGHGVRAAEDPRLLKRLADRQITCEVCPASNVALGVYERPEDVPLRTLFEAGVPMALGADDPLLFGSRLAAQYEIARRHHAFTDTELAELARQSVRGSAAPDDVQAKLLAGIDHWLTG

SEQ ID NO: 6036 - DNA, 900 bp, Treponema pallidum
  CDS (1)..(900): transl_table=11
atgaagagtcttgaatattatcgatcacagccaaaagcagatgtgcacacgcatctgaatttgagtatgaaatacgaacgatataagcaatggtcaggagtagtcattccaaactttccacgtaaaatgcgcgggctcgacgaaatgcatgaaattattggtgagtacacgcgtcctcagtgtaaaactgcgcaagacgtgttgaatttgtttaccatgtccatagaggatgccattgcagacaatgtcgtcgtaatggagacatcagttgatattggctttatcacccattatgaagaaaatttggatcatttcttatgtgatttaagcgatctgcatcgacgctacaagcgcaatgttacccttcactttgagctcggtatctccaaaatacgagagcgcagcttcgtagaacagtgggctgagcccatgatgcgaagcggtatctttgaaaatattgacctctacggtccagagatttccgaaggaatcgaagatttcatctatatttttaaactggccgagaagtatcacttaaaaaagaaagcccacgtaggcgagttctctgatgcgcaatcggtacggcactttgtcgaaatatttaacctggacgaagtccaacatggcatcggagccgctactgacgagaacgttttgcggtttctagctgaaagaaaagttcgctgtaacgtatgtccaaccagtaatgtcatgctcaacgcggtggaatgcctagaaaaacatcctataaaaaaaatgatggatgcaggggtccgtgttgggttaggaactgacgatcttctcttttttggaaaaacaaatagcgaacaattgtttgatatggtttcctgtggccttatcaccgaacttcacgccgaagcgctccttgctgtgcgttaa

SEQ ID NO: 6037 - protein, 299 aa, Treponema pallidum
MKSLEYYRSQPKADVHTHLNLSMKYERYKQWSGVVIPNFPRKMRGLDEMHEIIGEYTRPQCKTAQDVLNLFTMSIEDAIADNVVVMETSVDIGFITHYEENLDHFLCDLSDLHRRYKRNVTLHFELGISKIRERSFVEQWAEPMMRSGIFENIDLYGPEISEGIEDFIYIFKLAEKYHLKKKAHVGEFSDAQSVRHFVEIFNLDEVQHGIGAATDENVLRFLAERKVRCNVCPTSNVMLNAVECLEKHPIKKMMDAGVRVGLGTDDLLFFGKTNSEQLFDMVSCGLITELHAEALLAVR

SEQ ID NO: 6038 - DNA, 1005 bp, Vibrio cholerae
  CDS (1)..(1005): transl_table=11
atgataacttcatcactccctttaacggatttgcaccgtcatcttgatggaaatatccgcacccaaaccattttggaattaggacaaaaatttggcgttaagctacccgcaaacacgttacaaactcttaccccttatgtacaaattgtcgaagcagaaccctctctggttgccttcttatccaaactagactggggcgtagcggtactaggcgatcttgatgcttgccgtcgtgttgcctacgagaacgtcgaagatgcgcttaacgcccgtattgactatgccgagctacgtttttctccttattacatggccatgaaacacagcttacctgttacaggagtagtagaagccgttgtcgatggagtccgcgctggtgtgcgtgattttggtattcaagccaaccttattggcattatgagccgcacctttggtaccgatgcttgccaacaagagctcgacgccatcctaagccagaaaaatcacattgtggcagtcgatctcgcaggtgatgaattggggcaacccggtgaccgctttatccaacattttaaacaagtcagagatgcaggattgcatgtgaccgttcacgcaggtgaagcggcagggccagaaagcatgtggcaagcgatcagagatctgggcgcaacaaggattggtcatggcgtcaaagccatccatgatccaaaactgatggactatctcgcccagcaccggatcggtatcgaatcatgcctgacttccaacctgcagacgagcacggtggatagcctagccacacatcctcttaagcgtttcttagagcatggtattttagcctgcattaacaccgacgaccctgctgtagaaggtattgaactaccttacgaatatgaagtcgcagcacctcaagcaggcttaagccaagagcagatacgccaagctcagctcaacggtttagagttggccttcctctctgattcagagaaaaaagcgctcctcgccaaagcggcactacgcggttaa

SEQ ID NO: 6039 - protein, 334 aa, Vibrio cholerae
MITSSLPLTDLHRHLDGNIRTQTILELGQKFGVKLPANTLQTLTPYVQIVEAEPSLVAFLSKLDWGVAVLGDLDACRRVAYENVEDALNARIDYAELRFSPYYMAMKHSLPVTGVVEAVVDGVRAGVRDFGIQANLIGIMSRTFGTDACQQELDAILSQKNHIVAVDLAGDELGQPGDRFIQHFKQVRDAGLHVTVHAGEAAGPESMWQAIRDLGATRIGHGVKAIHDPKLMDYLAQHRIGIESCLTSNLQTSTVDSLATHPLKRFLEHGILACINTDDPAVEGIELPYEYEVAAPQAGLSQEQIRQAQLNGLELAFLSDSEKKALLAKAALRG

SEQ ID NO: 6040 - DNA, 996 bp, Vibrio vulnificus
  CDS (1)..(996): transl_table=11
atgaattactttgacctgccgaagatcgatttgcactgccacctagatggtagcgtacgcccgcagaccattattgaccttgctgacgaacagaacctcactttgccatcacgtgacattaacgtgatcaaagagatgatggttgcaccagaaacttgcccaaatttggatgagtatctgaaacgctttgagttgccaggtatggtcatgcaaacggcagaagcgctagagagaatttcatttgagctattcgaagacgctgcaaacgagaacgtcaaatatttagaagttcgctttggcccgcttttacaccaagtaaaaggcttaagccttgacgacatcatggacagcgtggtccgtggaatgaaacgtgcagaagcgcaatacgacatccacggtaactacattttgtctattctacgcaccatgccaaaagaccaaattaaagcggttttagaagcaggcgcaaaacaccttaacgatggtattgtggcttttgacctcgctggctctgaagttcctggattctgtcacgagtttgttccttacgcacaatacgcaaaagaattgggttaccgcatcactattcacgcaggtgagcaaggtgcaggacaaaacgtctatgacgcgatttctttgcttggcgcagagcgtgttggccacggcatcttcatccacaaccacccagaagcttaccagctcgttaaaggggaagaagtggctctggaaacgtgccctagcagtaacgttcagaccaaagccgtcaacagcttgagtgaacatccaattaaagcgttctacaaagacggtattgccgtaacgatcaacaccgacaaccgtaccgtgtcgaacaccacgatgaccgacgaagtgcgtaaagtcgttgaagcgtttgaactgacagaagcggaatacttcgatatctacaccatcagtgtcaacaatgccttcacctctgatgcggttaaacagcatctattgagcttcgctcagtaa

SEQ ID NO: 6041 - protein, 331 aa, Vibrio vulnificus
MNYFDLPKIDLHCHLDGSVRPQTIIDLADEQNLTLPSRDINVIKEMMVAPETCPNLDEYLKRFELPGMVMQTAEALERISFELFEDAANENVKYLEVRFGPLLHQVKGLSLDDIMDSVVRGMKRAEAQYDIHGNYILSILRTMPKDQIKAVLEAGAKHLNDGIVAFDLAGSEVPGFCHEFVPYAQYAKELGYRITIHAGEQGAGQNVYDAISLLGAERVGHGIFIHNHPEAYQLVKGEEVALETCPSSNVQTKAVNSLSEHPIKAFYKDGIAVTINTDNRTVSNTTMTDEVRKVVEAFELTEAEYFDIYTISVNNAFTSDAVKQHLLSFAQ

SEQ ID NO: 6042 - DNA, 996 bp, Vibrio vulnificus
  CDS (1)..(996): transl_table=11
atgaattactttgacctgccgaagatcgatttgcactgccacctagatggtagcgtacgcccgcagacaattattgaccttgctgacgaacagaacctcactctgccatcacgtgacattaacgtgatcaaagagatgatggttgcaccagaaacttgcccaaatttggatgagtatctgaaacgctttgagttgccaggtatggtcatgcaaacggcagaagcgctagagagaatttcatttgagctattcgaagacgctgcaaacgagaacgtcaaatatttagaagttcgctttggcccacttttacaccaagtaaaaggcttaagccttgacgacatcatggacagcgtggttcgtggaatgaaacgtgcggaagcacaatacgacatccacggtaactacattttgtctatcctacgcaccatgccaaaagaccaaattaaagcggttttagaagcaggcgcaaaacacctcaacgatggtattgtggcttttgacctcgctggctctgaaattcctggattctgtcacgagtttgttccttacgcacaatacgcaaaagagttgggttaccgcatcactattcacgctggtgagcaaggtgcaggacaaaacgtctatgacgcgatttctttgcttggcgcagagcgtgttggccacggcatcttcatccacaaccacccagaagcttaccagctcgttaaaggggaagaagtggctctggaaacgtgccctagcagtaacgttcagaccaaagccgtcaacagcttgagtgaacatccaattaaagcgttctacaaagacggtattgccgtaacgatcaacaccgacaaccgtaccgtgtcgaacaccacgatgaccgacgaagtgcgtaaagtcgttgaagcgtttgaactgacagaagcggaatacttcgatatctacaccatcagtgtcaacaatgccttcacgtctgatgcggttaaacagcatctattgagcttcgctcagtaa

SEQ ID NO: 6043 - protein, 331 aa, Vibrio vulnificus
MNYFDLPKIDLHCHLDGSVRPQTIIDLADEQNLTLPSRDINVIKEMMVAPETCPNLDEYLKRFELPGMVMQTAEALERISFELFEDAANENVKYLEVRFGPLLHQVKGLSLDDIMDSVVRGMKRAEAQYDIHGNYILSILRTMPKDQIKAVLEAGAKHLNDGIVAFDLAGSEIPGFCHEFVPYAQYAKELGYRITIHAGEQGAGQNVYDAISLLGAERVGHGIFIHNHPEAYQLVKGEEVALETCPSSNVQTKAVNSLSEHPIKAFYKDGIAVTINTDNRTVSNTTMTDEVRKVVEAFELTEAEYFDIYTISVNNAFTSDAVKQHLLSFAQ

SEQ ID NO: 6044 - DNA, 996 bp, Wolinella succinogenes
  CDS (1)..(996): transl_table=11
atgccaaccctaaaagagctcatcgccaaacttcccaaagccgaactccacctccatatcgaaggctctttggagcctgagcttatgtttgagctagcgcaaaagaatcgcatccctctcccctataaaagtgtcgaggaagtgagaaaagcctacagcttcacctcgcttcaatcctttcttgatatctactatgcaggagcgaaggtgcttctcaccgaatcagacttttttgatctagcatgggcttatttgcttcgatgcaaggctcaaaacatctgccacacagagatatttttcgatccccaaacccacacttcacgaggagtgagttttgaaaccgtgatagagggtatcaccaaagcccttgaaaagggcgaaaaagagctaggaatcagctcttttctcatcatgtgttttttgcgccatctaagcgaatcagagggttttgaaatcttgaaatcctcgctcccctttagagaaaaaattttaggcgtggggcttgattctagcgaagtgggacatccgccctccaagtttgaacgcctctttttggagtgcagaaaagctggttataaaatagtcgcacacgcaggggaagagggagatagctcctatatttgggaggcaatccacaagcttcaagtggagcgaatcgatcatgggattcgttgcgaagaggacgagaatctagtggagtggctcatccaaaaacagacacccctcacggtctgccccctctccaatgtcaagcttcaagccgtcaagaatctctctgagcataacatcttaagactgctccgcaagggtgttttagtcacggtcaactcagatgaccctgcctattttggaggttatcttaacgaaaactatgaggcactcagtgagcatttaaacgcaagcaaagaggagctaaaagccttagccatcaatagcttcaaggcctcgtttttgagcgaagagaaaaaaatggattggattaagcagatcatttaa

SEQ ID NO: 6045 - protein, 331 aa, Wolinella succinogenes
MPTLKELIAKLPKAELHLHIEGSLEPELMFELAQKNRIPLPYKSVEEVRKAYSFTSLQSFLDIYYAGAKVLLTESDFFDLAWAYLLRCKAQNICHTEIFFDPQTHTSRGVSFETVIEGITKALEKGEKELGISSFLIMCFLRHLSESEGFEILKSSLPFREKILGVGLDSSEVGHPPSKFERLFLECRKAGYKIVAHAGEEGDSSYIWEAIHKLQVERIDHGIRCEEDENLVEWLIQKQTPLTVCPLSNVKLQAVKNLSEHNILRLLRKGVLVTVNSDDPAYFGGYLNENYEALSEHLNASKEELKALAINSFKASFLSEEKKMDWIKQII

SEQ ID NO: 6046 - DNA, 25 bp, Artificial sequence
  primer
atggtttctgtggagtttttacagg

SEQ ID NO: 6047 - DNA, 26 bp, Artificial sequence
  primer
ctaatgcgaatatttagtgactactt

SEQ ID NO: 6048 - protein, 367 aa, Artificial sequence
  consensus sequence
  Variant (3)..(4): Xaa in position 3 to 4 is any amino acid
  Variant (5)..(5): Xaa in position 5 is any or no amino acid
  Variant (8)..(8): Xaa in position 8 is any amino acid
  Variant (10)..(11): Xaa in position 10 to 11 is any amino acid
  Variant (13)..(28): Xaa in position 13 to 28 is any amino acid
  Variant (29)..(62): Xaa in position 29 to 62 is any or no amino acid
  Variant (64)..(66): Xaa in position 64 to 66 is any amino acid
  Variant (68)..(102): Xaa in position 68 to 102 is any amino acid
  Variant (103)..(113): Xaa in position 103 to 113 is any or no amino acid
  Variant (115)..(118): Xaa in position 115 to 118 is any amino acid
  Variant (120)..(156): Xaa in position 120 to 156 is any amino acid
  Variant (157)..(174): Xaa in position 157 to 174 is any or no amino acid
  Variant (176)..(202): Xaa in position 176 to 202 is any amino acid
  Variant (203)..(232): Xaa in position 203 to 232 is any or no amino acid
  Variant (234)..(254): Xaa in position 234 to 254 is any amino acid
  Variant (255)..(261): Xaa in position 255 to 261 is any or no amino acid
  Variant (266)..(272): Xaa in position 266 to 272 is any amino acid
  Variant (273)..(277): Xaa in position 273 to 277 is any or no amino acid
  Variant (279)..(284): Xaa in position 279 to 284 is any amino acid
  Variant (285)..(285): Xaa in position 285 is any or no amino acid
  Variant (287)..(288): Xaa in position 287 to 288 is any amino acid
  Variant (291)..(295): Xaa in position 291 to 295 is any amino acid
  Variant (297)..(312): Xaa in position 297 to 312 is any amino acid
  Variant (313)..(327): Xaa in position 313 to 327 is any or no amino acid
  Variant (329)..(330): Xaa in position 329 to 330 is any amino acid
  Variant (333)..(356): Xaa in position 333 to 356 is any amino acid
  Variant (357)..(364): Xaa in position 357 to 364 is any or no amino acid
  Variant (366)..(366): Xaa in position 366 is any amino acid
PKXXXLHXHXXGXXXXXXXXXXXXXXXXXXXXXXXXXXXXXXXXXXXXXXXXXXXXXXXXXXLXXXLXXXXXXXXXXXXXXXXXXXXXXXXXXXXXXXXXXXXXXXXXXXXXXEXXXXPXXXXXXXXXXXXXXXXXXXXXXXXXXXXXXXXXXXXXXXXXXXXXXXXXXXXXXXRXXXXXXXXXXXXXXXXXXXXXXXXXXXXXXXXXXXXXXXXXXXXXXXXXXXXXXXXXEXXXXXXXXXXXXXXXXXXXXXXXXXXXXHAGEXXXXXXXXXXXXAXXXXXXXRXXHGXXXXXDXXXXXXXXXXXXXXXXXXXXXXXXXXXXXXXCXXSNXXXXXXXXXXXXXXXXXXXXXXXXXXXXXXXXNXD

SEQ ID NO: 6049 - DNA, 588 bp, Saccharomyces cerevisiae
  CDS (1)..(588)
atgtccgggtcgttaaaatctctagacaagaaaatagctaaaagaaggcaggtgtataagcccgtgctagacaatccgttcacaaacgaagcacatatgtggccgcgcgtgcatgatcagccattgatttggcagctgctgcaatcctctatcataaataagttgattcacattcaatcgaaggagaactacccttgggagctgtatacagatttcaatgaaattgtgcagtatttgagcggcgctcacggaaacagcgacccagtatgtctatttgtgtgcaataaggaccctgatgtaccgcttgtgctcttgcagcaaatcccgctattatgctatatggcgcccatgacggttaaactggtgcagttgcccaagagtgccatggataccttcaagtcggtttctaaatatggaatgctgctgctgcggtgcgacgatagggtcgacaagaaattcgtatcgcagatccagaagaacgttgatctgcttcagtttccctggttaaatgctatcaagtatcggcccacatctgtcaagctgttgaaaactacagtgccaattgtctcgaagaagaggcaaaagtag

SEQ ID NO: 6050 - protein, 195 aa, Saccharomyces cerevisiae
MSGSLKSLDKKIAKRRQVYKPVLDNPFTNEAHMWPRVHDQPLIWQLLQSSIINKLIHIQSKENYPWELYTDFNEIVQYLSGAHGNSDPVCLFVCNKDPDVPLVLLQQIPLLCYMAPMTVKLVQLPKSAMDTFKSVSKYGMLLLRCDDRVDKKFVSQIQKNVDLLQFPWLNAIKYRPTSVKLLKTTVPIVSKKRQK

SEQ ID NO: 6051 - DNA, 582 bp, Eremothecium gossypii
  CDS (1)..(582)
atggagtccgtcagagcagtcgagaagcgagtcgcgaagaagaagcaggtgtacaagccgatcctcgataatccgtacaccaacgaggcggagctgtggccgcatgtcagagagcagagcgttgttgtggagctgttgttgaacgccgtgctacggccgctgcggcacgcccgcgagctcggtggagcgcctccgttcgaggtgcacaccggctacaacgacgtgatggagcgcctgggctgcgccgagagtggtactgcgctgctctttgtgtgcactcgagacggcacgcccgccgtgctcctgtcccaggtaccacttgcggcgcatgtctcggcgctggacgtggctgtggtgcagctgccctgcggcacgctggcgcgctttgacgagcatctccctggcacgccgcacgacggcatgttgctggtcccggagactgcggccgtggaccccgcgttcgtgcagaaggtcagggcaagcgtggagcgaagagcaataccctggctggaaccgctgcgctacaagaaggcccctgtaaaactgctacggacggtgatgccgctgcgcagcaccaagtag

SEQ ID NO: 6052 - protein, 193 aa, Eremothecium gossypii
MESVRAVEKRVAKKKQVYKPILDNPYTNEAELWPHVREQSVVVELLLNAVLRPLRHARELGGAPPFEVHTGYNDVMERLGCAESGTALLFVCTRDGTPAVLLSQVPLAAHVSALDVAVVQLPCGTLARFDEHLPGTPHDGMLLVPETAAVDPAFVQKVRASVERRAIPWLEPLRYKKAPVKLLRTVMPLRSTK

SEQ ID NO: 6053 - DNA, 597 bp, Kluyveromyces lactis NRRL Y-1140
  CDS (1)..(597)
atgaacagtttacaaaaggaggagaaacgggttgctaaacgcagacaggtgtataagccgattttagagaatccgtttacaaacgaagctaaactatggcctcatgtcacggatcagaaattagtcctggagttattagaggagaaagtattgaagagatggaagcttttacaggatatgggtaacaatgaagaatctataacagttggtttcaacgaaatcgtcgatcttttaagccatgggaaagatgaatatatgctgttcgtatgcaataaagatttgccgtcagttttaatttcgcagttacctatcttatgtgaaacctcggaccatacagtgacgcttgtccaattacctcgactctcgtcggccaagttcgatgacgcgttcagggatgtagtgcatgacggtatgtgtcttgtgcgcacacatgctcattatcaggattttgcaaagatgatctctaccaaagtggaaccattatccataccatggctgcattctgcacagttcaaaaaggctcccgtcaagctattggcaaccaccgcaccgatcataaagaaacaagggaaacaagggaaacaagtgccatcctaa

SEQ ID NO: 6054 - protein, 198 aa, Kluyveromyces lactis NRRL Y-1140
MNSLQKEEKRVAKRRQVYKPILENPFTNEAKLWPHVTDQKLVLELLEEKVLKRWKLLQDMGNNEESITVGFNEIVDLLSHGKDEYMLFVCNKDLPSVLISQLPILCETSDHTVTLVQLPRLSSAKFDDAFRDVVHDGMCLVRTHAHYQDFAKMISTKVEPLSIPWLHSAQFKKAPVKLLATTAPIIKKQGKQGKQVPS

SEQ ID NO: 6055 - DNA, 753 bp, Yarrowia lipolytica CLIB99
  CDS (1)..(753)
atgtcagtactgggggaggaaaaacgcaaagcggtgctcaaacaggttctggaggacccttatcttaaggttgcatggcccgaggtctccgaggacaaaagggaatccatattcagtctcttacaatcggcgctggcacccgtcaaaccataccgagagtctcaacgacaggctaaagacacaggcgttaagctgccacctaccccaggcgctgtggagcagtcgtcgctgggcttcaatcccgtcacaaaggcactgcaaagccaggccaaacagaatctgctcagtgagcctgtgaaggaaccgatcaccatggtgttcatttgcaaggacgacatccaacccgagattctcgtcaaacactttccttcgctttgtgcaagtgcaagcaacacacagactgctgtaaagctcgtttctctgccagcaggctccatggagaagttgtctgaagttactggacttcgtgatctaggctgtgtggcactcaaggcccataaggactttgatactttgtccaaggtgataatggcttctgtgcttgacgtggaattgccgtggaagtccgagagtccattcacccctctggaagtcaagagtctgactacatttgcacccattaagaaaagcaagaaccagctgaccgctgaaaagaagggaaaagagaacaaccaaaaggaacaacagcagaagcagcagaaacaagggaaacagggcaatgcgaagcccaaaggaaaagtcaccaagccttag

SEQ ID NO: 6056 - protein, 250 aa, Yarrowia lipolytica CLIB99
MSVLGEEKRKAVLKQVLEDPYLKVAWPEVSEDKRESIFSLLQSALAPVKPYRESQRQAKDTGVKLPPTPGAVEQSSLGFNPVTKALQSQAKQNLLSEPVKEPITMVFICKDDIQPEILVKHFPSLCASASNTQTAVKLVSLPAGSMEKLSEVTGLRDLGCVALKAHKDFDTLSKVIMASVLDVELPWKSESPFTPLEVKSLTTFAPIKKSKNQLTAEKKGKENNQKEQQQKQQKQGKQGNAKPKGKVTKP

SEQ ID NO: 6057 - DNA, 747 bp, Candida albicans SC5314
  CDS (1)..(747): transl_table=12
atgtattgtaatctagagaaatataccgcgcataaaaaaaatatagtagtaaaatctttttgcgatgagagagaccccaagactatgaataaatcaaataaagtcaagaaaccttcggtggccaaagtctcaactaaagctgcttcatcatcactcaagtctcaggaagcaaagagaaaacaagttttccgtccaattctcgataactcatttacacaatcaaaccaatggccatttatagaaccaactattgcaaacgatattgttgatctactagaagtattgctaaaaatgcaagactctacatttaaataccgtgggtttaatccaactgtgtctgctcttgaaaaacaagcagctgctaatcgtggtatacataaaaatgcttgtgtacaaataaagtatgtatttgtgtgcaagtacgatatatccccagcaacgctcacaaatgtgtttcctacgttgtgtttcacggcgtcaaaaagtgctgaagatcgggttaagctaatccagttaccaagaggaagtctagaacggttatcgaaagcacttggggtagatagagttggtatatttggtctaactaaagatactgaaggggcacaaccgttatttgatcttataaatgaaaatgtcaaagatattgaagctccttggctagactgtattttccgtgaggagatggtatttaatcaacctaacacaaagcatgtggcaagtactgtaggtagaaagaaaaacaagtag

SEQ ID NO: 6058 - protein, 248 aa, Candida albicans SC5314
MYCNLEKYTAHKKNIVVKSFCDERDPKTMNKSNKVKKPSVAKVSTKAASSSLKSQEAKRKQVFRPILDNSFTQSNQWPFIEPTIANDIVDLLEVLLKMQDSTFKYRGFNPTVSALEKQAAANRGIHKNACVQIKYVFVCKYDISPATLTNVFPTLCFTASKSAEDRVKLIQLPRGSLERLSKALGVDRVGIFGLTKDTEGAQPLFDLINENVKDIEAPWLDCIFREEMVFNQPNTKHVASTVGRKKNK

SEQ ID NO: 6059 - DNA, 24 bp, Artificial sequence
  primer
atgtccgggtcgttaaaatctcta

SEQ ID NO: 6060 - DNA, 24 bp, Artificial sequence
  primer
ctacttttgcctcttcttcgagac

SEQ ID NO: 6061 - protein, 219 aa, Artificial sequence
  consensus sequence
  Variant (2)..(6): Xaa in position 2 to 6 is any amino acid
  Variant (8)..(10): Xaa in position 8 to 10 is any amino acid
  Variant (12)..(14): Xaa in position 12 to 14 is any amino acid
  Variant (16)..(16): Xaa in position 16 is any amino acid
  Variant (19)..(19): Xaa in position 19 is any amino acid
  Variant (21)..(22): Xaa in position 21 to 22 is any amino acid
  Variant (24)..(24): Xaa in position 24 is any amino acid
  Variant (26)..(27): Xaa in position 26 to 27 is any amino acid
  Variant (29)..(42): Xaa in position 29 to 42 is any amino acid
  Variant (43)..(45): Xaa in position 43 to 45 is any or no amino acid
  Variant (48)..(70): Xaa in position 48 to 70 is any amino acid
  Variant (71)..(86): Xaa in position 71 to 86 is any or no amino acid
  Variant (90)..(94): Xaa in position 90 to 94 is any amino acid
  Variant (96)..(108): Xaa in position 96 to 108 is any amino acid
  Variant (109)..(119): Xaa in position 109 to 119 is any or no amino acid
  Variant (122)..(122): Xaa in position 122 is any amino acid
  Variant (123)..(124): Xaa in position 123 to 124 is any or no amino acid
  Variant (126)..(127): Xaa in position 126 to 127 is any amino acid
  Variant (129)..(132): Xaa in position 129 to 132 is any amino acid
  Variant (134)..(134): Xaa in position 134 is any amino acid
  Variant (137)..(142): Xaa in position 137 to 142 is any amino acid
  Variant (143)..(146): Xaa in position 143 to 146 is any or no amino acid
  Variant (148)..(148): Xaa in position 148 is any amino acid
  Variant (154)..(166): Xaa in position 154 to 166 is any amino acid
  Variant (167)..(170): Xaa in position 167 to 170 is any or no amino acid
  Variant (172)..(187): Xaa in position 172 to 187 is any amino acid
  Variant (188)..(188): Xaa in position 188 is any or no amino acid
  Variant (190)..(192): Xaa in position 190 to 192 is any amino acid
  Variant (194)..(198): Xaa in position 194 to 198 is any amino acid
  Variant (202)..(210): Xaa in position 202 to 210 is any amino acid
  Variant (213)..(213): Xaa in position 213 is any amino acid
  Variant (215)..(215): Xaa in position 215 is any amino acid
  Variant (217)..(218): Xaa in position 217 to 218 is any amino acid
SXXXXXKXXXKXXXVXKPXLXXPXTXXAXXXXXXXXXXXXXXXXXLLXXXXXXXXXXXXXXXXXXXXXXXXXXXXXXXXXXXXXXXGFNXXXXXLXXXXXXXXXXXXXXXXXXXXXXXXKDXXXPXXLXXXXPXLCXXXXXXXXXXVXLVQLPXXXXXXXXXXXXXXXXXGXXXXXXXXXXXXXXXXXIXXXVXXXXXPWLXXXXXXXXXVKXLXTXXP

SEQ ID NO: 6062 - DNA, 1512 bp, Saccharomyces cerevisiae
  CDS (1)..(1512)
atgcacctagatctcatacacaagtccttcatcttagtgtggctcatatatatacgagccgcgttggctgaccaattcacatataaagcttgctattcagctagtgatatacgaaaattggggttgacttacaagggtgtttacgagtatcaatcagtttcctactgtcaaaatgaatgccctggtcaggctgtcgttgctcttttcaacggtacaggttgctactgtggtggttccgtagctcagttacagtctttgacgcaggtagattcgagcaaatgtgatgtttcgtgtgctggctggccctaccaaaattgtggtggttcttctgccatgaacgtttatatcaataacgctgcttctaccgcggactcaacttcatctactgctacctcaacatcgacaacatcttcatcaagcacaagtgttagttcaaaaacgtccacgaaattggacacgaaaacttcaactagttcttctgctacgcactcatcctcttcctcgtctacaacctccactaccacttcctcttcagagacaactacttcctcctcttcttcatcctcttcctcttctacgtctactacttctactacttctactacctctagtactacttctacttcttcttctccttccaccacttcctctagcacttctgcctcttccagttcagaaacgtcctctacgcaggcaacttcttcatccaccacatcgacctcatcctcaacttcgacagcaacggtcacttctaccccctcatcgacttcaataggtacttccacgcattacactacccgtgtggtgacgcagtccgtggtttctcaagctaaccaacaagcaagcacgatctttaccaccaggacctctgtttatgcaacagtatcgtctacgtcctcctctactagttctctcttaaacgggaaatcgagctcgtccaagagcaaaggcttgagtggtggcgccatcgcaggtgtcgtagtaggtgtggtttgtggtacagttgccttgttggctctggcgttattctttttcgtatggaaaaaacgtcgccaatcttctcagcatgtggacttggaagagacaaagcagtaccagccgtactcactgggtgatgctgacgctaaccctgttattccaccgtctgcttcgagcactaactggcacataccctctaggaataatacagcattgtccaagaatacagcgtctacttttgccacttatgatctgccgacaagggcgccgggcggcagagattctattattactggtgatgcacataatatcagcaaaagaagtcactttccctcggtagtgtacgaggagcctccttcgatctataacgggaaccaaaggttcagtgctacttcgctgcccgatatgatggaagaaagacaactacacattgtcaaccccgataatgtgagttcaaatattgggagtaatgtctcagatggtgatgatgattacgatgatgcaaaggattccaataatagttctttgcgctga

SEQ ID NO: 6063 - protein, 503 aa, Saccharomyces cerevisiae
MHLDLIHKSFILVWLIYIRAALADQFTYKACYSASDIRKLGLTYKGVYEYQSVSYCQNECPGQAVVALFNGTGCYCGGSVAQLQSLTQVDSSKCDVSCAGWPYQNCGGSSAMNVYINNAASTADSTSSTATSTSTTSSSSTSVSSKTSTKLDTKTSTSSSATHSSSSSSTTSTTTSSSETTTSSSSSSSSSSTSTTSTTSTTSSTTSTSSSPSTTSSSTSASSSSETSSTQATSSSTTSTSSSTSTATVTSTPSSTSIGTSTHYTTRVVTQSVVSQANQQASTIFTTRTSVYATVSSTSSSTSSLLNGKSSSSKSKGLSGGAIAGVVVGVVCGTVALLALALFFFVWKKRRQSSQHVDLEETKQYQPYSLGDADANPVIPPSASSTNWHIPSRNNTALSKNTASTFATYDLPTRAPGGRDSIITGDAHNISKRSHFPSVVYEEPPSIYNGNQRFSATSLPDMMEERQLHIVNPDNVSSNIGSNVSDGDDDYDDAKDSNNSSLR

SEQ ID NO: 6064 - DNA, 933 bp, Schizosaccharomyces pombe 972h-
  CDS (1)..(933)
atgtctgataatatagcatttgtagctatccgtaataatcaatgttattgcggtagtacacttactgctacagaagtttcaagttctctttgcacaacgccttgtccaggttatggttctcttatgtgtggtggtgatctgtactggtcggtttatctgactggcaatggggttttgcaaaccacggtttctagctcgtcagtgtcgtctacgacctcttcgtcttcatcatcatctccaagctcatcttcaactacaacaacaacatctccttcttcttcttcttcttcttcgtcttcgtcgtcttcctcttcttcttcgtcttcttcttcttcttcttcctcatcttcctcttcctcttcctcttcctcttcgtcttcgtcttcttcgtcttcttccagctcttcgtcttctagttcttcctcttccgtaccaataacgtcttccaccagttcttctcattcttcttcatcttcaagctcatcttcctcttcatcttctagtcggccatcttcgtcttcgtcgtttatcacgaccatgtcctcatctacttttatttctactgtcacagtaacaccaagcagttcctcttcttcaaccagtagtgaagttccaagcagtacggctgccctcgctctaaatgcaagcaaggcgtcaaaccatacgtccttgaatgcaggtgctattgtgggtattgttatcggttgtgtggcattcgccgtggtaatggcattgtgcattttcctatacttctatttcaggagattcaaaattagaatgagcgactcggcaaatgaaggaaaatatccctcctatgctagtgaattagattctcgcttggatcctgccatgatgaatcgcaaatcaagtgaatctttggctgacagtcaggattattcgagaaagatattgcgtgtcacaaatttgaactaa

SEQ ID NO: 6065 - protein, 310 aa, Schizosaccharomyces pombe 972h-
MSDNIAFVAIRNNQCYCGSTLTATEVSSSLCTTPCPGYGSLMCGGDLYWSVYLTGNGVLQTTVSSSSVSSTTSSSSSSSPSSSSTTTTTSPSSSSSSSSSSSSSSSSSSSSSSSSSSSSSSSSSSSSSSSSSSSSSSSSSSSSVPITSSTSSSHSSSSSSSSSSSSSSRPSSSSSFITTMSSSTFISTVTVTPSSSSSSTSSEVPSSTAALALNASKASNHTSLNAGAIVGIVIGCVAFAVVMALCIFLYFYFRRFKIRMSDSANEGKYPSYASELDSRLDPAMMNRKSSESLADSQDYSRKILRVTNLN

SEQ ID NO: 6066 - DNA, 1176 bp, Eremothecium gossypii
  CDS (1)..(1176)
atgggaccaggtcagctatggaagctagcgctgcttgcacagctggtcgcgaggggcctggcgcaggtcaacttcgagttcagcactgagtcgttctcatactacgggtgctacgaggtcgcagcactgaaaggctcgttaagatacgacggccaatccatctttaataccaaggacttgtgcatcaagaactgcgagaaaggagcgcttgcggtcgtgaaggaaaaagaatgctactgtggggatagcgctagtgtcctcagtggtctgacggctgcaggggaagataagtgcacgagtaaatgtcctattcttggcgcaacctgcggcgggccgagcgcgtactctgtctacgtcaacgacaaacaccagaaggatatctcggatgagcctaagtctccttcatccactaccgcgcagacgtcttcggaagctgcgcatacatccagctctactaagacgacgacctcatcgactgccgctccgacaacattggccagcactcagccctcgaccacttcgacttcgacttccagcacatcttcgcagacgacaacggtcgcaccagcgacgacagaaaataccccgacaacgtcggtgactcagccgccaaatccacaaacaaccgtttcttactcagttactacaagagtttcagaagggtcaactattatcagtacagcagaacctgtcactcgaacgataacgggatctgccccttctagcacaagttctgccccagaacactcgacttctgatgcgccgaaaaagaacagcaagtcgctatcgggcggcgcaattgccggaattgtgcttggctcgcttgcactagtggccattttcatagccctcgccgttttcatcatggtcaaccgtgatcgggatgatgtatccagcgagcccgacttggaggagaagcgattccatcagccatattcgttcggagaccaggacccgctgccgctgaattatactgatccttcctcgacttcaaactcaagacaccaaacaagatcgacgtcggaacaatcggcgcaccatgcgcttttcgcagaccaagctcctgtggcgcattaccaagaagccggcttgggacgtccaagattgagcaatagttcgctccccgatgttaccgcgaatagaccattacggattgccaatcctgataaagactaa

SEQ ID NO: 6067 - protein, 391 aa, Eremothecium gossypii
MGPGQLWKLALLAQLVARGLAQVNFEFSTESFSYYGCYEVAALKGSLRYDGQSIFNTKDLCIKNCEKGALAVVKEKECYCGDSASVLSGLTAAGEDKCTSKCPILGATCGGPSAYSVYVNDKHQKDISDEPKSPSSTTAQTSSEAAHTSSSTKTTTSSTAAPTTLASTQPSTTSTSTSSTSSQTTTVAPATTENTPTTSVTQPPNPQTTVSYSVTTRVSEGSTIISTAEPVTRTITGSAPSSTSSAPEHSTSDAPKKNSKSLSGGAIAGIVLGSLALVAIFIALAVFIMVNRDRDDVSSEPDLEEKRFHQPYSFGDQDPLPLNYTDPSSTSNSRHQTRSTSEQSAHHALFADQAPVAHYQEAGLGRPRLSNSSLPDVTANRPLRIANPDKD

SEQ ID NO: 6068 - DNA, 5292 bp, Gibberella zeae PH-1
  CDS (1)..(5292)
atgaagctgcttacactcattctctcggccctggtcggccgagtggttggtctggcttctacagataccatcacctggggaggcgacaactcgcgaacaggataccaaaccaaccataacatggaccctgccatcgtaggcagccctcaattcgacatcgtcttcaaaaccgcgcttcctggccgctacatcaacgccgccgagcaaatattttctcaaccactcgtttacactccttcaaacgacaccaagcaattcgtctaccttgcaaccacgcaaaacaacatttacaaactcgacgccaaaacgggcgttatcatcgcgtcacgaaacatcggcattcctttccttacagcggatctggatggctgtgtcgatgttaacccgaccgtcggcgtcactgcgacgggtgtcattgaccccgatacggatacctggtacatcacctccaagacgtacgtcgaccagaactatggcccaaagccacaagggaggccggccggtcggtataagattcacgctatcaacgtcaacgatctttccgaacagcccaacttccctgtcgatctcgagggcaccattgcacgaaacaatcccgagcgcatgttcaccggcggcattcaccaccagcgaccaggtcttctccataccggacaattcgtctacgcaggcttcgcttcgcattgtgtgcagtacaatttcaccggctggatcatgggctgggacaagaccagcggcaagattgttgagcgctgggcttccgaaggcatgggtgtcagtaacaacatctctggggctggtatctggcaatccggaggcggccttgcttctgataacgcgggatcaatgttcttcgctaccggaaacggatacgcttcacagctgtcgaccatccctgtcaatggattcactcctcctaccgcgatggaacaagccgccgttcacatgtccatcaactctgacggtacgctctcggtagttgactttttcatgcctttcgaaaaacaggaactcgatggtgcggataaagatcttggaacgagtccgcttgaacttttgccgagtcaattctcatgtggcaacatcaagagaatgggcatcgtcactggaaagtctggaaagacgtactggctgaacctcgatgacttgggtggttatcgcaatggacccaactccaaagatcgagtcattcagaccttccagaatgagaattctgtctacgcaggtgctggcgtgtatcctctggaaggcggttacatctacatcaatgtcatccaatatcccacccatgtcttcaagttctcttgtctcaacggcgttccctacttcaccaaagtcgctgacagtcccacgaacaacgcttacatcctcggtgtcagccatggaactaccacatccctcaacggacaggaaggcacaggtcttctttgggtctctgatgttcaaaacaccaatttcaagatctacgatgctgtccctcagaatggatacctcaacgtcatccgaaacttcacaatcgtcggcatcacaaagttcagcaggccagtgtttggcgatggcatggcgtatatcggtaccacagttggctacctctacggtcttggctcgactaacaagtaccctcttaactgtacttcttcagttgactttggaacagccaacttccagaatgctacaagtcctcagacaatcaattgtaccgcgctgttcgatctctctgttaccaacattagtcttggcgacgcgacgaattacaacatcaccaagacgcccagtctgccattgtccatgtcagcaggagatcagcttcaattctcggcgcagttctctccccagggtgttggtcgcttgggcggaatggtcaatatcatgacttcgggtgtttcagacgcgtcttacagcaagtctaccaaagtccgacttacaggtattggcacaagttcgaacgctttgttggatgtcagccccaagtctgttgtttttaccggtctcgtcagtggttctcaatctactacacagactatcctcattggtaacgacggtagtcagaacctaacggtcacttcggtcatgtacacaaatacttcctcatctggtcccttcactacctggacaggcactggtaacctgacagttggccaattcacactttctgggattcccaactccgttagtggtggcggcgatagtgctataactgtcctccccaacaccgccacgtctggcaacttcactgcttgggtcaagttcgttaccactggcggtaatgccacagtctcgttgtcagcagcagcgggtgatccacctacagcacttctcgagtttcagacaccagatagaagcggctgggtcaagtacgaccccaacactcccttcacctttggcaacgtgacagagaacacatcaaagtcactgctctttcgaatcagcaacaaggcttctgctggtggtgtcaagcttggactcactgtatcgaagcctccatttggtgttcctggtatcgtccgatcagccaaccagattgatatggccgagggtactctgattgcacctggtcagagtcaaacagctactattacctgcaatgtccccaagagtcagtggaatgtcccgtcgtacaatggcaccgcacaatggaccatcaacaccaacgatccgacgtggagtttcgagaagcgcgcagttcaattcttttgcaatgccgtcgccgaacaagccgctcctctccttcccagcggccagggccaataccaatatgtgggttgcttcaaggagaacaacccaagccgtcagctgtccagtcttctctatgctaatagctccaacacgaacgagatgtgcatcaacacttgcggcgaagaaggtctgacattctgcggcacgcaataccgtagtgaatgctgggctggaaacaagatccccacccaaaaggtcgacgacgcgaactgcaacttcgactgtgcgggtagcctgaaccagtactgcggtggtaacggtgttgacggaagcggtgcctacatcagtctcttcgctgatacgcttcagtgggatggaagcttatctggtggttcaactagtggcggcagcggaagtagcggcggaagtggtggcacaaacacaccgcagggacccttcgtgaatcccggtgttgatggatacaccagcatcggatgctacactgaggcaacttcaggcagagcactccccaacggacgaggcatagactcacctaccgtggcagaatgtgtcgatgcctgcagcagtgggaactttgtctacgctggagttgagtacggtggcgagtgctattgtggtaacaccttttccgatggctccgtgccagcccccatcgccgactgtggcatgctttgcaatggcaactcgagcgagtattgtggtggtcccaaccgtcttaacgtgtatcaggtcaattcggcttacagtgcttcgctgccaacttcgtcgtctacgtcttcctcgagcagcagtacctcctcctcgacatcatcgtcgtcaagtacttcgttgtcaacctccacctcgacttcgacctcgacttctagtacttctagctccataagcacaagctctacatccagtagtacttcgactaccagcacttctacttcaagcaccacgacttcaagcaccacgacttcaagtagcactaaaacgagtagtaccaccacaagctctacttcgtcttcttcatcaacttctaccagcacttccttgagtacctcgagtagctcaagcagcttgactggtaatgtcgccggtggtgcaaacgccgcttctacttccacgtctaccagtaccacgaagacctccacttccacaacgagtagcagtttgaccagcagttcgatttctagcagctcaagcactacctctcaatccacgacctcgacgacctcaagcaccagcacgacgagtacatcgacgactagttccagcacatccagctctagttcaagtagttcatcgacatggacaaccttttctactgcctcttctgtcagtagccgatcaacgacttccacaacgagttctactacgtctgtggcagttccctccagcgcaggtgcttcgagtattgtatcatctagcacatcatcgtccgtgactagtcgcacaacgtctgctggcacgtccttggttgtaccattaacccaagttgccggcctgtcgagtgtttcatcatctgggtcctcactggtcgcaccttcagttaattcccaggcaactgccccatcggcaccttcatctgccggttctttggtggttgccccttcaagctctatcggaggcgtgtcaattccttcgtctgctgccacatcgttgagtctcccatcagtcagttctcaaattggaggatcatcaattgcctcttctgctggtgcctcatccgtcgcctcctcgttgagctctcaggttgtagtcgcaccgggtatctcatctgcctttactctggctggaacttcccgcacgacgtctaccacatcttcgaccgcgacctcgacaacgtcgtcgacttcaaccacaacctcccgcacctcaacgagtaccaccagctcaaccacatcctccgtcaaccctgtcgctacaggcccttccatctccgacaaaataggtacatggtcattccaaggatgctgggcagaacccctcttcctcatccgtgcgctcagctccaagaccacctcaagcaacgacatggaccttgatgcttgcgccgccttttgtacaggctatacgtacttcggtgccgaaaacggtcgtgattgttattgtggaaatttccttaacctcggaagctaccaagctctcaatcaaaaggactgctccgctacttgcgcaggcgacaagacacagtattgcggtggaacgcaaagactacaactttacaaagctggcaaacccacgactggaaacaagaactttcaaagttacgcctgcgcatctgagccgctcataggccgtctacttaccgacctcgtcctttcggactccagagctatgacagtcgatacgtgtctcgacaagtgcggcaactacaagtacgctggtgttgagaatggacgtgattgctattgcggtaactctgttaattggcagggtcttatcggacagggtaagaatgtttccatgacggattgcaatattagctgtcctggtaacaaccttgcttattgcggtgggttgttgaagatgaatttgtacatcaataactctactgcgaacgcgtttttgagtaggcataggagaagacatgcgaaggggctactgtag

SEQ ID NO: 6069 - protein, 1763 aa, Gibberella zeae PH-1
MKLLTLILSALVGRVVGLASTDTITWGGDNSRTGYQTNHNMDPAIVGSPQFDIVFKTALPGRYINAAEQIFSQPLVYTPSNDTKQFVYLATTQNNIYKLDAKTGVIIASRNIGIPFLTADLDGCVDVNPTVGVTATGVIDPDTDTWYITSKTYVDQNYGPKPQGRPAGRYKIHAINVNDLSEQPNFPVDLEGTIARNNPERMFTGGIHHQRPGLLHTGQFVYAGFASHCVQYNFTGWIMGWDKTSGKIVERWASEGMGVSNNISGAGIWQSGGGLASDNAGSMFFATGNGYASQLSTIPVNGFTPPTAMEQAAVHMSINSDGTLSVVDFFMPFEKQELDGADKDLGTSPLELLPSQFSCGNIKRMGIVTGKSGKTYWLNLDDLGGYRNGPNSKDRVIQTFQNENSVYAGAGVYPLEGGYIYINVIQYPTHVFKFSCLNGVPYFTKVADSPTNNAYILGVSHGTTTSLNGQEGTGLLWVSDVQNTNFKIYDAVPQNGYLNVIRNFTIVGITKFSRPVFGDGMAYIGTTVGYLYGLGSTNKYPLNCTSSVDFGTANFQNATSPQTINCTALFDLSVTNISLGDATNYNITKTPSLPLSMSAGDQLQFSAQFSPQGVGRLGGMVNIMTSGVSDASYSKSTKVRLTGIGTSSNALLDVSPKSVVFTGLVSGSQSTTQTILIGNDGSQNLTVTSVMYTNTSSSGPFTTWTGTGNLTVGQFTLSGIPNSVSGGGDSAITVLPNTATSGNFTAWVKFVTTGGNATVSLSAAAGDPPTALLEFQTPDRSGWVKYDPNTPFTFGNVTENTSKSLLFRISNKASAGGVKLGLTVSKPPFGVPGIVRSANQIDMAEGTLIAPGQSQTATITCNVPKSQWNVPSYNGTAQWTINTNDPTWSFEKRAVQFFCNAVAEQAAPLLPSGQGQYQYVGCFKENNPSRQLSSLLYANSSNTNEMCINTCGEEGLTFCGTQYRSECWAGNKIPTQKVDDANCNFDCAGSLNQYCGGNGVDGSGAYISLFADTLQWDGSLSGGSTSGGSGSSGGSGGTNTPQGPFVNPGVDGYTSIGCYTEATSGRALPNGRGIDSPTVAECVDACSSGNFVYAGVEYGGECYCGNTFSDGSVPAPIADCGMLCNGNSSEYCGGPNRLNVYQVNSAYSASLPTSSSTSSSSSSTSSSTSSSSSTSLSTSTSTSTSTSSTSSSISTSSTSSSTSTTSTSTSSTTTSSTTTSSSTKTSSTTTSSTSSSSSTSTSTSLSTSSSSSSLTGNVAGGANAASTSTSTSTTKTSTSTTSSSLTSSSISSSSSTTSQSTTSTTSSTSTTSTSTTSSSTSSSSSSSSSTWTTFSTASSVSSRSTTSTTSSTTSVAVPSSAGASSIVSSSTSSSVTSRTTSAGTSLVVPLTQVAGLSSVSSSGSSLVAPSVNSQATAPSAPSSAGSLVVAPSSSIGGVSIPSSAATSLSLPSVSSQIGGSSIASSAGASSVASSLSSQVVVAPGISSAFTLAGTSRTTSTTSSTATSTTSSTSTTTSRTSTSTTSSTTSSVNPVATGPSISDKIGTWSFQGCWAEPLFLIRALSSKTTSSNDMDLDACAAFCTGYTYFGAENGRDCYCGNFLNLGSYQALNQKDCSATCAGDKTQYCGGTQRLQLYKAGKPTTGNKNFQSYACASEPLIGRLLTDLVLSDSRAMTVDTCLDKCGNYKYAGVENGRDCYCGNSVNWQGLIGQGKNVSMTDCNISCPGNNLAYCGGLLKMNLYINNSTANAFLSRHRRRHAKGLL

SEQ ID NO: 6070 - DNA, 1392 bp, Candida glabrata CBS138
  CDS (1)..(1392)
atgttctggcacttcttgctgctcttgtgtgctgtgcgtgcagagcaactgttctgctcgaatgaaaacagtgcttctggcccaggtacttcctacacatggcagagcaccgggtggtgtgcgtcgcattgcagcggctacgactacgccattgttcagggactcatgtgctggtgctccaactccgggcctgctgatagcatagacatatccagctgcgaccactactgccccggctacagcctggagaactgcgggagccagcagaataacgcatacgggtacatgtacctcgggagccagccccagagcgccattataccacccagaaagagctccaatactgcgcaatcctcgactccaagttctaccagcgctgcaagcacttcaagcacatctacaagcacttcaagcacatctacaagctccacaagctctacaagctctacaagctctacaagctctacaagctctacaagtacttcaagcacaagctctagttctagctctacaagttctacgaggtcatcctcaaggactacactagcaccttctaccacgtcttcatcctctcgcactcgctcgagttcagaggcctcggacgactatgtgctgtcaacttcgatgatatactcggtgatgacagtcacatcaacacagacgcacgattccgccgtgcagtccaatgtgacgtcagtgttctcctccaacgtgataacgacaaaagtagtcacatccatcatatcgacagtggccactgtggctaccaccacgacgagccaggcggccaacacatccgtggcctctacagcggcgggtatgcgtgggagctcgaaccagggcgatgtgagcgaaaagaaagcgaaggggtactggcagtcaccgggcaaagttgcgggcacttttgttgtagttggcgttgtcatcctcgccattctggggctgctgttctggtacttcgtgctgcgccctagatgggaacaaaagaaattcgaaaagaactacaatgacgcagttggtctagcaccagcaactccgccaaatatgccaagaaatgaaagcggccacagcagaattttctcaacaccaatattccacacgcaccattcaagcagcgaggacgactcgtcaacgggatccaatggtgctggctttaacgaggagaaaaacttagacgaggctaatgtgaagacaaacaagcgtgccacaaggcatgacgttttcgcagacgacgcctactctgattactctaatacaattccagtcatggttgaccaaagattggatcctaaccaaatgatgtcacaaatagaacaaagtccttccaacgtatcattatctgatgacgttgattactcaagaagggtcttacgagtgataaatgagctatag

SEQ ID NO: 6071 - protein, 463 aa, Candida glabrata CBS138
MFWHFLLLLCAVRAEQLFCSNENSASGPGTSYTWQSTGWCASHCSGYDYAIVQGLMCWCSNSGPADSIDISSCDHYCPGYSLENCGSQQNNAYGYMYLGSQPQSAIIPPRKSSNTAQSSTPSSTSAASTSSTSTSTSSTSTSSTSSTSSTSSTSSTSSTSTSSTSSSSSSTSSTRSSSRTTLAPSTTSSSSRTRSSSEASDDYVLSTSMIYSVMTVTSTQTHDSAVQSNVTSVFSSNVITTKVVTSIISTVATVATTTTSQAANTSVASTAAGMRGSSNQGDVSEKKAKGYWQSPGKVAGTFVVVGVVILAILGLLFWYFVLRPRWEQKKFEKNYNDAVGLAPATPPNMPRNESGHSRIFSTPIFHTHHSSSEDDSSTGSNGAGFNEEKNLDEANVKTNKRATRHDVFADDAYSDYSNTIPVMVDQRLDPNQMMSQIEQSPSNVSLSDDVDYSRRVLRVINEL

SEQ ID NO: 6072 - DNA, 1272 bp, Candida glabrata CBS138
  CDS (1)..(1272)
atgatgatgctacttatactggcggtgctggcggccgtgacgcgggcccagtcggactatacgtacatgaactgctacgtgtcgcttcccagcgacttctcatcggataacacctatgcgtaccagacgagctcatactgctacagcaggtgccagcagaagggtgccgcgtacttcgcgctgttcaatcacaaccagtgcttctgcgggaacacaagtccttcctcccagaccagctcaagttgcaacacgtactgcttcggatacgcccaggagatgtgcggtgggaactcagcatactcagtcttccagataggaaacgggaaccccagccagagctcttccaacacaaactcaaactctaatacaaacacaaatacaaacacaaatacaaattccaactccaactccaactccaactccaataccaatacaaacacgaatacaaacacgaatacaaactcaaacactaataccaataccaatacgaactcgaactcgaactccaataccaacacaagacctacgtctacgctgtcgagttctaggctggtggcgctgggcacaggcctctccatcgagccctcctcgagcgtggagcccaccacgcaggccacgacgatcgcctccagcacggtgaacaatggcgtcacgtccatagtgtactccacttccctgaagacgataagcgggtccgtgatctacaggaccagcaccattgtgcagagcgccgcgccaacggacgccggcaactcgaccagctccgacgacgactccagcggcaagaacaactccgggaagcacaagaagaaagccaacgtgggagcaatcgtaggtggtgtggtcggcggtgtggtgggcgcgtgtgtggtcgctgtagctgcattgctaatactgagacacataaacctgaaacgcgagcaggagagaatggagaaagaataccaggaagctataaaacctgtggaatacccagagaacaacgaactgttcccatccccatactcctctaatagagacccctcatcgggaagcttcgacgaagagctgcgaaacaaggcaatgtacccacccgcaacaggcactgacccttacgaaaataatgatttgatggctatgccggataggaaaccaagcacaaacaaccacctcgcggtagcgaacccattcgatgactcgagaagaataagtaacggttcattggtaccgggttccccacctctgggcaacaataatgttttgactgtggtaaatccagacgaaaccgattga

SEQ ID NO: 6073 - protein, 423 aa, Candida glabrata CBS138
MMMLLILAVLAAVTRAQSDYTYMNCYVSLPSDFSSDNTYAYQTSSYCYSRCQQKGAAYFALFNHNQCFCGNTSPSSQTSSSCNTYCFGYAQEMCGGNSAYSVFQIGNGNPSQSSSNTNSNSNTNTNTNTNTNSNSNSNSNSNTNTNTNTNTNTNSNTNTNTNTNSNSNSNTNTRPTSTLSSSRLVALGTGLSIEPSSSVEPTTQATTIASSTVNNGVTSIVYSTSLKTISGSVIYRTSTIVQSAAPTDAGNSTSSDDDSSGKNNSGKHKKKANVGAIVGGVVGGVVGACVVAVAALLILRHINLKREQERMEKEYQEAIKPVEYPENNELFPSPYSSNRDPSSGSFDEELRNKAMYPPATGTDPYENNDLMAMPDRKPSTNNHLAVANPFDDSRRISNGSLVPGSPPLGNNNVLTVVNPDETD

SEQ ID NO: 6074 - DNA, 1272 bp, Kluyveromyces lactis NRRL Y-1140
  CDS (1)..(1272)
atgtcaagattacgttctgttcttctattagctgtgcttccgttaatatctgcacagtattcctatcaaggttgttatagtgaaagtgatataagtagttcgctgtccagtgcaggtgaatacgaataccaaagtgtctcatactgtcaggaacaatgtaatgggaaaagtgttgctgcgttaattgatggtaacacatgctattgcggtgatgcatcttccattagtgcttcaactgtttctgactcaaactgtcaagttaattgcgtcggttatccatatgaaaaatgtggtggtgaagggtactttgctgtctattcaacagaggatatcgactcagatgaaagttccagttccagttcgagcacgagttcaagttcaagctcaagctcaagttccaggtcgacttcaagttcaagttcaagttcaagttcaagttcaacttcttccagtacctcatccagtgcaacctcaacagattcttcaagcactgccgctacaacgtcatcttctgatacttcaggcacttcttctagcactgatagtacgctttcatctttgtctagctccatcgcctctactaccagtcattcaaaagttgtaacaacacaggtttcagtcattactttaaatggtgagagtaggagtattgttgccgttacaactacaagtaccgtcgtggcaaccacagccgaaggtaccaacactgcaaactctaaaacggagtcaaataaatcttcatcattgtctaatggtgctatcgctggtattgttgtgggtgttgttttgggtgtgttactgatcgcagcaattatcattttcttcatctggcaacagcgaaagaaaagtaaacggtcagacttcgaggaaagtaagcattaccaaccttattcgtttggtcaagaagaagacatcgtagtcccaccagttaccggaggtggatttggcgctgctgctactttaccaaactctcattcagcatcatcatcctctgatagatctggtgtaagtcaaaatagggagaaaagattggataataatggaaacgaaatcagtgattcgcaaatcgttagtccgtttggagaaactatggatcaaccagacctaacacaacctcctgtacgtccgacaatgggaaatcctagattcagcaatggttctttaccagatgtaactcaacaaaggcgaccgctaagaatcgccaatccagatgagctggatgatgaggatacagaattcaattcgatcatcgaaaatctcaggggagattga

SEQ ID NO: 6075 - protein, 423 aa, Kluyveromyces lactis NRRL Y-1140
MSRLRSVLLLAVLPLISAQYSYQGCYSESDISSSLSSAGEYEYQSVSYCQEQCNGKSVAALIDGNTCYCGDASSISASTVSDSNCQVNCVGYPYEKCGGEGYFAVYSTEDIDSDESSSSSSSTSSSSSSSSSSRSTSSSSSSSSSSSTSSSTSSSATSTDSSSTAATTSSSDTSGTSSSTDSTLSSLSSSIASTTSHSKVVTTQVSVITLNGESRSIVAVTTTSTVVATTAEGTNTANSKTESNKSSSLSNGAIAGIVVGVVLGVLLIAAIIIFFIWQQRKKSKRSDFEESKHYQPYSFGQEEDIVVPPVTGGGFGAAATLPNSHSASSSSDRSGVSQNREKRLDNNGNEISDSQIVSPFGETMDQPDLTQPPVRPTMGNPRFSNGSLPDVTQQRRPLRIANPDELDDEDTEFNSIIENLRGD

SEQ ID NO: 6076 - DNA, 1341 bp, Kluyveromyces lactis NRRL Y-1140
  CDS (1)..(1341)
atgaaatgggtcaactggctggcgactgtttcattagtgcgacttgcctatggattagaacaggattattgttccagtgaaaacacaggtacggatcttatcacatacggttaccaaagtaatgggtactgttcggatacctgtcgtgggaagtcgttcgattttgccatagtacaaggatattcctgctggtgttctaacgatctcccatcttcgcaggtgtcagtttcgtcatgcagtgagacctgcccagggtatggggtagaggactgtggtgacaccagtgccggattatatgggtacttgtaccttggatcaggctctctgccatccattagttcaagttcaagtcctagtggaaccacttcggaatccagtgcagatccctcttctacatctactgatgatgatggtaccactgttacaaacgatgggagttctactagtgacacgggttcggcaacctcatcatcatcatcatcatcctcctcctcctcctcctcctcctcctcctcctcctcctcttcttcttcttcttcttctacttcttcttctacttcttcttcttcttcttcatcttcctcttcttcttcttcatcttcctcttcatcctcatcatcatcttcgtcctcttcctcatcttcatccccaacagcacagactacaacaacgttagaaccatctatttctgttctttattcggtggaaacgatcacagcagaaccatcgacagatagcaatagtaacggtagcaatagtaggaccaacgagattgtcaccacaagggtgataacaacagtatactcgtcaccgtctcaaactattgctgcgtccacatcaactgaaagcaactctaatcggggaaattcaagcttttgggactcatcgggcaaagtagggggaaccttcgctgtagtaggggtagtggtagctgcaatactcgctattctgctcatattattcctcaagtacagaaagaacaaagaacaacaagactttgaaaagacatacgatgaggtgaaaagatcagctactggagcatactctacttcgtcttcttcccaaatacatagcagtggcggtggtggtggtgcagcaccctttgtttacacagatgaaaagggtattgtgaacacgacgacaaccagtcctaaatcgccgacatcaaacacccagcaacccgttaatacccccgagtctgaagtatcagaacctgttgtccttgaccaaaggctggatccacaacatttaatgtcgcaatgggaaacgaacggaagtagagtatcactcgctgacgatgttgactattcgagaaaagtattaagagtaatcaacgaatga

SEQ ID NO: 6077 - protein, 446 aa, Kluyveromyces lactis NRRL Y-1140
MKWVNWLATVSLVRLAYGLEQDYCSSENTGTDLITYGYQSNGYCSDTCRGKSFDFAIVQGYSCWCSNDLPSSQVSVSSCSETCPGYGVEDCGDTSAGLYGYLYLGSGSLPSISSSSSPSGTTSESSADPSSTSTDDDGTTVTNDGSSTSDTGSATSSSSSSSSSSSSSSSSSSSSSSSSSSTSSSTSSSSSSSSSSSSSSSSSSSSSSSSSSSSSSPTAQTTTTLEPSISVLYSVETITAEPSTDSNSNGSNSRTNEIVTTRVITTVYSSPSQTIAASTSTESNSNRGNSSFWDSSGKVGGTFAVVGVVVAAILAILLILFLKYRKNKEQQDFEKTYDEVKRSATGAYSTSSSSQIHSSGGGGGAAPFVYTDEKGIVNTTTTSPKSPTSNTQQPVNTPESEVSEPVVLDQRLDPQHLMSQWETNGSRVSLADDVDYSRKVLRVINE

SEQ ID NO: 6078 - DNA, 1086 bp, Debaryomyces hansenii CBS767
  CDS (1)..(1086)
atgaaatcgataggattgacaggattggcggtggtgtgttacgccgtaggattagtgtatgcgatggactcggaagggtgttattcgtcggttctgatcgcagagagtaaaggatcggaacagtatgccagttcgtcgacttgttcggaccagtgtgaggaatatgcgtggtttgcattaaaaaacgggggtgagtgctactgtttgaagctgaagccttcggactccaccagctcgtcgagctgtaatgtggagtgtaatggatacggacaggaaatgtgtggtggtaaaaatgtatacagtttgtacgcaggtgccggttccgaaggactgggaagcagcgattcgagcagtctgagctcgtcttcgtcactgtcatcatcatcatcatcatcatctagcagcagttctagtgcaacccaaacatcgacatcgtcttcatcctcttcgtcatcatcatcatccacaacaacaacatcatcatcactgtcatcagaagaatctaccactacatcagaatcctcttcatcttctgaagcagcaacccagactacggtggtgacccaactgtcatcacaaggtggtagagttgtgtacaaaaccgagactaggagtccttcggctacagccacctcttctagttcttctacaagtaccagttccagcgaacccaacaaaaaggactcaggaaccaatgtgggggccattgtgggaggtgttgtcggaggtgtaggaggtgctatacttctcggggtattagcgttctttttcatcagacaccgtaatagtcacgaagaatcagaagatgaagaagagttctacgataagcctagcggattatccagtgtgggaggaacgagcaggtcaagaagcaagaagactctgtctccattagacatgcctatgtctaacccatttactgatccaactgacactgcggccgcaggaggaggaaataatgcgggcttagtcgaccctagattaaacccaataatgatgggaaggagaagactatcggacggttctttggccgacgaaactgactattctagaaaagttctacaggtggcaaaccctgatgattga

SEQ ID NO: 6079 - protein, 361 aa, Debaryomyces hansenii CBS767
MKSIGLTGLAVVCYAVGLVYAMDSEGCYSSVLIAESKGSEQYASSSTCSDQCEEYAWFALKNGGECYCLKLKPSDSTSSSSCNVECNGYGQEMCGGKNVYSLYAGAGSEGLGSSDSSSLSSSSSLSSSSSSSSSSSSSATQTSTSSSSSSSSSSSTTTTSSSLSSEESTTTSESSSSSEAATQTTVVTQLSSQGGRVVYKTETRSPSATATSSSSSTSTSSSEPNKKDSGTNVGAIVGGVVGGVGGAILLGVLAFFFIRHRNSHEESEDEEEFYDKPSGLSSVGGTSRSRSKKTLSPLDMPMSNPFTDPTDTAAAGGGNNAGLVDPRLNPIMMGRRRLSDGSLADETDYSRKVLQVANPDD

SEQ ID NO: 6080 - DNA, 1206 bp, Debaryomyces hansenii CBS767
  CDS (1)..(1206)
atgaggtattatggtataccctgggttatatacttgttgatccaaattaaatttgggagagcagactcgttctccaagctaggatgttacctgaagtcatctattcagggtctgttgagctaccaagatgaattcatgtatcagtcatcatcgcattgtgaagaggaatgtgctggtaaaaaggttgcagcattgttaaacggtaaatattgttattgtggtgattcggagccagatagtgacgaaactgacagttctgattgtaatgtcagttgccaaggatatgggcaagagaattgtggtggtagcaacgcatttttggtatattccaatagtgatgttgaatccgaaagcacgtcgtcatcatctagttccacttctagctctagcagctcaagttccagttccagttcaagcacaagtacccattccagctccactgcaaaatcaaccacacacagcagcagtttcagtagcagttctagcagcagttctagcagcagctccagtagcagctctagtagcgagtcctcgtctgccgaaccaagcacaagcagttctgctgtctcgtctacatcagacacgtcgagttcatcgtctctgagttcgtcactgtctacgccagatagaactactttgatatctacaattacaagcaatccaacagactcgcaagaagcatcaactgttgcagtaaccatgacagaaccgaattcatcatcgtcatcaacgccgaatgctaacgaagcttcatccaaacaaaacaaatcctcaaaatccatcagcacagggggcattgtgggtgccgtcattgggagtgtagcgggtgtcgggctcatccttggcttggtgttcttcctttgttgtttcaagcgtaacaaggatgacgacgacaaggacgacgaattcacgttatctggcccaagcaacgagaaaagtgacacctttgaaggtgcaccaaacccgtttatgatggcccaaacagggcgcaacgatgacggccacatagaccacaacaaagataccctgtactcccttgatactacaaataatgatgatttcttcttggctgccggccatcctgatactgaatccgccggccaaaacaaactttcttcagaatacggcagaagaagacttagtgatggctcgttacctgacatggttactagaaaccctggctctctcaaagtcgttaataactga

SEQ ID NO: 6081 - protein, 401 aa, Debaryomyces hansenii CBS767
MRYYGIPWVIYLLIQIKFGRADSFSKLGCYLKSSIQGLLSYQDEFMYQSSSHCEEECAGKKVAALLNGKYCYCGDSEPDSDETDSSDCNVSCQGYGQENCGGSNAFLVYSNSDVESESTSSSSSSTSSSSSSSSSSSSSTSTHSSSTAKSTTHSSSFSSSSSSSSSSSSSSSSSSESSSAEPSTSSSAVSSTSDTSSSSSLSSSLSTPDRTTLISTITSNPTDSQEASTVAVTMTEPNSSSSSTPNANEASSKQNKSSKSISTGGIVGAVIGSVAGVGLILGLVFFLCCFKRNKDDDDKDDEFTLSGPSNEKSDTFEGAPNPFMMAQTGRNDDGHIDHNKDTLYSLDTTNNDDFFLAAGHPDTESAGQNKLSSEYGRRRLSDGSLPDMVTRNPGSLKVVNN

SEQ ID NO: 6082 - DNA, 1449 bp, Debaryomyces hansenii CBS767
  CDS (1)..(1449)
atgatagcaaatagattgattttgatactaggattgattcaggtggtgtgtgggttgacattggactcgtgttccagtcagaatataggaagtggaaagacatcgtcgcagtatatgtccaacggtgaatgtaaagatacttgtatgtcagatggatatgccgtggctattttacagggatacgattgctggtgttccaactacctccctggggatacttcctcgatgtccaattgtgacgaggattgtcctgggtttccttccgaaaaatgtgctggtctgggatactatgggtacctcatagtaggggacccaagtggtacacaagggagctcgggtccaagttctacatctgagagtactagttccactgagactacttctagctcaacgtctagaacatcttcctcgacatcgacctcgagaactcccaccacaacttcatcgtcatcgacgtcatctacaagaacttcgtcttcatcctcattgatcgagcctactacatcgtcatcttcatcaacctgggatgatgaacctgtaacttcctcatattcgtcgtcttcgtcgtctttatcttcggcttcatcgagttggtcttcgtcatcagcaccaccatcatcatcatcatcagcaccatcatcatcatcatcatcatcatcatcatcatcatcatcatcatcatcatcatcgccgttttcttcagcttcttcagctcctcagactacttcgtcatcttcatcgtcgagttcggagacacttaaggctacaactgtattctcagtaaagactgtgaatggtaatccgactgatgttgtgaaaacacaatatgtgacagactctccatcctcgactgatgaaccagagtctacctcatcgtctgggtcttccaatgaggcgggtgctgatgagaataaatcgaaagaaaacaattcttttttcgattctacagggaaagtggcaggaacgttcactgcagtaggagtggttgtacttggttttttattgggaatagtatattgctgcttcaagaagtcgcatgatgattatgccgatgaagagaatcaatactcgtcggatgagtattcaataaataacgaaaaggcaatgatgccggcagtaatacctgattccaagaactcatcgaccgtttcgtctaatttgaagcgtgataattcgaacaagtcgatattttcttatttcactgccgcaaataataacagtggtgtaacgagaagttcttcaagaaagaaacttacaaaacatagtagaaatgatctggtgcaaagccacgatccaattttagggggtcaaataatgtttccgatcactgagtttgattcaagattagaccctgatgcaatgcttatgaataataatgaatcaaagaagtcatttggcgatgagaacgactattctcggaagatattaactgttgcgaatccagaatag

SEQ ID NO: 6083 - protein, 482 aa, Debaryomyces hansenii CBS767
MIANRLILILGLIQVVCGLTLDSCSSQNIGSGKTSSQYMSNGECKDTCMSDGYAVAILQGYDCWCSNYLPGDTSSMSNCDEDCPGFPSEKCAGLGYYGYLIVGDPSGTQGSSGPSSTSESTSSTETTSSSTSRTSSSTSTSRTPTTTSSSSTSSTRTSSSSSLIEPTTSSSSSTWDDEPVTSSYSSSSSSLSSASSSWSSSSAPPSSSSSAPSSSSSSSSSSSSSSSSSSPFSSASSAPQTTSSSSSSSSETLKATTVFSVKTVNGNPTDVVKTQYVTDSPSSTDEPESTSSSGSSNEAGADENKSKENNSFFDSTGKVAGTFTAVGVVVLGFLLGIVYCCFKKSHDDYADEENQYSSDEYSINNEKAMMPAVIPDSKNSSTVSSNLKRDNSNKSIFSYFTAANNNSGVTRSSSRKKLTKHSRNDLVQSHDPILGGQIMFPITEFDSRLDPDAMLMNNNESKKSFGDENDYSRKILTVANPE

SEQ ID NO: 6084 - DNA, 1089 bp, Yarrowia lipolytica CLIB99
  CDS (1)..(1089)
atgcgcatctcgactctgtggctcatatcggcggccaccgtggctctcgccgacggcatttcgctgggctgctacgacacgacggccacagacatggtgagcgcgtcgcaagacaacttcatgtcgtccaaagcatgcaacgacgagtgccgcagccagggcaaggccgtgttcatgatcaacgagaaatcgtgctggtgtggcggctccatcccggcgccgggcgcaaaggcatcgccagaaatgtgcaacaacccctgtcccggctaccccgcggaaaactgtggaggcaagtccggcaacacgctcttcttcaacttttaccaggccactaaccaggacggctcgcccgtggtcaactcgtactccacccaaaaggcccagagtaccgccaccaccccatcttcggcctcgtccagcgcggccgccacctcatcatcatcatcatcctccaccgagcagccctcgtccagctcctccgacgacacctcatccaacacgccatcgtccacatcgtcgacccagccgccatccacgacaaccacgtcgacgtcctcgtccgactcgtcgagctccaccgactccaccaccggcagcacgtcgtcagactccacctcccacaccacgggctcgcccaccacgtcacccacgcggacatcgggcaccagcatgacgtcagcgtcttcggacgcgcagagctcggcctcagccaccgcaggagcgctcacggaggaggagaaggacaaaaaatccggtggcatttccggtggcgccattgccggtattgtcattggcgtggtggccggcattgcgctggtcggactagcattcttcattctgcgacgccgacgccagtcgtacgagtaccagacacaggcctcggaccggtacggcttcaccgacgacccgttcaccaccgcagctgaagacaagatgaacttcagccacaatggcacctctgcgtttgtgcccgtggaccagcggctcaaccctgcgctcatcaaccagcggcgaatgagcgagggctccattgccgacgagcaggactactcgcgcaagattctgcgggtggccaaccccgatgcttag

SEQ ID NO: 6085 - protein, 362 aa, Yarrowia lipolytica CLIB99
MRISTLWLISAATVALADGISLGCYDTTATDMVSASQDNFMSSKACNDECRSQGKAVFMINEKSCWCGGSIPAPGAKASPEMCNNPCPGYPAENCGGKSGNTLFFNFYQATNQDGSPVVNSYSTQKAQSTATTPSSASSSAAATSSSSSSSTEQPSSSSSDDTSSNTPSSTSSTQPPSTTTTSTSSSDSSSSTDSTTGSTSSDSTSHTTGSPTTSPTRTSGTSMTSASSDAQSSASATAGALTEEEKDKKSGGISGGAIAGIVIGVVAGIALVGLAFFILRRRRQSYEYQTQASDRYGFTDDPFTTAAEDKMNFSHNGTSAFVPVDQRLNPALINQRRMSEGSIADEQDYSRKILRVANPDA

SEQ ID NO: 6086 - DNA, 1839 bp, Yarrowia lipolytica CLIB99
  CDS (1)..(1839)
atggacaaagccaagaggcaggtagcagctcctccagccgcagctcctccagcagcaccacctggagcaccagcagcacccggagcaccagcagcacccggagcacccgaaaacaacgtcacgtcgcaaacgacacaaatggaaactaccagtgacgaaactgggcccagcacggacctcagctctgcgctcagcacaaacaccaacacagacacaaacacaaacactggaccctccacaacatcgttgcagtccctcacaacatcggacacaagcagcattcccaccacgtcggccggcgagtcgttttcgagcacctcagagacccccagtatatcgtcgtccagcgagatccccagcacgtcgtccattgaaaccgcatcgtcggtagagtccagttctacggaggtgtcttctacggtggaatcaaccacagaatcgagtactgagtcctctctgccccctacaacttcgacagaaccatctacgacaagtgagcctcctacgacttcatcagagccgccaacaactagttcagagcctcctacaacaagttccgagcctccgactagcagttctgagccccccacaacctcctcagaaccttccacttcttccattccttttgcatcctcatcctcatcttcgtctccaccctcatcttcatcttcatcttcatcttcatcatcttcatcatcttcatcatcttcttcgtctgcgactacctcttcttcttctataccctcttccaccacatcgacacagccgcggaccacgtcccagccacccacaactacctcggagtcgtccacgtcggaatccccgtctccaaccaccacgtctaccactgcagaaagcaccaccacgccgccgatctcatggtcgtcttccggctcggtgaccttctccaacggtgtccctgtgacaatgacgcagactgtagacctgctggtgaccaggaccaaccctgatggatcgctggtaacagtgcgcgccggatcgcatgactcttcttccagttcaggaggaggcacgtccacaggcaccattgtgggctccgttgtgggctctgtggccggagtcgccgtactggcggtgttggtgctcatgttcattacacgcaagaagaagaagtcactcattgacgtgctcacgggccacaccaagagcaacagtgagctgggcgcagacacgccgcccttctcagattaccacaatgacaaccactcacctcctgaatcgtattcgggctaccgaggctggtctgccactcctggtgcggcccttgtggatgacaacagcaccgtgcctcccagctcctctgggggacccggaagtgctgctctgtcgcgttctgcgtctggagtttacagatccgggtcgcagaatagcaatgccgactactcgtattatcgacagccccgaaatgttgcttctgagggcatgacgcagattgactcgctacccgagaacccacagtacgatgtgccgttcgagtacgcgcagagcattcccgaaagtccgcctcgaggccggttcactgaacaggacgactcgcccgacgaggactttgattttgtggtgcatccctccgagtcgcagacgtcacaggtggcgtccgagaactcgcgcaacctgcccatcaactcgctcatgcatcagtatgagcgtgtgcatggaattgggcccgaggaggatgtgcccatggacggtcttcccattccactgggatactacgagacagttatggaggaggacgagacgcctcatccagtgtatgcccaacccaaggctgctcctagcagggagagtcggtttactgagacgggctctttgtag

SEQ ID NO: 6087 - protein, 612 aa, Yarrowia lipolytica CLIB99
MDKAKRQVAAPPAAAPPAAPPGAPAAPGAPAAPGAPENNVTSQTTQMETTSDETGPSTDLSSALSTNTNTDTNTNTGPSTTSLQSLTTSDTSSIPTTSAGESFSSTSETPSISSSSEIPSTSSIETASSVESSSTEVSSTVESTTESSTESSLPPTTSTEPSTTSEPPTTSSEPPTTSSEPPTTSSEPPTSSSEPPTTSSEPSTSSIPFASSSSSSSPPSSSSSSSSSSSSSSSSSSSSATTSSSSIPSSTTSTQPRTTSQPPTTTSESSTSESPSPTTTSTTAESTTTPPISWSSSGSVTFSNGVPVTMTQTVDLLVTRTNPDGSLVTVRAGSHDSSSSSGGGTSTGTIVGSVVGSVAGVAVLAVLVLMFITRKKKKSLIDVLTGHTKSNSELGADTPPFSDYHNDNHSPPESYSGYRGWSATPGAALVDDNSTVPPSSSGGPGSAALSRSASGVYRSGSQNSNADYSYYRQPRNVASEGMTQIDSLPENPQYDVPFEYAQSIPESPPRGRFTEQDDSPDEDFDFVVHPSESQTSQVASENSRNLPINSLMHQYERVHGIGPEEDVPMDGLPIPLGYYETVMEEDETPHPVYAQPKAAPSRESRFTETGSL

SEQ ID NO: 6088 - DNA, 1386 bp, Yarrowia lipolytica CLIB99
  CDS (1)..(1386)
atgatcatattcaagaacgccctcctgctggcgacgtcggccggcgccgcgctgacgtactgttcgtcgcagaactcgggcgagtcgttcgactctgttttcgggcagtttcagagcaacggagcgtgtagtgacacgtgctccgggtacgcgtttgccattttgcagggccaaaagtgctggtgttccaacatggcgccgtcagacaccacctccgtcggctcttgcgacgaggcctgtgccggctatccctccgacaagtgcggcaacatgttccagggcctttttgggtacattcagttggcccaggcgtccgggactcttgctgtttcgagttcgacgacgagcacaagctcaagcacgagttcgacgagtactacaagttccagcaccagcaccagcagcaccagcactagctcgagtaccagcagcaccagctcgagtaccagcagcaccagcactacagagagcaccagcagcaccagcagcaccagcagcaccaacagcacttctacttcctccacaacgtcgtcaagtacgacgtcttccagctcttccaccacgtccaccacgtcaagtacgacgtcttccagctcttccaccacgtccacctcgtcaccatccatttccgtgctcacagtggtgggcggagaaaagacggtgacagtgtccaactcggacagcacgtccacgcccgccccggcgtcgacaacgtcgtccgagtcgccggtagccacgttagacccccagtcgaaacacaaggacggcttcttcgaccacaagggcaaggtggccggtgtgttcacggtggtgggcatcgtcggcgcggcgttaatcgccggactcatcttctttctgtggcgacgcaacaagaagagccgctacgacgacgatgacgacgacgacgacgagctcaccgtgggctccggcgggtcgcccacaggatcgccctggcggtccaaggccgcggcggtcggcgtggtgggccgaagccagtcgacccgaaccacactgggcggcagcgaccgcggacccaacggagggctcgccacgtcgccgtcgctggcaacctcaggtaagctgcgcatcgacgagtcgtccgaaactggctctcatcacatgatgcgcgagcagtccgagtcgtcgattctgggctccatgggaatggcgcagcatgacgtgcccgacccatctgcggcgccgggacggtccatggccgccaacatgtcccaggtccacgaggtgcccgtcgttgaccagcggctagacccatcgcagatggtgctgcgctacgacggcgtcgacgagtcgcgtcatagtctacaggacgacgctgactacagcaggcgaattctaagggtcaccaacccggattactttggctag

SEQ ID NO: 6089 - protein, 461 aa, Yarrowia lipolytica CLIB99
MIIFKNALLLATSAGAALTYCSSQNSGESFDSVFGQFQSNGACSDTCSGYAFAILQGQKCWCSNMAPSDTTSVGSCDEACAGYPSDKCGNMFQGLFGYIQLAQASGTLAVSSSTTSTSSSTSSTSTTSSSTSTSSTSTSSSTSSTSSSTSSTSTTESTSSTSSTSSTNSTSTSSTTSSSTTSSSSSTTSTTSSTTSSSSSTTSTSSPSISVLTVVGGEKTVTVSNSDSTSTPAPASTTSSESPVATLDPQSKHKDGFFDHKGKVAGVFTVVGIVGAALIAGLIFFLWRRNKKSRYDDDDDDDDELTVGSGGSPTGSPWRSKAAAVGVVGRSQSTRTTLGGSDRGPNGGLATSPSLATSGKLRIDESSETGSHHMMREQSESSILGSMGMAQHDVPDPSAAPGRSMAANMSQVHEVPVVDQRLDPSQMVLRYDGVDESRHSLQDDADYSRRILRVTNPDYFG

SEQ ID NO: 6090 - DNA, 1401 bp, Cryptococcus neoformans var. neoformans JEC21
  CDS (1)..(1401)
atggccgatctctccccctcctcctcaaattcacgtgccaccacctcagctatagcctcctctagcgcccctacaacatctgctacgcctaccacctcgccgcaggtctccacagatgtagagtccagcgctgccgtgaccgcatcagatacctcgattgtacctcaaagcagctccgtcaccaccacttctgagtctaccacatctaccacatctaccaccgaatcgagcactgctccttcatctgcagaatcctcaacagatcccatcacatcctcgacttcaacttccgcctctcagcagccatcagtcgaaccttcaagtacatcttccagtcaatcggtcgagcccagttccataccaatcagttcctcatcatcaatcgagccttccacaagtaccgaacctatcacaagcactgtaacaagcacatcgtcttcttcctccgaggatccgacttcaagtacctcttcgtctagcgatgccacatctgctagtgaaaggcattctaccagtgttgtcgttgtcaccgtgacagattctaacgggtcaatgcgtgtaactgcgtcgtcgatcgcgacgggcgcagcaacagacactgagaattcaggtagtggtaccaacatcggtgccatcgtcggtggtgtaatcggtggtgttgctggtctcgctatcattcttgctttgttgtggttcttttgtatcaggcgcagaagaaacaacgaacaggcattcgatgaaaagacttttgacccttcacgagcggctcgccattctgtcaacgatcccatggacctcttgtctccatccgtccccgcggttggcggcgctgctttttcgggtaactcaactcctcgtgtcgatcctttccccttccaaaatgcttcatctcccgaagaccaaccttacgaccctatctctcatgctcccatgcgcatgcctgacgcccgtgattacatgggtggcgcttacgatccatatggtgggatggaaggcgggtatggccttgctgctggggctggtgccggtattggcgccggttctgccgctgaccactacaactatggtgaaagtgcccacagctctagcgactatccctccagcgtgagccccacccagacttctgcggcaatggccaagcaaagagaggctgctgcggagcgacgaacgagcaggacgagtagtggatacaatgtgccgagtggcagtggtaacggtccccaagaagtgattggaagcccggcgccgtcagagactggtggaaggagggagagtgggattagtgaggggcgtacatccgtctaccaacatactgatatgaaatccctgcctgacgaagaagaggagcagttagatgaaattcctccggactatcagtccatatctcggcaaacccagtga

SEQ ID NO: 6091 - protein, 466 aa, Cryptococcus neoformans var. neoformans JEC21
MADLSPSSSNSRATTSAIASSSAPTTSATPTTSPQVSTDVESSAAVTASDTSIVPQSSSVTTTSESTTSTTSTTESSTAPSSAESSTDPITSSTSTSASQQPSVEPSSTSSSQSVEPSSIPISSSSSIEPSTSTEPITSTVTSTSSSSSEDPTSSTSSSSDATSASERHSTSVVVVTVTDSNGSMRVTASSIATGAATDTENSGSGTNIGAIVGGVIGGVAGLAIILALLWFFCIRRRRNNEQAFDEKTFDPSRAARHSVNDPMDLLSPSVPAVGGAAFSGNSTPRVDPFPFQNASSPEDQPYDPISHAPMRMPDARDYMGGAYDPYGGMEGGYGLAAGAGAGIGAGSAADHYNYGESAHSSSDYPSSVSPTQTSAAMAKQREAAAERRTSRTSSGYNVPSGSGNGPQEVIGSPAPSETGGRRESGISEGRTSVYQHTDMKSLPDEEEEQLDEIPPDYQSISRQTQ

SEQ ID NO: 6092 - DNA, 1476 bp, Candida albicans SC5314
  CDS (1)..(1476): transl_table=12
atgacattacgaaaccaagcaatgccagcactacatcccacattattggtcatattattatacatctcgttgacccatgcactatcgttaagtagatgctcctcgacaaatttgggcggtgaaaaaacaagcagcgagttcatgtcaaatgggctttgtcgagacacctgttcaaaggatgggtatgccgttgctgtcttgtcaggaaacgattgctactgtaccaacgatgtcccagcagacactactgatatgtcgaattgtgaaattggatgtccaggttataaagaccaggaaaattgtgctggagatggttattttgggtacttgattattggacaaccatcagcaaccgtcggaggagagacaagtacgagtaagtcaacacaaagctcaacaagcacatcaacaagtactagctccacctctacatcgagcaccacctcaagctcatcatccactagcaccacctcaagctcatcatccacttctacttccactacttcagaaccctcttcttccatctcccctgccaccaccatggttaccaaaacaacacaaatcacagaaactcatcgttcaagcaatattgttcaagtcacacagtactcgacagaagtacttaccgtgtctcccagcaccacatccaaatcttctacttcctcatcatcgaaatcctcctcacaaacaccaatagtatccacaaaaatcgaacaaacaacagcctactccatcaaaacagtaaatggaactcaaacacaagagatcaaaacactatacataacccaattcacgacccaatcaactctggattcgacaactggcaccacaagttttgaatcagcatcaatatctaatttgcggtctcaggacgcttctgttgcgccaaccctgtcggtgcccagctcatcaacaacggattcccccaagaccaacaagaatgcattttttgacgacaagggtaaggttgctggtacttttactgccgttggaatagttgttgtcgggatagtcggtgctatgttgtactgctgctgctgctttggtggagcaggtggcagacacaacgaccacgacgggtacagtgacgaagagaaccaatacagctctgacgaattgtcggtcaaccatgcaacagttgttgctccatacagcaagcaatcgtcattttctacattaaagagagacagttcctcaaagactttatttgcatattttacaggcgacaatacgaataaagagagtggagtcaaccgaagctcgtcaagacgaaaattgatgagcaggagaagcagtcaaatgagctcatcgcccaataacaacccagaagcagatggaggagctatgttcccaattaatgagatagattccagattagatccagacacaatgttcttgaatcaaaacttttccaacaaatcacttggtgataatcaagattattcaagaaagcttaaaatcactaatcctgagtaa

SEQ ID NO: 6093 - protein, 491 aa, Candida albicans SC5314
MTLRNQAMPALHPTLLVILLYISLTHALSLSRCSSTNLGGEKTSSEFMSNGLCRDTCSKDGYAVAVLSGNDCYCTNDVPADTTDMSNCEIGCPGYKDQENCAGDGYFGYLIIGQPSATVGGETSTSKSTQSSTSTSTSTSSTSTSSTTSSSSSTSTTSSSSSTSTSTTSEPSSSISPATTMVTKTTQITETHRSSNIVQVTQYSTEVLTVSPSTTSKSSTSSSSKSSSQTPIVSTKIEQTTAYSIKTVNGTQTQEIKTLYITQFTTQSTSDSTTGTTSFESASISNLRSQDASVAPTSSVPSSSTTDSPKTNKNAFFDDKGKVAGTFTAVGIVVVGIVGAMLYCCCCFGGAGGRHNDHDGYSDEENQYSSDELSVNHATVVAPYSKQSSFSTLKRDSSSKTLFAYFTGDNTNKESGVNRSSSRRKLMSRRSSQMSSSPNNNPEADGGAMFPINEIDSRLDPDTMFLNQNFSNKSLGDNQDYSRKLKITNPE

SEQ ID NO: 6094 - DNA, 1404 bp, Candida albicans SC5314
  CDS (1)..(1404): transl_table=12
atgttgttaatatttttgtcgttactactaccagtatatgctgacagttggagtaaattgggatgttactcttcgataagtgtggccgaatcaaaaggaagttacatgtaccaaagttcgggatactgtgaacaacaatgtgctgggtatagagtggcagcattaaagaatggtaacgaatgttattgtggtgatgttgatcctacttctcaaagtaatggatgtaatatcaaatgttcaggttggcccctggacacttgtggtggaagttctgcctatatggtgtacattaatgccgacgctgattcccaggcacagtcaagttcaacgtcatcaacatcaacaagttcaacaagttcaacatcatcatcaaaatctacatcatcatcaagttcatctacctcttcatcttcaacatcaacggaacaaccatctaccaccaccattcaagcaacaacaaccgaacagactacagcagaaccagagtccaccgaacaaccagaaacaacagaaaaacaacaaacaacttcatcatcacgtacaaccactcaaccccgaaccactacagtagtttccacatcagtacaaaatggtactcctagtgttgtttacaaaacaatagtagcaaccccaagttcgaatccgtctacatcttcttcctcaagttcaagttcaagttcaagcacaacaccaccatctacatctacatcttcatcttcatcagaaactggaagtaaagataaagggaaaaaccaatccaaatcgtcggtttcaggaggcacaatagcaggagctgtagttgggtcagtggcaggaacagcattagttgcaggattagtgtttttgttctgctggtatagaagaaagaagcaagatgaatacgatgacgacgttgatgatcaatttacactttctggacctaaacaagaaatggaacaacatccatattcaacgataggtggtggcggcgctggtggcggtggaggagcagcaatgttggatcctaatccatttttaattgctggtggctataataattttgatacatctcaacaacaaaccccacgacaacaaattatatcaaatggaactgtcaccggatcaggcggttatggacacaatcataaaataagttctagtggaaccagtggtgatggcaatcactcatttggatctcaaactgataccgaatttgcattctatgattatagcaactccaacaataacaacaataacaataataccactagccccaatatcaataacaacaataacaatgctaataatggacttttgcatacagattcgccgaatccagaatttggtagacgaagattgagtaatggatcattacctgatatgattgctcgaaatcctggatctttgaaagtggtcaataattga

SEQ ID NO: 6095 - protein, 467 aa, Candida albicans SC5314
MLLIFLSLLLPVYADSWSKLGCYSSISVAESKGSYMYQSSGYCEQQCAGYRVAALKNGNECYCGDVDPTSQSNGCNIKCSGWPSDTCGGSSAYMVYINADADSQAQSSSTSSTSTSSTSSTSSSKSTSSSSSSTSSSSTSTEQPSTTTIQATTTEQTTAEPESTEQPETTEKQQTTSSSRTTTQPRTTTVVSTSVQNGTPSVVYKTIVATPSSNPSTSSSSSSSSSSSTTPPSTSTSSSSSETGSKDKGKNQSKSSVSGGTIAGAVVGSVAGTALVAGLVFLFCWYRRKKQDEYDDDVDDQFTLSGPKQEMEQHPYSTIGGGGAGGGGGAAMLDPNPFLIAGGYNNFDTSQQQTPRQQIISNGTVTGSGGYGHNHKISSSGTSGDGNHSFGSQTDTEFAFYDYSNSNNNNNNNNTTSPNINNNNNNANNGLLHTDSPNPEFGRRRLSNGSLPDMIARNPGSLKVVNN

SEQ ID NO: 6096 - DNA, 1392 bp, Candida albicans SC5314
  CDS (1)..(1392): transl_table=12
atgttgttaatatttttgtcgttactactaccagtatatgctgacagttggagtaaattgggatgttactcttcgataagtgtggccgaatcaaaaggaagttacatgtaccaaagttcgggatactgtgaacaacaatgtgctgggtatagagtggcagcattaaagaatggtaacgaatgttattgtggtgatgtcgatcctacttctcaaagtaatggatgtaatatcaaatgttcaggttggcccctggacacttgtggtggaagttctgcctatatggtgtacattaatgccgacgctgattcccaggcacagtcaagttcaacgtcatcaacatcaacaagttcaacatcatcatcaaaatctacatcatcatcaagttcatctacctcttcatcttcaacatcaacggaacaaccatctaccaccaccattcaagcaacaacaaccgaacagactacagcagaaccagagtccaccgaacaaccagaaacaacagaaaaaccagaaacaacttcatcatcatcacgtacaaccactcaacctcgaaccactacagtagtttccacatcagtacaaaatggtactcctagtgttgtttacaaaacaatagtagcaaccccaagttcgaatccgtctacatcttcttcctcaagctcaagttcaagttcaagcacaataccaccatctacatctacatcttcatctccatcagaaactggaagtaacgataaaggtaaaaaccaatccaaatcgtcggtttcaggaggcacaatagcaggagctgtagttgggtcagtggcaggaacagcattagttgcaggattagtgtttttgttctgctggtatagaagaaagaagcaagatgaatacgatgacgacgttgatgatcaatttacactttctggacctaaacaagaaatggaacaacatccatattcaacgataggtggtggcggcgctggtggcggtggaggagcagcaatgttggatcctaatccatttttaattgctggtggctataataattttgatacatctcaacaacaaaccccacgacaacaaattatatcaaatggaactgtcaccggatcaggcggttatggacacaatcataaaataagttctagtggaaccagtggtgatggcaatcactcatttggatctcaaactgataccgaatttgcattctatgattatagcaactccaccaataccaataataccaccactagccccaatatcaataataacaataacaatactaataacggagttttgcatacaaattcgccgaatccagaatttggtagacgaagattgagtaatggatcattacctgatatgattgctcgaaatcctggatctttgaaagtggtcaataattga

SEQ ID NO: 6097 - protein, 463 aa, Candida albicans SC5314
MLLIFLSLLLPVYADSWSKLGCYSSISVAESKGSYMYQSSGYCEQQCAGYRVAALKNGNECYCGDVDPTSQSNGCNIKCSGWPSDTCGGSSAYMVYINADADSQAQSSSTSSTSTSSTSSSKSTSSSSSSTSSSSTSTEQPSTTTIQATTTEQTTAEPESTEQPETTEKPETTSSSSRTTTQPRTTTVVSTSVQNGTPSVVYKTIVATPSSNPSTSSSSSSSSSSSTIPPSTSTSSSPSETGSNDKGKNQSKSSVSGGTIAGAVVGSVAGTALVAGLVFLFCWYRRKKQDEYDDDVDDQFTLSGPKQEMEQHPYSTIGGGGAGGGGGAAMLDPNPFLIAGGYNNFDTSQQQTPRQQIISNGTVTGSGGYGHNHKISSSGTSGDGNHSFGSQTDTEFAFYDYSNSTNTNNTTTSPNINNNNNNTNNGVLHTNSPNPEFGRRRLSNGSLPDMIARNPGSLKVVNN

SEQ ID NO: 6098 - DNA, 1137 bp, Saccharomyces cerevisiae
  CDS (1)..(1137)
atgagaccgaacaaaacaagtctgcttctggcgttattatccattttatcgcaagcgaacgcctatgaatacgtgaattgttttagctcactaccctctgacttttcaaaggccgattcatataactggcagtcgagttcacactgtaacagtgagtgtagcgcaaaaggtgcaagctactttgccctttataatcattcagaatgttattgtggtgatactaatccatctggttcggaatctacttcctcttcatgtaatacgtattgctttggttacagcagtgagatgtgtggtggtgaagatgcctattctgtgtaccaacttgactctgacacaaatagcaatagcataagcagctcagattcaagtacggagtctacttctgcgtcgtcttccacaacttcttcaacaacgtcctccacaacatcaactacatcatcgactacatcatcaactacatcatcaatggcgtcttcctctacagtacagaattcccccgagtcaactcaagcagctgcctctatttcaacgtcacagagttcgagcactgtaacgtcagaaagctcgctaacttcggatactttggcaacgagcagtactagctctcaatcacaggacgccacttcgataatctattccactacttttcacactgagggcggttccacaatttttgtcacgaacaccatcacggcaagtgcacagaattcaggatcggccacaggtacagctggatctgactctacgagtggaagtaaaactcataaaaagaaagccaatgtaggggcaattgtaggcggcgttgtaggtggtgtagtgggagccgtagccattgctctttgtatcttgttgattgtcagacacattaatatgaagcgggaacaagacaggatggaaaaggaataccaagaggcgataaaaccagttgagtaccctgataaactatacgcctcttcattttcatctaatcacgggccctcttcaggtagcttcgaggaggagcacaccaaagggcaaactgatattaaccctttcgacgactcaaggagaataagtaacggaacattcataaatggcggaccaggagggaaaaacaacgttttaacagtggtcaatccagacgaagctgattga

SEQ ID NO: 6099 - protein, 378 aa, Saccharomyces cerevisiae
MRPNKTSLLLALLSILSQANAYEYVNCFSSLPSDFSKADSYNWQSSSHCNSECSAKGASYFALYNHSECYCGDTNPSGSESTSSSCNTYCFGYSSEMCGGEDAYSVYQLDSDTNSNSISSSDSSTESTSASSSTTSSTTSSTTSTTSSTTSSTTSSMASSSTVQNSPESTQAAASISTSQSSSTVTSESSLTSDTLATSSTSSQSQDATSIIYSTTFHTEGGSTIFVTNTITASAQNSGSATGTAGSDSTSGSKTHKKKANVGAIVGGVVGGVVGAVAIALCILLIVRHINMKREQDRMEKEYQEAIKPVEYPDKLYASSFSSNHGPSSGSFEEEHTKGQTDINPFDDSRRISNGTFINGGPGGKNNVLTVVNPDEAD

SEQ ID NO: 6100 - DNA, 1671 bp, Saccharomyces cerevisiae
  CDS (1)..(1671)
atggaaagagtatggtttgcaaaattaacaaataaaggaactattaaaatcgggtatatctcatttatacttctaagtttgctatgtcaatctctgattgggctggttaatgctgattttaattatgaaggctgttacagtgccgcggatatccagtctgctggactgtctctgaaaaactcatacatatatcaatcagtgtcatactgtcaaaaccagtgccctgagtcagcagtagtagcattatttaacgggtcagattgttactgcggtaattcggtaagttttctgacttctttgacgaaatcaacagattcaaactgtggaactaaatgctctggctggccttaccaaatgtgtggagggtcatcgtacatgaacgtgtatgtaaatgctgaaacttttgtttcatcggttgaatcttcctcttccaaagaagggtctagcacttcctatatgccctcaacaacttcttcattgtcctccgcccaaatttcttcaactactaggagaacgtcaacagatatgaaaagttctgaaatgatagccacgacagtttctaccacttcaacaacctcttcctcgacttcctctactacctcttctaccacctcttctaccacctcttctaccacctcttctactacctcttcctcgacttcctctactacctcttctaccacctcttctaccacctcttctaccacctcttctaccacctcttctactacctcttctactacctcctctactacctcctctactacctctatcttttctgttacgtctagctcctcatccattacattgtcctcatctgagcataccacagtcgatagccgtacttcttcaccctcttccaccttggtgccagtgtcctcgagtagcagcacactatcaactccaaaagtgacctcaatgacccctagtacgtcatcaacgataccaatagttacctcagtggaactagtgactagtgtggttacaaaagcgatcgtgagtacttctgatcaacatcaggaaacaatatttgttacgaggacatccgtggttgaacgatcttctgaggtagctactgctactgctgccgcctcaaataatagatctaattcgacttcgaagcagcgtctgagtggtggagccattgccggtattgttattggtgttgtgtttggcgtaatttttattattttgattctattgttcctgatatggaggagacggaaatcgcacgaccaattagacttggaggaaacgaaacattatcagccctattcgttcggtgatgaggatgcaaatccaataggaccgcctccctcctctggtacgacaaattggatgagacattcaaggggtaatacagcgggttctatcggtacaagtaatatgtatggtttttctatgagtaatggtgcaaattatagtagtcctagttcaaacaccagtggaagcatcataaacaacttggctggcttacaagatgctacggttcagaaacagaaccttccatcgacagtttttgaagaggcaaatactttgaatagtgcaaatgaaaggttcagtgccaattctttacccgacatgatgatgagcggaccattgcaagtggtaaaccctgataatcctgataatcctgaattatctagtaccgtatctcataatcgagcctga

SEQ ID NO: 6101 - protein, 556 aa, Saccharomyces cerevisiae
MERVWFAKLTNKGTIKIGYISFILLSLLCQSLIGLVNADFNYEGCYSAADIQSAGLSLKNSYIYQSVSYCQNQCPESAVVALFNGSDCYCGNSVSFLTSLTKSTDSNCGTKCSGWPYQMCGGSSYMNVYVNAETFVSSVESSSSKEGSSTSYMPSTTSSLSSAQISSTTRRTSTDMKSSEMIATTVSTTSTTSSSTSSTTSSTTSSTTSSTTSSTTSSSTSSTTSSTTSSTTSSTTSSTTSSTTSSTTSSTTSSTTSIFSVTSSSSSITLSSSEHTTVDSRTSSPSSTLVPVSSSSSTLSTPKVTSMTPSTSSTIPIVTSVELVTSVVTKAIVSTSDQHQETIFVTRTSVVERSSEVATATAAASNNRSNSTSKQRLSGGAIAGIVIGVVFGVIFIILILLFLIWRRRKSHDQLDLEETKHYQPYSFGDEDANPIGPPPSSGTTNWMRHSRGNTAGSIGTSNMYGFSMSNGANYSSPSSNTSGSIINNLAGLQDATVQKQNLPSTVFEEANTLNSANERFSANSLPDMMMSGPLQVVNPDNPDNPELSSTVSHNRA

SEQ ID NO: 6102 - DNA, 1818 bp, Saccharomyces cerevisiae
  CDS (1)..(1818)
atgcagacgtcaatggtgagcgcaaaagttagtatatggctagtatgtagcgttatatgcagtagcctggtacgggctacgcaatctgtgtgttcgtcgcaaaacacagcgaccactgacggtgtacgaaatcaatttcagagtaatggttggtgttcaaataactgtgctggtcatcagtttgccatcgtacaggggttcatgtgctggtgcagtgattcggaaccgagcactcagacatcggtgggagactgcagtggcacttgtcccggttatggctacgaagattgtggtaatgcggataaggatctttttggttatatatatctggggcaaaccccgctaagttctgtacagagtgtggaaacgtcaacagagtccagtgtgtacgtttcaagtagctctatcacgagtagtagtagtacgagtattgtggacacaaccacaatctcgccgactctgacgtcaacgagtacgaccccattgacaaccgcctcaaccagtacaacaccatcaactgatataacatcggcactgcccacgactacaagcacaaagttgtcaacatccattcccacaagcacgacatcgtcaacctctaccaccacaagtacctcatcgtcgacttctacgaccgtaagtgtcacatcatcaacatctaccaccacaagtactacgtcgtcaaccctcatttccacgagcacatcatcatcatcatcatcaactccaaccacaacatcgtcagcccccatttctacaagcacgacgtcgtcaacttccacttcaacaagtacaacatcgccaacttcttcttcagcacctacaagctcgtctaatacaacaccaacgagcacaacgttcactacgacatcacccagtacagccccttcaagcactacggttacttacaccagtaccacagcatctccaataacgtccactataacttctgtaaacctgcagacctccttaaagtattctgtgataacagtgacttcagtgcacaccatggacactaacatttcggaaatcacctcgagatatctcaccatgaaaaaagtaataacgcagatttactcttccaccctcggggctactcctacttctgcagtggctactacgtctgccagcgtaggtggtagaataacaaacaataacaatagtaacaccaccaacagcaatacaccaactaacaagtctacagaaaagaaagggtactgggattcgcccgggaaaatagccgctactttcgtcgtggttggagtggtatgtttggtaattatatgcatactaatatacttaatacatcattatagaacaagacccgctcggaaggctcaagattttgagaatgaatatcagagtaagttttaccagtccaagtacccaaatgaagttaccactaccacgttacacacgccttcaccatcttcaaattcaactttctcgaccccaagattaatatacactgatgaaaagggacaaattatgtctgaatcaccatccccacgtcaatctacgtattccttgactgcaggcagtccaccaaatgacccaagcacgttggcaagcccatttcacgatcccattcttcccagaagaacttctacttttcttcattcgcccattcaaaagcaacacgaaaaaatggaatcaaacgttactctaggtgaagacacggtactggtggatcagaggctagacccaagtaagatgcttaacactttagcaaatgacgatgccacaaaccactctaccatttcgttatcagacaacgtagactactccaggagggttctgcggctaatgaacgaataa

SEQ ID NO: 6103 - protein, 605 aa, Saccharomyces cerevisiae
MQTSMVSAKVSIWLVCSVICSSLVRATQSVCSSQNTATTDGVRNQFQSNGWCSNNCAGHQFAIVQGFMCWCSDSEPSTQTSVGDCSGTCPGYGYEDCGNADKDLFGYIYLGQTPLSSVQSVETSTESSVYVSSSSITSSSSTSIVDTTTISPTLTSTSTTPLTTASTSTTPSTDITSALPTTTSTKLSTSIPTSTTSSTSTTTSTSSSTSTTVSVTSSTSTTTSTTSSTLISTSTSSSSSSTPTTTSSAPISTSTTSSTSTSTSTTSPTSSSAPTSSSNTTPTSTTFTTTSPSTAPSSTTVTYTSTTASPITSTITSVNLQTSLKYSVITVTSVHTMDTNISEITSRYLTMKKVITQIYSSTLGATPTSAVATTSASVGGRITNNNNSNTTNSNTPTNKSTEKKGYWDSPGKIAATFVVVGVVCLVIICILIYLIHHYRTRPARKAQDFENEYQSKFYQSKYPNEVTTTTLHTPSPSSNSTFSTPRLIYTDEKGQIMSESPSPRQSTYSLTAGSPPNDPSTLASPFHDPILPRRTSTFLHSPIQKQHEKMESNVTLGEDTVLVDQRLDPSKMLNTLANDDATNHSTISLSDNVDYSRRVLRLMNE

SEQ ID NO: 6104 - DNA, 1125 bp, Schizosaccharomyces pombe
  CDS (1)..(1125)
atggtctttttaaattcctctccctttaaggggaggttactattttttgtttaccttttgataatttctactcggttggtggcggctgacatgaacactcaatatggctgttatctcgtggatagtagcttaactgaacaaggcacgtttacctatcttgatccagcgtattgctataacaacatttgtggtggatctgataatatagcatttgtagctatccgtaataatcaatgttattgcggtagtacacttactgctacagaagtttcaagttctctttgcacaacgccttgtccaggttatggttctcttatgtgtggtggtgatctgtactggtcggtttatctgactggcaatggggttttgcaaaccacggtttctagctcgtcagtgtcgtctacgacctcttcgtcttcatcatcatctccaagctcatcttcaactacaacaacaacatctccttcttcttcttcttcttcttcgtcttcgtcgtcttcctcttcttcttcgtcttcttcttcttcttcttcctcatcttcctcttcctcttcctcttcctcttcgtcttcgtcttcttcgtcttcttccagctcttcgtcttctagttcttcctcttccgtaccaataacgtcttccaccagttcttctcattcttcttcatcttcaagctcatcttcctcttcatcttctagtcggccatcttcgtcttcgtcgtttatcacgaccatgtcctcatctacttttatttctactgtcacagtaacaccaagcagttcctcttcttcaaccagtagtgaagttccaagcagtacggctgccctcgctctaaatgcaagcaaggcgtcaaaccatacgtccttgaatgcaggtgctattgtgggtattgttatcggttgtgtggcattcgccgtggtaatggcattgtgcattttcctatacttctatttcaggagattcaaaattagaatgagcgactcggcaaatgaaggaaaatatccctcctatgctagtgaattagattctcgcttggatcctgccatgatgaatcgcaaatcaagtgaatctttggctgacagtcaggattattcgagaaagatattgcgtgtcacaaatttgaactag

SEQ ID NO: 6105 - protein, 374 aa, Schizosaccharomyces pombe
MVFLNSSPFKGRLLFFVYLLIISTRLVAADMNTQYGCYLVDSSLTEQGTFTYLDPAYCYNNICGGSDNIAFVAIRNNQCYCGSTLTATEVSSSLCTTPCPGYGSLMCGGDLYWSVYLTGNGVLQTTVSSSSVSSTTSSSSSSSPSSSSTTTTTSPSSSSSSSSSSSSSSSSSSSSSSSSSSSSSSSSSSSSSSSSSSSSSSSSSSSSVPITSSTSSSHSSSSSSSSSSSSSSRPSSSSSFITTMSSSTFISTVTVTPSSSSSSTSSEVPSSTAALALNASKASNHTSLNAGAIVGIVIGCVAFAVVMALCIFLYFYFRRFKIRMSDSANEGKYPSYASELDSRLDPAMMNRKSSESLADSQDYSRKILRVTNLN

SEQ ID NO: 6106 - DNA, 1611 bp, Schizosaccharomyces pombe
  CDS (1)..(1611)
atgtcattcacgaacaatacttcaagtgtggacacttccctcagctcatctgcttctagcagtattccggcaagcagctcttctgctgctgctagtacgagtttgagtagctcaagcgtgattccttctagttcgagctctatgctttcatcgtctagtgctactgcaattagttcttcatcatcgtcttcacctctttcatcctcatcttttacttctcctgcttcttcttcttttatcacatctttggtctcatcaagcagccaacaaagctctagtagcagtgcttcattgacctctagtagcagtgctacactgacttccagtagcagtgcttccccgacctccagtagttcgagtcacgcgcttagcagcagcagtagttctcttgtcgctagtagttcctccagtgggatgtccagtagttccttaagccattcgtctagtgtcccatcatctagttcttcctaccacagctcttccatgactacgagcggcttgagttcttcagccagcattgtcagtagtacgtatcgagatggaccctcaataatcacattggtctcaacttcttacgtttctgaagtggtgacccccactactactaataattggaattcctccagttctttcacttccagcacttcgtctacgcctattagctcttcttattcttccagtggcactttgcccagtaaatctaacaagtcaagcaatcatgtcggcgtagttgttggttgttctgttgctattcctgttggtgtagttctaattttgattggtttaggaatttttctttggaaaaggcatcaacggtccaaacgaattaaggctgagcgcatgcaagaagtcgaggaatacggatttaaccccaatcaaccctccaatttccgtagcccaaatcgtgctccctctactaataacaggtatcgtggctggaatggaagcccaacacctgctgctggaaacaatactaacggacggcctgttgctcctagaccttctgccggcgctggcggagccaatccgcctgcagcttctcagcccggccttttgggtggcagtagtaattcagctggtccaattgcagctgctaccgctgctggtgtcggtgctgatgcttctgatgcagctaatactggtggaagctttactcgtcctcaaggagcccgtatggttagaccgattggaaatccacctgatctttctgcttctaacgaagctgaagctacaatgcctccatctaatggaagcaacttttctgaaggtttgtctgcatctccgtttgagtcaggccctgctgttggtgccgctggagctgcggccgaagctgcagaacacagtggttctggttcagattcctatccagaaggtcctttagctacgattcctgaaagtgacagtgaaagcatggctagtgatttagctggagaatcctcttacggctcgagggcagctctgtctagtcgatctcaaagcaatcttctttccccaacaagcactggtgcttctaaccagcccaattattcaccttttgctgacaacccatcaagtagcaacgtttctattcctcggtcgtcatcggaagctcgcaggttgaacctgttttaa

SEQ ID NO: 6107 - protein, 536 aa, Schizosaccharomyces pombe
MSFTNNTSSVDTSLSSSASSSIPASSSSAAASTSLSSSSVIPSSSSSMLSSSSATAISSSSSSSPLSSSSFTSPASSSFITSLVSSSSQQSSSSSASLTSSSSATLTSSSSASPTSSSSSHALSSSSSSLVASSSSSGMSSSSLSHSSSVPSSSSSYHSSSMTTSGLSSSASIVSSTYRDGPSIITLVSTSYVSEVVTPTTTNNWNSSSSFTSSTSSTPISSSYSSSGTLPSKSNKSSNHVGVVVGCSVAIPVGVVLILIGLGIFLWKRHQRSKRIKAERMQEVEEYGFNPNQPSNFRSPNRAPSTNNRYRGWNGSPTPAAGNNTNGRPVAPRPSAGAGGANPPAASQPGLLGGSSNSAGPIAAATAAGVGADASDAANTGGSFTRPQGARMVRPIGNPPDLSASNEAEATMPPSNGSNFSEGLSASPFESGPAVGAAGAAAEAAEHSGSGSDSYPEGPLATIPESDSESMASDLAGESSYGSRAALSSRSQSNLLSPTSTGASNQPNYSPFADNPSSSNVSIPRSSSEARRLNLF

SEQ ID NO: 6108 - DNA, 1122 bp, Pichia angusta
  CDS (1)..(1122)
atgagattcggtgtcgtattcgtgatcacccaagtcctagcagactttacgtatttaggttgctacagctcggatgccatttccggcttgaccaagaaggactcgtacacatggcagagctccagccattgcacggagcagtgttcgggacacgcagttgctgcattgatcaacggccaggactgttattgcggagacgacgtaccttcggacaaccccgacggctcgtgcacaacgtcctgcactggttatcccatggagaagtgtggtggtagcgactcttattccgtctatgttgacgagtctgaggaaaacgacgacgacagttcgtcggcgcagtcgtcgcactcgtccacagacgatgccacttccacctcctccacctccaccacctcctcctccagttccagtctgtccagctcctcaacatcgtcttcctccaagcaaagttcctccccacagagctccaccatgtcttccacagactcgtctccaacgtcctcaagtctgtccgctagctcgactacaacaagctcgatttcgtccttttctttctcccagagctcgtcgtcgtcttcaaccacctcttcgtccacaccctcatccgaatcagtgcggataactacgtccgtttcacctggaaacatgcagacctcgatcatctacatcacgcagtccgtcgctacagccacctcggcgtcggctgccgcgtcgtcctcaagtgcctcgagcgccaacaacaggtccacggggctcagcaagggcgcgaaggccggaatcgctgtcgggtcgatcctcggagctttgctgctcttgggactcctgctcctgttcctgttttggcgcagacgccagcgcgacgacagagacaaccttagcgaaaagcgcgcatccagcattttggcgtcgtcttcccgtcagcctccagctggctcgcgaggtgcggcagcaggaatcggagccaaccgcattcggattcatgtccgaggacgacagactggacatgccgggcacgtcgagacggttcagcgacggttcgttgccgggacgctgccgctggagccgcggtgccgccgaatagtgcccgacaggaggtttgcgggtggtaaacccagatcttag

SEQ ID NO: 6109 - protein, 373 aa, Pichia angusta
MRFGVVFVITQVLADFTYLGCYSSDAISGLTKKDSYTWQSSSHCTEQCSGHAVAALINGQDCYCGDDVPSDNPDGSCTTSCTGYPMEKCGGSDSYSVYVDESEENDDDSSSAQSSHSSTDDATSTSSTSTTSSSSSSLSSSSTSSSSKQSSSPQSSTMSSTDSSPTSSSLSASSTTTSSISSFSFSQSSSSSSTTSSSTPSSESVRITTSVSPGNMQTSIIYITQSVATATSASAAASSSSASSANNRSTGLSKGAKAGIAVGSILGALLLLGLLLLFLFWRRRQRDDRDNLSEKRASSILASSSRQPPAGSRGAAAGIGANRIRIHVRGRQTGHAGHVETVQRRFVAGTLPLEPRCRRIVPDRRFAGGKPRS

SEQ ID NO: 6110 - DNA, 25 bp, Artificial sequence
  primer
atgcacctagatctcatacacaagt

SEQ ID NO: 6111 - DNA, 25 bp, Artificial sequence
  primer
tcagcgcaaagaactattattggaa

SEQ ID NO: 6112 - protein, 609 aa, Artificial sequence
  consensus sequence
  Variant (2)..(2): Xaa in position 2 is any amino acid
  Variant (4)..(14): Xaa in position 4 to 14 is any amino acid
  Variant (15)..(21): Xaa in position 15 to 21 is any or no amino acid
  Variant (23)..(25): Xaa in position 23 to 25 is any amino acid
  Variant (27)..(27): Xaa in position 27 is any amino acid
  Variant (29)..(32): Xaa in position 29 to 32 is any amino acid
  Variant (33)..(34): Xaa in position 33 to 34 is any or no amino acid
  Variant (36)..(67): Xaa in position 36 to 67 is any amino acid
  Variant (68)..(144): Xaa in position 68 to 144 is any or no amino acid
  Variant (146)..(246): Xaa in position 146 to 246 is any amino acid
  Variant (247)..(352): Xaa in position 247 to 352 is any or no amino acid
  Variant (354)..(424): Xaa in position 354 to 424 is any amino acid
  Variant (425)..(608): Xaa in position 425 to 608 is any or no amino acid
CXCXXXXXXXXXXXXXXXXXXCXXXCXGXXXXXXCXXXXXXXXXXXXXXXXXXXXXXXXXXXXXXXXXXXXXXXXXXXXXXXXXXXXXXXXXXXXXXXXXXXXXXXXXXXXXXXXXXXXXXXXXXXXXXXXXXXXXXXXXXXXXSXXXXXXXXXXXXXXXXXXXXXXXXXXXXXXXXXXXXXXXXXXXXXXXXXXXXXXXXXXXXXXXXXXXXXXXXXXXXXXXXXXXXXXXXXXXXXXXXXXXXXXXXXXXXXXXXXXXXXXXXXXXXXXXXXXXXXXXXXXXXXXXXXXXXXXXXXXXXXXXXXXXXXXXXXXXXXXXXXXXXXXXXXXXXXXXXXXXXXXXXXXXXXXXGXXXXXXXXXXXXXXXXXXXXXXXXXXXXXXXXXXXXXXXXXXXXXXXXXXXXXXXXXXXXXXXXXXXXXXXXXXXXXXXXXXXXXXXXXXXXXXXXXXXXXXXXXXXXXXXXXXXXXXXXXXXXXXXXXXXXXXXXXXXXXXXXXXXXXXXXXXXXXXXXXXXXXXXXXXXXXXXXXXXXXXXXXXXXXXXXXXXXXXXXXXXXXXXXXXXXXXXXXXXXXXXXXXXXXXXXXXXXXXXXXXXXXXXXXXXXXXXL

SEQ ID NO: 6113 - DNA, 858 bp, Saccharomyces cerevisiae
  CDS (1)..(858)
atggatgctgatgaattggaattgaaaggtcatttgaaaaaattgaaaaaagaagaattgcttagaaggaaacagttaaaagagagtaatcttcagaaaagagagcttgaatataataatgcctcaaaaaatacttcaatatatatttctggtcttcccacagacaaaacaacgaaagaaggactcactgagcagttttgcaagtatggaatgataagaaccaatcgagatggggaacccctttgcaagctatatgtgaatgataaaggcgctttcaaaggggatgccttgatcacttattccaaggaagaaagtgttacattagcaatcgaaatgatgaacgagtcgatcttcctgggaaaacagatcagggtcgaaagagcccaatttcaaaacaaggaaggtgacaatatgcacgggaaagaaaatgatttaaaggagttcaacggacctgagcctccaataaagaggctaaaaaaagcgaagtctgaaggggagggggaagtaatagattacaatgacgatgaaagcctagcaaaagctgatcgaacggtgatatttgccaacgtattcaatatttacaaatcatacacaaatgatgatataaatgatattcaggaagatcttttggaaggctgtgaagagataggtcaagtagacagtatatctgtatctcccaataagggggaagcgacggtcgtctttaagaacaataaagttgcattgcaatgttgcaaaatcatgaccggacgttattttgatgggcaaaagttgcttgctttcatttctggagatgagaacacttcaagcacaagtgacaagaatgaggacagcgaagtggaagatgaccttatatag

SEQ ID NO: 6114 - protein, 285 aa, Saccharomyces cerevisiae
MDADELELKGHLKKLKKEELLRRKQLKESNLQKRELEYNNASKNTSIYISGLPTDKTTKEGLTEQFCKYGMIRTNRDGEPLCKLYVNDKGAFKGDALITYSKEESVTLAIEMMNESIFLGKQIRVERAQFQNKEGDNMHGKENDLKEFNGPEPPIKRLKKAKSEGEGEVIDYNDDESLAKADRTVIFANVFNIYKSYTNDDINDIQEDLLEGCEEIGQVDSISVSPNKGEATVVFKNNKVALQCCKIMTGRYFDGQKLLAFISGDENTSSTSDKNEDSEVEDDLI

SEQ ID NO: 6115 - DNA, 1353 bp, Gallus gallus
  CDS (1)..(1353)
atgagcggagaggacggcaacgaggagttctaccggcagctgcagctccagcagcagtacgaggccgatcgcggcggcgagggcgatgccgatcccttcacctacgtggacccggccgacggggccgcctacgagtgggaccgggagaagaaggcctggttccccaagataacagaagatttcctggcaacataccatgctaactatggcttcaatgcagacgaaacggatagttcatctgcttctggcacagcatctgaaaataagttaccactaagttctaagacatcagaaacacaaccgtcagcaaatgagaaaggaccaaaacaaacagagccaaaacaaaagacagaaaaacggaagcttgagccaggatggtttcatgttgaagaagacagaaacacaaatgtttatgtgactggtttaccaccagacattacaaaagatgaatttgttcaagtcatgtcaaaaggtggtatcattatgcgagatcctcagacggaagagcacaaaatcaaactttacaaagataaggaaggaaatctcaaaggagacggcctctgctgctatctaaagagagaatcagttcaacttgctttgaggcttctggatgaggcagaaattagaggctataaattgcatgttgaagttgcaaagtttcagctcaagggggagtacgatgcaagcaagaagaagaagaaatgtaaagactacaagaagaaattgtctcaacagcagaaacagctggattggaggcctgagaagaaagatggcgcagctcgaatgcgacatgaacgcatcgttattatcaggaatatgtttcacccaaaggactttgaggaggatcccttagtgctaaatgagatcagggaagacctacggacagaatgtgaaaagtttggtcaagtaaagaaggttctcatatttgatcgacaccctgatggcgtagcttctgtgtcatttaaggaagcgacagaagctgatctgtgcaaactaactctaaatggaaggtggtttggtggccgtcagctcagtgctgaaacatgggatggtgtaacagattatcaggtggaggagactgcaagagaaagggaagaaaggctgaaggtatggggatcgtttctagaggatcctgattcaaaggagcagcaaactacatctgattcagattccacaacgagtagcgttaaaatccctgaaagcagccaaccttcaaaagttaatgatgcatccaaggaggatgtaaatgatgaaggccataagaaggagaataatggtgagggcgttaatgaagatggtgctccgtccacagacagcagccttgcaggcagtgatgctgaagcagatacataa

SEQ ID NO: 6116 - protein, 450 aa, Gallus gallus
MSGEDGNEEFYRQLQLQQQYEADRGGEGDADPFTYVDPADGAAYEWDREKKAWFPKITEDFLATYHANYGFNADETDSSSASGTASENKLPLSSKTSETQPSANEKGPKQTEPKQKTEKRKLEPGWFHVEEDRNTNVYVTGLPPDITKDEFVQVMSKGGIIMRDPQTEEHKIKLYKDKEGNLKGDGLCCYLKRESVQLALRLLDEAEIRGYKLHVEVAKFQLKGEYDASKKKKKCKDYKKKLSQQQKQLDWRPEKKDGAARMRHERIVIIRNMFHPKDFEEDPLVLNEIREDLRTECEKFGQVKKVLIFDRHPDGVASVSFKEATEADLCKLTLNGRWFGGRQLSAETWDGVTDYQVEETAREREERLKVWGSFLEDPDSKEQQTTSDSDSTTSSVKIPESSQPSKVNDASKEDVNDEGHKKENNGEGVNEDGAPSTDSSLAGSDAEADT

SEQ ID NO: 6117 - DNA, 2274 bp, Mus musculus
  CDS (1)..(2274)
atgagtggcaacaacttgagcgggaacgatgagtttgatgagcaattgcgaatgcaagaattgtatggaggagaccccaaggaaggtgacacccagaatgagccctctggagaagcccattctttgggacaaccaccagatgacactccttacgagtgggaccttgataagaaggcttggttccctaagatcaccgaagatttcattgctacgtatcaggctaactacggcttttctagtgatggtgcatccagctctactgcgaacgtccaggacgccaacactaaggctgtagaagaacctccacaaaaagaagtcccggagacccctgactccaaaaggaagggggaaaagagaaaggctgaatctggatggttccatgttgaagaagacagaaatacaaatgtatacgtgtcaggtctccctccagacatcacagtggatgaatttattcagctcatgtccaaatttggcattattatgagagatcctcagactgaagagtttaaagttaaactgtacaaagatgatcaagggaatcttaaaggagatgggctttgttgttatctgaagaaagaatctgtggagcttgcattaaaacttttggatgaagatgaaattagaggctacaaattgcatgtggaggtggcaaagttccagctcaagggtgaatacgatgcctcaaagaagaagaagaagtgcaaagattataagaagaagctgtctctacaacagaagcagttggattggagacctgagagacgagctggaccaaaccggctgcgccatgagcgagttgtcattctcaaaaatatgtttcaccccatggactttgaggatgacccattggtactgaatgagatcagagaagatctgcgagtagaatgttccaagtttgggcagattcggaagctccttctgtttgatagacacccagatggtgtggcctctgtgtccttcagagagccagaggaggctgaccattgtattcagactctggatggaaggtggtttggtggccgacagatcactgctcaagcctgggatgggactacagattatcaggtagaggagacctcaagagaaagagaggagcggctgagaggctgggaggcattcctcaatgctcctgaggccagcagaggcctccggcggatggattccatcgctggttcagaaaggccagggccttccagaatgaggcatttttcagagcacccaagtatgtctaatatgaaggctcaggaagctacaactggaatggcatttgaagaaactatcgatgaaaataagtttgaaaaggcagaagaagggggagaatccgaaggagatgcttctgaaaaagatgccaaagaaggtgggtctgatggggaccaccctgagagagagggtggagaaggctgctccaagaaagagaatgaagagggctgccctgagagggcgcttgagcctgaggagggtaatcctcaaaccgaggctcaagagaatggccctgaaagggaagctaggaagaaaagcaaaatggattatgagaagaatggcttttcaaaagagtctgaagacaatgaccttggcaaggagtctgaaggggaagacagcctcaagaaagagtcggaagatgatgattcagaggaggaatctgaggaagacagctcagaaaagcaatctcaagatggctctgacaaagaaatagaagaaaatggtgttaaaaaagatgttgaccaggatgtctctgacaaggagttcccagaagatgttgagaaagagtcagaagaaaatgagactgacaaatcagaatttgatgaaggttctgaaagagtgttagatgaggaaggctcggagagagaatttgaggaagactcagatgaaaaggaggaagaaggtgatgatgatgaagaagaggtcgtatatgaaagggtttttgatgatgattctgatgacattgaggaggaagaagaagcagatgaaaaggagtgtgaagatgctgatgacaaagaggaagacaatgatatagatgaaaagctctttgatgactccgatgagaaggaagatgaagaagacacagatggaaagaaagatgatgatgccagtgacaaggtattcgaagacaattccaatgagaagttgtttgatgaggaagaaggtcccaatgagaagttgtttgatgattctgatgagagagggactgtggggaatgtgaaggaagatgggtctcagtccacagacagcagctttgccctcagtagtagtgatgatgatgatgatgaagtgtaa

SEQ ID NO: 6118 - protein, 757 aa, Mus musculus
MSGNNLSGNDEFDEQLRMQELYGGDPKEGDTQNEPSGEAHSLGQPPDDTPYEWDLDKKAWFPKITEDFIATYQANYGFSSDGASSSTANVQDANTKAVEEPPQKEVPETPDSKRKGEKRKAESGWFHVEEDRNTNVYVSGLPPDITVDEFIQLMSKFGIIMRDPQTEEFKVKLYKDDQGNLKGDGLCCYLKKESVELALKLLDEDEIRGYKLHVEVAKFQLKGEYDASKKKKKCKDYKKKLSLQQKQLDWRPERRAGPNRLRHERVVILKNMFHPMDFEDDPLVLNEIREDLRVECSKFGQIRKLLLFDRHPDGVASVSFREPEEADHCIQTLDGRWFGGRQITAQAWDGTTDYQVEETSREREERLRGWEAFLNAPEASRGLRRMDSIAGSERPGPSRMRHFSEHPSMSNMKAQEATTGMAFEETIDENKFEKAEEGGESEGDASEKDAKEGGSDGDHPEREGGEGCSKKENEEGCPERALEPEEGNPQTEAQENGPEREARKKSKMDYEKNGFSKESEDNDLGKESEGEDSLKKESEDDDSEEESEEDSSEKQSQDGSDKEIEENGVKKDVDQDVSDKEFPEDVEKESEENETDKSEFDEGSERVLDEEGSEREFEEDSDEKEEEGDDDEEEVVYERVFDDDSDDIEEEEEADEKECEDADDKEEDNDIDEKLFDDSDEKEDEEDTDGKKDDDASDKVFEDNSNEKLFDEEEGPNEKLFDDSDERGTVGNVKEDGSQSTDSSFALSSSDDDDDEV

SEQ ID NO: 6119 - DNA, 1560 bp, Arabidopsis thaliana
  CDS (1)..(1560)
atgtcagactctgataatctacagcttccaccatcatcgacaggggcaacagttgcagctactgatgttggttggtacattcttggtgaaaatcagcagaacctgggcccttatactttctctgagctatgtaaccatttcaggaatggttacctactagaaactactctagtctgggctgacggaagaagcgaatggcagccactttctgccatccccgatttaatgtcaaggatatccggagctgagattgcctatccagctgtaggttcatctgggttgataaatggatctaatgctggaaccaggcaagagaagcaagattatactgcctctgctagtactgaggatgaatttgagaaatggcagagagagattaaagacgcagaagcagaggctgaaaggttgaaaaatggttctgtctctggtactgagcttgttgaagatgatcatgaaagggcatcttcaccacctgagggcgaagatgagttcacagatgatgatggaacaaaatataaatgggacagagctcgtagagtatgggttcctcaggacgatccaccactgggtagcgttgacccgtatggactcgaagagatgacctttgctaaggaagacgaagtatttccaacaattaacattcttgatacttctgttgataagaaggatgcctctaaggatgacgtggctggtaagaaagaagaagatggctctgatgaaaccgctgaaataaacagtaacggcaagagaaagctaccagagccagaaactgaaaagaaggaaccaaacaagcctccagattcgtggtttgagttaaaagtaaacccacatatttatgttaatgggttgcccgatgatgtcaccatcgaggaagtagctgaagttttttctaagtgcggtataattaaggaggatgacactggcaagcctcgcataaagctatacagtgacaaggcgacaggaaaattaaaaggcgatgctcttatctcctatatgaaggagccctcagtggatctggcaattaaaatcttagacggggctccgttacgtcctgctgataagctcctcatgtcagtttctcgagctaagttcgagcagaaaggggagagatttataactaagcaaaccgacaacaagaagaaaaagaagcttaaaaaggtcgagcaaaagttgcttggatggggtggtacagatgattctaaggtctcaatacctgcaacggttgttctgcgctacatgttcagtccagctgagttgatggctgatgaggatctggttgctgagttagaggaagacgtgaaagaggagagtttgaagcatggaccgttcgactcagtgaaggtatgtgagcatcatccacagggtgttgttcttgtaagattcaaggatcggagagatgcacagaaatgtatagaagcaatgaacggtcgatggtatgcaaagagacagatacatgcgagcctcgatgatggatcagtgaaccatgctacagttagggattttgatttggaagcggaacggttagatcagtttgcagctgaactggaagctgctgagtaa

SEQ ID NO: 6120 - protein, 519 aa, Arabidopsis thaliana
MSDSDNLQLPPSSTGATVAATDVGWYILGENQQNLGPYTFSELCNHFRNGYLLETTLVWADGRSEWQPLSAIPDLMSRISGAEIAYPAVGSSGLINGSNAGTRQEKQDYTASASTEDEFEKWQREIKDAEAEAERLKNGSVSGTELVEDDHERASSPPEGEDEFTDDDGTKYKWDRARRVWVPQDDPPLGSVDPYGLEEMTFAKEDEVFPTINILDTSVDKKDASKDDVAGKKEEDGSDETAEINSNGKRKLPEPETEKKEPNKPPDSWFELKVNPHIYVNGLPDDVTIEEVAEVFSKCGIIKEDDTGKPRIKLYSDKATGKLKGDALISYMKEPSVDLAIKILDGAPLRPADKLLMSVSRAKFEQKGERFITKQTDNKKKKKLKKVEQKLLGWGGTDDSKVSIPATVVLRYMFSPAELMADEDLVAELEEDVKEESLKHGPFDSVKVCEHHPQGVVLVRFKDRRDAQKCIEAMNGRWYAKRQIHASLDDGSVNHATVRDFDLEAERLDQFAAELEAAE

SEQ ID NO: 6121 - DNA, 1329 bp, Caenorhabditis elegans
  CDS (1)..(1329)
atgtcggattttgtgccagaaaccgaggaaaatgaagaagaatctcaaaaaatcgatgaaatccatgaaatcccagctcaagcaattatcatcgaccaaagtttttctcgacgatttctcaacaataaatggtacggaaagtacggcgaagatggggatcttctggagcacatcgacgaggactgggagcccgtaggcctcgacgaagtggaatttctgagccaactgtggtttgagcaggaggatcaggagaaaaaagctcataggcactatgattgggatgaagaaaagaaggaatgggtgccgaaggccaagcaggaggaggtcaatgaggattttatcgcagaatatcaagcgaattacggggttcagtatgatgatatttataaaaaaatggacgaagaattgcaagaaaaagcggcaaaagctcaaaaagaagatgaagagaagaaggagaagaagcggaagaaaaaagttggcttgggagccggggaagacgctaaagagggctggcttgacctaggagataaggttcatgcggtttatgtgtcaaatcttccggaagatattacagacgaggaattccagaaatttatgtcaaaatgtggagttattcagccggatattcgaacgaataagccgaaatgcaagctttaccgggaggaaaacggcaaactcaaaggcgacggaagatgttgttatattaagaaggaatctgtcgagcttgcctgtaacattctcgatggagcgaacttaaacgggcgggaagtgaaggttgaggaagctcgatttgagatgaagggcgattttgatccggcgaggaagcggcggaaattgactgcggcgcagaaaaaacgatatatggagcagcagaataaaatcttcgaatggacgcccgataagccacgtaactaccgtccaaagtcggactgtacggttattgtcaaaaatctgttcactcaggaaatgatgaacaagaatgcggcgttgatgttggatttgaaagaggaaatgacacaaagttgtcagaaatatggaattgttaagaaagtcgtcgtttatgcgaaccacccggacggcgtcgtatcggtaacctttccaacgacagaagaatcggatatggctgtaaaatatcttcacggacgagtagttgacggtcggaaattgacagccgagctctgggatggccggacaaagtttaaggtcgaggagacggaagaggatgaggagaagcgtcggaaagagtacgagaagtatattgagggtggaagtagtgagacgaaggaggagagcgacgacgatgatgacgatgaagctgaagataattga

SEQ ID NO: 6122 - protein, 442 aa, Caenorhabditis elegans
MSDFVPETEENEEESQKIDEIHEIPAQAIIIDQSFSRRFLNNKWYGKYGEDGDLLEHIDEDWEPVGLDEVEFLSQLWFEQEDQEKKAHRHYDWDEEKKEWVPKAKQEEVNEDFIAEYQANYGVQYDDIYKKMDEELQEKAAKAQKEDEEKKEKKRKKKVGLGAGEDAKEGWLDLGDKVHAVYVSNLPEDITDEEFQKFMSKCGVIQPDIRTNKPKCKLYREENGKLKGDGRCCYIKKESVELACNILDGANLNGREVKVEEARFEMKGDFDPARKRRKLTAAQKKRYMEQQNKIFEWTPDKPRNYRPKSDCTVIVKNLFTQEMMNKNAALMLDLKEEMTQSCQKYGIVKKVVVYANHPDGVVSVTFPTTEESDMAVKYLHGRVVDGRKLTAELWDGRTKFKVEETEEDEEKRRKEYEKYIEGGSSETKEESDDDDDDEAEDN

SEQ ID NO: 6123 - DNA, 1671 bp, Drosophila melanogaster
  CDS (1)..(1671)
atgagcgacgaaggtggctgtaaatcggagcagttagagaaatccgaagaagcggaggaaaaaaagggggacgcagaaggacaggaagcgaaagctccaattctcaaccccatttcagtcccagaagttgatgacaagccgacggaaaataaaccccaatcggataatcacgcggacaaaacggacgaaactccatctcaggactttgccgcctacgaggagcacatgacctatggagcggacggcggggctatatacacggatcccagcacgaagcagaaatacaagtggtgcgccaccggaaacaattggcaacccttaggcgttgatgaagatgttgatggacaggctgaagatccctacgaaaacgagcactacaagtggtgtcccaaatcccaacagtggttgccaaaaaaacaggaaactgaaacggagcactacaagtgggatgacgagcaaaagaagtgggtgcccaagcacccgaaccctggccaggaaggggtttgcggtgtggatgagcatggcgagcgcacttacaccgacaaggatggcgtcgagttcttttgggatgcaaccaagagtgcttggttccccaagatcgatgatgatttcatggctcgctaccaaatgaactatggatttattgacaacacatcagcgggggagaaagagaaggctgaaaaggaggcggctgaggccaagagaaaggaggaggaactcaagcgtatgacggcagaggcggaagctgctatgtctagagacaatccagcatccagcgctgcagtgcccactggcaagcgaaaggcccaggagcccccaaaatggttcgaaatggatccattgcagaacaccaaggtgtatgtctccaatttgcccctggacattactatggatgagtttgccgatctgatgggcaagtgtggcatggtaatgagagatccgcagacgcagaaattcaagctgaaactatatgccgaaaaggatggacaaatcaagggcgatggcttgtgtgattacatcaaggtggagagtgtcaatctggcgctgaaaattttagacgagtacaatctgcgtggccacaagattcgtgtccagagggctcagttccaaatgcgtggagaatacaatcccgctctgaagcccaaacgcaagaagaaggacaaagagaaattgcaaaagatgaaggaaaagttatttgattggcgtccagataaattgcgtggcgaacggtcaaagaatgagaaaaccgtcatcattaaaaacctcttcaccccagaactctttgagaaggaagtggagctcatattggagtaccaaaacaatctgcgtgaggagtgcagcaaatgcgggatggtccgtaaagtggttatctatgatcgccatcctgatggtgtagcccagatcaacatggcctcgccggaggaagctgacctcgtcattcaaatgatgcaggggcgttattttggacagcggcaactaagtgcggaggcctgggatggcaagaccaaatacaaaattgaggaatcagctgtcgaggcgcatgaacggctttccaaatgggatgaattcttggcagaagaagaaaccgataaaaaagcttccgaggatatgaaggaggaggacgttgactcgcccgaaaaccagcttttgccaggagacgccaccccttag

SEQ ID NO: 6124 - protein, 556 aa, Drosophila melanogaster
MSDEGGCKSEQLEKSEEAEEKKGDAEGQEAKAPILNPISVPEVDDKPTENKPQSDNHADKTDETPSQDFAAYEEHMTYGADGGAIYTDPSTKQKYKWCATGNNWQPLGVDEDVDGQAEDPYENEHYKWCPKSQQWLPKKQETETEHYKWDDEQKKWVPKHPNPGQEGVCGVDEHGERTYTDKDGVEFFWDATKSAWFPKIDDDFMARYQMNYGFIDNTSAGEKEKAEKEAAEAKRKEEELKRMTAEAEAAMSRDNPASSAAVPTGKRKAQEPPKWFEMDPLQNTKVYVSNLPLDITMDEFADLMGKCGMVMRDPQTQKFKLKLYAEKDGQIKGDGLCDYIKVESVNLALKILDEYNLRGHKIRVQRAQFQMRGEYNPALKPKRKKKDKEKLQKMKEKLFDWRPDKLRGERSKNEKTVIIKNLFTPELFEKEVELILEYQNNLREECSKCGMVRKVVIYDRHPDGVAQINMASPEEADLVIQMMQGRYFGQRQLSAEAWDGKTKYKIEESAVEAHERLSKWDEFLAEEETDKKASEDMKEEDVDSPENQLLPGDATP

SEQ ID NO: 6125 - DNA, 1353 bp, Danio rerio
  CDS (1)..(1353)
atgagcggggactcagacggtaataaagagttccacgagcagctccggttgcagcagctgtatgaacagaggcaagagaattcagacgatccctacacatacaccgacccagaagacggcactgtgtatgactgggaccatgaaaagagagcctggtttccaaagataaatgatgatttcatcgcagcatatcaagcaaactatggatttaatgaggaaggagctcctgatccgtctgctgcagttaattcagctgaatccctccctgccaaatcagaggagccgaagaaaccagaggaacccacgaaaccggcggaagcgtcagaccagggaaaaaataaagagggagagaagaaaggagagaaaagaaaagcagatccaacttggtttgaagttgaaaaggaaaaaaacacaaatgttcatgtgaccggccttcctcccgacatcactcctgatgagtttgtgggggtgatgtccaaatgtggaattgtcatgcgtgatcccatcacagaggaatataaaatcagaatatacaaggacaaagatgggaaccaaaaaggagatggactgtgctgctacttaaagaaagagtctgtcgctctagctaagcagctcttggatgagacagagattcggggctaccggctgcatgtggaagaagcacgatttgaacttaaagggcagtttgatgccagcaagaagaagaaaaagaacaaagagtaccgcaaaaaactacagcagcaacaaaagcagctggattggaggcctgagaagagcggagaagtgcgcaaaagacacgaaaaagttattatcatccaaaacatgtttcatcccactgactttgaggaggatcctctggtcctcaacgagtacagagatgatctgcggacagaatgtgagaaattcgggcaagtgaagaaagtgatcatttttgataggcaccctgatggagtggcgtcagtggcatttaaggagcctgaagaggcagacgcgtgtcaggtggctttgaacggacgctggtttggaggaaggaaactctcagctctactgtgggacggcgtgaccgactaccaggttgaggaaacgtcacgagagcgagaagagagactgaaaggctggttgtcttttctgggcgacgaaaaaggatctggcgaagctaaagctaactccacgaaaacagacgaacaacagaactccagcccacaagaagcagcagcagcagaacagacccagcaggagccacatgtaaacgaaagcagcacaaaaccacaggaggagaaaaatgaggaggaaggaggaggaatggcatcgactgatagcagtttagcaggaagtgatgatgaagatgcgtaa

SEQ ID NO: 6126 - protein, 450 aa, Danio rerio
MSGDSDGNKEFHEQLRLQQLYEQRQENSDDPYTYTDPEDGTVYDWDHEKRAWFPKINDDFIAAYQANYGFNEEGAPDPSAAVNSAESLPAKSEEPKKPEEPTKPAEASDQGKNKEGEKKGEKRKADPTWFEVEKEKNTNVHVTGLPPDITPDEFVGVMSKCGIVMRDPITEEYKIRIYKDKDGNQKGDGLCCYLKKESVALAKQLLDETEIRGYRLHVEEARFELKGQFDASKKKKKNKEYRKKLQQQQKQLDWRPEKSGEVRKRHEKVIIIQNMFHPTDFEEDPLVLNEYRDDLRTECEKFGQVKKVIIFDRHPDGVASVAFKEPEEADACQVALNGRWFGGRKLSALLWDGVTDYQVEETSREREERLKGWLSFLGDEKGSGEAKANSTKTDEQQNSSPQEAAAAEQTQQEPHVNESSTKPQEEKNEEEGGGMASTDSSLAGSDDEDA

SEQ ID NO: 6127 - DNA, 2478 bp, Rattus norvegicus
  CDS (1)..(2478)
  misc_feature (1658)..(1658): n is a, g, c or t
  misc_feature (1659)..(1659): n is a, g, c or t
  misc_feature (1717)..(1717): n is a, g, c or t
  misc_feature (1726)..(1726): n is a, g, c or t
atggacacgcggcggcagccaggctttgaaaccccgcccctgtccgcgcaagcgtcgcggacatatgacgccacgtgggcgtgtcgagcgatccttacgtcgccacgcgcggacaatggcgaccgcatcacgcccttttggcctcttcacttctctgaccgttgtgtccgggactacgtgagaaccatgagtggcagcaacttgagcgggaacgatgaatttgatgagcagttgcgaatgcaagaattgtacggagaccccaaggaaggtgacacccagaatgagccctctggagaaactgattctttgggacaaccaccagatgacactccctacgagtgggaccttgataagaaggcttggttccctaagatcaccgaagatttcattgcttcgtatcaggccaactacggcttttctggtgatggtgcacccagctctactgggaatgtccaggacgccaacactaagactgtagaagagccgccacagaaagaaatcccggaaaccactgactccaaaaagaggggagaaaagagaaaggctgaatctggcaatacaggtctccctccagacatcacagtggatgaatttatacagcttatgtccaaatttggtattattatgagggatcctcagactgaagaatttaaggtcaaactttacaaagatgatcaaggaaatcttaaaggagatggactttgctgttatctaaagaaagaatctgtggaacttgcattaaaacttttggatgaagatgaaattagaggctacaaattgcatgtggaggtggcacagttccagctgaagggggaatacgatgcctcaaagaagaagaagaagtgcaaagactataagaagaagctgtctctgcagcagaagcagttggattggagacctgagagacgagctgggccaaaccggctgcgccatgaacgagttgtcattctcaaaaatatgtttcaccccatggattttgaggatgatccattggtgctgaatgaaatcagagaggatcttcgagtagaatgttcaaagtttgggcagattaggaagctccttctgtttgatagacacccagatggtgtggcctctgtgtccttcagagaaccagaggaggctgataattgtattcagactctggatggaaggtggtttggtggccgtcagatcactgctcaagcctgggatgggactacagattatcaggtggaggagacctcaagagaaagagaggaaaggctaagaggctgggaggcattcctcaatgctcctgaggccaacagaggccttcagcgtatggattccatctgcggttcagaaaggccagggccttccagagtgaggcatttttcagagcacccaagtatgtctaacatgggtgctcaggaagctacgactggaatggcgtttgaagaaactatcgatgaaaataagtttgaaaaggcagaagatgatgggggagagtctgaaggagatgcttctgaaaaagatgctaaagaaggtgagtccgatggagactaccctgagagagagagtgatgaaggctgctccaagagacagtgtgaagagggctgccctgatagagagagtggagaaggctgctccaagagagagagtggagaaggctgtcctgagagggagcttgagctagaagnnggtaatcctaaaaaggagtctcaggagaatggccctgaaagagaatctaagaagaaangtaaagagnattatgaaaagaatggccttgcaaaagaatctgaagacaatgacctcaacagagagtccgaaggggaagatagccccaagaaagaatcagaagaggatgactcagagagggaatctgaggaagacagctcagaaaagcaatctgaaaatggctctgacaaagaactagaagaaaatggtgtgaaaaaagattttgaccaggatgcctctgacaaggagttcccagaaaatgttgagaaagagtcagaagaaaatgagactgacaagtcagaatttgatgaaggctctgaaagagtgttaggtgaggaaggctctgagagagaatttgaggaagactcagatgaaaaggaggaggaggaagatgatgatgaagagaaagaggtcgtatatgaaagagtttttgaggatgattctgatgacttcgaggaggaagaagaagcatatgaaaaggagtgtgaagatgctgatgagaaagaggaagacgatgatgttgatgaaaaggtctttgatgactcggatgagaaggaggatgaagaagacacagatgtaaggaaagatgacgatgctagtgacaaggtattcgaagacaattccaatgagaagttgtttaatgaggaagaaggtcccaatgagaagttgtttgatgattctgatgaaagagggactgtggggaatgtgaaggaagatgggtctcaatccacagacagcagctttgccctcagtagtagtgatgatgatggtgatgaagtgtaa

SEQ ID NO: 6128 - protein, 825 aa, Rattus norvegicus
  misc_feature (553)..(553): The Xaa at location 553 stands for Ala, Asp, Glu, Gly, or Val.
  misc_feature (573)..(573): The Xaa at location 573 stands for Arg, Cys, Gly, or Ser.
  misc_feature (576)..(576): The Xaa at location 576 stands for Asn, Asp, His, or Tyr.
MDTRRQPGFETPPLSAQASRTYDATWACRAILTSPRADNGDRITPFWPLHFSDRCVRDYVRTMSGSNLSGNDEFDEQLRMQELYGDPKEGDTQNEPSGETDSLGQPPDDTPYEWDLDKKAWFPKITEDFIASYQANYGFSGDGAPSSTGNVQDANTKTVEEPPQKEIPETTDSKKRGEKRKAESGNTGLPPDITVDEFIQLMSKFGIIMRDPQTEEFKVKLYKDDQGNLKGDGLCCYLKKESVELALKLLDEDEIRGYKLHVEVAQFQLKGEYDASKKKKKCKDYKKKLSLQQKQLDWRPERRAGPNRLRHERVVILKNMFHPMDFEDDPLVLNEIREDLRVECSKFGQIRKLLLFDRHPDGVASVSFREPEEADNCIQTLDGRWFGGRQITAQAWDGTTDYQVEETSREREERLRGWEAFLNAPEANRGLQRMDSICGSERPGPSRVRHFSEHPSMSNMGAQEATTGMAFEETIDENKFEKAEDDGGESEGDASEKDAKEGESDGDYPERESDEGCSKRQCEEGCPDRESGEGCSKRESGEGCPERELELEXGNPKKESQENGPERESKKKXKEXYEKNGLAKESEDNDLNRESEGEDSPKKESEEDDSERESEEDSSEKQSENGSDKELEENGVKKDFDQDASDKEFPENVEKESEENETDKSEFDEGSERVLGEEGSEREFEEDSDEKEEEEDDDEEKEVVYERVFEDDSDDFEEEEEAYEKECEDADEKEEDDDVDEKVFDDSDEKEDEEDTDVRKDDDASDKVFEDNSNEKLFNEEEGPNEKLFDDSDERGTVGNVKEDGSQSTDSSFALSSSDDDGDEV

SEQ ID NO: 6129 - DNA, 1299 bp, Neurospora crassa
  CDS (1)..(1299)
atggaacaacaagaaggacaacaagccgagtactggacatttccgaccgaccccggagagtttgacaaagacgagcgcatctccttctctaagctcgacaacaaatacatcgcggtccaagacgatggcaccgaatacgagttcgacgagggtctcaagcgctggcttcccatcatcgacgaagccttaatcgaagaacaccagagggcatacataacatcactcggagacgacgatacagagacaggccaattgggcaaaggacaaggcaagaagagaaagaacgacgaccgagaggactccgctagcagtaaccacaacatgaacgcccgtccatcgaagaaccggaagcgtgagaaagcgccacgggagcccaagcagaacacagccgtctacgtgactggtcttccgctcgatgcgacggctgacgaggtcgccgagctcttctcgcgtaaatgcggcgtcattgccgaggagatcgacagcggccgcccgcgcatcaagatgtacacggacgccaacggaaacttcaaaggggacgccttgatcgtcttcttcaagccgcagtcggtcgagatggccattatgctcctggatgacaccgacttccgctttgagcctgctccggatggcagcagaatgcgcgtccaggcggcggatatgagctacaaaaagaccaaatacgacgcagcagcaggcgcggagaacggcggtggtgacaaggcaggcaatggtggcgcagagggagaaggctcgtcctcttcgaccccctacaacaacatcaccaaccccaaccccgtttccagcgacggtggcggtaacggtcataaccaacgcagccaacaagacaaagccaaaatcatcaaaaagacccaaaagctctccgccaagctcgccgactgggacgacgacgagccctccccttctgcccgccttctggggcccgcgatcaaggaagcaaagggaggcaagtgggacaaggtcgtgatcctgcgacacatgttcacgctggaggagctcaacgaggacccggctgctctgctggagatcaaggacgacatccgggaggaatgtgccaagctggggcccgtgactaacgtggtgctgtttgatgaggaagaggaagggattgtgagcgtcaagttcgcgacagtggaggcggcagaggcgtgcgtgcatttgatgcatggacgggcatttgatggaaggattgttgaggctttctttgctactggcaaggagcggttcaggaagagcaagaataaggatgcgggtgaggaggacggtggtgatgattga

SEQ ID NO: 6130 - protein, 432 aa, Neurospora crassa
MEQQEGQQAEYWTFPTDPGEFDKDERISFSKLDNKYIAVQDDGTEYEFDEGLKRWLPIIDEALIEEHQRAYITSLGDDDTETGQLGKGQGKKRKNDDREDSASSNHNMNARPSKNRKREKAPREPKQNTAVYVTGLPLDATADEVAELFSRKCGVIAEEIDSGRPRIKMYTDANGNFKGDALIVFFKPQSVEMAIMLLDDTDFRFEPAPDGSRMRVQAADMSYKKTKYDAAAGAENGGGDKAGNGGAEGEGSSSSTPYNNITNPNPVSSDGGGNGHNQRSQQDKAKIIKKTQKLSAKLADWDDDEPSPSARLLGPAIKEAKGGKWDKVVILRHMFTLEELNEDPAALLEIKDDIREECAKLGPVTNVVLFDEEEEGIVSVKFATVEAAEACVHLMHGRAFDGRIVEAFFATGKERFRKSKNKDAGEEDGGDD

SEQ ID NO: 6131 - DNA, 1233 bp, Magnaporthe grisea 70-15
  CDS (1)..(1233)
atggccgagccgcagcagcatgacgatcagccgcaggagccggtggctgagttctggtccttccccaccgacccggccgagttcgacaacgacgagcgcgtctccttttcgcggctcgagaacaagtacatcgcggtgcaggaggatggggcggagtacgagtgggacggcggcctgaagcgctggatccccatcgtcgacgacgcgctgattgagtcgcaccaggcggcgtacggcggcggtgctgcagaggacgaagaggcgccagcgacgacggcagccgacaggaggaaaaagaagcgaaaagcaggcgacgatgacggcggcaaggcgaagcggccgcgacagaacacggccgtctacgtcacgggcctgccgctcgacgtgacggtggaggagatcgcggagctcttctcacgaaagtgcggcgtcatcgccgagaacatcgacgacagcagcccgcgcatcaagctgtacacggacggcggcggcaacttcaagggcgacgcccttgtcgtcttcttcaagccccagtcggtcgacatggccatcatgctgctcgatgacacagactttaggatcacgccgtcgggcctctcgagcgggaggataagggttcaggcggcagacacgagctacaagagaaataattacgaccaggagggtggagcagaaggtgtggacggagcgggtagtggtaatggtaacagcggtagggggtctgcggcgccggcagcggagaatggcaacggcggccatacgcgtaatacgactgacaaggccaaggtgatcaagaaggcgcagaaaatgagcgcgaaactggcagactgggacgacgacgacccgtacccgtaccttgcggctgcagtcggagcaggggctggaggaaacggaccgaccaacaaaaaggccgaacggaccgtgatactcaggcacatgtttacgctcaaagagctggacgaagacccggcggcgctactcgagatcaaagaggacatcagggacgagtgcgaaaagcttggcgaagtcaccaactgcgtactcttcgacctggaggaggacggcattgtgagcgtcaggttccgcacccccgacgcggccgaggcgtgcatcaagctcatgcacggccggagctttgacgggaggacggtgcaggcctccctagcgaccggaaaggagaagtacaggaggtccaaagacaaagatgacggcctggatgaggatgatgcctaa

SEQ ID NO: 6132 - protein, 410 aa, Magnaporthe grisea 70-15
MAEPQQHDDQPQEPVAEFWSFPTDPAEFDNDERVSFSRLENKYIAVQEDGAEYEWDGGLKRWIPIVDDALIESHQAAYGGGAAEDEEAPATTAADRRKKKRKAGDDDGGKAKRPRQNTAVYVTGLPLDVTVEEIAELFSRKCGVIAENIDDSSPRIKLYTDGGGNFKGDALVVFFKPQSVDMAIMLLDDTDFRITPSGLSSGRIRVQAADTSYKRNNYDQEGGAEGVDGAGSGNGNSGRGSAAPAAENGNGGHTRNTTDKAKVIKKAQKMSAKLADWDDDDPYPYLAAAVGAGAGGNGPTNKKAERTVILRHMFTLKELDEDPAALLEIKEDIRDECEKLGEVTNCVLFDLEEDGIVSVRFRTPDAAEACIKLMHGRSFDGRTVQASLATGKEKYRRSKDKDDGLDEDDA

SEQ ID NO: 6133 - DNA, 1131 bp, Gibberella zeae PH-1
  CDS (1)..(1131)
atggacctgccgttccctatagaccctcgcgagttcgacagcgatgatcgcatatcgttttccaagctcgacaagaagttcatcgcggttcatgacgatggcaacgagtacgaattcgacgccgattctaagcgatggattcttgcagatgaagagccattggaaccaccagtaactgacgtgtatgatgatttcgccgagtttgcatcaaacgaagctgcagaggacgggtcaaggaagcgcaaaaatgggtcgggtcaggattctgagactcccgaaccatccaaaccatcacggccaaacaagaagcaaaaagcacctccgcaacccaaacaaaacacagctgtgtatgtcaccggtttacctcccgatacaactgtcgaggaagtgcacgatctcttctcacgaaagggcggtgttattgcggaggaaattgatagcggtgcaccgcgaatcaagctttacaatgatgccgacggcaacttcaagggcgatgctctgattgtcttcttcaagccccaaagcgtcgagatggccatcatgcttcttgacgatacagatttcaggattactgcgagcggcacgcacgagggtcggataaaagtacaagctgccgattcgagctacaaaaaggtcaaatacgaccaagaacctggtgctggtggagagaagagcaacggcgcagctgagcgcaagccacagaacaaccgcgacaggcaaaagattattaagaaaacccagaagctggatgcaaagctggctgactgggatgatgatctgccgtacccgggacagccggaggcagcgaccaagtgggacaagcttgtgattcttcggcacatgtttacactggaagagctcgaggaggaccctgctgctcttttggagatcaaggaagatatccgagaagaatgcgccaagctgggaacagtgacgaacgttgtgctgtttgaccaagagcctgaaggcattgtctcggtcaagttcaaagacacagcatcggcccacgcatgcattaatcttatgcacgggagaagatttgatggtcgaacggtggaggctttcctggcaacaggaaaggaaaagtttaacaaatcaaaggatgaggagaaccatgaggactcggattag

SEQ ID NO: 6134 - protein, 376 aa, Gibberella zeae PH-1
MDLPFPIDPREFDSDDRISFSKLDKKFIAVHDDGNEYEFDADSKRWILADEEPLEPPVTDVYDDFAEFASNEAAEDGSRKRKNGSGQDSETPEPSKPSRPNKKQKAPPQPKQNTAVYVTGLPPDTTVEEVHDLFSRKGGVIAEEIDSGAPRIKLYNDADGNFKGDALIVFFKPQSVEMAIMLLDDTDFRITASGTHEGRIKVQAADSSYKKVKYDQEPGAGGEKSNGAAERKPQNNRDRQKIIKKTQKLDAKLADWDDDLPYPGQPEAATKWDKLVILRHMFTLEELEEDPAALLEIKEDIREECAKLGTVTNVVLFDQEPEGIVSVKFKDTASAHACINLMHGRRFDGRTVEAFLATGKEKFNKSKDEENHEDSD

SEQ ID NO: 6135 - DNA, 1131 bp, Apis mellifera
  CDS (1)..(1131)
atgtcaagaatgtggggaacaccatcggcgagaatggaaggagtatttggttttgaaaacgatactcatacgtacacagatcctaatgatggcagtgtgtatttttgggacaaagagaaaaatgcatggtttccaaaggtggatgaagatttcatggcaagatatcaaatgagttatgggtttacagatacaaatcgcatagaaacaaaacctgtgcaacaatttcaatcacaaggaaaggtcgataaagagaaaaagaaaatggaagccaaaagaaaatcacaagaaccaccgacctggttcgaagtggatgaagcccataatactgctatttacgtgtccggtctaccactagatattactatggatgaacttaccgagcttttcaacaagtgtggtctcatagcgcgagacgaaaaaggaaaagacaaaatcaaattatacaaggattcgaatggacaaccaaagggtgacgctctttgtatctatataaaggtcgaatcggtggatttggcattaaagatcttggataaatcgcaaatcaggggtaaaacgttgtctgttcagagggcaaagtttcaaatgaaaggagacgcgtacgacccagccttgaaaccgaaaaggaaaaaaaaggataaggaacgacagaaaaagttgcaagaaaaattattcgattggaggcccgaacgtgcgccaggagaaccattgaaacacgaaagagtagtaattataaaaaatctattttctccggaagattttgacaaagaggtgtcgttattgctggaatatcaacaggacatcagatcggaatgcttgaaatgcggtgacgtccgaaaagttgttatttacgatagacatccggaaggcgttgcacaggtaacatttcgggaaccagcagaagcacaagcttgtattcaattattaaacggccgttggttcagccaaaggaaaatatcggctgaaatatgggatggtaaaacgaaatacaaaattttggaaccagacgcggaaacggaagctcgaatcgctaaatgggacaaatatctagaaaccgaaaaggaaaagaaggaagaagaaattgcgaaggacgagttacgaaaggagtcgaaaacaaggcggaaaggcccgtaa

SEQ ID NO: 6136 - protein, 376 aa, Apis mellifera
MSRMWGTPSARMEGVFGFENDTHTYTDPNDGSVYFWDKEKNAWFPKVDEDFMARYQMSYGFTDTNRIETKPVQQFQSQGKVDKEKKKMEAKRKSQEPPTWFEVDEAHNTAIYVSGLPLDITMDELTELFNKCGLIARDEKGKDKIKLYKDSNGQPKGDALCIYIKVESVDLALKILDKSQIRGKTLSVQRAKFQMKGDAYDPALKPKRKKKDKERQKKLQEKLFDWRPERAPGEPLKHERVVIIKNLFSPEDFDKEVSLLLEYQQDIRSECLKCGDVRKVVIYDRHPEGVAQVTFREPAEAQACIQLLNGRWFSQRKISAEIWDGKTKYKILEPDAETEARIAKWDKYLETEKEKKEEEIAKDELRKESKTRRKGP

SEQ ID NO: 6137 - DNA, 1170 bp, Debaryomyces hansenii CBS767
  CDS (1)..(1170)
atgctggatttccctgatgcaccacctcttccgtctttgatgtccaaggatccagatatccttaaaaccgtggacgaaagactttcttatgacaaaagctcatcgcaatggtttttcgaggtgaataacgataataaatcaacagagtactattataactttatactcgaaagatggataccaacagcagagattgaagataacggccggaaaagaagtcgtgaggatgaaaccatccatgacgaagaagaagagaataaattagctatcaagaatttgaaaaagcagaagcttaaagaaatgaaagaacaaatgaataaatctaaagcagatggcaataagaataaatctacgtttgaaaataccggggtgtatgtctcgcaattaccaggggatattacgaaggacgagctaatggtgacctttagtaaatatggattgatatcagaagattataagacaggtgaaccacgaattaaaatatatcacaacgatggtcaacgtgacgatcaacgcgatgcattgataatatatcatagtaaagaaagtgtttctttggctattgagatgcttgatgactcctccataagaccaccatctgataaggatcagacaaagataaaagttcaaccggctgagtttaagaaatcagactcagacacaactaacgacaagaaaaaaacgctcacatatgaagagaaaaagttgttaaataagaaaaaagaaatgatgaagaaaaagctatcaagttgggatgatgatgaaggaaccatacaggcaggagacctggataaaactaataatattaaaaagagaatctgggacaagattgtggttatagagaaaatgtttcgaattgaggaattgaagagcgatcctttattagaaatggatttgaaggaagatattcaagacgaatgtaataagctcaatataggaaatgatgtcacaaaaattactatctatgatgtaagtggcataatcactgttaaatttaataacggcgatctgagcttaaaatgcattgaaagcttcagtggaagatattacgatggtctaacacttaaagcctatctctatcaaggggagaagttccaaaaaacgagccaagataaggagaatgaaggtgaaaggcttgatagctttggaaattggttagagaagaaataa

SEQ ID NO: 6138 - protein, 389 aa, Debaryomyces hansenii CBS767
MLDFPDAPPLPSLMSKDPDILKTVDERLSYDKSSSQWFFEVNNDNKSTEYYYNFILERWIPTAEIEDNGRKRSREDETIHDEEEENKLAIKNLKKQKLKEMKEQMNKSKADGNKNKSTFENTGVYVSQLPGDITKDELMVTFSKYGLISEDYKTGEPRIKIYHNDGQRDDQRDALIIYHSKESVSLAIEMLDDSSIRPPSDKDQTKIKVQPAEFKKSDSDTTNDKKKTLTYEEKKLLNKKKEMMKKKLSSWDDDEGTIQAGDLDKTNNIKKRIWDKIVVIEKMFRIEELKSDPLLEMDLKEDIQDECNKLNIGNDVTKITIYDVSGIITVKFNNGDLSLKCIESFSGRYYDGLTLKAYLYQGEKFQKTSQDKENEGERLDSFGNWLEKK

SEQ ID NO: 6139 - DNA, 1431 bp, Oryza sativa (japonica cultivar-group)
  CDS (1)..(1431)
atggagggcggcggcgaggtgggctggtacgtgctcggcccgaaccaggagcacgtcggcccctacgcgctctccgagctgcgagaacattttgctaatgggtacatcagtgagagctcaatgctctgggcagaagggaggagtgaatggatgccattgtcgtcgattcctgacctacttgcggtggtcacaaaaaaggatcaacctgatgaaggaattgaagatgatttcgataaatttcaaaaggaggttatagaagctgaggcagaggtggaagcctcgacagacaaggctgcagataacgacataaaccaagaacatggggccgatgatcctgatgaccggccagcaaccccaccagatggcgaggacgaatttactgatgatgatggtactgtttacaagtgggatcgtgtcctgagggcatgggttcctcaagatgacctagaaggcaaaaatgacaactatgaagttgaagacatgacttttgcacatgaggaagaagttttccaagcaccagatattgctggttcaaccacattagaagaaaacaatgtttctgccgaaattgaaatcaaagaaccaacaaaggtagaaaagagagcagataagaagcggaagtcttctgagaagccagccgataaaaaggaagctaacaaacctccagatagttggtttgatctcaaagttaacacacatgtctacgttactggtttgcctgatgatgtcacagctgaggagattgtggaggtattttccaaatgtggaattataaaggaggacccagagacaagaaaaccccgagtaaaaatctatactgacagagaaacaggcagaaagaaaggtgatgcgctagtgacctacctcaaggagccttctgtagcactagcaattcaactgttggatgggacatcatttcgccctggtggtaagactctaatgtctgttagcccggccaaatttgagcagaaaggtgatgttttcatttctaagaagacagataagcaaaagaaaaggaaaaccaagaaagttgaggataaaattctaggatggggtggacatgatgacaagaaggtgacgattacaactacagttattttgaggcatatgttcactcctgctgaattgcgagccgatgaaactcttcttcccgagcttgaggcagatgttagagaagaatgcatgaagcttggtccagttgataatgtcaaggtctgtgaaaatcatccagagggtgttattttggtgaaattcaaagaccggaaagatggtatcaaatgcatagagaagatgaatggaagatggtttggtgggaatcaaatccaggcgagtgaagatgacggttctatcaaccatgctctgatccgtgattatgatgcagaggtgtcaaggcttgatcgatttggagaagagttagaagagtccacatag

SEQ ID NO: 6140 - protein, 476 aa, Oryza sativa (japonica cultivar-group)
MEGGGEVGWYVLGPNQEHVGPYALSELREHFANGYISESSMLWAEGRSEWMPLSSIPDLLAVVTKKDQPDEGIEDDFDKFQKEVIEAEAEVEASTDKAADNDINQEHGADDPDDRPATPPDGEDEFTDDDGTVYKWDRVLRAWVPQDDLEGKNDNYEVEDMTFAHEEEVFQAPDIAGSTTLEENNVSAEIEIKEPTKVEKRADKKRKSSEKPADKKEANKPPDSWFDLKVNTHVYVTGLPDDVTAEEIVEVFSKCGIIKEDPETRKPRVKIYTDRETGRKKGDALVTYLKEPSVALAIQLLDGTSFRPGGKTLMSVSPAKFEQKGDVFISKKTDKQKKRKTKKVEDKILGWGGHDDKKVTITTTVILRHMFTPAELRADETLLPELEADVREECMKLGPVDNVKVCENHPEGVILVKFKDRKDGIKCIEKMNGRWFGGNQIQASEDDGSINHALIRDYDAEVSRLDRFGEELEEST

SEQ ID NO: 6141 - DNA, 1095 bp, Yarrowia lipolytica CLIB99
  CDS (1)..(1095)
atgttcgagtttgaccatgtgactagaggctggcggttgatagaggaggaggaggaggacaaggaggaggaggtggaggataagggagacgagttggaagcggctctggttgctggggagacgacggacacaactgcgactgcgaaggcggaaccgagtgggagggatacgggcaaaaaccagccggtttcggacaagaaggcggttcaggagcagctcaaaaagaggcgcaaagaggtaattgaggagcgacggaatgcgaaaaaggctcagcagaagggcgacaagcctcctcagaaggccatctatgtcagtgggcttccttcaactgctaccaacgatgagctggtggacattttccaaaagtacggagtgttggccgaagatgtttacactggcaagaagaaggctcgggtttatgtcgatgagcagggcaagggcaagggcgacggtctggtggtttttttcaagcccgaaagcgtgaaattggcggtggatatgctgcacaatcagccagtttacgttggcgacacaatggtcactctgaatgtccagccggcagttttcgacaaggaaaagggcagtagcgacaataagaagcaagagacgaattccggtcccaattactccgaagaagccaaggccaaggccaagaggaagtacactcaattgcagcaaaggctcaacgattgggatgaggaggaggtcaaacgagtcaagacggagtctcgtgaaaagtcgtccaaggtggtcactctcaaacgggtatttaccattcaggagctccaggatgacgtggatgccgaaatggacatcaaggaagatatttataacggttgtggagctatcggaacagtcacaaacgtgactttatacgacctggagcccgacggagtggtgaccgtcaagtttgaaagagcttccgatgccgcggagtgcgtggagaagatgaacggtcgcttctttggtggccagaaactcgaggcatacattgattatgacgagaccaagtggagaaagactaaggatcggggaggtgatgaggaagatgaggagaggctggagaggtttggagagtggctggagggcgagtag

SEQ ID NO: 6142 - protein, 364 aa, Yarrowia lipolytica CLIB99
MFEFDHVTRGWRLIEEEEEDKEEEVEDKGDELEAALVAGETTDTTATAKAEPSGRDTGKNQPVSDKKAVQEQLKKRRKEVIEERRNAKKAQQKGDKPPQKAIYVSGLPSTATNDELVDIFQKYGVLAEDVYTGKKKARVYVDEQGKGKGDGLVVFFKPESVKLAVDMLHNQPVYVGDTMVTLNVQPAVFDKEKGSSDNKKQETNSGPNYSEEAKAKAKRKYTQLQQRLNDWDEEEVKRVKTESREKSSKVVTLKRVFTIQELQDDVDAEMDIKEDIYNGCGAIGTVTNVTLYDLEPDGVVTVKFERASDAAECVEKMNGRFFGGQKLEAYIDYDETKWRKTKDRGGDEEDEERLERFGEWLEGE

SEQ ID NO: 6143 - DNA, 2745 bp, Canis familiaris
  CDS (1)..(2745)
atggcgcgcgccgagtgggaacattcccacgcctccggctgccgcccaccgcggcctccaccgagcccgagggtccagcactgcccgcccgcgtcggcgcttattgacgccactggaggcgtgtcggcgcgacccgcgacgtctcgacgtgccaacaatggcgactgcgtcagcctgagcgggcctcagttttccggcaacctcttgacgttgccgcgagggccacgggggccgcgggagccgcgggagccgcgggggttgcagaggctgcaggcgactccgacccggtcggcggcgggggcggcggcggcgcgcgtgcgcgctcccgccacgccctgggtcgagccgcggcgccgaggcccggtggagcgagccaggtgggcggcggcgcggcaggggctgcagcctgcggcgcgcgcgcgcgcgcgcgtcggcaacatgagcggcaacaacttggatgggaacgacgagtttgatgagcagttgcgaatgcaagaattgtacggcgacgccaaggacggcgacacccagaaagatcccagtggagaacccgattctttcgggcagcagccggctgacaccccgtacgagtgggacctggacaagaaggcttggttccccaagatcactgaagatttcattgctacatatcaggccaattatggcttttctaatgagggggcatctagctctactgcaaatgtgcaagaagtcagtgctaggactgcagaagaaccgccacaaagaaaaacccctgaacccaatgatcccaaaaagaggggagaaaagagaaaggctgaaccaggatggtttcatgttgaagaagacagaaatacaaatgtatatgtgtctggtttgcctccagacattacagtggatgaatttatacagctcatgtccaagtttggcatcattatgagagatcctcaaacagaagaatttaaggtcaaactttacaaagataatcaaggaaatcttaaaggagatggtctttgctgttatttgaagagggaatctgtggatctcgcgttaaagcttctggacgaagatgaaattagaggctacaaattgcatgtcgaagtggccaagtttcaactgaagggagagtatgatgcctcaaagaagaagaagaagtgcaaagactacaagaaaaagctgtctctgcaacagaagcagttggactggagacctgagagaagagctggcccatctcgaatgcgccatgagcgagttgtcatcatcaaaaatatgtttcatccgatggattttgaggatgatccattggtgctgaatgaaatcagagaagaccttcgagtagagtgttcaaagtttggacaaattaggaagcttcttctctttgatagacaccccgatggtgtggcctctgtgtccttcagggatccggaggaagctgactattgtatacaaactcttgatggaaggtggtttggtggccgtcaaatcactgcccaggcgtgggatgggactacagattatcaggtggaagagaccacaagagaaagggaggaaaggctgagaggatgggaggctttccttaatgctcccgaggctaacagaagccttcggcgttcaaattccatctgtgcttcggaaagggcggggccttctagggtaaggcatttttcagagcgccctagcacatcgaaaatgaatgcacaagaggccacaagggaaatggcatttgaagaacccatcgatgaaaagaagtttgaaaaaaccgaagatgggggagaatttgaaggagatgcttcggaaaaagatgccaaagaaagtggtcccgagaaagaggctgaggaaggctgcgcccagaaagaatctgaagaaggctccctcaaaacagagtctgaggaaggctgccccaagagggagcgtgaggaagactacccagagagagagtctggagaaggcagccctgaaaaagagtttgaagagggcggtcctaaagcagagtctaaagagaatggccctgaacaagaatccaaaaagaagaggctcaaaaatgattatgaagagaacggtcttgaaaaggattctgaccaagatggccccagcaaggagtgtgaagaggagagccctcaaaaggagtctgaagaggatgactcggaaagggaatccgaagaagacttctctgaaaagcagtttgaagacggctctgagaaagaatttgaagaaaatggccttgagaaggattttgatgaggatgcctccgacaaggagttcggcgagaacattctcgacagggagtttgaagacaatgactctgacaaatcagaatttggagatagcagctctgagagagtgtttgaggaggaagtctcagagagggagtttgacgaagagtctgatgacaaggaagaaggggaggacacctacgaaaaggtatttgatgatgagtcagacgaaagagaggatgaagactatgcagatgaaaaggggcttgaagacgttgatgagaagatgttcgaagactcggatgacaaagaagatgaggaaggagtagagataaaggaaggtgaggacgtggatgataagatgtttgaagaggatgattccaacgggaagctgtttgatgatgacgatgaggattccagtgagaagctgtttgacgactctgatgagagagggacagtgaggggtgtgggcaacgtgaaggaggaagggcccctgtccacaggcagtagctttgtcctcagtagcgacgacgatgtcgatgatgacatttaa

SEQ ID NO: 6144 - protein, 914 aa, Canis familiaris
MARAEWEHSHASGCRPPRPPPSPRVQHCPPASALIDATGGVSARPATSRRANNGDCVSLSGPQFSGNLLTLPRGPRGPREPREPRGLQRLQATPTRSAAGAAAARVRAPATPWVEPRRRGPVERARWAAARQGLQPAARARARVGNMSGNNLDGNDEFDEQLRMQELYGDAKDGDTQKDPSGEPDSFGQQPADTPYEWDLDKKAWFPKITEDFIATYQANYGFSNEGASSSTANVQEVSARTAEEPPQRKTPEPNDPKKRGEKRKAEPGWFHVEEDRNTNVYVSGLPPDITVDEFIQLMSKFGIIMRDPQTEEFKVKLYKDNQGNLKGDGLCCYLKRESVDLALKLLDEDEIRGYKLHVEVAKFQLKGEYDASKKKKKCKDYKKKLSLQQKQLDWRPERRAGPSRMRHERVVIIKNMFHPMDFEDDPLVLNEIREDLRVECSKFGQIRKLLLFDRHPDGVASVSFRDPEEADYCIQTLDGRWFGGRQITAQAWDGTTDYQVEETTREREERLRGWEAFLNAPEANRSLRRSNSICASERAGPSRVRHFSERPSTSKMNAQEATREMAFEEPIDEKKFEKTEDGGEFEGDASEKDAKESGPEKEAEEGCAQKESEEGSLKTESEEGCPKREREEDYPERESGEGSPEKEFEEGGPKAESKENGPEQESKKKRLKNDYEENGLEKDSDQDGPSKECEEESPQKESEEDDSERESEEDFSEKQFEDGSEKEFEENGLEKDFDEDASDKEFGENILDREFEDNDSDKSEFGDSSSERVFEEEVSEREFDEESDDKEEGEDTYEKVFDDESDEREDEDYADEKGLEDVDEKMFEDSDDKEDEEGVEIKEGEDVDDKMFEEDDSNGKLFDDDDEDSSEKLFDDSDERGTVRGVGNVKEEGPLSTGSSFVLSSDDDVDDDI

SEQ ID NO: 6145 - DNA, 1434 bp, Bos taurus
  CDS (1)..(1434)
atgagtggcaacaacttggatgtgaatgacaagtttgatgagcagttgcgagtgcaagaatggtacagagacaccaaggacaacggcactgagaaagatcccggtgcagaaaccgattctttcagacagcagccgactgacaccccatacgagtgggacctagacaagaaggcttggttccccaagatcactgaagatttcattgctacgtatcaggccaattatggcttttctaatgatggtgcatctaattctactgcaagtgtccaagatgtcagtgctaggactgcagaagaacctccgcaaagacaaccccctgatcccagtgatctgaaaaagaagggagaaaagagaaagactgaatcaggatggtttcatgttgaagacgacagaaatacaaatgtttatgtgtctggtttgcctccagacattacagtggatgaatttatacagctcatgtcgaagttcggcattattatgagagatcctcaaacgggagactttaaggtcaagctttataaagatgatcaaggaaatcttaaaggagatggactttgctgttatttgaagagagaatctgtggatctggcattaaaacttttggatgaaggtgaaattagaggctacagattacatgtggaggtggcaaaatttcagttaaagggagaatatgatgcctcaaagaagaagaagaagtgcaaagactacaagaaaaagctgtctatgcaacaaaagcagttggattggagacctgagagacaagctggctcatcccgaatgtaccatgagcgagttgtcatcatcaaaaacatgtttcatccagtggattttgaggatgatccactggtgttgaatgaaatcagagaagaccttcgagtagagtgttcaaagtttggacaaattaggaagctccttctctttgatagacaccctgatggtgtggcctctgtgtcctttaggagtccagaggaagctgattattgtattcaaaccctcaatggaaggtggtttggtgggcgtcaaatcactgcccaagcgtgggatggaactacagattgtcaggtggaggagaccacaagcgaaagggaggaaaggctgagaggatgggaggctttcctcaatgctcctgaggccaacagaggcctgcagcgttcagattccatccgtgctccagagagggcagggtcttctagagttaggcatttttctgagcatcctggcacatctcaaacaaatgttcaagcagctgcaactgaaatggcatttgaagaacctatagatgaaaagaagtttgaaaaaatggaagatgggggagaagttgaagaagctgcttctgaaaaagatgctaaagaaagtggccctgaaaaagaagctgaaggttcccgagaagaatctgaagagagctgccttgaaagagagtctaaggcagcctag

SEQ ID NO: 6146 - protein, 477 aa, Bos taurus
MSGNNLDVNDKFDEQLRVQEWYRDTKDNGTEKDPGAETDSFRQQPTDTPYEWDLDKKAWFPKITEDFIATYQANYGFSNDGASNSTASVQDVSARTAEEPPQRQPPDPSDLKKKGEKRKTESGWFHVEDDRNTNVYVSGLPPDITVDEFIQLMSKFGIIMRDPQTGDFKVKLYKDDQGNLKGDGLCCYLKRESVDLALKLLDEGEIRGYRLHVEVAKFQLKGEYDASKKKKKCKDYKKKLSMQQKQLDWRPERQAGSSRMYHERVVIIKNMFHPVDFEDDPLVLNEIREDLRVECSKFGQIRKLLLFDRHPDGVASVSFRSPEEADYCIQTLNGRWFGGRQITAQAWDGTTDCQVEETTSEREERLRGWEAFLNAPEANRGLQRSDSIRAPERAGSSRVRHFSEHPGTSQTNVQAAATEMAFEEPIDEKKFEKMEDGGEVEEAASEKDAKESGPEKEAEGSREESEESCLERESKAA

SEQ ID NO: 6147 - DNA, 1545 bp, Bos taurus
  CDS (1)..(1545)
atgagcggcaacaacttggatgcgaacgacgagtttgatgagcagttgcgaatgcaagaattgtacggagacaccaaggacgacgacaccgagaaagatcccggtggagaaaccgattctttcgggcagcagccgactgacaccccgtacgagtgggacctagacaagaaggcttggttccccaagatcactgaagatttcattgctacatatcaggccaattacggcttttctgatgatggtgcgtctagttctactgcaagtgtccaagatgtcagtgctaggactgcagaagaacctccgcaaagacaaccccccgaacccagtgatctgaaaaagaagggagaaaagagaaaggctgaatcaggatggtttcatgttgaagaaggcagaaatacaaatgtttatgtgtctggtttgcctccagacattacagtggatgaatttatacagcttatgtcgaagtttggcattattatgagagatcctcaaacagaagaatttaaggtcaagctttacaaagataatcaaggaaatcttaaaggagatggactttgctgttatttgaagagagaatctgtggatctggcattaaaacttttggatgaagatgaaattagaggctacaaattacatgtggaagtggcaaaatttcagttgaagggagaatatgacgcctcaaagaagaagaagaagtgcaaagactacaagaaaaagctgtctatgcaacaaaagcagttggattggagacctgagagacgggctggcccatcccgaatgcgccatgagcgagttgtcatcatcaaaaacatgtttcatccgatggattttgagtgttttgtaggcctgaatgtaaaagtgtatcagtataggtctgtccactggagtagattgtccagaatggtagactatagccacatgtggtttggtgggcgtcaaatcactgcccaagcgtgggatggaactacggattatcaggtggaggagaccacaagagaaagggaggaaaggctgagaggatgggaggctttcctcaacgctcctgaggccaacagaggcctgcagcgttcaaattccatccgtgctccagaaagggcagggccttctagagttaggcatttttctgagcaccctggcacatctcaagcaaatgttcaagcagccgcaactgaaatggcatttgaagaacctatagatgaaaagaagtttgaaaaaatggaagatgggggagaagttgaagaagctgcttctgaaaaagatgctaaagaaggtggccctgaaaaagaagctgaaggtccccaagaagaatctgaagagagctgccttgaaagagagtctaaggaaggctgtcccaaaagagagcgtgaagaagacttcccggagagagagtctggagaaggcagccctgagaaagagcgtgaagagggtaatcctaacaaagagtcaaaagagactgtccctgaaagagaatccaaaaagaagaaactcaaaacggatcctgacaagaacggccgtgagaaggagtctgaagaagaaggcccctag

SEQ ID NO: 6148 - protein, 514 aa, Bos taurus
MSGNNLDANDEFDEQLRMQELYGDTKDDDTEKDPGGETDSFGQQPTDTPYEWDLDKKAWFPKITEDFIATYQANYGFSDDGASSSTASVQDVSARTAEEPPQRQPPEPSDLKKKGEKRKAESGWFHVEEGRNTNVYVSGLPPDITVDEFIQLMSKFGIIMRDPQTEEFKVKLYKDNQGNLKGDGLCCYLKRESVDLALKLLDEDEIRGYKLHVEVAKFQLKGEYDASKKKKKCKDYKKKLSMQQKQLDWRPERRAGPSRMRHERVVIIKNMFHPMDFECFVGLNVKVYQYRSVHWSRLSRMVDYSHMWFGGRQITAQAWDGTTDYQVEETTREREERLRGWEAFLNAPEANRGLQRSNSIRAPERAGPSRVRHFSEHPGTSQANVQAAATEMAFEEPIDEKKFEKMEDGGEVEEAASEKDAKEGGPEKEAEGPQEESEESCLERESKEGCPKREREEDFPERESGEGSPEKEREEGNPNKESKETVPERESKKKKLKTDPDKNGREKESEEEGP

SEQ ID NO: 6149 - DNA, 1425 bp, Bos taurus
  CDS (1)..(1425)
atgagcggcaacaacttggatgcaaacgacgagtttgatgagcagttgcgaatgcaagaattgtatggagacaccaaggacaacgacaccaagaaagatcctggtggagaaaccgattctttcgggcagcagcagactgacaccccatacgagtgggacctagacaagaaggcttggttccccaagatcactgaagatttcattgctacatatgaggccaattatggcttttctaacgatggtgcatctagttctactgcaagtgtccaagatgtcagtgctaggacttcagaagaacctccgcaaagacaaccccctgatcccagtgatccgaaaaataagggagaaaagagaaaggctgaatcaggatggtttcatgttgaagaaggcagaaatacaaatgtttatgtgtctggtttgcctccagacattacagtggatgaatttatacagctcatgtcaaagtttggcattattatgagagatcctcaaacagaagaatttaaggtcaagctttacaaagataaccaaggaaatcttaaaggagatggattttgctgttatttgaagagagaatctgtggatctggcattaaaacttttggatgaagatgaaattagaggctacaaattacatgcagagttggcaaaatttcagttgaagggagaatatgacgcctcaaagaagaaaaagaagtgcaaagactacaaggaaaagctgtctatgcaacaaaagcagttggattggagacctgagagacgagctggctcatcccgaatgcaccgtgagagagttgtcatcatcaaaaacatgtttcatccagtggattttgaggatgatccactggtgttgaatgaaatcagagaagaccttcgagtagagtgttcaaagtttggacaaattaggaagctccttctctttgatagacaccccgatggtgtggcctctgtgtcctttagggatccagaggaagttgattatttgtttgatgaagaaggctctgagaaagactttgacgaagagtcagatgaaaaggaagaagaggaagatgcatatgaaaaggtatttgatgatgaatcagatgacaaagaggacgaagaagatgcagaagaaaaggaacttgaagatgctgatgaaaaggacgaagaagatgatgcagatgaaaaggtatttgaagattcagatggaaaagaagatgaggaagatggagatgtaaaggaagatgaagacatagatgaaaaggtgtttgaagatgatgattccaacgagaagttgtttgatgatgattccagcgacaaattgtttgaagattctgatgagagagggactgtgggtggtttagggaatgttaaggaagaagggcccttgtccacaggcagcagctttgttctcagtagtgatgatgatgatgacgacactatttaa

SEQ ID NO: 6150 - protein, 474 aa, Bos taurus
MSGNNLDANDEFDEQLRMQELYGDTKDNDTKKDPGGETDSFGQQQTDTPYEWDLDKKAWFPKITEDFIATYEANYGFSNDGASSSTASVQDVSARTSEEPPQRQPPDPSDPKNKGEKRKAESGWFHVEEGRNTNVYVSGLPPDITVDEFIQLMSKFGIIMRDPQTEEFKVKLYKDNQGNLKGDGFCCYLKRESVDLALKLLDEDEIRGYKLHAELAKFQLKGEYDASKKKKKCKDYKEKLSMQQKQLDWRPERRAGSSRMHRERVVIIKNMFHPVDFEDDPLVLNEIREDLRVECSKFGQIRKLLLFDRHPDGVASVSFRDPEEVDYLFDEEGSEKDFDEESDEKEEEEDAYEKVFDDESDDKEDEEDAEEKELEDADEKDEEDDADEKVFEDSDGKEDEEDGDVKEDEDIDEKVFEDDDSNEKLFDDDSSDKLFEDSDERGTVGGLGNVKEEGPLSTGSSFVLSSDDDDDDTI

SEQ ID NO: 6151 - DNA, 828 bp, Cryptosporidium parvum
  CDS (1)..(828)
atgaagaaagccattgtatctttttatttaatcagattatatatagaatttattaatgctatggattcgaaaaaaataaagaaactaaacaagaaaaaagcaaaaggaactcttgtaaacacctctatttatgtccaagggcttccaaaagatataacttttgaagagatgaaatatttttttggtaggggaggtatcataaaaattgacccaacaactttgtctccaaagattaaattatacaatgatgagcttaccaaagaattttctggaaatgctttagttgtttataaatatgaacaaagtattgaattagctctcaagtacctaaatgaaaccgaaattagacctggatttaaagtcaaaattgaaaaggcaatattcaacaagtcatccaaatcaaatattgctccattatctgaaactgaaattaataaaaaaagaaagcaactaaaagcagcagaaatggaagaggaaagacttttatcttggagtaacgaacaacattcactaaatagcaacattgcttccagaatagttgttcttagaccaatgtattctagaaaagaagctgaaatgtaccctgagggggatgacttctacagtgaactagaaatagaagttcaggaagaggtaaccaaatattgtgaggtagtaagtgttacatgtattcctagacatccacagggaattgtttgtgtcaaattaaaatcccaacatgatgctgaaattgttatcgatatttttaatcaaagatactttgatggcagacaaattgaagttcacatgtacgacggaagcaccgacttcaaggcatcttgtatttag

SEQ ID NO: 6152 - protein, 275 aa, Cryptosporidium parvum
MKKAIVSFYLIRLYIEFINAMDSKKIKKLNKKKAKGTLVNTSIYVQGLPKDITFEEMKYFFGRGGIIKIDPTTLSPKIKLYNDELTKEFSGNALVVYKYEQSIELALKYLNETEIRPGFKVKIEKAIFNKSSKSNIAPLSETEINKKRKQLKAAEMEEERLLSWSNEQHSLNSNIASRIVVLRPMYSRKEAEMYPEGDDFYSELEIEVQEEVTKYCEVVSVTCIPRHPQGIVCVKLKSQHDAEIVIDIFNQRYFDGRQIEVHMYDGSTDFKASCI

SEQ ID NO: 6153 - DNA, 1164 bp, Dictyostelium discoideum
  CDS (1)..(1164)
atgaatgaaaataaacaaaaaactacaaatacaatagaaacaaaagaaataaatccaatagtacctcctcctccaccaccaattacagcagaaacaacagcaccagcaaaaatacaaccacctccaacatcaactacaaaagcaaatacaacaacaacaacaacaacaacaacaacaacaaaagaagcagcatcatcattatcaattttagcaccattaaatttaaatgaaatagatgaaaataaaataaaatttaataaagatggtgataaaacatatttttcagagaaagataatactcattatatttataatacacatagtaaacaatggttagcagagataactaaagatatgatgaattcacaacaatcggtataccagaaaaaggtagagaaaagagatttaacacaagaacaaattgataatatctctgatttacatatttctggtatacctatggatggttcaataagagagttacaaatatcaaattatctaaagaaatgtggttacattaaaaagaatgaatatggtagaccaatcattagtcttttagttgataatgaaaatcaattcactggttgtgctttagtttcatttgaacgtaaagaatctgttccaattgcaattttacaatatgatgaaactgaaatctctccaaataatataattagaataagaaaagcaacacttgaagaatcaaaactacatttagtaaatgaaaaaagtaataaaaaacaaaagaaatcacataaagatagaaggagtgaatatgagaatgaagcaaaatatggttgggcagattcagagagtaaaacagtgattataaagaatttattctcaccagaggaagcaatggtggatccaaacttttttaatgatcttcaagcagatttagaggatgaaacccatggttgtggaaaatgtggtccaatctcttcgattcacatctttgagtataatccagatggtgttgtatctgtaaaattttctgaatttgaatctgctaagaaatgtgtagccttaatgaatgatcgattctttggtggaaggaaattatctgctgatttctatgatggttattcaaattattatgttgaagaaactgatgaaaataaagaaaaacgtctcaagaaatgggaatcttatataaataaataa

SEQ ID NO: 6154 - protein, 387 aa, Dictyostelium discoideum
MNENKQKTTNTIETKEINPIVPPPPPPITAETTAPAKIQPPPTSTTKANTTTTTTTTTTTKEAASSLSILAPLNLNEIDENKIKFNKDGDKTYFSEKDNTHYIYNTHSKQWLAEITKDMMNSQQSVYQKKVEKRDLTQEQIDNISDLHISGIPMDGSIRELQISNYLKKCGYIKKNEYGRPIISLLVDNENQFTGCALVSFERKESVPIAILQYDETEISPNNIIRIRKATLEESKLHLVNEKSNKKQKKSHKDRRSEYENEAKYGWADSESKTVIIKNLFSPEEAMVDPNFFNDLQADLEDETHGCGKCGPISSIHIFEYNPDGVVSVKFSEFESAKKCVALMNDRFFGGRKLSADFYDGYSNYYVEETDENKEKRLKKWESYINK

SEQ ID NO: 6155 - DNA, 1509 bp, Aspergillus nidulans FGSC A4
  CDS (1)..(1509)
atggcgctccaagaccccaaacacgacccaacggcgacaggttccccgcctgcaatcagcaacttcccgcaagacccatccgactttgacagcgacccgcgagtctccttctccaagctcgacaacaaattcatcttagaaacagacgatgggcaggaatatagctacgatacgatcttgaagcggtggattccgacgattgacgatgacttgctgcggcaacaacaagaagcctataaagttgaaggagtagatgaagacgagcaggctggagcacagaggctcaagaaaaagcgcaaacagggcagtgaggagggcgacgctcaaaaaccaaagaagcaacgggtcaacaccgctgtgttcgttacatctatccccctcgacgcagagttcgacgaaatacgagacatcttttcgaggtgcggcgtcatcgccgaggagattgacagcggccggccccggatcaaaatgtacacggatgacgagggaaaattcaagggggaagctctagtcgtctatttccgacccgagtcggtgaatctcgcgattcagatgctggatgattcagactttagactgggcgtgcctgggccgcaggggcccatgcgcgtgcagcctgcagatttctctttcaaaagccagcaagaggcgccgacgaagacgagcatgcgggataagaaaaaaatcattaagagaacgcagaaactgaataacaaactcgcagattgggatgacgatgagcccgctgcactggtggatacgaattccaagtttgagaaaatcgtaatattgaagcatatgttcacgcttcaagaattggaggaggacccggcagctatccttgacatcaaggaagatatccgtgaagaatgctcaaaactcggagaggtcacaaatgtcgtcctttatgacaaggaagaagcgggcgtcgtcagcgtccggttctcgaatccagagtccgcgagagcttgcgtcaagctcatgaacggccgcttcttcggcggcacagcagtcgaagcatacatctcagatggaagcgagcggttccgcaagtcgaatgagaagcgcgctgcactggaagatcttgctgagaagggtctcgacgcagaagatgacgatgagaatcagcgtctcgatgaatttgggacttggttggaaagctcacatacgactccccttcaagcaatgcctttacctctatcgaatttcgaaataatgcacatgatacggggtatctcttcgcgaaaactagaacgatatggaatcatgattgccattggcgctttccatgacctgccttatatccctaatgatataccattactggcgaagaagttctacgtggagttatccccgccgaaaacatcccaacctcaaaacccaggcaagagcacagaaccggattgtagtgagttgtctattgaggaagcaagcagtagcaggaaacgcgacggaaacgtacgcatggagtacattgtcacccagacgccgaacagacccggtgattaa

SEQ ID NO: 6156 - protein, 502 aa, Aspergillus nidulans FGSC A4
MALQDPKHDPTATGSPPAISNFPQDPSDFDSDPRVSFSKLDNKFILETDDGQEYSYDTILKRWIPTIDDDLLRQQQEAYKVEGVDEDEQAGAQRLKKKRKQGSEEGDAQKPKKQRVNTAVFVTSIPLDAEFDEIRDIFSRCGVIAEEIDSGRPRIKMYTDDEGKFKGEALVVYFRPESVNLAIQMLDDSDFRLGVPGPQGPMRVQPADFSFKSQQEAPTKTSMRDKKKIIKRTQKLNNKLADWDDDEPAALVDTNSKFEKIVILKHMFTLQELEEDPAAILDIKEDIREECSKLGEVTNVVLYDKEEAGVVSVRFSNPESARACVKLMNGRFFGGTAVEAYISDGSERFRKSNEKRAALEDLAEKGLDAEDDDENQRLDEFGTWLESSHTTPLQAMPLPLSNFEIMHMIRGISSRKLERYGIMIAIGAFHDLPYIPNDIPLLAKKFYVELSPPKTSQPQNPGKSTEPDCSELSIEEASSSRKRDGNVRMEYIVTQTPNRPGD

SEQ ID NO: 6157 - DNA, 768 bp, Cryptosporidium hominis
  CDS (1)..(768)
atggattcgaaaaaaataaagaaactaaacaagaaaaaagcaaaaggaactcttgtaaacacctctatttatgtccaagggcttccaaaagatataacttttgaagagatgaaatatttttttggtaggggaggtatcataaaaattgacccaacaactttgtctccaaagattaaattatacaatgatgagcttaccaaagaattttctggaaatgctttagttgtttataaatatgaacaaagcattgaattagctctcaagtacctaaatgaaaccgaaattagacctggatttaaagtcaaaattgaaaaggcaatattcaacaagtcatccaaaccaaatattgctccattatctgaaactgaaattaataaaaaaagaaagcaactaaaagcagcagaaatggaagaggaaaggcttttatcttggagtaacgagcaacattcactaaatagcaacattgcttccagaatagttgttcttagaccaatgtattctagaaaagaagctgaaacgtaccctgagggggatgaattctacagtgaactagaaatagaagttcaggaagaggtaaccaaatattgtgaggtagtaagtgttacatgtattcctagacatccacagggaattgtttgtgtcaaattaaaatcccaacatgatgctgaaattgttatcgatatttttaatcaaagatacttcgatggcagacaaattgaagcccacatgtacgacggaagcaccgacttcaaggcatcttgtatttag

SEQ ID NO: 6158 - protein, 255 aa, Cryptosporidium hominis
MDSKKIKKLNKKKAKGTLVNTSIYVQGLPKDITFEEMKYFFGRGGIIKIDPTTLSPKIKLYNDELTKEFSGNALVVYKYEQSIELALKYLNETEIRPGFKVKIEKAIFNKSSKPNIAPLSETEINKKRKQLKAAEMEEERLLSWSNEQHSLNSNIASRIVVLRPMYSRKEAETYPEGDEFYSELEIEVQEEVTKYCEVVSVTCIPRHPQGIVCVKLKSQHDAEIVIDIFNQRYFDGRQIEAHMYDGSTDFKASCI

SEQ ID NO: 6159 - DNA, 1881 bp, Danio rerio
  CDS (1)..(1881)
atggcgtctgctgcagattacaacagttacggacaggctggaagccagcaggggtacggctcctatccggcccagccctctcaaccgggatatggacagggcacccagcagtcgtatggtcaacagcaaggctatggttcatatagccaaccggctgactcaacctactctcagaccagtggttcttcaagcagttatggccaacagccatatgggtcttcctatggacagcagccaccagccagcggtagttataatgctgcttcagccacaccgcaaggctatactcaaccagtgcaaggttatggaagcagcagctatgattcctccacagctgctgcctcgtcaaccagcaacactcagacctcttatggtgggcaggccagctatggaacccagtctgcatatcctggatatggacaacagcctgctgctgctgcacctcccagcagttacagttctgggagccagcagcctgccggatatgagcagagctcgtactcccagcagcctcagcaaagcacttattctcagcagcagcagggaggataccagggccagcaaggaggctacggacagcagagctcctatagccagcagggaggatatcaacaaactcctccccagcagcagcaggctccgccttccagctatgctccgccttctggatcttatggacagccttctgccagtcagtatggacagcagggcagtactggaggaggttatggccaatcagactataaaccaccaaaccagtatggtagttacagaccagaccatcagaatggaggtggctattctggccctgaatctggaggatatgggggccctggagagggccgaggcatgggagggggggagaaccgcgggcgcggccggggtgggtttgaccggggaatgatgcgaggaggtggtggcatgcgagggggcatgagccgtggaggcatgggcatcgctggagacagaggtggcttcagtaagcctggtgatggtgaaatgggagccccagaggagcaagatgactctgaaaacagcactatctacatcacgggactgactgagaatgctacgttggaggaagtcgctgactttttcaagcacagcggcatcattaggatcaacaaacgaacaggcctgcctgctgtcaacatatacaccgataaagatactggcaaacctaaaggcgatgccaccttatcctacgaggagcctccatctgctaaagcagcagtcgagtggtttgatggaaaagatttccaagggaagaagctgaaggtgtcaatggccagacgcaagcccatgatgggtatgatgcgcgggggtatgccaatgagaggagaccgcggtggcatgatgggacgaggaggaatgatgggtcgtggtggaatgggcagaggtggtgatcgcggagggtttatgccacgtgggggtcccaggggaatgggtcgtggaggacctactggaggaaacatgcagcagagggcaggagactggcagtgtccaaatgctggatgtggaaaccaaaactttgcctggagaatggagtgtaatcagtgcaaggcacccaaacctgaaggcttcggacctcctcccttccctccaggtggtgatcgcggtcgtggtggtcctggtgggatgcgtggtggtcgtggtatggatcgcggaggaccagggggacccggaggcttccgtggaggcagaggtgtggaccgtggaggcttcagaggacgtggtatggacagagggggctttggaggaaggggtcgtggaggccctccaatggatgacatgggccgaagggggcgaggaatgggaccaccgggcaaaatggatatgaagggagaccaccgccaggaccgtagagagcggccgtattaa

SEQ ID NO: 6160 - protein, 626 aa, Danio rerio
MASAADYNSYGQAGSQQGYGSYPAQPSQPGYGQGTQQSYGQQQGYGSYSQPADSTYSQTSGSSSSYGQQPYGSSYGQQPPASGSYNAASATPQGYTQPVQGYGSSSYDSSTAAASSTSNTQTSYGGQASYGTQSAYPGYGQQPAAAAPPSSYSSGSQQPAGYEQSSYSQQPQQSTYSQQQQGGYQGQQGGYGQQSSYSQQGGYQQTPPQQQQAPPSSYAPPSGSYGQPSASQYGQQGSTGGGYGQSDYKPPNQYGSYRPDHQNGGGYSGPESGGYGGPGEGRGMGGGENRGRGRGGFDRGMMRGGGGMRGGMSRGGMGIAGDRGGFSKPGDGEMGAPEEQDDSENSTIYITGLTENATLEEVADFFKHSGIIRINKRTGLPAVNIYTDKDTGKPKGDATLSYEEPPSAKAAVEWFDGKDFQGKKLKVSMARRKPMMGMMRGGMPMRGDRGGMMGRGGMMGRGGMGRGGDRGGFMPRGGPRGMGRGGPTGGNMQQRAGDWQCPNAGCGNQNFAWRMECNQCKAPKPEGFGPPPFPPGGDRGRGGPGGMRGGRGMDRGGPGGPGGFRGGRGVDRGGFRGRGMDRGGFGGRGRGGPPMDDMGRRGRGMGPPGKMDMKGDHRQDRRERPY

SEQ ID NO: 6161 - DNA, 882 bp, Danio rerio
  CDS (1)..(882)
atgggagccccagaggagcaagatgactctgaaaacagcactatctacatcacgggactgactgagaatgctacgttggaggaagtcgctgactttttcaagcacagcggcatcattaggatcaacaaacgaacaggcctgcctgctgtcaacatatacaccgataaagatactggcaaacctaaaggcgatgccaccttatcctacgaggagcctccatctgctaaagcagcagtcgagtggtttgatggaaaagatttccaagggaagaagctgaaggtgtcaatggccagacgcaagcccatgatgggtatgatgcgcgggggtatgccaatgagaggagaccgcggtggcatgatgggacgaggaggaatgatgggtcgtggtggaatgggcagaggtggtgatcgcggagggtttatgccacgtgggggtcccaggggaatgggtcgtggaggacctactggaggaaacatgcagcagagggcaggagactggcagtgtccaaatgctggatgtggaaaccaaaactttgcctggagaatggagtgtaatcagtgcaaggcacccaaacctgaaggcttcggacctcctcccttccctccaggtggtgatcgcggtcgtggtggtcctggtgggatgcgtggtggtcgtggtatggatcgcggaggaccagggggacccggaggcttccgtggaggcagaggtgtggaccgtggaggcttcagaggacgtggtatggacagagggggctttggaggaaggggtcgtggaggccctccaatggatgacatgggccgaagggggcgaggaatgggaccaccgggcaaaatggatatgaagggagaccaccgccaggaccgtagagagcggccgtattaa

SEQ ID NO: 6162 - protein, 293 aa, Danio rerio
MGAPEEQDDSENSTIYITGLTENATLEEVADFFKHSGIIRINKRTGLPAVNIYTDKDTGKPKGDATLSYEEPPSAKAAVEWFDGKDFQGKKLKVSMARRKPMMGMMRGGMPMRGDRGGMMGRGGMMGRGGMGRGGDRGGFMPRGGPRGMGRGGPTGGNMQQRAGDWQCPNAGCGNQNFAWRMECNQCKAPKPEGFGPPPFPPGGDRGRGGPGGMRGGRGMDRGGPGGPGGFRGGRGVDRGGFRGRGMDRGGFGGRGRGGPPMDDMGRRGRGMGPPGKMDMKGDHRQDRRERPY

SEQ ID NO: 6163 - DNA, 852 bp, Candida albicans SC5314
  CDS (1)..(852): transl_table=12
atgagtaaagattttcctgctaagccaccacatccttctacacttgagagcattgatttatcaaagttagatccacagttagttttggataaggcatcgcagagatggttattcgaggaaggagaccaagaatatgaatatgattacataaaggagcaatgggtaaacacttctaaaagatcactatcagaagatgatacgaacaaagaagatatcaagcgacaacggaaacaagatatgagtaaattgaaggaagaattgaatagtttgaaacagaagaaaaagaacagcagtatatttatatcaaatttaccagtcgattctgggttttcggaaatcgaggaagcattttcaaagtatggtaaaatatctgttggaaaagatgaaaaacctcgaataaagatgtacactaatgagaaaggttcttttaaaggcgaagctttgattatatattcgaatccagaaagtgcattattggctattgaaatgatggataatacccaatataatggcaacaccatacgagttgaagaagctaagtttgataacaaaaaggagaatccaaagaaaaaacaagatagcctttctaaagctgtgattattcgaaatatggttagaaaagaagagcttgccaatgatatacacatcaagcaagacataattgatgacatcaaggaagaatgtaaaaatataggcatatctgatatcgaagatatagtgtttaatgaggaaaatgcaacggttctagtaaagttttccaaagaagagctgttgttgttatgcatcaagaagtttcataatcgatattacgacggtttgacattggatgtccaagaatcaaaagtcatatga

SEQ ID NO: 6164 - protein, 283 aa, Candida albicans SC5314
MSKDFPAKPPHPSTLESIDLSKLDPQLVLDKASQRWLFEEGDQEYEYDYIKEQWVNTSKRSLSEDDTNKEDIKRQRKQDMSKLKEELNSLKQKKKNSSIFISNLPVDSGFSEIEEAFSKYGKISVGKDEKPRIKMYTNEKGSFKGEALIIYSNPESALLAIEMMDNTQYNGNTIRVEEAKFDNKKENPKKKQDSLSKAVIIRNMVRKEELANDIHIKQDIIDDIKEECKNIGISDIEDIVFNEENATVLVKFSKEESLLLCIKKFHNRYYDGLTLDVQESKVI

SEQ ID NO: 6165 - DNA, 852 bp, Candida albicans SC5314
  CDS (1)..(852): transl_table=12
atgagtaaagattttcctgctaagccaccacatccttctacacttgagagcattgatttatcagagttagatccacggttagttttggataaggcatcgcaaagatggttattcgaggaaggagaccaagaatatgaatatgattacataaaggagcaatgggtaaacacttccaagagatcactatcagaggatgatacgaacaaagaagatattaagcgacaacggaaacaagatatgagtaaattgaaggaagaattgaatagtttgaaacagaagaaaaagaacagcagtatatttatatcaaatttaccagtcgattctgggttttcggaaatcgaggaagcattttcaaagtatggtaaaatatctgttggaaaagatgaaaaacctcgaataaagatgtacactaatgagaaaggttcttttaaaggcgaagctttgattatatattcgaatccagaaagtgcattattggctattgaaatgatggataatgcccaatataatggcaacaccatacgagttgaagaagctaagtttgataacaaaaaggagaatccaaagaaaaaacaagatagcctttctaaagctgtgattattcgaaatatggtcagaaaaaaagagcttgccaatgatatacacatcaagcaagacataattgatgacattaaggaagaatgtaaaaatataggcatatctgatatcgaagatatagtgtttaacgaggaaaatgcaacggttctagtaaagttttccaaaaaagagctgttgttgttatgcattaagaagtttcataatcgatattacgacggtttgacattggatgtccaagaatcaaaagtcatatga

SEQ ID NO: 6166 - protein, 283 aa, Candida albicans SC5314
MSKDFPAKPPHPSTLESIDLSELDPRLVLDKASQRWLFEEGDQEYEYDYIKEQWVNTSKRSLSEDDTNKEDIKRQRKQDMSKLKEELNSLKQKKKNSSIFISNLPVDSGFSEIEEAFSKYGKISVGKDEKPRIKMYTNEKGSFKGEALIIYSNPESALLAIEMMDNAQYNGNTIRVEEAKFDNKKENPKKKQDSLSKAVIIRNMVRKKELANDIHIKQDIIDDIKEECKNIGISDIEDIVFNEENATVLVKFSKKESLLLCIKKFHNRYYDGLTLDVQESKVI

SEQ ID NO: 6167 - DNA, 2223 bp, Aspergillus fumigatus Af293
  CDS (1)..(2223)
atgatctcaacagccatgacagagcaacacaagaaaggaagtctggacgaaagtagtggtggtcaccaagacacacagactacgatggattccccgagaaaagataccatccagaacgacaaagtctccacgcagccaaaaaggaccctctttgttcggtcgcttcccacctcagctacgaccgagagccttaccgaatacttctcccaatcctacgttatcaagcatgcgatcgtcgttaatgatccggaaacgaagctgtgcaagggttatggtttcgttacctttgccgatctcgaagacgcgcaagctgcgctaaaggagttcaacgggtctgtcttcgaagggaaaacaatcagagtcgactacgctcagccgcgtcaccgtgagattgatgagaacctcgggaaaagcgtgccggctcctgctgcccttgaacttaagaaacagcgggaacaacagaaaacatctacccaacccccgaagctcattgtccgaaacttgccttggagcatcaaggaaccagaagatctagcggtacatttcagaagtttcggcaaagtcaaatatgtcacgcttcccaagaaaggtgataagctggccgggtttggcttcgttgttttacgaggaaagaagaacgctgaaaaggcgctgcaggccgtcaacggcaaagaggtagacggaagaacgctggcagtcgattgggctgtagaaaaggaagtatgggagaacttgaagaaggagtctgagaagaaggaggatacccaggaggaggctggatcgagcgacgttgagatggcagatgacgcagaaacgacatccgataatgaaggcgtcgagtctgatgacgacgatgaagatgaggatatggacgatgacgacgaggaggatgaggaagatatggatgaagaggaggacgaggacgagggcaacgaagacgaaagacaagagaaagaagacgagcgaaatgcttgtacgattttcattcgaaatctacccttctcgtgtacagacgaggcgctttacgagcattttacgcaatttggccccttgcgatacgcacgaattgtcgttgacccggagacagaacgtccccgtggtaccgggtttgtttgcttctggaaggttgaggatgccgcattgtgcgtgcgcgaagccccgaaacaacaagatactttgatcgcggagaaggataaaggaaagaagtcttccaccgcactcaagcactctatcctgcagaatgagaactctgaccccagcggccgctataccttggacggtcgtgtcctccaggtcgcccgcgccgtcagcaaatcacaagctgccaaacttgaagaggagggtgtatcaaaacgactggttcgtgatactgacaagcgtcgtcttttcctcttgcaagaaggcactatctctcccaactcccctttgtaccataagctttcgccgtccgagatcaagatgagagaggacagcttcaagcagcgacagaacttcatccggaagaacccggctctacattttagtttgacccgactctcggtacgcaacatcccccgtcacgtcacctctaaggacctcaagcagctcgctcgacaggctgtggtcggcttcgcgaaagacgtcaaggaaggtcaacgtcaacctctctccaaggaggaactcactcggtcagccgacgctatgaaagaggcagaggagtaccggaggtcaaagggcaagggtattgtgaagcaagccaagattgtctttgagactcgagagggaagtaagatcagcgagaagagcggggcaggccgaagccggggctacggtttcatcgagtactacacacatcgacatgcgcttatgggtctacgatggcttaacggccacgctgtggaagccccgaagagcggctcggcggagatcaaagataagaagaagcgactgattgtcgagttcgcccttgagaacgcccaggttgttaagcgacggaatgagatggaggctagggcacgcgccaagaaggaaagtcaacagaacaacggaaacaccccgagcaaagatgattcgaacagcaaagcttctcccaaagggaagaagcggaagcgatccgacagccgtggcagtggcaaagagcaggatggagaccgcgatgtggaagaagagaacaagatcgccaaacgcaaccggatcatttctagaaaaaggatgcagcgcaaagctcggaaagggaaggcctaa

SEQ ID NO: 6168 - protein, 740 aa, Aspergillus fumigatus Af293
MISTAMTEQHKKGSLDESSGGHQDTQTTMDSPRKDTIQNDKVSTQPKRTLFVRSLPTSATTESLTEYFSQSYVIKHAIVVNDPETKLCKGYGFVTFADLEDAQAALKEFNGSVFEGKTIRVDYAQPRHREIDENLGKSVPAPAALELKKQREQQKTSTQPPKLIVRNLPWSIKEPEDLAVHFRSFGKVKYVTLPKKGDKLAGFGFVVLRGKKNAEKALQAVNGKEVDGRTLAVDWAVEKEVWENLKKESEKKEDTQEEAGSSDVEMADDAETTSDNEGVESDDDDEDEDMDDDDEEDEEDMDEEEDEDEGNEDERQEKEDERNACTIFIRNLPFSCTDEALYEHFTQFGPLRYARIVVDPETERPRGTGFVCFWKVEDAALCVREAPKQQDTLIAEKDKGKKSSTALKHSILQNENSDPSGRYTLDGRVLQVARAVSKSQAAKLEEEGVSKRLVRDTDKRRLFLLQEGTISPNSPLYHKLSPSEIKMREDSFKQRQNFIRKNPALHFSLTRLSVRNIPRHVTSKDLKQLARQAVVGFAKDVKEGQRQPLSKEELTRSADAMKEAEEYRRSKGKGIVKQAKIVFETREGSKISEKSGAGRSRGYGFIEYYTHRHALMGLRWLNGHAVEAPKSGSAEIKDKKKRLIVEFALENAQVVKRRNEMEARARAKKESQQNNGNTPSKDDSNSKASPKGKKRKRSDSRGSGKEQDGDRDVEEENKIAKRNRIISRKRMQRKARKGKA

SEQ ID NO: 6169 - DNA, 1188 bp, Aspergillus fumigatus Af293
  CDS (1)..(1188)
atggcatctcgaagccccagcgaagaagcacctaaaccggcgccgtttagcaacttcccgcaggacccggctgaattcgacagcgaccccagaatttccttctcgaagctggacaacaagtttatactagagactgaagacggacaggaatttgaatacgatacggttttaaaacgatggattccgacggtcgacgatgacttgctccggcagcaacaagaagcctacaagattcaaggggtggacgaaaatgaacaagtcactgcgcaacaattgaggaagaagcggaagcagcagacaagtggggatgagaataatggccaaaagccaaaaaaacaacgagtgaacactgccgtcttcgtcacatctattccccttgatgctgagttcgatgagatccgcgacgtcttctccaagtgtggcgttatcgccgaagagattgacagtggccggccccgaattaagatgtatatggatgaaaacggcaagttcaagggcgaggctttgatagtgtatttccggccggagtctgtcaacctcgccatacagatgctggacgagtcagactttaggttaggggtgtcggggccgcagggaccgatgaaggtccaggctgcagatttctcgttcaagagccaacaagaggcaccggcaaagagcagcatgagggataagaaaaagatcatcaagaggactcagaaactaaatagcaaactcgctgattggagtgacgacgagccatcaattctgacagacacgagctctaggtttgagaaagttgtcatactcaaacacatgtttactctgaaggagatcgacgaggacccagcagccatcctcgacatcaaggacgacattcgggaggagtgctccaaattaggcgaggttacgaatgtcgttctatatgacaaagagcccgatggagttgtcagcgttcgtttcaccgatcctgaagccgccagacaatgcgtcagagtcatggatggtcgttttttcgccggcacacgcgtcgaagcctacatcacagatgggaaagagaagttcaaaaagagcaatgagaggcgggcagctctggaggatatggcggagagaggacttgacgctgaagacgaggaagaaaacgcacggttggacgaatttgggacttggctggaaagctcccatgtggtggaaaatactgccaagtag

SEQ ID NO: 6170 - protein, 395 aa, Aspergillus fumigatus Af293
MASRSPSEEAPKPAPFSNFPQDPAEFDSDPRISFSKLDNKFILETEDGQEFEYDTVLKRWIPTVDDDLLRQQQEAYKIQGVDENEQVTAQQLRKKRKQQTSGDENNGQKPKKQRVNTAVFVTSIPLDAEFDEIRDVFSKCGVIAEEIDSGRPRIKMYMDENGKFKGEALIVYFRPESVNLAIQMLDESDFRLGVSGPQGPMKVQAADFSFKSQQEAPAKSSMRDKKKIIKRTQKLNSKLADWSDDEPSILTDTSSRFEKVVILKHMFTLKEIDEDPAAILDIKDDIREECSKLGEVTNVVLYDKEPDGVVSVRFTDPEAARQCVRVMDGRFFAGTRVEAYITDGKEKFKKSNERRAALEDMAERGLDAEDEEENARLDEFGTWLESSHVVENTAK

SEQ ID NO: 6171 - DNA, 1398 bp, Ustilago maydis 521
  CDS (1)..(1398)
atgcatccagcgcctcccacggcatctggctcggacgaccctcgagtctaccttgatcggctctctggcaattggaggtacgaagatgatcaaggcgacgaatgggagtggcagccgttggtgcaacattcgcgactggctgtcgatctgggcgagaccgaagaggatggacctagcgcatccagctcgagcttgaaagctacgcagactgtgtctcggagcggacattgggtcaaagccctggacgatgatctcatccgtgcacagcaagcagcctactcggttgaaggcgtggacgaatcacaaccggcacaagcggtgcttcggcgtggcaagaaacgtgccgcgtcgccgccttgttcgcacaacacagcctccaagcgctcagctacaaaccacaccagcggctcatcaccaaccaagctcccgccgtccaggaagccaaaaccaatcacatcgctttacgtcacaggcctaccactcgacgctacgtcggacgaaatagcacgtgtctttcaacgctacggtgtacttttggaagacgatcaaggtcgacctcgtgtcaagatgtactacgacgacaagacgcgcatgttcaaaggtgaagcattggtggtgtacttcaagccggagagtgtggatctggcgatcagcatgttggacgagacaagcttgagaggtgctattgggtcgtccagtgggggacaggtgatgagggttcagcgtgcggaattccacaatgctcaagctggcgatgccaaggcgagtggaaagcaacaagctggtgcagatggagtgaaaccaaactccaccgatgcatcttgcaacagccatcgacgaaatttgacggaacaagatcgcaagaagatcgccaagcgagttgcgagattggaaaccaagctttcggattggcgagatgactcgtcctcatcgagcgtctcggatagcgagacgatgcatactggcagcgccactgcccgcactggtggtgctcgcacagtggtgctcaccaagatgtttaccttgttcgaactcgagtcagacccaacgctgctgctcgacctgaaagaggacgttcgtgaagaatgcaattccagcatcggcggtgtcaccaatgtcgtgctctgggatgccgaacccgagggtataattacggtcaaattctctacgccagatcaagccaacgcttgcgtacgcatgatgaatggccgattcttcgctcaacgacgcatcgacgcctatatcctccgcagcaaacccagattccgcaaaaccaccaccgaacaagaccccgacaccgatcatgacaccatccccgctaccgctacagctgcaaacagcaagagcgaagccatcagaaaagacgctttcggcacttggttacaagacgcttcttaa

SEQ ID NO: 6172 - protein, 465 aa, Ustilago maydis 521
MHPAPPTASGSDDPRVYLDRLSGNWRYEDDQGDEWEWQPLVQHSRLAVDLGETEEDGPSASSSSLKATQTVSRSGHWVKALDDDLIRAQQAAYSVEGVDESQPAQAVLRRGKKRAASPPCSHNTASKRSATNHTSGSSPTKLPPSRKPKPITSLYVTGLPLDATSDEIARVFQRYGVLLEDDQGRPRVKMYYDDKTRMFKGEALVVYFKPESVDLAISMLDETSLRGAIGSSSGGQVMRVQRAEFHNAQAGDAKASGKQQAGADGVKPNSTDASCNSHRRNLTEQDRKKIAKRVARLETKLSDWRDDSSSSSVSDSETMHTGSATARTGGARTVVLTKMFTLFELESDPTLLLDLKEDVREECNSSIGGVTNVVLWDAEPEGIITVKFSTPDQANACVRMMNGRFFAQRRIDAYILRSKPRFRKTTTEQDPDTDHDTIPATATAANSKSEAIRKDAFGTWLQDAS

SEQ ID NO: 6173 - DNA, 897 bp, Strongylocentrotus purpuratus
  CDS (1)..(897)
atggatcctgaggctgaggactttgaataccagctgaagttagagcaggaagagcaatggaaacgagacaatggatacatctacaccgatcctaatgacggcacaatgtatgaatgggaccctgaaaagaaggcatggttcccaaaggtggatgagaacttcattgcatcttaccaagccagctacggtgtcacgaccgatgagaacactgcagacggtcagaccgatccacagccttcagcagcagcagctacatcagcatcggcatcctcagggactccaggaacgtctgcaggagtgggtgaagacaccacaccaggagggaaggatggagccaaaggagaaggggaagtgaagaagctagatgaacaaccccagatgctctataggtaccaaaagatgcagatgaagaggaaagcagaacagaaaagctggtttgaggtcgatcccaccaagaacacaaatgtctacgtgagtggccttccaactgacatcaccctagaggaattccaggaagtaatggccaagtggggtatcatcatgttggaagaggagacggagaaacccaagatcaagctctacatggacgaggagggcagacctaaaggagatggcagatgctgctatctcaagagagagtcagttgaccttgccttacagttgctggatgagtcagagatcagaggtcacaagattcatgtagaggtcgcgacctttaccctcaaaggagattataaacctgatatgaggaagaaaaagaaacccaacaagaaaaagaaaggaaacgttcaagacaaacttctcgactggaggcctgagaagaagtttcaacagaggaaaagaaacgagcaagttatcatcctgaaacatgtcttccatccaagtgaatttgagtag

SEQ ID NO: 6174 - protein, 298 aa, Strongylocentrotus purpuratus
MDPEAEDFEYQLKLEQEEQWKRDNGYIYTDPNDGTMYEWDPEKKAWFPKVDENFIASYQASYGVTTDENTADGQTDPQPSAAAATSASASSGTPGTSAGVGEDTTPGGKDGAKGEGEVKKLDEQPQMLYRYQKMQMKRKAEQKSWFEVDPTKNTNVYVSGLPTDITLEEFQEVMAKWGIIMLEEETEKPKIKLYMDEEGRPKGDGRCCYLKRESVDLALQLLDESEIRGHKIHVEVATFTLKGDYKPDMRKKKKPNKKKKGNVQDKLLDWRPEKKFQQRKRNEQVIILKHVFHPSEFE

SEQ ID NO: 6175 - DNA, 1428 bp, Canis familiaris
  CDS (1)..(1428)
atgcagccagtcacagcaccaccatcttatcctcctaccagctactcctctacacagccgactagttatgatcagagcagttactctcagcagaacacctatgggcagccgagcagctatggacagcagagtagctatggtcaacaaagcagctatgggcagcagccgcccactagttatcccccccaaactggatcctacagccaggctccaagtcaatatagccaacagagcagcagctacgggcagcagagttcattccgacaggaccaccccagtagcatgggtgtttatgggcaggagtctggaggattttccggaccaggagagaaccggagcatgagtggccctgataaccggggcaggggaagagggggatttgatcgtggaggcataagcagaggtgggcggggaggaggacgcggtggaatgggcagcgctggagagcgaggtggcttcaataagcctggtggacccatggatgaaggaccagatcttgatctaggcccacctgtagatccagatgaagactctgacaacagtgcaatttatgtgcaaggcctaaatgacaatgtgactctagatgatctggctgacttctttaagcaatgtggagttgttaagatgaagagaaccggacaacccatgatccatatctacttggacaaggaaacaggaaagcccaaaggtgatgctacagtatcctatgaagacccaccaactgccaaggctgctgtggagtggtttgatgggaaagattttcaaggaagcaaacttaaggtttctcttgctcggaagaaacctccaatgaacagcatgcggggtggtatgcctccccgtgagggcagagggatgccactgccactccgtggaggtccagggggcccaggaggtcctgggggccccatgggtcgcatgggaggccgtggaggagacagaggtggctttcccccaagaggaacccggggttcccgagggaacccatctggaggaggaaacgtccagcaccgagctggggactggcggtgccccaatccggggtgtggaaaccagaacttcgcctggagaacagaatgcaaccagtgtaaggccccgaagcctgaaggcttccttccaccacccttcccgcccccgggcggtgaccgtggcagaggtggccctggtggcatgcggggaggaagaggtggcctcatggaccgcggtggtaccggtgggatgttcagaggtggccgcggtggagacagagggggcttccgtggtggccggggcatggaccgaggtggctttggcggaggaagacgaggcggtcctggtgggccccctggacctttgatggaacagatgggaggaagaagaggcgggcgtggaggacctggaaaaatggataaaggcgagcaccgtcaggagcgcagagaccggccctactag

SEQ ID NO: 6176 - protein, 475 aa, Canis familiaris
MQPVTAPPSYPPTSYSSTQPTSYDQSSYSQQNTYGQPSSYGQQSSYGQQSSYGQQPPTSYPPQTGSYSQAPSQYSQQSSSYGQQSSFRQDHPSSMGVYGQESGGFSGPGENRSMSGPDNRGRGRGGFDRGGISRGGRGGGRGGMGSAGERGGFNKPGGPMDEGPDLDLGPPVDPDEDSDNSAIYVQGLNDNVTLDDLADFFKQCGVVKMKRTGQPMIHIYLDKETGKPKGDATVSYEDPPTAKAAVEWFDGKDFQGSKLKVSLARKKPPMNSMRGGMPPREGRGMPLPLRGGPGGPGGPGGPMGRMGGRGGDRGGFPPRGTRGSRGNPSGGGNVQHRAGDWRCPNPGCGNQNFAWRTECNQCKAPKPEGFLPPPFPPPGGDRGRGGPGGMRGGRGGLMDRGGTGGMFRGGRGGDRGGFRGGRGMDRGGFGGGRRGGPGGPPGPLMEQMGGRRGGRGGPGKMDKGEHRQERRDRPY

SEQ ID NO: 6177 - DNA, 1872 bp, Canis familiaris
  CDS (1)..(1872)
atggcgtccacggattacagtacctacagccaagctgcagcccagcagggctacagtgcatacaccgcccaaccaactcaaggatatgcacagaccacccaggcatatgggcagcagagttatggaacctatggacagcccactgatgtcagctatacccaggctcagaccactgcgacctatgggcagaccgcctatgcaacttcttatggacagcctcccgctggttatactactccaactgccccccaggcatacagtcagcctgtccaggggtacggcactggtgcttatgataccaccactgctacggtcactaccacccaggcctcctatgcagctcagtctgcatatggcactcagcctgcttacccagcctatgggcagcagccagcagccaccgcacctgcaagaccacaggatggtaacaaacccgctgagactagtcaacctcaatctagcacagggggttacaaccagcccagcctaggatatggacagagtaactacagttatccccaggtacctgggagctaccccatgcagccagtcacagcaccaccatcttatcctcctaccagctactcctctacacagccgactagttatgatcagagcagttactctcagcagaacacctatgggcagccgagcagctatggacagcagagtagctatggtcaacaaagcagctatgggcagcagccgcccactagttatcccccccaaactggatcctacagccaggctccaagtcaatatagccaacagagcagcagctacgggcagcagagttcattccgacaggaccaccccagtagcatgggtgtttatgggcaggagtctggaggattttccggaccaggagagaaccggagcatgagtggccctgataaccggggcaggggaagagggggatttgatcgtggaggcatgagcagaggtgggcggggaggaggacgcggtggaatgggcgctggagagcgaggtggcttcaataagcctggtggacccatggatgaaggaccagatcttgatctagatgaagactctgacaacagtgcaatttatgtgcaaggcctaaatgacaatgtgactctagatgatctggctgacttctttaagcaatgtggagttgttaagatgaacaagagaaccggacaacccatgatccatatctacttggacaaggaaacaggaaagcccaaaggtgatgctacagtatcctatgaagacccaccaactgccaaggctgctgtggagtggtttgatgggaaagattttcaaggaagcaaacttaaggtttctcttgctcggaagaaacctccaatgaacagcatgcggggtggtatgcctccccgtgagggcagagggatgccaccgccactccgtggaggtccagggggcccaggaggtcctgggggccccatgggtcgcatgggaggccgtggaggagacagaggtggctttcccccaagaggaccccggggttcccgagggaacccatctggaggaggaaacgtccagcaccgagctggggactggcagtgccccaatccggggtgtggaaaccagaacttcgcctggagaacagaatgcaaccagtgtaaggccccgaagcctgaaggcttccttccaccacccttcccgcccccgggcggtgaccgtggcagaggtggccctggtggcatgcggggaggaagaggtggcctcatggaccgcggtggtcccggtgggatgttcagaggtggccgcggtggagacagagggggcttccgtggtggccggggcatggaccgaggtggctttggcggaggaagacgaggcggtcctggcgagcaccgtcaggagcgcagagaccggccctactag

SEQ ID NO: 6178 - protein, 623 aa, Canis familiaris
MASTDYSTYSQAAAQQGYSAYTAQPTQGYAQTTQAYGQQSYGTYGQPTDVSYTQAQTTATYGQTAYATSYGQPPAGYTTPTAPQAYSQPVQGYGTGAYDTTTATVTTTQASYAAQSAYGTQPAYPAYGQQPAATAPARPQDGNKPAETSQPQSSTGGYNQPSLGYGQSNYSYPQVPGSYPMQPVTAPPSYPPTSYSSTQPTSYDQSSYSQQNTYGQPSSYGQQSSYGQQSSYGQQPPTSYPPQTGSYSQAPSQYSQQSSSYGQQSSFRQDHPSSMGVYGQESGGFSGPGENRSMSGPDNRGRGRGGFDRGGMSRGGRGGGRGGMGAGERGGFNKPGGPMDEGPDLDLDEDSDNSAIYVQGLNDNVTLDDLADFFKQCGVVKMNKRTGQPMIHIYLDKETGKPKGDATVSYEDPPTAKAAVEWFDGKDFQGSKLKVSLARKKPPMNSMRGGMPPREGRGMPPPLRGGPGGPGGPGGPMGRMGGRGGDRGGFPPRGPRGSRGNPSGGGNVQHRAGDWQCPNPGCGNQNFAWRTECNQCKAPKPEGFLPPPFPPPGGDRGRGGPGGMRGGRGGLMDRGGPGGMFRGGRGGDRGGFRGGRGMDRGGFGGGRRGGPGEHRQERRDRPY

SEQ ID NO: 6179 - DNA, 1347 bp, Canis familiaris
  CDS (1)..(1347)
atgcagccagtcacagcaccaccatcttatcctcctaccagctactcctctacacagccgactagttatgatcagagcagttactctcagcagaacacctatgggcagccgagcagctatggacagcagagtagctatggtcaacaaagcagctatgggcagcagccgcccactagttatcccccccaaactggatcctacagccaggctccaagtcaatatagccaacagagcagcagctacgggcagcagagttcattccgacaggaccaccccagtagcatgggtgtttatgggcaggagtctggaggattttccggaccaggagagaaccggagcatgagtggccctgataaccggggcaggggaagagggggatttgatcgtggaggcataagcagaggtgggcggggaggaggacgcggtggaatgggcagcgctggagagcgaggtggcttcaataagcctggtggacccatggatgaaggaccagatcttgatctaggcccacctgtagatccagatgaagactctgacaacagtgcaatttatgtgcaaggcctaaatgacaatgtgactctagatgatctggctgacttctttaagcaatgtggagttgttaagatgaagagaaccggacaacccatgatccatatctacttggacaaggaaacaggaaagcccaaaggtgatgctacagtatcctatgaagacccaccaactgccaaggctgctgtggagtggtttgatgggaaagattttcaaggaagcaaacttaaggtttctcttgctcggaagaaacctccaatgaacagcatgcggggtggtatgcctccccgtgagggcagagggatgccactgccactccgtggaggtccagggggcccaggaggtcctgggggccccatgggtcgcatgggaggccgtggaggagacagaggtggctttcccccaagaggaacccggggttcccgagggaacccatctggaggaggaaacgtccagcaccgagctggggactggcggtgccccaatccggggtgtggaaaccagaacttcgcctggagaacagaatgcaaccagtgtaaggccccgaagcctgaaggcttccttccaccacccttcccgcccccgggcggtgaccgtggcagaggtggccctggtggcatgcggggaggaagaggtggcctcatggaccgcggtggtaccggtgggatgttcagaggtggccgcggtggagacagagggggcttccgtggtggccggggcatggaccgaggtggctttggacctggaaaaatggataaaggcgagcaccgtcaggagcgcagagaccggccctactag

SEQ ID NO: 6180 - protein, 448 aa, Canis familiaris
MQPVTAPPSYPPTSYSSTQPTSYDQSSYSQQNTYGQPSSYGQQSSYGQQSSYGQQPPTSYPPQTGSYSQAPSQYSQQSSSYGQQSSFRQDHPSSMGVYGQESGGFSGPGENRSMSGPDNRGRGRGGFDRGGISRGGRGGGRGGMGSAGERGGFNKPGGPMDEGPDLDLGPPVDPDEDSDNSAIYVQGLNDNVTLDDLADFFKQCGVVKMKRTGQPMIHIYLDKETGKPKGDATVSYEDPPTAKAAVEWFDGKDFQGSKLKVSLARKKPPMNSMRGGMPPREGRGMPLPLRGGPGGPGGPGGPMGRMGGRGGDRGGFPPRGTRGSRGNPSGGGNVQHRAGDWRCPNPGCGNQNFAWRTECNQCKAPKPEGFLPPPFPPPGGDRGRGGPGGMRGGRGGLMDRGGTGGMFRGGRGGDRGGFRGGRGMDRGGFGPGKMDKGEHRQERRDRPY

SEQ ID NO: 6181 - DNA, 1344 bp, Oncorhynchus mykiss
  CDS (1)..(1344)
atggagtacacttatgatgtcgatttggaagagctatgtcctgtttgtggcgataaggtgtcgggataccactatggactactgacgtgtgaaagctgtaagggtttcttcaaaagaacggttcaaaataataagaggtatacatgtgcagaaaaccaggattgtaaaattgacaaaactcagaggaaacggtgtccattttgtcggtttcagaaatgcctgaatgttggaatgcgattagaagctgtccgagccgatcgcatgcgaggaggccggaataagtttggccccatgtacaagcgcgaccgagccctcaagcagcagaagaaagcattgattcgagccactggcctcaagatggagaccacccctccgatgctgtcccctgacactcagacagactacaccttcaccggcagtctcccgggcctccacccgctccccaagggcatcctccacaccaccacgaccgccaccgcccccccgtcaaagccaaagatgagtggtgatactgatggaaataaggagttccatgagcagctccggttgcagcagctgtatggccagagacagggggacggagctgaccctaacaccttcgtggacccagaggatgggacagtgtatgactgggaccatgacaagaaagcatggtttcctaaaataacagaggacttccttgctgcgtatcaagctaactacggcttcacaaaggatgggcagcatgatccaaatgctgcgtgtgcacctgacacggacacaacagccaagccagaggaggggaagaaaaccgagaagcgcactgacacggaacagccgaaagatggcaaaaaggagaaaggagagaaaaggaaggctgatactgcagcctggtttgatgtggaaaccgacaagaataccaatgtgtacgtgtcaggtcttccaccggacatcaccacggaggagtttgttgaggtcatgtctaagtgtggcattgttatgagggaccccatctccgaggagtacaaagtcaaactctacagggacggccaggggaaccagaaaggcgacggactctgctgttacttaaagaaggagtctgtggccctggctgagcgactgattgacgagtcagagatcagggggtatcagctccacgtggaggctgccaggttcgagctcaagggccagtacgacgccagtaagaagaagaagaagagcaaggattaccgcaagaggatgaaggcacagcagaagcagctggactggaggccagagaagaaaggggaggcgcgcaagaggcatgaacgtgtgctcatcatccagaacatgttccaccccagtgactttgaggaatttgtgtaa

SEQ ID NO: 6182 - protein, 447 aa, Oncorhynchus mykiss
MEYTYDVDLEELCPVCGDKVSGYHYGLLTCESCKGFFKRTVQNNKRYTCAENQDCKIDKTQRKRCPFCRFQKCLNVGMRLEAVRADRMRGGRNKFGPMYKRDRALKQQKKALIRATGLKMETTPPMLSPDTQTDYTFTGSLPGLHPLPKGILHTTTTATAPPSKPKMSGDTDGNKEFHEQLRLQQLYGQRQGDGADPNTFVDPEDGTVYDWDHDKKAWFPKITEDFLAAYQANYGFTKDGQHDPNAACAPDTDTTAKPEEGKKTEKRTDTEQPKDGKKEKGEKRKADTAAWFDVETDKNTNVYVSGLPPDITTEEFVEVMSKCGIVMRDPISEEYKVKLYRDGQGNQKGDGLCCYLKKESVALAERLIDESEIRGYQLHVEAARFELKGQYDASKKKKKSKDYRKRMKAQQKQLDWRPEKKGEARKRHERVLIIQNMFHPSDFEEFV

SEQ ID NO: 6183 - DNA, 1488 bp, Ciona intestinalis
  CDS (1)..(1488)
atgttttgtttattattatgtcacacatgtgatagtttgagtaaaattcaatgtttttgtcgcttacgcgagatgtcgatgaaaaaagaagattatgaagaatttcaaagacaattagaattacaaaaccaacttccagaaaaagatacaaaagttaaaacaaagaaagacgaagatgggacggaatatgaatgggacgaagtaaaaaaagcatggtttcccaagttgagcccggatttaatgttgaagtttcaatcgaattattcaaacgatgaagtttcaagttcaacgtcggtttacgttgatccacaaactaagatgaaatataaatgggacaataccgcccacaagtggatgcctgatgtaaagtacgaagtatcgaaagatgggaattatatttacaccgatccaagcaacggagataaatatgaatgggattcaaacaaacaagtctgggtaaagaaaaaattcaaggaaaataatctcgaagacgacaacattatccaaccaagtgaagcaactccaaacctggaggatgaaagttggaattcggagaagaaattgtggggggaagtccctattgagaaacagtcgaagaaaaaaaatcatcagaaatctggccagaagagggcggcgtcgaggccagaatggttttcactggacaagtccaagaacacgagcgtatatgttgaaggtttgcctagtgacatcacaatggatgaatttcgtgatttgatgttgaaatgcggaatcatcgcaacaaacgtcgtcaaccaacaaccaaagttgaaactttatacgaacgctggggggaatattaagggagacggattgtgttgttatttgaagcgcgaatctgtcgaactttcgttacaactccttgatggcatggaggtcagaggtcataagttgaaagttcaagaagcaaagttcgaacttaaaggggaatacgacgcgtctaagaaacccaagatgttgagtaaaaaagaaaaaaggaaaattaaaaaagagaaagaaaaattacttgattggaaacttgcacggagcgaggaaattgtttccaagaaagatcgagttgttattcttaagaaaatgtttcaagttaacgagtttgaggaagacccggtgttgatcaccgatgttcgagatgatcttcgtgccgagtgcgagaagttcgggcaagtcaagaaagttatcgtgttcgatcgccacccggatggtgtttgttcggttgcgttcaaagaagctgagagcgccaccaagtgtcagcaagcattgaacggacgatggttcgcttgcaaagaaattgaggcttcaatatgggacggtcatactgattatcagatcgaggagacggatcgtgaacgcgaagttcggcttcaaaagtgggaggaattccttgataacgggccgaccgaacaaacatcggggaataatgacgatgttagcggggatacgaccgttgcggcgcccgcagaaaaactttaa

SEQ ID NO: 6184 - protein, 495 aa, Ciona intestinalis
MFCLLLCHTCDSLSKIQCFCRLREMSMKKEDYEEFQRQLELQNQLPEKDTKVKTKKDEDGTEYEWDEVKKAWFPKLSPDLMLKFQSNYSNDEVSSSTSVYVDPQTKMKYKWDNTAHKWMPDVKYEVSKDGNYIYTDPSNGDKYEWDSNKQVWVKKKFKENNLEDDNIIQPSEATPNLEDESWNSEKKLWGEVPIEKQSKKKNHQKSGQKRAASRPEWFSLDKSKNTSVYVEGLPSDITMDEFRDLMLKCGIIATNVVNQQPKLKLYTNAGGNIKGDGLCCYLKRESVELSLQLLDGMEVRGHKLKVQEAKFELKGEYDASKKPKMLSKKEKRKIKKEKEKLLDWKLARSEEIVSKKDRVVILKKMFQVNEFEEDPVLITDVRDDLRAECEKFGQVKKVIVFDRHPDGVCSVAFKEAESATKCQQALNGRWFACKEIEASIWDGHTDYQIEETDREREVRLQKWEEFLDNGPTEQTSGNNDDVSGDTTVAAPAEKL

SEQ ID NO: 6185 - DNA, 1122 bp, Theileria annulata
  CDS (1)..(1122)
atgagcgattcaacaaaatccgataatattccacctcctacaaacgctcctaaatggtacgtccaagccggagaaaacgacatccgtggaccgtgcgacaccgaatctctaaaatcacttttaaaatccttagagtcagaagataaagaaaatttagaacagcttgaagaaaatacgtatataaagggagctgtattaacagaggaagaagaggccaaaaaacgtaagagggaaaagaaaaagctgtatcttaagaggaagaagcagaggatggagtcgggtgaaatcgcaggatcactgaaaagccatacagtttatgtatccggacttccaaaggacacaactatttctgaggtcgcagaggtgtttaagaaggcaggacttattaaaattgacccacatacaaccttacctaaaattaagctatatactgacgagaaaggtgaactaaagtctgacggaactgtcacttttgtaaacaaggagtcaattgaccttgcaatcagatacctagacaactaccactttcgagacaactgtgtcattcacgtggaacaagctaaatttgaacctcgatctactcaaatcaagcctattccaccttcaattaagtctgagctcaggaagaaataccttgcagcaaaatatgaggaaaagagactccaagggtggtctgacactttggatgacggcactggtagacgtatcgtaatttccaagccaatgttctccatggaggatgcaatgaaatacgaggctggtgacgagttttacgaggagcttaaggaggagattctttctgaaattaagaagtacgttgaagttgaaaaggtcactcccattgctcgccacccacaaggggttgtttgcataaagtttaagaactcttctgacgctgaggttttcatttcgaaattcaacggccggatgttcgatgggagagaacttgaggtgtatttctttgatgggaaaactgatctccaagctcagacaatcccaagcaataaaattaaaaaaccagtagtggaaacgaagttgaaggaggacgaagatgatgatgtaaaatgtgattgggttgaggaacaaagcagtgacgaggaatttgaaattagaaccgagtaa

SEQ ID NO: 6186 - protein, 373 aa, Theileria annulata
MSDSTKSDNIPPPTNAPKWYVQAGENDIRGPCDTESLKSLLKSLESEDKENLEQLEENTYIKGAVLTEEEEAKKRKREKKKLYLKRKKQRMESGEIAGSLKSHTVYVSGLPKDTTISEVAEVFKKAGLIKIDPHTTLPKIKLYTDEKGELKSDGTVTFVNKESIDLAIRYLDNYHFRDNCVIHVEQAKFEPRSTQIKPIPPSIKSELRKKYLAAKYEEKRLQGWSDTLDDGTGRRIVISKPMFSMEDAMKYEAGDEFYEELKEEILSEIKKYVEVEKVTPIARHPQGVVCIKFKNSSDAEVFISKFNGRMFDGRELEVYFFDGKTDLQAQTIPSNKIKKPVVETKLKEDEDDDVKCDWVEEQSSDEEFEIRTE

SEQ ID NO: 6187 - DNA, 1470 bp, Cryptococcus neoformans var
  CDS (262)..(1470)
atggcgagctgctacatatcagccatgctgacggaagagatgaccaatcgagtagatccggagagccagtggatgactgacgagttgacgaggcgaaggagggagccgtcccacgtgcgcttggcgtggatctcgcgtggcttatcctaccaccgtcatggccctcaagccgtcgcggaccagaagcaatcgaactatccgttgttcgagtctcttcagttattgagctgtctatacgtttacgtgccaccatttggtaaaatgccaaacgcccccatacccggccagttcgagcaggacactcgagtctcttttgacaaagtttccggcaagtggcagtacgaagatgatgaaggcacagaacatgaatggaatggcactgcttggattcccattattgacgatgagcttgtaagagcacagcaagcagcgtactcggtacccggtgtagacgaatcaacaccttccaatgcggccatcgcaagagaagaacgccgtaacaagaagcgtaagaagggagaaaaggattatacctcaaatacctccaacgccccagctgctgcgaccgaggcctccaaacctgctcctgccccgtctgcgcccaagaagactggtgtttgggtcacaaatcttccgccaaacaccactatccagaagcttgccgatgtcttctccaaggctggcgtcttgcatattgatgatgaaggcaatccccgtattaagatgtactatgatgacgaagggaatttcaaaggcgaagcttgggttgtatatttcaaggaaggcagtgtggacctcgccatcacacttttggatgacactgagctcgagctgggtgctggttatccgcctatgagagtcaaagtcgcggaatattttaaagatcaggaaaagggaaaagataaagagaagaaagagaaaactgaaggagaaaagaagaaattgacggccgaagagaagcaaaaaatgagcaagaggatgaagactcttcagagtaaaatcacgtggcgctcggatgatgagtctgacgaccctgctgctcctctcggaggtgctcctgccccgacaaacaaccgtttcgctcgtgtggtcgtgttgaagggaatgttcgtccccgaggaattagaaaaggatcctgcgttattgctagagctgaaagaagaggtcagagaagaagcagagacgcttggccaagtcacgagtgttatcttgtatgataaggaggaggacggggtaatgaccatcaagttcaaggaacccgtgtcagcgcaggcgtgtgtagcgaagatgaacaaccgatatttcgacggtcgagtgatctacgccggtctctataacggaaaggaaagattcaaaaaatctggtggacggacgtttgatgaagataatgatcaggaggagaaggagcgactggacaactttgcgcactggctggtggagggcgaggatgaagaagctgccaagaagtaa

SEQ ID NO: 6188 - protein, 402 aa, Cryptococcus neoformans var
MPNAPIPGQFEQDTRVSFDKVSGKWQYEDDEGTEHEWNGTAWIPIIDDELVRAQQAAYSVPGVDESTPSNAAIAREERRNKKRKKGEKDYTSNTSNAPAAATEASKPAPAPSAPKKTGVWVTNLPPNTTIQKLADVFSKAGVLHIDDEGNPRIKMYYDDEGNFKGEAWVVYFKEGSVDLAITLLDDTELELGAGYPPMRVKVAEYFKDQEKGKDKEKKEKTEGEKKKLTAEEKQKMSKRMKTLQSKITWRSDDESDDPAAPLGGAPAPTNNRFARVVVLKGMFVPEELEKDPALLLELKEEVREEAETLGQVTSVILYDKEEDGVMTIKFKEPVSAQACVAKMNNRYFDGRVIYAGLYNGKERFKKSGGRTFDEDNDQEEKERLDNFAHWLVEGEDEEAAKK

SEQ ID NO: 6189 - DNA, 1578 bp, Xenopus tropicalis
  CDS (1)..(1578)
atgcactgttggtttggggcaaagttaatgcgcaggcgcatttcaggaaaaccagctgcgcaggcgcatttcaggaaaaccagctgcgcaggcgcatttcaggaaaacccgctgcgcagtcgcactagccacctggaaagtaatcctgtagtacctcagttttgttgcttagggtacccctgtccccagtcggctttgcagacacagctgaacataagaatgtgtgacgatacgggatataacgaagccttttatgaacagctacgacttcagcagctgtatggagaacgtgaggcgggagatggtcaggatccgtacacataccgggaccccagtgatggtacccagtatgagtgggacatagaaaagaaggcctggttccctaagataacagaagactttttggctatgtaccatgcaaactatggtgtagatgcggggagtacagacaatactgttaatactgatgctgcaaaagccaaggaaacgtcagtctccagtgaagcacaagcaataaagaaacctaaagaggaacaaaagccgcaaactgagcaaggcgagcccaaagcaaaaggagaaaaaagaaaagcagacccaggatggttcaatgtagaagcccagagaaacactaatgtttatgtaacagggctccctcctgacattacaaatgaagaatttgctgagattatgtctaagtgtggtattatcatgcgtgatccacaatctgaggattataaaataaagttgtacaaagacagagaaggaaacctgaaaggggatggattgtgttgttatctcaaaagagaatctgtggatcttgctttaaggcttcttgatgagtatgagataagaggctacaagttgcacgtggaaaatgcaaagtttcaactcaaaggagagtatgatgccactaaaaagaagaagaaatgcaaagactacaaaaagaagatatctatacagcaaaaacaactggattggaggccagaaaagaaagcaaatgatacatcaagaatgagatttgagagagttgtgatcattaaaaatatgtttcacccaaaagactttgaggaggatcctttggtattaaatgaaatacgagaagatcttcgatctgaatgtgaaaaatttgggcaagtgaagaaactcttgatatttgatcaacatcctgatggagtggcctctgtggcatttaaagaagcagaagaaggtgatatgtgtatacaagctttgaatggacgctggtttggtggtcgccagctaattgtggaatcatgggatggggtaactgattatcagattgaagaaacatctcgagaaagagaagaaaggttaaaaggctgggagaaattcatcagtggcgatggggagaaaaaatccgagggtgaaagcaccccttcaaataataaacaatcagttgaaaatatggacaatggcaccacatcagaatgtaacaaggagaacaatattcatcgggcagaaaatcttcagactgatcttcctcaagatgatgctcagtcaacagatagcagcattggaagcagtgatgaagaaagtgaagaaaacaaaggacaatcatag

SEQ ID NO: 6190 - protein, 525 aa, Xenopus tropicalis
MHCWFGAKLMRRRISGKPAAQAHFRKTSCAGAFQENPLRSRTSHLESNPVVPQFCCLGYPCPQSALQTQLNIRMCDDTGYNEAFYEQLRLQQLYGEREAGDGQDPYTYRDPSDGTQYEWDIEKKAWFPKITEDFLAMYHANYGVDAGSTDNTVNTDAAKAKETSVSSEAQAIKKPKEEQKPQTEQGEPKAKGEKRKADPGWFNVEAQRNTNVYVTGLPPDITNEEFAEIMSKCGIIMRDPQSEDYKIKLYKDREGNLKGDGLCCYLKRESVDLALRLLDEYEIRGYKLHVENAKFQLKGEYDATKKKKKCKDYKKKISIQQKQLDWRPEKKANDTSRMRFERVVIIKNMFHPKDFEEDPLVLNEIREDLRSECEKFGQVKKLLIFDQHPDGVASVAFKEAEEGDMCIQALNGRWFGGRQLIVESWDGVTDYQIEETSREREERLKGWEKFISGDGEKKSEGESTPSNNKQSVENMDNGTTSECNKENNIHRAENLQTDLPQDDAQSTDSSIGSSDEESEENKGQS

SEQ ID NO: 6191 - DNA, 735 bp, Homo sapiens
  CDS (1)..(735)
atgagcggcaccaacttggatgggaacgatgagtttgatgagcagttgcgaatgcaagaattgtacggagacggcaaggatggtgacacccagaccgatgccggcggagaacccgattctctcgggcagcagccgacggacactccctacgagtgggacctggacaaaaaggcttggttccccaagattactgaagatttcattgctacatatcaggccaattatggcttctctaacgatggcgcatctagttctaccgcaaatgttgaagatgtccatgctaggactgcagaggaacctccacaagaaaaagccccggaacccactgatgccagaaagaagggagaaaaaagaaaggctgagtcaggatggtttcatgttgaagaagacagaaatacaaatgtatacgtgtctggtttgcctccagatattacagtggatgaatttatacaacttatgtccaagtttggcattattatgagagatcctcagacagaagaatttaaggtcaaactttacaaagataatcaaggaaatcttaaaggagacggtctttgctgttatttgaaaagagaatctgtggaacttgcattaaaacttttggatgaagatgaaattagaggctacaaattacatgttgaggtggcaaagtttcaactgaagggagaatatgatgcctcaaagaagaagaagaagtgcaaagactataagaagaagctgtctatgcaacaatag

SEQ ID NO: 6192 - protein, 244 aa, Homo sapiens
MSGTNLDGNDEFDEQLRMQELYGDGKDGDTQTDAGGEPDSLGQQPTDTPYEWDLDKKAWFPKITEDFIATYQANYGFSNDGASSSTANVEDVHARTAEEPPQEKAPEPTDARKKGEKRKAESGWFHVEEDRNTNVYVSGLPPDITVDEFIQLMSKFGIIMRDPQTEEFKVKLYKDNQGNLKGDGLCCYLKRESVELALKLLDEDEIRGYKLHVEVAKFQLKGEYDASKKKKKCKDYKKKLSMQQ

SEQ ID NO: 6193 - DNA, 672 bp, Homo sapiens
  CDS (1)..(672)
atgagcggcaccaacttggatgggaacgatgagtttgatgagcagttgcgaatgcaagaattgtacggagacggcaaggatggtgacacccagaccgatgccggcggagaacccgattctctcgggcagcagccgacggacactccctacgagtgggacctggacaaaaaggcttggttccccaagattactgaagatttcattgctacatatcaggccaattatggcttctctaacgatggcgcatctagttctaccgcaaatgttgaagatgtccatgctaggactgcagaggaacctccacaagaaaaagccccggaacccactgatgccagaaagaagggagaaaaaagaaaggctgagtcaggatggtttcatgttgaagaagacagaaatacaaatgtatacgtgtctggtttgcctccagatattacagtggatgaatttatacaacttatgtccaagtttggcattattatgagagatcctcagacagaagaatttaaggtcaaactttacaaagataatcaaggaaatcttaaaggagacggtctttgctgttatttgaaaagagaatctgtggaacttgcattaaaacttttggatgaagatgaaattagaggctacaaattacatgttgaggtggcaaagtttcaactgaagggagaatag

SEQ ID NO: 6194 - protein, 223 aa, Homo sapiens
MSGTNLDGNDEFDEQLRMQELYGDGKDGDTQTDAGGEPDSLGQQPTDTPYEWDLDKKAWFPKITEDFIATYQANYGFSNDGASSSTANVEDVHARTAEEPPQEKAPEPTDARKKGEKRKAESGWFHVEEDRNTNVYVSGLPPDITVDEFIQLMSKFGIIMRDPQTEEFKVKLYKDNQGNLKGDGLCCYLKRESVELALKLLDEDEIRGYKLHVEVAKFQLKGE

SEQ ID NO: 6195 - DNA, 2265 bp, Pongo pygmaeus
  CDS (1)..(2265)
atgagcggcaccaacttggatgggaacgatgagtttgatgagcagttgcgaatgcaagaattgtacggagacggcaaggatggtgacacccagaccgatgccggcggagaacccgattctctcgggcagcagccgacggacaccccctacgagtgggacctggacaaaaaggcttggttccccaagattactgaagatttcattgctacatatcaggccaattacggcttctctaacgatggcgcatctagttctactgcaaatgttgaagatgtccatgctaggactgcagaggaacctccacaagaaaaagccccggaacccactgatcccagaaagaagggagaaaaaagaaaggctgagtcaggatggtttcatgttgaagaagacagaaatacaaatgtatacgtgtctggtttgcctccagatattacagtggatgaatttatacaacttatgtccaagtttggcattattatgagagatcctcagacagaagaatttaaggtcaaactttacaaagataatcaaggaaatcttaaaggagacggtctttgctgttatttgaagagagaatctgtggaacttgcattaaaacttttggatgaagatgaaattagaggctacaaattacatgttgaggtggcaaagtttcaactgaagggagaatatgatgcctcaaagaagaagaagaagtgcaaagactataagaagaagctgtctatgcaacaaaagcagttggattggagacctgagaggcgagccggaccatcccggatgcgccatgagcgagttgtcatcatcaagaatatgtttcatcctatggattttgaggatgatccgttggtgctgaatgagatcagagaagaccttcgagtagagtgttcgaagtttggacaaattaggaaactccttctctttgataggcacccagatggtgtggcctctgtatcctttcgggatccagaggaagctgattattgtattcagactctcgatggaagatggtttggtggccgtcaaatcactgcccaggcatgggatgggactacagattatcaggtggaggaaacctcaagagaaagggaggaaaggctgagaggatgggaggctttcctcaatgctcctgaggccaacagaggccttaggcgttcagattctgtctctgcttccgaaagggcagggccttctagagcaaggcatttttcagagcaccccagcacatctaaaatgaatgctcaagaaactgcaactggaatggcgtttgaagaacctatagatgagaagaagtttgaaaagacagaagatgggggagaatttgaagaaggtgcttctgaaaacaatgctaaagaaagtagccccgaaaaagaggctgaagaaggctgccctggaaaagaatctgaagagggctgccccaaaagagggtttgaaggcagctgctcccaaaaagagtctgaagaaggcaatcccttaagaggatctgaagagggtagtcctaaaaaagagtctaaaaagaagacactcagaaatgattgtgaagagaatggctttgcaaaggaatctgaagatgaccccaacaaggagtctgaagaggaggttggccccacgaaagagtccgaagaagatgactcagagaaagagtctgacgaagactgctctgaaaaacagtctgaagatggctctgaaagagaatttgaagaaaatggtctcgagaaagatttggacgaggaaggctctgaaaaggagcttcatgaaaatgttcttgacaaagagttagaagaaaatgactctgaaaactccgaatttgaagatgacggctctgaaaaagtgttagatgaggaaggctctgagagagagtttgatgaagattcagatgaaaaggaagaagaggaggatacatatgaaaaagtatttgatgatgagtccaatgagaaagaggatgaagaatatgcagatgaaaaggggcttgaagctgctgataaaaaggaggaagaaggtgatgcagatgaaaagctgtttgaagagtcagacgacaaggaagatgaagatgcagatggaaaggaagttgaagatgctgacgaaaagttgttcgaagatgatgattccaatgagaagttgtttgatgaggaggaagattccaatgagaagttgtttgacgattctgatgagagggggactttgggtggttttgggagtgttgaagaagggcccctatccactggcagcagctttattctcagtagcgatgatgatgatgatatttaa

SEQ ID NO: 6196 - protein, 754 aa, Pongo pygmaeus
MSGTNLDGNDEFDEQLRMQELYGDGKDGDTQTDAGGEPDSLGQQPTDTPYEWDLDKKAWFPKITEDFIATYQANYGFSNDGASSSTANVEDVHARTAEEPPQEKAPEPTDPRKKGEKRKAESGWFHVEEDRNTNVYVSGLPPDITVDEFIQLMSKFGIIMRDPQTEEFKVKLYKDNQGNLKGDGLCCYLKRESVELALKLLDEDEIRGYKLHVEVAKFQLKGEYDASKKKKKCKDYKKKLSMQQKQLDWRPERRAGPSRMRHERVVIIKNMFHPMDFEDDPLVLNEIREDLRVECSKFGQIRKLLLFDRHPDGVASVSFRDPEEADYCIQTLDGRWFGGRQITAQAWDGTTDYQVEETSREREERLRGWEAFLNAPEANRGLRRSDSVSASERAGPSRARHFSEHPSTSKMNAQETATGMAFEEPIDEKKFEKTEDGGEFEEGASENNAKESSPEKEAEEGCPGKESEEGCPKRGFEGSCSQKESEEGNPLRGSEEGSPKKESKKKTLRNDCEENGFAKESEDDPNKESEEEVGPTKESEEDDSEKESDEDCSEKQSEDGSEREFEENGLEKDLDEEGSEKELHENVLDKELEENDSENSEFEDDGSEKVLDEEGSEREFDEDSDEKEEEEDTYEKVFDDESNEKEDEEYADEKGLEAADKKEEEGDADEKLFEESDDKEDEDADGKEVEDADEKLFEDDDSNEKLFDEEEDSNEKLFDDSDERGTLGGFGSVEEGPLSTGSSFILSSDDDDDI

SEQ ID NO: 6197 - DNA, 1359 bp, Xenopus laevis
  CDS (1)..(1359)
atgtgtgacgacacgggatcgaacgaggccttttatgagcagctacgacttcaggagctgtatggagaacgggaagcgggagatggtcaggatccttacacgttccgggaccctagtgatggcaccgagtatgagtgggacgtggagaagaaggcctggttcccaaaaataacagaagactttttggctatgtaccatgcaaactatggtgtagacacagggggtacagacaatgctcttaatacagatgctacaaaaaccaaggaaatgccagtctccagcgaagcacaagaaaaaaagaaacctaaagaagagcagaagctgcaaactgagcaaggggaacccaaagcaaaaggagaaaaaagaaaagcagacccaggatggtttaatgttgaagaacagagaaacactaatgtttatgtgacagggcttcctcctgacactacaaatgaagaatttgctgagattatgtctaagtgtggtattataatgcgtgatccacattctgaggattataaaataaagttgtacaaagacagagaaggaaacctgaaaggggatgggctatgttgttatctcaaaagagaatctgtggaacttgctttgaagcttcttgatgagtatgagataagaggttacaagttgcgtgtggaaaatgcaaagtttcaactgaagggggcgtatgatgccaccaaaaagaagaagaaatgcaaagactacaggaagaagatgtctatgcagcaaaaacaactggactggaggcccgaaaagaaggcaaatgatgcatcacgaatgagatttgaaagggttgtaattatcaaaaatatgtttcacccaaaagactttgaggaagatcctttggtattaaatgaaatccgagaagatcttagatctgaatgtgaaaaatttggccaagtgaagaaactcttgatatttgatcaacatcctgatggagtggcctctgtggcattcaaagaagcaaacgaaggcgacctttgcatacaggctctgaatgggcgctggtttggtggccgtcagcttgctgtggaaccatgggatggggtaactgattatcagattgaagaaacatctcgagaaagagaagaaaggttaaaaggctgggagaacttcctggttggcagtgaggataaaaaatcggagagtgatgggaccccttcaaataataaacagtcagtggaaaacaatgacaatggcagcacatcagaatttaacaaggaaaacaatgttcatcaggcagaaaatgttcagactgctcttccccaagatgatgctcagtcaactgatagtgatattggtagcagtgatgaagagagtgaaaaaaacaaaggacagtcataa

SEQ ID NO: 6198 - protein, 452 aa, Xenopus laevis
MCDDTGSNEAFYEQLRLQELYGEREAGDGQDPYTFRDPSDGTEYEWDVEKKAWFPKITEDFLAMYHANYGVDTGGTDNALNTDATKTKEMPVSSEAQEKKKPKEEQKLQTEQGEPKAKGEKRKADPGWFNVEEQRNTNVYVTGLPPDTTNEEFAEIMSKCGIIMRDPHSEDYKIKLYKDREGNLKGDGLCCYLKRESVELALKLLDEYEIRGYKLRVENAKFQLKGAYDATKKKKKCKDYRKKMSMQQKQLDWRPEKKANDASRMRFERVVIIKNMFHPKDFEEDPLVLNEIREDLRSECEKFGQVKKLLIFDQHPDGVASVAFKEANEGDLCIQALNGRWFGGRQLAVEPWDGVTDYQIEETSREREERLKGWENFLVGSEDKKSESDGTPSNNKQSVENNDNGSTSEFNKENNVHQAENVQTALPQDDAQSTDSDIGSSDEESEKNKGQS

SEQ ID NO: 6199 - DNA, 2070 bp, Gallus gallus
  CDS (1)..(2070)
atggcgtcgacggattatagcacctatagccaagctgcagctcagcagggctacagcgcgtacgcacctcagccagcccaaggatacgcacagaccacgcagacctatgggcagcagagctacggaacttatggacagcccactgatgccagctacacacagcctcagacaactgcaacgtatgggcagactgcgtatgcgacatcctacgggcagccccccactggttacacggccccaactgcccccccagcgtacagtcagcccgtccaggggtacggcacggccgcctacgacaccagcaccgccacggttaccaccacccaggcttcctacgcagcaccatccgcctatggcacccagcctgcctacccagcctatgggcagcagccacctgcggccgttcccccgagaccccaggatggcagcaaaccagcagagaccagccagccaccatcaagtacaacaggctacaaccagcccagcctagggtatgggcagagcaactacagctacccccaggtgcctgccagctacccgatgcagccggttactgcgcctccctcctatcctcctaccagctattcctccacacagccaagcagttacgatcagagcacttattcccagcagagcacctatgggcagcagaacacctacagccagcagactagctatgggcagcagagcagctacgcgcagcagccgcccccaacgagttacccaccccagaccggatcctacagccagcccccaagccagtacagccagcagagcagcagctacggccagcagagctcgttccgccaggaccatcccagcagcatgaatgtgtacggacaggaatctggaggtttttcaggcccaggagagaaccggaatatgagcggccctgataaccggggcaggggaagagggggatatgagcgcggaggcatgagcagaggtgggcggggaggaggacgcggtggaatgggcagcgctggagagcgaggtggcttcaataagcctggtggacacatggaggagggaccggaccttgacttaggcccacctatggacccggatgaggactcggacaacagctcagtgtatgtgcagggactcaatgataatgtgaccctggaggacctggcagacttcttcaaacagtgtggggttgtcaagatgaacaagaggactgggcagcctatgatacacctctacatcgacaaagaaactggcaagccgaaaggagatgccacggtctcttatgatgatccatccactgccaaaacagctgttgaatggtttgatgggaaggacttccagggcagcaagctcaaagtcagcctcacacggaaaaagggcccgatgaacagcatgaggggcgggatgcccccacgggatcagcggggaatgcccccccccctccgcggaggtcctggggggcctggaggcccaggggggcccggtgggccgagcggtcccatgggccggatgggaggcagaggtggcgacaggggaggcttctcctccagaggaccacggggatccagggaaacccctctgggggcagcgtgcagcaccgtgctggggactggcagtgccccaatccgggatgtggaaaccagaacttcgcctggagaacagagtgcaatcagtgcaaggctcctaaaccagaagggtttctcccgcccccttttccccctccaggcggcgaccgcggtagaggcggcccggaggaatgaggggcggcagaggcggcggtatgatggagcgcggcggccccggcggaatgttcagaggcggccgcggcggagacagaggtggattcagaggcggtcggggcatggatcgaggcggctacggaggagggggccggcgaggagggggccccgggggtccgcctggcccccttatggaccagatgggaggaggaggcagaggcggaaggcgcggaggcccggggaagatggacaagggggagcaccgccaggagcgcagagatcggccctactgaaggcaccgcccagccgcgtttactaccagatttattttttaaagccagaaaatgttttaaatttataa

SEQ ID NO: 6200 - protein, 689 aa, Gallus gallus
MASTDYSTYSQAAAQQGYSAYAPQPAQGYAQTTQTYGQQSYGTYGQPTDASYTQPQTTATYGQTAYATSYGQPPTGYTAPTAPPAYSQPVQGYGTAAYDTSTATVTTTQASYAAPSAYGTQPAYPAYGQQPPAAVPPRPQDGSKPAETSQPPSSTTGYNQPSLGYGQSNYSYPQVPASYPMQPVTAPPSYPPTSYSSTQPSSYDQSTYSQQSTYGQQNTYSQQTSYGQQSSYAQQPPPTSYPPQTGSYSQPPSQYSQQSSSYGQQSSFRQDHPSSMNVYGQESGGFSGPGENRNMSGPDNRGRGRGGYERGGMSRGGRGGGRGGMGSAGERGGFNKPGGHMEEGPDLDLGPPMDPDEDSDNSSVYVQGLNDNVTLEDLADFFKQCGVVKMNKRTGQPMIHLYIDKETGKPKGDATVSYDDPSTAKTAVEWFDGKDFQGSKLKVSLTRKKGPMNSMRGGMPPRDQRGMPPPLRGGPGGPGGPGGPGGPSGPMGRMGGRGGDRGGFSSRGPRGSRETPLGAACSTVLGTGSAPIRDVETRTSPGEQSAISARLLNQKGFSRPLFPLQAATAVEAARRNEGRQRRRYDGARRPRRNVQRRPRRRQRWIQRRSGHGSRRLRRRGPARRGPRGSAWPPYGPDGRRRQRRKARRPGEDGQGGAPPGAQRSALLKAPPSRVYYQIYFLKPENVLNL

SEQ ID NO: 6201 - DNA, 1878 bp, Brachydanio rerio
  CDS (1)..(1878)
atgtctgctgcagattacaacagttacggacaggctggaagccagcaggggtacggctcctatccggcccagccctctcaaccaggatatggacagggcacccagcagtcatatggtcaacagcaaggctatggttcatatagccaaccggctgactcaacctactctcagaccagtggttcttcaagcagttatggccagcagccatatgggtcttcctatggacagcagccaccagccagcggtagttataatgctgcttcagccacaccgcaaggctatactcaaccagtgcaaggttatggaagcagcagctatgattcctccacagctgctgcctcgtcaaccagcaacactcagacctcttatggtgggcaggccagctatggaacccagtctgcatatcctggatatggacaacagcctgctgctgctgcacctcccagcagttacagttctgggagccagcagcctgccggatatgagcagagctcgtactcccagcagcctcagcaaagcacttattctcagcagcagcagggaggataccagggccagcaaggaggctacggacagcagagctcctatagccagcagggaggatatcaacaaactcctccccagcagcagcaggctccgccttccagctatgctccgccttctggatcttatggacagccttctgccagtcagtatggacagcagggcagtactggaggaggttatggccaatcagactataaaccaccaaaccagtatggtagttacagaccagaccatcagaatggaggtggctattctggccctgaatctggaggatatgggggccctggagagggccgaggcatgggagggggggagaaccgcgggcgcggccggggtgggtttgaccggggaatgatgcgaggaggtggtggcatgcgagggggcatgagccgtggaggcatgggcatcgctggagacagaggtggcttcagtaagcctggtgatggtgaaatgggagccccagaggagcaagatgactctgaaaacagcactatctacatcacgggactgactgagaatgctacgttggaggaagtcgctgactttttcaagcacagcggcatcattaggatcaacaaacgaacaggcctgcctgctgtcaacatatacaccgataaagatactggcaaacctaaaggcgatgccaccttatcctacgaggagcctccatctgctaaagcagcagtcgagtggtttgatggaaaagatttccaggggaagaagctgaaggtgtcaatggccagacgcaagcccatgatgggtatgatgcgcgggggtatgccaatgagaggagaccgcggtggcatgatgggacgaggaggaatgatgggtcgtggtggaatgggcagaggtggtgatcgcggagggtttatgccacgtgggggtcccaggggaatgggtcgtggaggacctactggaggaaacatgcagcagagggcaggagactggcagtgtccaaatgctggatgtggaaaccaaaactttgcctggagaatggagtgtaatcagtgcaaggcacccaaacctgaaggcttcggacctcctcccttcccgccaggtggtgatcgcggtcgtggtggtcctggtgggatgcgtggtggtcgtggtatggatcgcggaggaccagggggacccggaggcttccgtggaggcagaggtgtggaccgtggaggcttcagaggacgtggtatggacagaggaggctttggaggaaggggtcgtggagggcctccaatggatgacatgggccgaagggggcgaggaatgggaccaccgggcaaaatggatatgaagggagaccaccgccaggaccgtagagagcggccgtattaa

SEQ ID NO: 6202 - protein, 625 aa, Brachydanio rerio
MSAADYNSYGQAGSQQGYGSYPAQPSQPGYGQGTQQSYGQQQGYGSYSQPADSTYSQTSGSSSSYGQQPYGSSYGQQPPASGSYNAASATPQGYTQPVQGYGSSSYDSSTAAASSTSNTQTSYGGQASYGTQSAYPGYGQQPAAAAPPSSYSSGSQQPAGYEQSSYSQQPQQSTYSQQQQGGYQGQQGGYGQQSSYSQQGGYQQTPPQQQQAPPSSYAPPSGSYGQPSASQYGQQGSTGGGYGQSDYKPPNQYGSYRPDHQNGGGYSGPESGGYGGPGEGRGMGGGENRGRGRGGFDRGMMRGGGGMRGGMSRGGMGIAGDRGGFSKPGDGEMGAPEEQDDSENSTIYITGLTENATLEEVADFFKHSGIIRINKRTGLPAVNIYTDKDTGKPKGDATLSYEEPPSAKAAVEWFDGKDFQGKKLKVSMARRKPMMGMMRGGMPMRGDRGGMMGRGGMMGRGGMGRGGDRGGFMPRGGPRGMGRGGPTGGNMQQRAGDWQCPNAGCGNQNFAWRMECNQCKAPKPEGFGPPPFPPGGDRGRGGPGGMRGGRGMDRGGPGGPGGFRGGRGVDRGGFRGRGMDRGGFGGRGRGGPPMDDMGRRGRGMGPPGKMDMKGDHRQDRRERPY

SEQ ID NO: 6203 - DNA, 1215 bp, Plasmodium yoelii yoelii
  CDS (1)..(1215)
atggataaagaaagaagtgaagcagagtctatcaattgtaactccacaaaagaggaaaaccaaagtaaagaaaatgaaaaagaaaaaaacaaagctactaatttaccgccttttaacgaattaaatatagaacaaaaaaaagaacaagatgaatgggtaatttatgtttgtaataattcttatggcccttataatttagatcaaataataaatttatggaatacaaagagaattaatatgatgacaacaatatttaaaaagggtgaaaataattggaaatatgtatataatgatgaaactttagtaaaacactttcaaggaacacaatcaaatacaacaaatattgataacacaacttctagttataataatgaaaaagacgcttcaaataatcatcttttaaacaaacaattaaataataacaatactaattcaggtcaaacacaaaatcatgttaataaatctaacgaaaatgattttcaccaaaaagaaatacaatatagtacaaataaccttaatgggaataatgtagaatatgataataatgatacttataataataatttaaattataataatgttgataataatacagctaccaatttaactaacgaaaacgaagcaaatcaggcagaattggaaaaaataaaaaaaagaaataaaaaaaaaaaatatttagaaaggaaaaaaaaaaaaattgaagaaggaatatgtgaaagaaaaataaaaaatagttctgtatatatttctggtcttcctaaagatgtaacacaagaagaaataaataacgtttttaaaaaagctggaattataaaaatcgactctgaaaccacaaaaccaaaaataaaaatatattatgatgaaaataataatgtaaaaggtgatgcattagttacttatgtatatacgcaaagtgttgatatcgcaattaaatattttgataaatttcattttagacaaaattgcgtgataaatgtggaaaaagcccaatttaataaaaaagtagaacatcataaaatatcaaaagaagaaatattaattaaaaaaaaaaaaatacaagcagcaaaacatgaacagtacagattacaaaactggggagaagtttatactggatcaaaaaaaaaaattgttatttttagaaacgcattttcctatgaagacgcattggtaatgataaatctcaaaagacattttcgttttaagctctttatttaa

SEQ ID NO: 6204 - protein, 404 aa, Plasmodium yoelii yoelii
MDKERSEAESINCNSTKEENQSKENEKEKNKATNLPPFNELNIEQKKEQDEWVIYVCNNSYGPYNLDQIINLWNTKRINMMTTIFKKGENNWKYVYNDETLVKHFQGTQSNTTNIDNTTSSYNNEKDASNNHLLNKQLNNNNTNSGQTQNHVNKSNENDFHQKEIQYSTNNLNGNNVEYDNNDTYNNNLNYNNVDNNTATNLTNENEANQAELEKIKKRNKKKKYLERKKKKIEEGICERKIKNSSVYISGLPKDVTQEEINNVFKKAGIIKIDSETTKPKIKIYYDENNNVKGDALVTYVYTQSVDIAIKYFDKFHFRQNCVINVEKAQFNKKVEHHKISKEEILIKKKKIQAAKHEQYRLQNWGEVYTGSKKKIVIFRNAFSYEDALVMINLKRHFRFKLFI

SEQ ID NO: 6205 - DNA, 2265 bp, Homo sapiens
  CDS (1)..(2265)
atgagcggcaccaacttggatgggaacgatgagtttgatgagcagttgcgaatgcaagaattgtacggagacggcaaggatggtgacacccagaccgatgccggcggagaacccgattctctcgggcagcagccgacggacactccctacgagtgggacctggacaaaaaggcttggttccccaagattactgaagatttcattgctacatatcaggccaattatggcttctctaacgatggcgcatctagttctaccgcaaatgttgaagatgtccatgctaggactgcagaggaacctccacaagaaaaagccccggaacccactgatgccagaaagaagggagaaaaaagaaaggctgagtcaggatggtttcatgttgaagaagacagaaatacaaatgtatacgtgtctggtttgcctccagatattacagtggatgaatttatacaacttatgtccaagtttggcattattatgagagatcctcagacagaagaatttaaggtcaaactttacaaagataatcaaggaaatcttaaaggagacggtctttgctgttatttgaaaagagaatctgtggaacttgcattaaaacttttggatgaagatgaaattagaggctacaaattacatgttgaggtggcaaagtttcaactgaagggagaatatgatgcctcaaagaagaagaagaagtgcaaagactataagaagaagctgtctatgcaacaaaagcagttggattggagacctgagaggcgagccggaccatcccggatgcgccatgagcgagttgtcatcatcaagaatatgtttcatcctatggattttgaggatgatccgttggtgctgaatgagatcagagaagaccttcgagtagagtgttcgaagtttggacaaattaggaaactccttctctttgataggcacccagatggtgtggcctctgtgtcctttcgggatccagaggaagctgattattgtattcagactctcgatggaagatggtttggtggccgtcaaatcactgcccaggcatgggatgggactacagattatcaggtggaggaaacctcaagagaaagggaggaaaggctgagaggatgggaggctttcctcaatgctcctgaggccaacagaggccttagcgttcagattctgtctctgcttcgaaaggcagggccttctagagcaaggcatttttcagagcaccccagcacatctaaaatgaatgctcaagaaactgcaactggaatggcatttgaagaacctatagatgagaagaagtttgaaaagacagaagatgggggagaatttgaagaaggtgcttctgaaaacaatgctaaggaaagtagccccgaaaaagaggctgaagaaggctgccctgaaaaagaatctgaagagggctgccccaaaagagggtttgaaggcagctgctcccaaaaagagtctgaagaaggcaatcccgtaagaggatctgaagaggatagtcctaaaaaagagtctaaaaagaagacactcaaaaatgattgtgaagagaatggccttgcaaaggaatctgaagatgacctcaacaaggagtctgaagaggaggttggccccacaaaagagtccgaagaagatgactcagagaaagagtctgatgaagactgctctgaaaaacagtctgaagatggctccgaaagagaatttgaagaaaatggtctcgagaaagatttggacgaggaaggttctgaaaaggagcttcatgaaaatgttcttgacaaagagttagaagaaaatgactctgaaaactccgaatttgaagatgacggctctgaaaaagtgttagatgaggaaggctctgagagagagtttgacgaagattcagatgaaaaggaagaagaggaggatacatatgaaaaagtatttgatgatgagtctgatgagaaagaggatgaagaatatgcagatgaaaaggggcttgaagctgctgataaaaaggcggaagaaggtgatgcagatgaaaagctgtttgaagagtcagatgacaaggaagatgaagatgcagatggaaaggaagttgaagatgctgacgaaaagttgttcgaagatgatgattccaatgagaagttgtttgatgaggaggaagattccagtgagaagttgtttgacgattctgatgagagggggactttgggtggttttgggagtgttgaagaagggcccctatccactggcagcagctttattctcagtagcgatgatgatgacgatgatatttaa

SEQ ID NO: 6206 - protein, 754 aa, Homo sapiens
MSGTNLDGNDEFDEQLRMQELYGDGKDGDTQTDAGGEPDSLGQQPTDTPYEWDLDKKAWFPKITEDFIATYQANYGFSNDGASSSTANVEDVHARTAEEPPQEKAPEPTDARKKGEKRKAESGWFHVEEDRNTNVYVSGLPPDITVDEFIQLMSKFGIIMRDPQTEEFKVKLYKDNQGNLKGDGLCCYLKRESVELALKLLDEDEIRGYKLHVEVAKFQLKGEYDASKKKKKCKDYKKKLSMQQKQLDWRPERRAGPSRMRHERVVIIKNMFHPMDFEDDPLVLNEIREDLRVECSKFGQIRKLLLFDRHPDGVASVSFRDPEEADYCIQTLDGRWFGGRQITAQAWDGTTDYQVEETSREREERLRGWEAFLNAPEANRGLSVQILSLLRKAGPSRARHFSEHPSTSKMNAQETATGMAFEEPIDEKKFEKTEDGGEFEEGASENNAKESSPEKEAEEGCPEKESEEGCPKRGFEGSCSQKESEEGNPVRGSEEDSPKKESKKKTLKNDCEENGLAKESEDDLNKESEEEVGPTKESEEDDSEKESDEDCSEKQSEDGSEREFEENGLEKDLDEEGSEKELHENVLDKELEENDSENSEFEDDGSEKVLDEEGSEREFDEDSDEKEEEEDTYEKVFDDESDEKEDEEYADEKGLEAADKKAEEGDADEKLFEESDDKEDEDADGKEVEDADEKLFEDDDSNEKLFDEEEDSSEKLFDDSDERGTLGGFGSVEEGPLSTGSSFILSSDDDDDDI

SEQ ID NO: 6207 - DNA, 1104 bp, Schizosaccharomyces pombe
  CDS (1)..(1104)
atgtccagccagcctttttgggatgaaagaatacatcgttggagatgtttaggatcagaaggaaacgaattaatatatattgatgaagaacaaacttggaaagattatgatcctaatagcttaaaaatgaataaggccggctcaactggtgcagaagtcagtgatgttacggcggaggctaccgaaggaaaggaatctagcaacggcgaagaccgccataccaaacgattgtacgaatcgacatcggctgaagggtatccttcaggttctcgaaataaaaagtcaaagtccgaaaattcagaagcctcgcccgccccagtaataaacaaagcggtttacattcaaggactaccactggatgtcacggttgacgaaattgaagaagtattcaagaaatgcggtgttattgctaagaatattgacaatggtacgccgagaatcaaaatctaccggacagaggatggaactcctaaaggtgatgctttaattgtatttttccgcagcgaaagtgttgagcttgcagagcaattatttgatgacactgaatttcgttatggatctgggcaaaagatgcgtgtccagaaagctaatattgattacaaaaaggagaaaacggtgaacaaagacgtaggtggtgccttaaaaaaaaaggcacttcgtctccgacaacaacaaatgcagcaaatttcatcctgggatgatgttgacgaagaggttgatgataaaagaaaaaaacgatttaataaaatagtagttttaaagcatatttttacgctggaagaactcgataaaacacctgaacttttaattgacttaaaagacgatatcactgaggaagctgagaaatgtggacgagttactaatgtggttttgtacgacaaggagcctgatggagtagtaactgtacggttttcaaacaatgaagaagctgaagcttgcgtaaggttaatgcaaggccgatattttgatggccgggtagtggaagcttcaatttacgatggaaaggttcggttccagaaaagtggaaagcatacattagatgatgaagaggacgaggaaaaacgtttggaaaaattcgcagattggttagaaaattctaactga

SEQ ID NO: 6208 - protein, 367 aa, Schizosaccharomyces pombe
MSSQPFWDERIHRWRCLGSEGNELIYIDEEQTWKDYDPNSLKMNKAGSTGAEVSDVTAEATEGKESSNGEDRHTKRLYESTSAEGYPSGSRNKKSKSENSEASPAPVINKAVYIQGLPLDVTVDEIEEVFKKCGVIAKNIDNGTPRIKIYRTEDGTPKGDALIVFFRSESVELAEQLFDDTEFRYGSGQKMRVQKANIDYKKEKTVNKDVGGALKKKALRLRQQQMQQISSWDDVDEEVDDKRKKRFNKIVVLKHIFTLEELDKTPELLIDLKDDITEEAEKCGRVTNVVLYDKEPDGVVTVRFSNNEEAEACVRLMQGRYFDGRVVEASIYDGKVRFQKSGKHTLDDEEDEEKRLEKFADWLENSN

SEQ ID NO: 6209 - DNA, 25 bp, Artificial sequence
  primer
atggatgctgatgaattggaattga

SEQ ID NO: 6210 - DNA, 25 bp, Artificial sequence
  primer
ctatataaggtcatcttccacttcg

SEQ ID NO: 6211 - protein, 194 aa, Artificial sequence
  consensus sequence
  Variant (2)..(2): Xaa in position 2 is any amino acid
  Variant (3)..(4): Xaa in position 3 to 4 is any or no amino acid
  Variant (6)..(7): Xaa in position 6 to 7 is any amino acid
  Variant (11)..(13): Xaa in position 11 to 13 is any amino acid
  Variant (15)..(16): Xaa in position 15 to 16 is any amino acid
  Variant (18)..(25): Xaa in position 18 to 25 is any amino acid
  Variant (26)..(30): Xaa in position 26 to 30 is any or no amino acid
  Variant (32)..(45): Xaa in position 32 to 45 is any amino acid
  Variant (46)..(50): Xaa in position 46 to 50 is any or no amino acid
  Variant (52)..(52): Xaa in position 52 is any amino acid
  Variant (54)..(58): Xaa in position 54 to 58 is any amino acid
  Variant (59)..(59): Xaa in position 59 is any or no amino acid
  Variant (62)..(66): Xaa in position 62 to 66 is any amino acid
  Variant (67)..(72): Xaa in position 67 to 72 is any or no amino acid
  Variant (74)..(77): Xaa in position 74 to 77 is any amino acid
  Variant (78)..(80): Xaa in position 78 to 80 is any or no amino acid
  Variant (82)..(84): Xaa in position 82 to 84 is any amino acid
  Variant (86)..(89): Xaa in position 86 to 89 is any amino acid
  Variant (91)..(100): Xaa in position 91 to 100 is any amino acid
  Variant (101)..(108): Xaa in position 101 to 108 is any or no amino acid
  Variant (110)..(111): Xaa in position 110 to 111 is any amino acid
  Variant (113)..(127): Xaa in position 113 to 127 is any amino acid
  Variant (128)..(193): Xaa in position 128 to 193 is any or no amino acid
NXXXYXXGLPXXXTXXEXXXXXXXXXXXXXGXXXXXXXXXXXXXXXXXXXYXDXXXXXXKGXXXXXXXXXXXYXXXXXXXSXXXAXXXXDXXXXXXXXXXXXXXXXXXVXXAXXXXXXXXXXXXXXXXXXXXXXXXXXXXXXXXXXXXXXXXXXXXXXXXXXXXXXXXXXXXXXXXXXXXXXXXXXXXXXXXXW

SEQ ID NO: 6212 - DNA, 912 bp, Saccharomyces cerevisiae
  CDS (1)..(912)
atgactgttactgacacttttaaactgtttattttaaggcatggtcaaagtgaattaaactcagaaaacatattctgcggatggattgatgctcaattaacggaaaaagggaagtctcaggcccgccactctgcaaaattgatcaagcagttttgcgattctaacaatatctctttgcctcagattggctatacttcaaggttgattcgaactcagcagaccatggacgttattctcgaagagttgggactaaaacacaccaattatgtaattactacgaatacaaacattaaggaggagctgcaggacacaagatttgaaggaagtatgcctgtgttgcaaacctggaggttaaatgagcgtcattacggcgcatggcaaggacaaagaaagccagatatcttgaaagaatacggtaaggaaaaatacatgtatatcagaagagattacaacggaaaaccccctaaagtcaacctaaacctggaaatggtccaagaggaaaatgatcaggggtcctccacaggctatgattttaaggagcccaatagacacttaaaatacggccccgaagagaaggctaatgagcgtctgccagaaagtgagtctctttgtgaagtggtcgtcagattgaaaccatttttaaataatgttgttctgtctaccgccaacaaaatcagtcaagaatcgtgtgttatagttgggcatggcagctctgtaagatctctgctgaaagtattggaaggtatctcagatgaagacatcaaagatgtcgatattcccaacggcattccgctagttatagagttggatagagacaattactcttttgtgaggaaattttacttggatccagaatcagctaaagttaatgctcaaatggttcgtgatgagggtttcgaaaagaatccatga

SEQ ID NO: 6213 - protein, 303 aa, Saccharomyces cerevisiae
MTVTDTFKLFILRHGQSELNSENIFCGWIDAQLTEKGKSQARHSAKLIKQFCDSNNISLPQIGYTSRLIRTQQTMDVILEELGLKHTNYVITTNTNIKEELQDTRFEGSMPVLQTWRLNERHYGAWQGQRKPDILKEYGKEKYMYIRRDYNGKPPKVNLNLEMVQEENDQGSSTGYDFKEPNRHLKYGPEEKANERLPESESLCEVVVRLKPFLNNVVLSTANKISQESCVIVGHGSSVRSLLKVLEGISDEDIKDVDIPNGIPLVIELDRDNYSFVRKFYLDPESAKVNAQMVRDEGFEKNP

SEQ ID NO: 6214 - DNA, 762 bp, Homo sapiens
  CDS (1)..(762)
atggccactcaccgcctcgtgatggtccggcacggcgagagcacatggaaccaggagaaccgtttctgtggctggttcgatgcagagctgagtgaaaaggggaccgaggaggccaagcggggagccaaggccatcaaggatgccaagatggagtttgacatctgctacacgtcagtgctgaagcgggccatccgcaccctctgggccatcctggacggcacggaccagatgtggctgcctgtggtgcgcacttggcgcctcaatgagcggcattacgggggcctcacaggcctcaacaaggcagaaacggccgccaagcacggggaggagcaggtgaagatctggaggcgctccttcgacatcccgccgcccccgatggacgagaagcacccctactacaactccattagcaaggagcgtcggtacgcaggcctgaagcccggggaactccccacctgcgagagcctcaaggacaccattgcccgggccctgcccttctggaacgaggagattgttccccagatcaaggccggcaagcgagtgctcattgcagcccacgggaacagcctgcggggcattgtcaagcacctggaagggatgtcagaccaggcgatcatggagctgaacctgcccacggggatccccattgtgtatgagctgaacaaggagctgaagcccaccaagcccatgcagttcctgggtgatgaggaaacggtgcggaaggccatggaggctgtggctgcccagggcaaggccaagtga

SEQ ID NO: 6215 - protein, 253 aa, Homo sapiens
MATHRLVMVRHGESTWNQENRFCGWFDAELSEKGTEEAKRGAKAIKDAKMEFDICYTSVLKRAIRTLWAILDGTDQMWLPVVRTWRLNERHYGGLTGLNKAETAAKHGEEQVKIWRRSFDIPPPPMDEKHPYYNSISKERRYAGLKPGELPTCESLKDTIARALPFWNEEIVPQIKAGKRVLIAAHGNSLRGIVKHLEGMSDQAIMELNLPTGIPIVYELNKELKPTKPMQFLGDEETVRKAMEAVAAQGKAK

SEQ ID NO: 6216 - DNA, 765 bp, Danio rerio
  CDS (1)..(765)
atggccgcctacaagctggtgctgatccggcacggtgagagcacatggaacctggagaaccgtttcagcggctggtacgacgcggacctgagcccagcagggcacgaggaggcgaagcgaggcgggcaggctctgagagatgctggctatgagtttgacatctgcttcacctcagtgcagaagagagcaatccggaccctctggacagtgctggatgccattgaccaaatgtggctgccagtggtgaggacttggcgccttaatgagcgacactatgggggtctgactggcctcaataaggcagaaactgcggccaagcatggtgaggcccaggtaaagatctggaggcgctcctatgatgtcccgccacctcccatggagcccgaccatcccttctacagcaacatcagtaaggatcgcaggtacgcagacctcacagaagaccagctgccctcatgtgagagtctgaaggacacaattgccagagctctgcccttttggaatgaagaaattgtcccccagatcaaggaggggaaacgggtactaattgcagcccatggcaacagccttcggggcatcgtcaagcatctggagggtctctctgaagaggctatcatggagctgaacctgccgactggcattcccatggtctatgaattggacaagaacttgaagcccatcaagcccatgcagttcctgggggatgaagagaccgtgcgtaaagccatggaggctgtggctgcccagggcaagggcaagaagtga

SEQ ID NO: 6217 - protein, 254 aa, Danio rerio
MAAYKLVLIRHGESTWNLENRFSGWYDADLSPAGHEEAKRGGQALRDAGYEFDICFTSVQKRAIRTLWTVLDAIDQMWLPVVRTWRLNERHYGGLTGLNKAETAAKHGEAQVKIWRRSYDVPPPPMEPDHPFYSNISKDRRYADLTEDQLPSCESLKDTIARALPFWNEEIVPQIKEGKRVLIAAHGNSLRGIVKHLEGLSEEAIMELNLPTGIPMVYELDKNLKPIKPMQFLGDEETVRKAMEAVAAQGKGKK

SEQ ID NO: 6218 - DNA, 780 bp, Danio rerio
  CDS (1)..(780)
atgtccaaatacaaactcttcctccttcggcacggagagggagcctggaacaaagagaaccgcttctgcagctgggttgatcaaaaactgagtgagaacggtgtggtggaagctcaagaatgtggccgccttttaaaagagaatggctaccaattggaccaggtttttacctccatactcagccgttccatccacactgcctggttggtgcttgaggccatgggacacgagtgggtccctgtgacaaaatcgtggaggttaaacgaacggcattacggtgccctgattggtctcaatcgtgctgaaatggcattaaaccatggagaggagcaggttaaactgtggaggcgcagttatgacatcactccacctcccatacatgagtcacatccctattatgctgaaatttacaatgaccgtcgatacagtacatgtgacgtcccgaaggaggaactgcccaaaacagagagtctaaaggaagtgttagacagacttcttccttactggaatgatgtcattgtaccggtgatcaaaagcggccagacggtcctcatctctgcacatggcaacagctgcagggctttgcttaaacacttggaagctatatctgaaacagacatcgtcaatgtaacactgcccacaggagtacctgtcctgctggagctggatgaagaccttcgaccggtcaaaccccgtcagcttctgggcgaccaggccaaaattcaggcagccattaaaaaggtggaggaccaagggaaagttaatgcgcaaaataaatag

SEQ ID NO: 6219 - protein, 259 aa, Danio rerio
MSKYKLFLLRHGEGAWNKENRFCSWVDQKLSENGVVEAQECGRLLKENGYQLDQVFTSILSRSIHTAWLVLEAMGHEWVPVTKSWRLNERHYGALIGLNRAEMALNHGEEQVKLWRRSYDITPPPIHESHPYYAEIYNDRRYSTCDVPKEELPKTESLKEVLDRLLPYWNDVIVPVIKSGQTVLISAHGNSCRALLKHLEAISETDIVNVTLPTGVPVLLELDEDLRPVKPRQLLGDQAKIQAAIKKVEDQGKVNAQNK

SEQ ID NO: 6220 - DNA, 762 bp, Xenopus tropicalis
  CDS (1)..(762)
atgcctcaccgtctggtaattgtacgccacggggaaagctcatggaatcaggagaacagattctgtggatggttcgatgccgacctgagtgagaaaggggcagaggaggctcgcagaggagctcaggcaataaaggaggccggaatggagtttgacatctgctacacctcagtgctgaagagggcagtgcgtacactatggtacatcttggatggaatagaccaaatgtggctgccagtggtcaggacctggagactcaatgagcgccactatgggggactgacaggcctcaacaaggcagagacggcggagaaacatggggaagagcaggtgaagatatggagaagatcttttgacatcccaccaccagtcatgggagaagatcattcatactataagcttataagtaaggaccgtcggtacaaagatctcactcagaaagagctgccatcctgtgagagcctgaaggacaccattgcccgtgccctcccattttggaacgaagtgattgccccccagatcctggcaggaaagcgcgtaatgatagcggcacatggaaacagcttgagaggcattgtcaagcacctggatgggatgtccgatgctgccattatggaactcaatctacccactggaattcccattgtttatgaactagatgataacctgaagccaatcaaacccatgagcttccttggggatgaggaaactgtacgaaaagccatggaggcagtggcagctcagggaaaggtcaaaaaatag

SEQ ID NO: 6221 - protein, 253 aa, Xenopus tropicalis
MPHRLVIVRHGESSWNQENRFCGWFDADLSEKGAEEARRGAQAIKEAGMEFDICYTSVLKRAVRTLWYILDGIDQMWLPVVRTWRLNERHYGGLTGLNKAETAEKHGEEQVKIWRRSFDIPPPVMGEDHSYYKLISKDRRYKDLTQKELPSCESLKDTIARALPFWNEVIAPQILAGKRVMIAAHGNSLRGIVKHLDGMSDAAIMELNLPTGIPIVYELDDNLKPIKPMSFLGDEETVRKAMEAVAAQGKVKK

SEQ ID NO: 6222 - DNA, 780 bp, Xenopus tropicalis
  CDS (1)..(780)
atgtcaaaatataaacttgttatgctgaggcatggcgaaggcgcctggaacattgaaaatcgcttctgcagttgggttgaccaaaagttgagcgccgatggactcagggaagctgaggagtgtgggaaaaagttaaagtctttgggttttgagtttgaccttgtgtttacttccatcttgagtcgatccatacagacagcatggctggttctgcgggagctggaccaagaatgggtccccatccagagttcatggcgactcaacgaacggcattatggagctttgataggtcttaaccgagcagaacttgccttgaatcatggagaagaacaagtgaaaatctggcgaaggagctatgatgtttctcctccacccatagacgcgagccacccttattatcaagaaattcacacagatcggaggtatacgacttgcgatattccaaaggaaaaactaccaaagtctgaaagcttaaaacaagtactcgagcggcttctcccatattggaatgaagttatcgcgccagagattaagaatgggaaaagggttcttatatcagcacatggcaacagcacaagagcacttcttaagcatttagaaggaatctctgactcggatattgtgaacatttcacttcctaccggtgtccctgtgctccttgaacttgatgagaatctacatcccgtcaagcctcatgagttcttgggtgaccaagaggccatccgagctgctataaagaaagtggaagatcaaggaaaagtgaagcctaatgataactaa

SEQ ID NO: 6223 - protein, 259 aa, Xenopus tropicalis
MSKYKLVMLRHGEGAWNIENRFCSWVDQKLSADGLREAEECGKKLKSLGFEFDLVFTSILSRSIQTAWLVLRELDQEWVPIQSSWRLNERHYGALIGLNRAELALNHGEEQVKIWRRSYDVSPPPIDASHPYYQEIHTDRRYTTCDIPKEKLPKSESLKQVLERLLPYWNEVIAPEIKNGKRVLISAHGNSTRALLKHLEGISDSDIVNISLPTGVPVLLELDENLHPVKPHEFLGDQEAIRAAIKKVEDQGKVKPNDN

SEQ ID NO: 6224 - DNA, 780 bp, Gallus gallus
  CDS (1)..(780)
atgactaagtacaagcttgttctcctgaggcacggggaaggagcctggaacaaggagaatcgcttctgcagctgggtggaccagaagctgagcagtgatggaataaaggaagctcaaaactgtggcagacagcttaaagctctgggctttgagtttgaccttgtcttcacctctatactcaggcgctctatccagactgcgtggctggtcctggaagagatgggccaggaatgggtccccatccagagttcttggagactgaatgaacgccactatggtgcactgattggtctcaacagagcagaaatggctctgaatcatggagaagagcaagtgaaaatatggaggagaagctatgatgttactccacctcccataactgaatcacatccctactatgaagagatatacaatgaccgtcgatacaaatgctgcgatgtctctcaggataaccttccgaaggctgaaagtctaaaagatgtgcttgatagactccttccctattggaatgaaaagatagtgccagaactcaaaagtgggaaaaagatccttatatctgctcatggcaacagcagcagggcactgctcaagcatttggaaggcatctctgacaaggacatcatgaatgttactctccccactggtgtgcccgtactccttgaacttgatgagaatctgcgtcctctgggcccccaccagtttttgggtgatcaggaagctatccaagctgccatcaaaaaagtggaagatcaagggaaagtaaaatctgcagagaagtaa

SEQ ID NO: 6225 - protein, 259 aa, Gallus gallus
MTKYKLVLLRHGEGAWNKENRFCSWVDQKLSSDGIKEAQNCGRQLKALGFEFDLVFTSILRRSIQTAWLVLEEMGQEWVPIQSSWRLNERHYGALIGLNRAEMALNHGEEQVKIWRRSYDVTPPPITESHPYYEEIYNDRRYKCCDVSQDNLPKAESLKDVLDRLLPYWNEKIVPELKSGKKILISAHGNSSRALLKHLEGISDKDIMNVTLPTGVPVLLELDENLRPLGPHQFLGDQEAIQAAIKKVEDQGKVKSAEK

SEQ ID NO: 6226 - DNA, 765 bp, Gallus gallus
  CDS (1)..(765)
atggccgcctaccgcctcgtgctcgtccgccacggcgagagcgcctggaacctggagaaccgcttctgcgggtggtacgacgccgacctcagccccgccgggcagcaggaggcgcgccgcggcggagaggccctgcgagacgccggctatgagttcgatatctgcttcacgtcggtgcagaagagggccatccgcaccctctggaacgtgctggacgccatcgaccagatgtggctgcccgtggtacggacgtggcgcctcaacgagcggcactacggggccctcaccggcctcaacaaggccgagacggccgccaagcacggcgaggctcaggtgaagatctggaggcgctccttcgacatccccccgccgcccatgcagtcggaccaccccttcttcagcaccatcagcaaggatcgtcgctacgctgacctgacggaggaccagctgcctacatgtgagagcctgaaggacaccatcgcccgggccctgcccttctggaatgaggaaatagtcccgcagatcaaagagggcaagagagtccttatcgcggcccatggcaacagcttgcgggggattgtcaagcatttggaaggcatgtcagaagaggccatcatggaactgaacctgcccaccggtatcccaatcgtgtatgaattggacaagaacctgaagcccatcaagcccatgcagttcctaggagatgaggagacggtgcgcaaggccatggaggctgtcgctgctcagggcaaagtcaagaaatga

SEQ ID NO: 6227 - protein, 254 aa, Gallus gallus
MAAYRLVLVRHGESAWNLENRFCGWYDADLSPAGQQEARRGGEALRDAGYEFDICFTSVQKRAIRTLWNVLDAIDQMWLPVVRTWRLNERHYGALTGLNKAETAAKHGEAQVKIWRRSFDIPPPPMQSDHPFFSTISKDRRYADLTEDQLPTCESLKDTIARALPFWNEEIVPQIKEGKRVLIAAHGNSLRGIVKHLEGMSEEAIMELNLPTGIPIVYELDKNLKPIKPMQFLGDEETVRKAMEAVAAQGKVKK

SEQ ID NO: 6228 - DNA, 780 bp, Homo sapiens
  CDS (1)..(780)
atgtccaagtacaaacttattatgttaagacatggagagggtgcttggaataaggagaaccgtttttgtagctgggtggatcagaaactcaacagcgaaggaatggaggaagctcggaactgtgggaagcaactcaaagcgttaaactttgagtttgatcttgtattcacatctgtccttaatcggtccattcacacagcctggctgatcctggaagagctaggccaggaatgggtgcctgtggaaagctcctggcgtctaaatgagcgtcactatggggccttgatcggtctcaacagggagcagatggctttgaatcatggtgaagaacaagtgaggctctggagaagaagctacaatgtaaccccgcctcccattgaggagtctcatccttactaccaagaaatctacaacgaccggaggtataaagtatgcgatgtgcccttggatcaactgccacggtcggaaagcttaaaggatgttctggagagactccttccctattggaatgaaaggattgctcccgaagtattacgtggcaaaaccattctgatatctgctcatggaaatagcagtagggcactcctaaaacacctggaaggtatctcagatgaagacatcatcaacattactcttcctactggagtccccattcttctggaattggatgaaaacctgcgtgctgttgggcctcatcagttcctgggtgaccaagaggcgatccaagcagccattaagaaagtagaagatcaaggaaaagtgaaacaagctaaaaaatag
